United States Patent Application Publication US 2011/0245090 A1 - sequence listing, part 3

SEQ ID NO: 3645 - DNA, 2367 bp, Homo sapien
  Unsure 1555: Unknown base
gatgatcccaatagcagtgatgaatctaatggcaatgatgatgctaattcagaaagtgacaataacagcagtagccgaggagatgcttcttataactctgatgaatcaaaagataatggcaatggcagtgactcaaaaggagcagaagatgatgacagtgatagcacatcagacactaataatagtgacagtaatggcaatggtaacaatgggaatgatgacaatgacaaatcagacagtggcaaaggtaaatcagatagcagtgacagtgatagtagtgatagcagcaatagcagtgatagtagtgacagcagtgacagtgacagcagtgatagcaacagtagcagtgatagtgacagcagtgacagtgacagcagtgatagcagtgacagtgatagtagtgatagcagcaatagcagtgacagtagtgacagcagtgatagcagtgacagtagtgatagtagtgacagcagtgacagcaagtcagacagcagcaaatcagagagcgacagcagtgatagtgacagtaagtcagacagcagtgacagcaacagcagtgacagtagtgacaacagtgatagcagcgacagcagcaatagcagtaacagcagtgatagtagtgacagcagtgatagcagtgacagcagcagtagcagcgacagcagcaacagcagtgatagtagtgacagtagtgacagcagcaatagcagtgagagcagtgatagtagtgacagcagtgatagtgacagcagtgatagtagtgacagcagtaatagtaacagcagcgacagtgacagcagcaacagcagcgatagcagtgacagcagcaacagcagtgacagcagtgatagcagtgacagcagcaacagcagtgacagtagcgatagcagtgacagcagcaacagcagtgacagcagtgatagcagtgacagcagtgatagtagtgacagcagcaacagcagtgatagcaacgacagcagcaatagcagtgacagcagtgatagcagcgacagcagtgatagcagcaacagcagtgatagcagtgatagcagtgacagcagtgatagcgacagcagcaatagcagtgacagcagtaatagtagtgacagcagcgatagctgcaacagcagtgatagcagcgacagcagcgatagcagtgacggcagtgatagcgacagcagcaatagaagtgacagtagtaatagtagtgacagcagcgatagcagtgacagcagcaacagcagtgacagcagtgatagcagtgacagcaacgaaagcagcaatagcagtgacagcagtgatagcagcaacagcagtgacagtgacagcagtgatagcagcaacagcagtgacagcagtgatagcagcaacagcagtgatagcagtgaaagcagtaatagtagtgacaacagcaatagcagtgacagcagcaacagcagtgacagcagtgatagcagtgacagcagtaatagtagtgacagcagcaatagcagtgacagcagcaacagcagtgacagcagtgatagcaatagcagcgacagcagtgacagcagcnacagcagcgatagcagtgacagcagtgatagcagtgacagcagtgacagcagtgatagcagcgacagcagtgatagcagtgacagcagtgacagcagtgatagcagtaatagtagtgacagcggcaacagcagtgacagcagcgatagcagtgacagcagcgatagcagtgacagcagcgatagcagtgacagcagtgacagcagcaatagcagtgacagcagtgacagcagcgacagcagtgatagcagtgacagcagtgacagcagcgacagcagtgatagcagtgaaagcagtgatagcagcgatagcagtgacagcagcgacagcagtgacagcagtgacagcagtgaaagcagcaacagcagtgacagcagcgacagcagtgacagcagcgatagcagcgacagcagcgacagcagcgatagcagtgacagcagcaatagaagtgatagcagcgacagcagtgatagcagtgacagcagcgacagcagcgatagcagcgacagcagcgatagtagtgatagcagtgacagcagtgacagcagcgacagcagtgacagcagcgacagcagtgacagcagcgacagcagtgacagcaatgaaagcagcgacagcagtgacagcagcgatagcagtgacagcagcaacagcagtgacagcagcgacagcagtgatagcagtgacagcacatctgacagcaatgatgagagcgacagccagagcaagtctggtaacggtaacaacaatggaagtgacagtgacagtgacagtgaaggcagtgacagtaaccactcaaccagtgatgattag

SEQ ID NO: 3646 - DNA, 2561 bp, Homo sapien
gggggactcgagagctagctgagcgaatgggccggcgactgtggagttagcgtcctcaatgtggacgccctgagctcccattaggagccgctggctgcggcagcaggggactagcgtgaaagttggctaaaaaaaagaaaagaacatggaggcagatataatcacaaatcttcgatgcaggctcaaagaggctgaagaagagcgactaaaagctgcacagtatggtttacaactagtagagagtcaaaatgaattacagaatcaattggataaatgtcgtaatgaaatgatgaccatgactgagagttatgaacaagaaaaatatacccttcaaagagaagttgaactcaagagtcgaatgttagaaagtttgagctgcgaatgtgaagctattaaacaacaacaaaaaatgcacctggagaaattggaagaacaactaagcagaagccatggacaggaagtgaatgaactaaaaactaagatagaaaaactgaaagtggaattagatgaagccaggcttagtgaaaagcagctgaagcaccaagtagatcatcagaaggaactcctctcttgtaaatcagaggaactgcgcgtaatgtctgaacgtgtgcaggaaagcatgtcttcagagatgctggctcttcaaattgagctgacagaaatggagagtatgaagaccaccctcaaagaagaagtgaatgaactacaatacagacaagaacagctagaacttcttattactaacctaatgcgccaggtagaccggcttaaagaggaaaaagaggagcgagagaaagaagcagtttcttactataatgccctagagaaagctcgtgtagcaaatcaagatcttcaggtacagttggaccaggcactccagcaagccttggatcccaatagtaaaggcaactctttgtttgcagaggtggaagatcgaagggcagcaatggaacgtcagcttatcagtatgaaagtcaagtatcagtcactaaagaagcaaaatgtatttaacagagaacagatgcagagaatgaagttacaaattgccacgttgctacagatgaaagggtctcaaactgaatttgagcagcaggaacggttgcttgccatgttggagcagaagaatggtgaaataaaacatcttttaggtgaaattagaaatctggagaaatttaagaatttatatgacagtatggaatctaagccttcagtcgactctggtactctggaagataacacctattatacagatttacttcagatgaagctggataacttaaacaaagaaattgaaagcactaaaggtgaattgtccatacagcgaatgaaagcattatttgagagccagcgggctctagatattgagcgaaaactttttgcaaatgaaagatgcctccagctttcagaaagtgaaaatatgaaactgagagctaaactagatgaattgaaactaaaatatgaacctgaagagacagttgaagtgcctgtactgaaaaagaggcgtgaggtgctccctgtggatataaccaccgctaaagatgcatgtgtcaacaacagtgctctcgggggagaagtttatcgattaccgcctcagaaagaggagacacagtcctgccctaacagtttagaagataacaacttgcaattagaaaaatcagtttctatacacacaccagtagtcagtctctctcctcacaaaaatctgcccgtggatatgcagctgaagaaggaaaagaaatgtgtgaaactcataggagttcccgctgacgctgaggccttaagtgaaagaagtggaaacacccctaactctcccaggttagctgctgaatcaaagcttcaaacagaagttaaagaaggaaaagaaacttcaagcaaattggaaaaagaaacttgtaagaaatcacaccctattctatatgtgtcttctaaatctactccagagacccagtgccctcaacagtaaagacttttctttaataagagtacggtgccacttgcctcaaaagttactatggtgcttaagattgtcttgatctgacatatatcaccttctgggttatttactcattgtgccaggacctggcattttcatgtgcctttgaccaagtgttcagaatttgcttgactctaacctggagagcttcttaagtgatgccccttcatggagcttctatgacagtgaataaactattaattgaaggaaaatgttataattaatgtatctatttgctgcattgtatatggattaaatgataaaaaacaagtaatctaccctcagagccatgtatttgagaatgcttcaatcatattttcctatgtacttttttttataaacttagttttagactatgttgtaaaaatgggaaggttgtaaactatgttgtaaaaataggaaatgtggcttaaaatatatacattatattgtttcaggattttgtcagtgtttaaagaaccaatgttcatctttgtatttatatacatgatttaaattttgtctaaaattttaaataaaactgcagtgatttatccgtaaaaaaaaaaaaaaaaaaaaaaaaaaaaaa

SEQ ID NO: 3647 - protein, 605 aa, Homo sapien
MEADIITNLRCRLKEAEEERLKAAQYGLQLVESQNELQNQLDKCRNEMMTMTESYEQEKYTLQREVELKSRMLESLSCECEAIKQQQKMHLEKLEEQLSRSHGQEVNELKTKIEKLKVELDEARLSEKQLKHQVDHQKELLSCKSEELRVMSERVQESMSSEMLALQIELTEMESMKTTLKEEVNELQYRQEQLELLITNLMRQVDRLKEEKEEREKEAVSYYNALEKARVANQDLQVQLDQALQQALDPNSKGNSLFAEVEDRRAAMERQLISMKVKYQSLKKQNVFNREQMQRMKLQIATLLQMKGSQTEFEQQERLLAMLEQKNGEIKHLLGEIRNLEKFKNLYDSMESKPSVDSGTLEDNTYYTDLLQMKLDNLNKEIESTKGELSIQRMKALFESQRALDIERKLFANERCLQLSESENMKLRAKLDELKLKYEPEETVEVPVLKKRREVLPVDITTAKDACVNNSALGGEVYRLPPQKEETQSCPNSLEDNNLQLEKSVSIHTPVVSLSPHKNLPVDMQLKKEKKCVKLIGVPADAEALSERSGNTPNSPRLAAESKLQTEVKEGKETSSKLEKETCKKSHPILYVSSKSTPETQCPQQ

SEQ ID NO: 3648 - DNA, 1347 bp, Homo sapien
ggggcctggtgtgattccgtcctgcgcggttgttctctggagcagcgttcttttatctccgtccgccttctctcctacctaagtgcgtgccgccacccgatggaagattcgatggacatggacatgagccccctgaggccccagaactatcttttcggttgtgaactaaaggccgacaaagattatcactttaaggtggataatgatgaaaatgagcaccagttatctttaagaacggtcagtttaggggctggtgcaaaggatgagttgcacattgttgaagcagaggcaatgaattacgaaggcagtccaattaaagtaacactggcaactttgaaaatgtctgtacagccaacggtttcccttgggggctttgaaataacaccaccagtggtcttaaggttgaagtgtggttcagggccagtgcatattagtggacagcacttagtagctgtggaggaagatgcagagtcagaagatgaagaggaggaggatgtgaaactcttaagtatatctggaaagcggtctgcccctggaggtggtagcaaggttccacagaaaaaagtaaaacttgctgctgatgaagatgatgacgatgatgatgaagaggatgatgatgaagatgatgatgatgatgattttgatgatgaggaagctgaagaaaaagcgccagtgaagaaatctatacgagatactccagccaaaaatgcacaaaagtcaaatcagaatggaaaagactcaaaaccatcatcaacaccaagatcaaaaggacaagaatccttcaagaaacaggaaaaaactcctaaaacaccaaaaggacctagttctgtagaagacattaaagcaaaaatgcaagcaagtatagaaaaaggtggttctcttcccaaagtggaagccaaattcatcaattatgtgaagaattgcttccggatgactgaccaagaggctattcaagatctctggcagtggaggaagtctctttaagaaaatagtttaaacaatttgttaaaaaattttccgtcttatttcatttctgtaacagttgatatctggctgtcctttttataatgcagagtgagaactttccctaccgtgtttgataaatgttgtccaggttctattgccaagaatgtgttgtccaaaatgcctgtttagtttttaaagatggaactccaccctttgcttggttttaagtatgtatggaatgttatgataggacatagtagtagcggtggtcagacatggaaatggtggggagacaaaaatacacatgtgaaataaaactcagtattttaataaagtaaaaaaaaaaaaaaccaaaaaaaaaaaaaaaaaaaaaaaaaaaaa

SEQ ID NO: 3649 - protein, 294 aa, Homo sapien
MEDSMDMDMSPLRPQNYLFGCELKADKDYHFKVDNDENEHQLSLRTVSLGAGAKDELHIVEAEAMNYEGSPIKVTLATLKMSVQPTVSLGGFEITPPVVLRLKCGSGPVHISGQHLVAVEEDAESEDEEEEDVKLLSISGKRSAPGGGSKVPQKKVKLAADEDDDDDDEEDDDEDDDDDDFDDEEAEEKAPVKKSIRDTPAKNAQKSNQNGKDSKPSSTPRSKGQESFKKQEKTPKTPKGPSSVEDIKAKMQASIEKGGSLPKVEAKFINYVKNCFRMTDQEAIQDLWQWRKSL

SEQ ID NO: 3650 - DNA, 2844 bp, Homo sapien; identical to SEQ ID NO: 3503

SEQ ID NO: 3651 - protein, 422 aa, Homo sapien; identical to SEQ ID NO: 3504

SEQ ID NO: 3652 - DNA, 2738 bp, Homo sapien
gtcacgtgtcccccccgcggggggcggcccttgagggcggcgcttccggtcggcggagcctggtggccgcagcggcggtggcgacgacggccgagacgtggggatggcgggcgccgggagcgaagcccggttcgccgggctgtcgctggtgcagctcaacgagctgctggaggacgagggccagctgacggagatggtgcagaagatggaggagacacagaatgttcagcttaacaaagaaatgacacttgccagcaaccggagcctggcagaaggaaaccttttgtaccagccccagctggacacgttgaaagcacgcttgacccagaaataccaggaactccaggttctctttgaagcctatcagataaagaagaccaaattagacagacagtctagcagtgcttccttggagaccctgttagcacttcttcaggcagaaggggccaagattgaggaagacactgagaacatggcagagaagtttctggatggagaacttcctctggattccttcattgatgtctatcagagcaaacggaaactggcccacatgcgacgggtgaaaatcgagaagctccaggagatggtcctaaaggggcagagactcccacaggccctggccccgctgccccccaggctgcccgaactggcacctaccgccccccttccctaccctgccccagaggccagtgggcctcctgccgttgcacctcggcgcatcccccccccaccacccccggtgcctgcgggacgcttagccaccccgtttactgcggccatgagttcgggacaggccgtgccgtacccaggattacagtgcccgcccctgcccccccgcgtgggcctccccactcagcaaggattctcttcgcagttcgtgtccccatatccgccacctctccctcagagacccccgccccggctccctccacaccagccgggtttcatcctccagtgagcgccggcgcggtccttcccgggagacttcttccacctggcgtgttgtgctctgctcacgggaaggaggctggaggtccgctctgtgccaagggctctggggccctgggccagcgtgtctgtctgattttagaactgtaggtcagtggtgagtagtaggagcccaggctttgggcatcaaggcagttgtgtgtgccgggttacagcctgacacctgtgcgttgcatcggtttgcattatccgtgtgatttctaagtatcttagcgttgatgaactcatgtttgggaagaaataggcctctcccccagtcccatttagaatcgtggtccttctgttgcagctttatttaatgagcatggttcatgatacttattttattttcgaaagacagtcctatgtgtctcacccaccggccactgcagccctggtgagggcgggtgggcgccggccggcctggaagagcgccgtggctgggccaccacctgtggctgcgttgttgctcactgaatctgttggggagaggtcaccatagtcaccgcctgacctggctgctgctcttgcttcagagccacaagcaaagtttgcactgggcccactgccgagtccagaggccggagaacggccactggtgtgggaggggagcgcacgagtgggactttgcacagcaaattgtgtccccagctcctcctctcccgcctgcctggagccggccctgaaggtttctatgaagaaataatcccccaatatttttactacgtgtgtgattttcctgttttatattgaaaaaacttttttgacactcccaagaccattcagggaaattttataaaaaatgcagatactgtcttgagcagatcgaaatgccgatgaagtggatgcaatttccttttgtgcaagcagtgcacggtgcccccccctcgggtgtccgtgctgtgccttagcttccccaggtgccgggactcacacctgctaggggctgggcaaggccccggctctgctttctctgaagggcttgtccaagttcattgccctgttacaggtggtcaagacgtccggccgccttgacccaggctacccttagccaatatcctctgcccctgggtggctggtggctgggcctcagggtgggcaacgttaggggtttggcgaaagcccgccccatgggattgagggacggggctgcactccaaccgtctgcacctgctcttcccccacccctgtgggacctcatcttcacgtgccatgtgtgctgaaggcccagggcccagcagggggcagtggcacctgttgacggaaaaggccgaggtgcttaccagtggaccttctggcccgcccctcccctgtcacttgtcgggcatccagggccccgacctgtgcctagccgccagggtgacagaaggcagaactgaagcggggtctgggccacgggccaggccactgccttttgtcctcagtgaccatacattcctgctctcggacttgaactctactgtaactgttttcttgaaatgaagctgtacaggacgattcactgccatgccagtcaggcgggcttgccatgttctgtgaatctcgagtgagcggtgccacccgcccccatacctccgccaccggccgctgtcggggatgccacagcctgccacggtcgcagccagacgtgagcttggcattgaagttgcaaagcggcccctggccgggctcgccgtcgctgtccagggccgtgtccggtgctgtggctgtaaagctgtaggaccctttttaataaatagagaattatt

SEQ ID NO: 3653 - protein, 285 aa, Homo sapien
MAGAGSEARFAGLSLVQLNELLEDEGQLTEMVQKMEETQNVQLNKEMTLASNRSLAEGNLLYQPQLDTLKARLTQKYQELQVLFEAYQIKKTKLDRQSSSASLETLLALLQAEGAKIEEDTENMAEKFLDGELPLDSFIDVYQSKRKLAHMRRVKIEKLQEMVLKGQRLPQALAPLPPRLPELAPTAPLPYPAPEASGPPAVAPRRIPPPPPPVPAGRLATPFTAAMSSGQAVPYPGLQCPPLPPRVGLPTQQGFSSQFVSPYPPPLPQRPPPRLPPHQPGFILQ

SEQ ID NO: 3654 - DNA, 10156 bp, Homo sapien
gcggccgctcccccggagcggctaaagcggcggcgaccgaggcgagcaatgggcacggcagtctcggcagagcacaggcgcttcaccgcggctgctcgggctccgcgctgacctgcccgggcggccgcctattgtctttctccgcggcgaaggtgaagagttgtcccagctcggcccgcgggggagccccgggagccgcacgtgtcctgggtcatgaaacttaatccacagcaagctcccttatatggtgattgtgttgttacagtgctgcttgctgaagaggacaaagctgaagatgatgtagtgttttacttggtatttttgggttccaccctccgtcactgtacaagtactcggaaggtcagttctgatacattggagaccattgctcctggtcatgattgttgtgaaacagtgaaggtgcagctctgtgcttccaaagagggccttcccgtgtttgtggtggctgaagaagactttcatttcgtccaggatgaagcgtatgatgcagctcaattcctagcaaccagtgctggaaatcagcaggctttgaactttacccgttttcttgaccagtcaggacccccatctggggatgtgaattcccttgataagaagttggtgctggcattcaggcacctgaagctgcccacggagtggaatgtattggggacagatcagagtttgcatgatgctggcccgcgagagacattgatgcattttgctgtgcggctgggactgctgaggttgacgtggttcctgttgcagaagccaggtggccgcggagctctcagtatccacaaccaggaaggggcgacgcctgtgagcttggccttggagcgaggctatcacaagctgcaccagcttctaaccgaggagaatgctggagaaccagactcctggagcagtttatcctatgaaataccgtatggagactgttctgtgaggcatcatcgagagttggacatctatacattaacctctgagtctgattcacatcatgaacacccatttcctggagacggttgcactggaccaatttttaaacttatgaacatccaacagcaactaatgaaaacaaacctcaagcagatggacagtcttatgcccttaatgatgacagcacaggatccttccagtgccccagagacagatggccagtttcttccctgtgcaccggagcccacggaccctcagcgactttcttcttctgaagagactgagagcactcagtgctgcccagggagccctgttgcacagactgaaagtccctgtgatttgtcaagcatagttgaggaggagaatacagaccgttcctgtaggaagaaaaataaaggcgtggaaagaaaaggggaagaggtggagccagcacctattgtggactctggaactgtatctgatcaagacagctgccttcagagcttgcctgattgtggagtaaagggcacggaaggcctttcgtcctgtggaaacagaaatgaagaaactggaacaaaatcttctggaatgcccacagaccaggagtccctgagcagtggagatgctgtgcttcagagagacttggtcatggagccaggcacagcccagtattcctctggaggtgaactgggaggcatttcaacaacaaatgtcagtaccccagacactgcaggggaaatggaacatgggctcatgaacccagatgccactgtttggaagaatgtgcttcagggaggggaaagtacaaaggaaagatttgagaactctaatattggcacagctggagcctctgacgtgcacgtcacaagtaagcctgtggataaaatcagtgttccaaactgtgcccctgctgccagttccctggatggtaacaaacctgctgagtcttcacttgcatttagtaatgaagaaacctccactgaaaaaacagcagaaacggaaacttcacgaagtcgtgaggagagtgctgatgctccagtagatcagaattctgtggtgattccagctgctgcaaaagacaagatttcagatggattagaaccttatactctcttagcagcaggcataggtgaggcaatgtcaccctcagatttagcccttcttgggctggaagaagatgtaatgccacaccagaactcagaaacaaattcatctcatgctcaaagccaaaagggcaaatcctcacccatttgttctacaactggagacgataaactttgtgcagactctgcatgtcaacagaacacagtgacttctagtggcgatttggttgcaaaactgtgtgataacatagttagcgagtccgaaagcaccacagcaaggcaacccagctcacaagatccacccgatgcctcccactgtgaagacccacaggctcatacagtcacctctgaccctgtaagggatacccaggaacgtgcggatttttgtcctttcaaagtggtggataacaaaggccaacgaaaagatgtgaaactagataaacctttaacaaatatgcttgaggtggtttcacatccacatccagttgtccctaaaatggagaaagaactggtgccagaccaggcagtaatatcagacagtactttctctctggcaaacagtccaggcagtgaatcagtaaccaaggatgacgcactttcttttgtcccctcccagaaagaaaagggaacagcaactcctgaactacatacagctacagattatagagatggcccagatggaaattcgaatgagcctgatacgcggccactagaagacagggcagtaggcctgtccacatcctccactgctgcagagcttcagcacgggatggggaataccagtctcacaggacttggtggagagcatgagggtcccgcccctccagcaatcccagaagctctgaatatcaaggggaacactgactcttccctgcaaagtgtgggtaaggccactttggctttagattcagttttgactgaagaaggaaaacttctggtggtttcagaaagctctgcagctcaggaacaagataaggataaagcggtgacctgttcctctattaaggaaaatgctctctcttcaggaactttgcaggaagagcagagaacaccacctcctggacaagatactcaacaatttcatgaaaaatcaatctcagctgactgtgccaaggacaaagcacttcagctaagtaattcaccgggtgcatcctctgcctttcttaaggcagaaactgaacataacaaggaagtggccccacaagtctcactgctgactcaaggtggggctgcccagagcctggtgccaccaggagcaagtctggccacagagtcaaggcaggaagccttgggggcagagcacaacagctccgctctgttgccatgtctgttgccagatgggtctgatgggtccgatgctcttaactgcagtcagccttctcctctggatgttggagtgaagaacactcaatcccagggaaaaactagtgcctgtgaggtgagtggagatgtgacggtggatgttacaggggttaatgctctacaaggtatggctgagcccagaagagagaatatatcacacaacacccaagacatcctgattccaaacgtcttgttgagccaagagaagaatgccgttctaggtttgccagtggctctacaggacaaagctgtgactgacccacagggagttggaaccccagagatgatacctcttgattgggagaaagggaagctggagggagcagaccacagctgtaccatgggtgacgctgaggaagcccaaatagacgatgaagcacatcctgtcctactgcagcctgttgccaaggagctccccacagacatggagctctcagcccatgatgatggggccccagctggtgtgagggaagtcatgcgagccccgccttcaggcagggaaaggagcactccctctctaccttgcatggtctctgcccaggacgcacctctgcctaagggggcagacttgatagaggaggctgccagccgtatagtggatgctgtcatcgaacaagtcaaggccgctggagcactgcttactgagggggaggcctgtcacatgtcactgtccagccctgagttgggtcctctcactaaaggactagagagtgcttttacagaaaaagtgagtactttcccacctggggagagcctaccaatgggcagtactcctgaggaagccacggggagccttgcaggatgttttgctggaagggaggagccagagaagatcattttacctgtccaggggcctgagccagcagcagaaatgccagacgtgaaagctgaagatgaagtggattttagagcaagttcaatttctgaagaagtggctgtagggagcatagctgctacactgaagatgaagcaaggcccaatgacccaggcgataaaccgagaaaactggtgtacaatagagccatgccctgatgcagcatctcttctggcttccaagcagagcccagaatgtgagaacttcctggatgttggactgggcagagagtgtacctcaaaacaaggtgtacttaaaagagaatctgggagtgattctgacctctttcactcacccagtgatgacatggacagcatcatcttcccaaagccagaggaagagcatttggcctgtgatatcaccggatccagttcatccaccgatgacacggcttcactggaccgacattcttctcatggcagtgatgtgtctctctcccagattttaaagccaaacaggtcaagagatcggcaaagccttgatggattctacagccatgggatgggagctgagggtcgagaaagtgagagtgagcctgctgacccaggcgacgtggaggaggaggagatggacagtatcactgaagtgcctgcaaactgctctgtcctaaggagctccatgcgctctctttctcccttccggaggcacagctgggggcctgggaaaaatgcagccagcgatgcagaaatgaaccaccggagttcaatgcgagttcttggggatgttgtcaggagacctcccattcataggagaagtttcagtctagaaggcttgacaggaggagctggtgtcggaaacaagccatcctcatctctagaagtaagctctgcaaatgccgaagagctcagacacccattcagtggtgaggaacgggttgactctttggtgtcactttcagaagaggatctggagtcagaccagagagaacataggatgtttgatcagcagatatgtcacagatctaagcagcagggatttaattactgtacatcagccatttcctctccattgacaaaatccatctcattaatgacaatcagccatcctggattggacaattcacggcccttccacagtaccttccacaataccagtgctaatctgactgagagtataacagaagagaactataatttcctgccacatagcccctccaagaaagattctgaatggaagagtggaacaaaagtcagtcgtacattcagctacatcaagaataaaatgtctagcagcaagaagagcaaagaaaaggaaaaagaaaaagataagattaaggagaaggagaaagattctaaagacaaggagaaagataagaagactgtcaacgggcacactttcagttccattcctgttgtgggtcccatcagctgtagccagtgtatgaagcccttcaccaacaaagatgcctatacttgtgcaaattgcagtgcttttgtccacaaaggctgccgagaaagtctagcctcctgtgcaaaggtcaaaatgaagcagcccaaagggagccttcaggcacatgacacatcatcactgcccacggtcattatgagaaacaagccctcacagcccaaggagcgtcctcggtccgcagtcctcctggtggatgaaaccgctaccaccccaatatttgccaatagacgatcccagcagagtgtctcgctctccaaaagtgtctccatacagaacattactggagttggcaatgatgagaacatgtcaaacacctggaaattcctgtctcattcaacagactcactaaataaaatcagcaaggtcaatgagtcaacagaatcacttactgatgagggagtaggtacagacatgaatgaaggacaactactgggagactttgagattgagtccaaacagctggaagcagagtcttggagtcggataatagacagcaagtttctaaaacagcaaaagaaagatgtggtcaaacggcaagaagtaatatatgagttgatgcagacagagtttcatcatgtccgcactctcaagatcatgagtggtgtgtacagccaggggatgatggcggatctgctttttgagcagcagatggtagaaaagctgttcccctgtttggatgagctgatcagtatccatagccaattcttccagaggattctggagcggaagaaggagtctctggtggataaaagtgaaaagaactttctcatcaagaggataggggatgtgcttgtaaatcagttttcaggtgagaatgcagaacgtttaaagaagacatatggcaagttttgtgggcaacataaccagtctgtaaactacttcaaagacctttatgccaaggataagcgttttcaagcctttgtaaagaagaagatgagcagttcagttgttagaaggcttggaattccagagtgcatattgcttgtaactcagcggattaccaagtacccagttttattccaaagaatattgcagtgtaccaaagacaatgaagtggagcaggaagatctagcacagtccttgagcctggtgaaggatgtgattggagctgtagacagcaaagtggcaagttatgaaaagaaagtgcgtctcaatgagatttatacaaagacagatagcaagtcaatcatgaggatgaagagtggtcagatgtttgccaaggaagatttgaaacggaagaagcttgtacgtgatgggagtgtgtttctgaagaatgcagcaggaaggttgaaagaggttcaagcagttcttctcactgacattttagttttccttcaagaaaaagaccagaagtacatctttgcatcattggaccagaagtcaacagtgatctctttaaagaagctgattgtgagagaagtggcacatgaggagaaaggtttattcctgatcagcatggggatgacagatccagagatggtagaagtccatgccagctccaaagaggaacgaaacagctggattcagatcattcaggacacaatcaacaccctgaacagagatgaagatgaaggaattcctagtgagaatgaggaagaaaagaaaatgttggacaccagagcccgagaattaaaagaacaacttcaccagaaggaccaaaaaatcctactcttgttggaagagaaggagatgattttccgggacatggctgagtgcagcacccctctcccagaggattgctccccaacacatagccctagagttctcttccgctccaacacagaagaggctctcaaaggaggacctttaatgaaaagtgcaataaatgaggtggagatccttcagggtttggtgagtggaaatctgggaggcacacttgggccgactgtcagcagccccattgagcaagatgtggtcggtcccgtttccctgccccggagagcagagacctttggaggatttgacagccatcagatgaatgcttcaaaaggaggcgagaaggaagagggagatgatggccaagatcttaggagaacggaatcagatagtggcctaaaaaagggtggaaatgctaacctggtatttatgcttaaaagaaacagtgagcaggttgtccagagcgttgttcatctctacgagctcctcagcgctctgcagggtgtggtgctgcagcaggacagctacattgaggaccagaaactggtgctgagcgagagggcgctcactcgcagcttgtcccgcccgagctccctcattgagcaggagaagcagcgcagcctggagaagcagcgccaggacctggccaacctgcagaagcagcaggcccagtacctcgaggagaagcgcaggcgcgagcgtgagtgggaagctcgtgagagggagctgcgggagcgggaggccctcctggcccagcgcgaggaggaggtgcagcaggggcagcaggacctggaaaaggagcgggaggagctccagcagaagaagggcacataccagtatgacctggagcgactgcgtgctgcccagaaacagcttgagagggaacaggagcagctgcgccgggaggcagagcggctcagccagcggcagacagaacgggacctgtgtcaggtttcccatccacataccaagctgatgaggatcccatcgttcttccccagtcctgaggagcccccctcgccatctgcaccttccatagccaaatcagggtcattggactcagaactttcagtgtccccaaaaaggaacagcatctctcggacacacaaagataaggggccttttcacatactgagttcaaccagccagacaaacaaaggaccagaagggcagagccaggcccctgcgtccacctctgcctctacccgcctgtttgggttaacaaagccaaaggaaaagaaggagaaaaaaaagaagaacaaaaccagccgctctcagcccggtgatggtcccgcgtcagaagtatcagcagagggtgaagagatcttctgctgaccctcttcctctctgctgaggcagctgcctcctgatcctggccagcccacctctcctgctgtccccgcgtgcacaagtctcttacactggacgcccactgctcctcagcgtccagtcctcctgggcggccccaggtcctggacaataagcaacagatgatattgagtgtcgggtggggaaggaggcccagactctgcttcggccatgatttgtgactgcccaggactctcaggttgggctggccctactcaggattacactgaaagtaatggcctcgtaagtacaggtgatggttttggacacgtcaggaattcctaaaggctgaaagagtgtatccaagtaaggtctgaacctccgactgccttttatttgggggaacacaaaaccaaacagcagatgttttggacttgatctgtgtacgtacatggggacctgtctgcatatacacacggggaatgccagaagaaggcccagtctgcaccaggcgtctggtcaacttagcacaagggcagtgcctggacggacccggagcccccgcatatcagcagttcacccagtactcctcagagactggtttccctctaaacccatcccgggcacataccacccctgttttgcatgtatttctcatttcattttagggatgacaaacatttgtgaaaccagtgagagaaggcttgatgtgtataaaagacgtgatgtgcaccacctcgatctcggtgtttcaggcactaaagcaacaaaacaacccatagtatctcattttgtcatcagatccagaagaaatatcctggttttccagcatgtttacccacatgttttgggcatggataaagtgaagaggcctactcaccattatccctgcagcgtgacaccttttgattgtcactgaccactcagaaggggccacggcctcctggctgtgttcctgagcccccgtcgtgcctctcccagacagcagctgtctggcccttgctgggtgagggcacaccactgccaggggtcagcctcgcacccaggccaggcagaagctgtgctctgaagctaggacagctggctgagaagtgggttcaggcgaagggtgaagccatgtgtagcagttcctgccagtgcagatctggagaggagctggcccggaaggcgtggttgtgaaagcgcccttcttatgttaggaggccttggcaaaattggatttcttcaaaaatacatgtaaaggtctgttgttgaattgtactctgcccctggaagcagatacagatggctgcctgctgctcggctttgcttttgcttttcccaccgtgttttcatctttgttcacttgaggctttccccagctggtgtgtgcaggacagttcatggtaatgttgccctctgaggccccgtacaccagaagggaggccctggaaaattttgtgcttccaacgtggccttcaattcttgcttttttgcccctcggaagcatggggcttttgagcacacttaaaaaaaaaaaccggaattc

SEQ ID NO: 3655 - protein, 2813 aa, Homo sapien
MKLNPQQAPLYGDCVVTVLLAEEDKAEDDVVFYLVFLGSTLRHCTSTRKVSSDTLETIAPGHDCCETVKVQLCASKEGLPVFVVAEEDFHFVQDEAYDAAQFLATSAGNQQALNFTRFLDQSGPPSGDVNSLDKKLVLAFRHLKLPTEWNVLGTDQSLHDAGPRETLMHFAVRLGLLRLTWFLLQKPGGRGALSIHNQEGATPVSLALERGYHKLHQLLTEENAGEPDSWSSLSYEIPYGDCSVRHHRELDIYTLTSESDSHHEHPFPGDGCTGPIFKLMNIQQQLMKTNLKQMDSLMPLMMTAQDPSSAPETDGQFLPCAPEPTDPQRLSSSEETESTQCCPGSPVAQTESPCDLSSIVEEENTDRSCRKKNKGVERKGEEVEPAPIVDSGTVSDQDSCLQSLPDCGVKGTEGLSSCGNRNEETGTKSSGMPTDQESLSSGDAVLQRDLVMEPGTAQYSSGGELGGISTTNVSTPDTAGEMEHGLMNPDATVWKNVLQGGESTKERFENSNIGTAGASDVHVTSKPVDKISVPNCAPAASSLDGNKPAESSLAFSNEETSTEKTAETETSRSREESADAPVDQNSVVIPAAAKDKISDGLEPYTLLAAGIGEAMSPSDLALLGLEEDVMPHQNSETNSSHAQSQKGKSSPICSTTGDDKLCADSACQQNTVTSSGDLVAKLCDNIVSESESTTARQPSSQDPPDASHCEDPQAHTVTSDPVRDTQERADFCPFKVVDNKGQRKDVKLDKPLTNMLEVVSHPHPVVPKMEKELVPDQAVISDSTFSLANSPGSESVTKDDALSFVPSQKEKGTATPELHTATDYRDGPDGNSNEPDTRPLEDRAVGLSTSSTAAELQHGMGNTSLTGLGGEHEGPAPPAIPEALNIKGNTDSSLQSVGKATLALDSVLTEEGKLLVVSESSAAQEQDKDKAVTCSSIKENALSSGTLQEEQRTPPPGQDTQQFHEKSISADCAKDKALQLSNSPGASSAFLKAETEHNKEVAPQVSLLTQGGAAQSLVPPGASLATESRQEALGAEHNSSALLPCLLPDGSDGSDALNCSQPSPLDVGVKNTQSQGKTSACEVSGDVTVDVTGVNALQGMAEPRRENISHNTQDILIPNVLLSQEKNAVLGLPVALQDKAVTDPQGVGTPEMIPLDWEKGKLEGADHSCTMGDAEEAQIDDEAHPVLLQPVAKELPTDMELSAHDDGAPAGVREVMRAPPSGRERSTPSLPCMVSAQDAPLPKGADLIEEAASRIVDAVIEQVKAAGALLTEGEACHMSLSSPELGPLTKGLESAFTEKVSTFPPGESLPMGSTPEEATGSLAGCFAGREEPEKIILPVQGPEPAAEMPDVKAEDEVDFRASSISEEVAVGSIAATLKMKQGPMTQAINRENWCTIEPCPDAASLLASKQSPECENFLDVGLGRECTSKQGVLKRESGSDSDLFHSPSDDMDSIIFPKPEEEHLACDITGSSSSTDDTASLDRHSSHGSDVSLSQILKPNRSRDRQSLDGFYSHGMGAEGRESESEPADPGDVEEEEMDSITEVPANCSVLRSSMRSLSPFRRHSWGPGKNAASDAEMNHRSSMRVLGDVVRRPPIHRRSFSLEGLTGGAGVGNKPSSSLEVSSANAEELRHPFSGEERVDSLVSLSEEDLESDQREHRMFDQQICHRSKQQGFNYCTSAISSPLTKSISLMTISHPGLDNSRPFHSTFHNTSANLTESITEENYNFLPHSPSKKDSEWKSGTKVSRTFSYIKNKMSSSKKSKEKEKEKDKIKEKEKDSKDKEKDKKTVNGHTFSSIPVVGPISCSQCMKPFTNKDAYTCANCSAFVHKGCRESLASCAKVKMKQPKGSLQAHDTSSLPTVIMRNKPSQPKERPRSAVLLVDETATTPIFANRRSQQSVSLSKSVSIQNITGVGNDENMSNTWKFLSHSTDSLNKISKVNESTESLTDEGVGTDMNEGQLLGDFEIESKQLEAESWSRIIDSKFLKQQKKDVVKRQEVIYELMQTEFHHVRTLKIMSGVYSQGMMADLLFEQQMVEKLFPCLDELISIHSQFFQRILERKKESLVDKSEKNFLIKRIGDVLVNQFSGENAERLKKTYGKFCGQHNQSVNYFKDLYAKDKRFQAFVKKKMSSSVVRRLGIPECILLVTQRITKYPVLFQRILQCTKDNEVEQEDLAQSLSLVKDVIGAVDSKVASYEKKVRLNEIYTKTDSKSIMRMKSGQMFAKEDLKRKKLVRDGSVFLKNAAGRLKEVQAVLLTDILVFLQEKDQKYIFASLDQKSTVISLKKLIVREVAHEEKGLFLISMGMTDPEMVEVHASSKEERNSWIQIIQDTINTLNRDEDEGIPSENEEEKKMLDTRARELKEQLHQKDQKILLLLEEKEMIFRDMAECSTPLPEDCSPTHSPRVLFRSNTEEALKGGPLMKSAINEVEILQGLVSGNLGGTLGPTVSSPIEQDVVGPVSLPRRAETFGGFDSHQMNASKGGEKEEGDDGQDLRRTESDSGLKKGGNANLVFMLKRNSEQVVQSVVHLYELLSALQGVVLQQDSYIEDQKLVLSERALTRSLSRPSSLIEQEKQRSLEKQRQDLANLQKQQAQYLEEKRRREREWEARERELREREALLAQREEEVQQGQQDLEKEREELQQKKGTYQYDLERLRAAQKQLEREQEQLRREAERLSQRQTERDLCQVSHPHTKLMRIPSFFPSPEEPPSPSAPSIAKSGSLDSELSVSPKRNSISRTHKDKGPFHILSSTSQTNKGPEGQSQAPASTSASTRLFGLTKPKEKKEKKKKNKTSRSQPGDGPASEVSAEGEEIFC

SEQ ID NO: 3656 - DNA, 4224 bp, Homo sapien
caaggggcattccaactggtggaggagatccggaaccacgtgctgagagacagctctgggatcaggagcttggaggagttgtgtctgcaagtgaccgacctgctgccaggccttaggaagctcaggaacctactccctgagcatggatgcctgctgctgtcccctgggaacttctggcagaatgactgggaacgcttccatgctgatcctgacatcattgggaccatccaccagcacgagcctaaaaccctgcagacttcagccacactcaaagacttgttatttggtgttcctgggaagtacagcggggtgagcctctacaccaggaagaggatggtctcctacaccatcaccctggtcttccagcactaccatgccaagttcctgggcagcctgcgtgcccgcctgatgcttctgcaccccagccccaactgcagccttcgggcggagagcctggtccacgtgcacttcaaggaggagattggtgtcgctcgaacgaccaagagggtgttcgactgctagagccgagcgaagcgatgcctaaatcaaaggaacttgtttcttcaagctcttctggcagtgattctgacagtgaggttgacaaaaagttaaagaggaaaaagcaagttgctccagaaaaacctgtaaagaaacaaaagacaggtgagacttcgagagccctgtcatcttctaaacagagcagcagcagcagagatgataacatgtttcagattgggaaaatgaggtacgttagtgttcgcgattttaaaggcaaagtgctaattgatattagagaatattggatggatcctgaaggtgaaatgaaaccaggaagaaaaggtatttctttaaatccagaacaatggagccagctgaaggaacagatttctgacattgatgatgcagtaagaaaactgtaaaattcgagccatataaataaaacctgtactgttctagttgttttaatctgtctttttacattggcttttgttttctaaatgttctccaagctattgtatgtttggattgcagaagaatttgtaagatgaatacttttttttaatgtgcattattaaaaatattgagtgaagctaattgtcaactttattaaggattactttgtctgcccaccacctagtgtaaaataaaatcaagtaatacaatcttaactgttgtggccttttttgatcataagagttggtactgtttaaggccaaaagtaacagtttttatagatcttttagtttcaactcagcttttacaataaaaaggatttgtattgcattgagtttataaacttttggtttgtgaacttcatatttgatcttttctcttccaatcaaatgtctaggcttgtttgacttccacccccaatggtttttcactctttttatttacttcattttcctttaataacttaatctcttcatgttcagtttttacttcactctttattcttttctttgattatggtatgcttatttggaaagtcagtgaaactgtcaaaatgttatctcaataagatacttatatgagaactacaatcaccgaatctactgtattcaatattagcagatctaatttgataaacaacatggcttgtgtgaaaactgagcaggtgtttgtttacccatagtgttctgtgtagttattgcttagtctgcagaaaataatgacttagatgagatgtctgacttgctttcacttattaaacatgttcaccatgggatgatgtctgtaacatcagatattgttcaactagactaggatttaataaaaattgtgaaagcttactggcctaacattttattttataatattgggtatgaattatatgtagccagagatgtcattaagctttactgttatagtaggtaatatggttagtttgtagggaaaagagcatatgagcacatgcttgtgtattttggcctttgccccagtagaacagaccaatggcattctagacttgatgatactaagttttagcagacactagtaagtggtttgtatttaaccatactgatgaagcagacagattgaggcacagattttagtggctttgtggcaataaatagggcatggtgtgccttaggaaaagaatgtttataaagggaattataactgaaattaaaggaggcggcagtgaagaggaaataattctcttctatctaaatgatatacatatgatattttgagatttttataacagcagtggaacacaattctaggtagagtagaaaaaggaaagttttaaagacatataaaagattcttgttgacaaattatttttggtagcaaatctcaaatggttacctgctattaaggtctgccatattagagttttgcactattttgctaccaagtttgattcatacatctaaaacattttgtagttacttgtcaaggacttaatttgaaaatcatttgccaggccacatagttatcaatttttttttctatcagctattctgttgtatttctaaaacattttttagatgactttttaaagtatatttagcagtaaccttatgaggttcaaattggtaaatctcttgtaatttagccttcatcgaataataggtaccagtgtattaaaaatgtgtattttttgcagccccttgaaccagagtaggttcagagaaactcccaaagtttgtactttagacacatcaagcttgattggtaacttccctccttttttggggaacatgtttgtgtcctattaacttaattggatagatttttaaatatttcttatttttggcacacggaaagggtagttcgagtacagaactttgatttttggtgtagatgcagagggaatgatgggtaaatttcctaggtttatgtgaatttagggggtgtatgcattttgaaacaatctactaacagatggtgctgaaatctattacctacatgttttctagttgttcagcattatgttaatgaagcctccatataaggagtgtttctctggcacagttggtaagttgactgctaacttcatttaaatgtgttactggatatgcagtatactgaaattattaatcagtttgtgtataggaaaagagaactgggttaaaagcaaattaacttgttctgaaaagaaagtatagattaattttgttttctgtttaaattttatctccttggtaaagatttttttttcctgggcagaaaacttggcatttttaggcgtagataccttaccttacaatgccaaaatgaatttaattccagtactcaggtttttccctttaacagactctatgtgtatcagggctttctaatgggtttttcctcttcgtttttaaaatgtgagtagcatttgaccaatttccagtgctcttagcattttacttaaagaacaaccactacaaaagaaaatctttgtaatttgattgtcttttgctttgcttcattaatgcctaagaacttaagaatactcctacctcattagctactcaagatgctgtgacgatcaaatctattctacataatgcgtttagaaacaaagacttgggtgaaaaatgaaataagtatattctgacttggctattgaggggaaaattcagtattaagtgttcctcacaggagatatgttagcagaatactataaaagtttgaaatttttaaaaagtaaaagtacttaaatttaggtatctctcctgaaattctttgcagttcattttttatggcagttaatccagtgaaacactcaaaagtttttttttttttaaaagtgtttttccagataaactgtagggtgaacattcacataatcacaaatatgtaattctgtaattgtggaatgcttgtatgctttgttttcgtacatcttccatggagatgtctgaatataatactccatctgtgaatattttaaatgtggcatttattgtggatgcattttcacaatatatgttaatgggagcgatccattatcagtgaaaagtatcaagtgtttataaaatttttaggaatggcagattcacagaacatgctagtcagctggcagtttaacctcgtaaagataacagagaattatagtcaaaccagtaaacaaggaatttacttttcaaaagttttgaattaggcctatggtaaggtaacattgctttgttgtacttttgaacaagagctcctcctgatcactattacatatttttctagaaaatctaaagttcagaagagaatgtatcactgctgacttttattcca

SEQ ID NO: 3657 - protein, 173 aa, Homo sapien
QGAFQLVEEIRNHVLRDSSGIRSLEELCLQVTDLLPGLRKLRNLLPEHGCLLLSPGNFWQNDWERFHADPDIIGTIHQHEPKTLQTSATLKDLLFGVPGKYSGVSLYTRKRMVSYTITLVFQHYHAKFLGSLRARLMLLHPSPNCSLRAESLVHVHFKEEIGVARTTKRVFDC

SEQ ID NO: 3658 - DNA, 2427 bp, Homo sapien
cggacgcgtggggagaggctgtttaccagaacagcataacaagggcaggtctgactgcaaggctgggactgggaggcagagccgccgccaagggggcctcggttaaacactggtcgttcaatcacctgcaagacgaaggaggcaaggatgctgttggcctgggtacaagcattcctcgtcagcaacatgctcctagcagaagcctatggatctggaggctgtttctgggacaacggccacctgtaccgggaggaccagacctcccccgcgccgggcctccgctgcctcaactggctggacgcgcagagcgggctggcctcggcccccgtgtcgggggccggcaatcacagttactgccgaaacccggacgaggacccgcgcgggccctggtgctacgtcagtggcgaggccggcgtccctgagaaacggccttgcgaggacctgcgctgtccagagaccacctcccaggccctgccagccttcacgacagaaatccaggaagcgtctgaagggccaggtgcagatgaggtgcaggtgttcgctcctgccaacgccctgcccgctcggagtgaggcggcagctgtgcagccagtgattgggatcagccagcgggtgcggatgaactccaaggagaaaaaggacctgggaactctgggctacgtgctgggcattaccatgatggtgatcatcattgccatcggagctggcatcatcttgggctactcctacaagagggggaaggatttgaaagaacagcatgatcagaaagtatgtgagagggagatgcagcgaatcactctgcccttgtctgccttcaccaaccccacctgtgagattgtggatgagaagactgtcgtggtccacaccagccagactccagttgaccctcaggagggcagcaccccccttatgggccaggccgggactcctggggcctgagcccccccagtgggcaggagcccatgcagacactggtgcaggacagcccaccctcctacagctaggaggaactaccactttgtgttctggttaaaaccctaccactcccccgcttttttggcgaatcctagtaagagtgacagaagcaggtggccctgtgggctgagggtaaggctgggtagggtcctaacagtgctccttgtccatcccttggagcagattttgtctgtggatggagacagtggcagctcccacagtgatgctgctgctaagggcttccaaacattgcctgcacccctggaactgaaccagggatagacggggagctcccccaggctcctctgtgctttactaagatggcctcagtctccactgtgggcttgagtggcatacactgttattcatggttaaggtaaagcaggtcaagggatggcattgaaaaaatatatttagtttttaaaatatttgggatggaactccctactgacctctgagaactggaaacgagtttgtacagaagtcagaactttgggttgggaatgagatctaggttgtggctgctggtatgcttcagcttgctggcaatgatgtgccttgacaaccgtgggccaggcctgggcccagggactcttcctgtttcataaggaaaggaagaattgcactgagcattccacttaggaagaggatagagaaggatctgctccgcctttggccacaggagcagaggcagacctgggatgccccagtttctcttcagggatggatagtgacctgtcttcattttgcacaggtaagagagtagttagctaacctatgggaattatactgtggggccttgtgagctgcttctaagaggctaacctggaaactaagctcagaggcaaggtaataaagcacttcagggcttgctccccaagtgggcctgatttagcaggtggtcctgcgggcgtccaggtcagcaccttcctgtagggcactggggctagggtcacagcccctaactcataaagcaatcaaagaaccattagaaagggctcattaagccttttggacacaggaccccagagaggaaaaagtgacttgcccaaggtcgtaagcaagctactggcatggcaagagcccagcttcctgacggagcgcaacatttctccactgcactgtgctagcagctcagcagggcctctaacctgtgatgtcacactcaagaggccttggcagctcctagccatagagcttcctttccagaacccttccactgcccaatgtggagacaggggttagtggggctttctatggagccatctgctttggggacctagacctcaggtggtctcttggtgttagtgatgctggagaagagaatattactggtttctacttttctataaaggcatttctctatatacatgttttatatacctcattctgacacctgcatatagtgtgggaaattgctctgcatttgacttaattaaaaaaaaaaaaaaa

SEQ ID NO: 3659 - protein, 263 aa, Homo sapien
MLLAWVQAFLVSNMLLAEAYGSGGCFWDNGHLYREDQTSPAPGLRCLNWLDAQSGLASAPVSGAGNHSYCRNPDEDPRGPWCYVSGEAGVPEKRPCEDLRCPETTSQALPAFTTEIQEASEGPGADEVQVFAPANALPARSEAAAVQPVIGISQRVRMNSKEKKDLGTLGYVLGITMMVIIIAIGAGIILGYSYKRGKDLKEQHDQKVCEREMQRITLPLSAFTNPTCEIVDEKTVVVHTSQTPVDPQEGSTPLMGQAGTPGA

SEQ ID NO: 3660 - DNA, 2427 bp, Homo sapien; identical to SEQ ID NO: 3658

SEQ ID NO: 3661 - protein, 263 aa, Homo sapien; identical to SEQ ID NO: 3659

SEQ ID NO: 3662 - DNA, 7480 bp, Homo sapien
ctccacagtacctgaatggagagcgaaagataatgatctacgattactgctgacaaatggaagaataattaaagatgaaaggcagccctttgcagatcaaagtctttatacagcagatagtgaaaatgaagaggataaaagaaggacaaaaaaggcaaaaatgaagatagaagagagttcaggagtagagggagtggaacatgaagaatctcaaaaaccactgaatgggttttttacaagtgtgaaatcagaactcaggagtagatcatcaggatattctgatatttctgagtcagaagactccggacccgagtgcactgcactgaaaagtatctttaccactgaagagtctgaaagttcaggtgatgaaaagaaacaagaaataacatccaactttaaggaggaatctaatgtgatgaggaacttccttcaaaagagccagaagccatctagaagtgaaattccaattaaaagggaatgtcctacctcgacgagcacagaggaagaagctattcagggcatgctgtctatggcagggttgcactattccacgtgtttacaaaggcaaatacaaagcacagactgcagtggtgaaagaaactctctccaggatcccagcagctgccatggcagtaaccatgaggttaggcagttgtatcgctatgataaaccagtggaatgtggataccatgtcaagactgaagatccagacttgaggacttcctcctggattaaacagtttgatacttccagatttcatcctcaggatctaagtagaagccagaaatgcatcagaaaggaaggttcatcagaaattagtcagagggtacaaagtaggaattatgtggacagcagcggctcaagccttcagaatggaaagtatatgcagaattcaaacctgacttcgggggcgtgccagataagtaatggcagtctaagcccagaaaggccagttggtgaaacttccttctcggtgccccttcaccccaccaagagaccggcatcaaatccaccacctatcagcaaccaggcaacaaaaggtaaacgtccaaaaaaaggaatggcaacagccaaacaacgtcttgggaagatccttaagttgaacagaaatggccatgcacgtttctttgtgtgacagagctgctgttgcagccattcttccctttggagaccagtctaggggtgcaggagcctggagcttccgctgtccccctgcctggagcagtttgtgtgtatagtaagaacactgcccgaagaacagaatgaacctgatgctgcattttcactgtgccacacccactcagcaataaccattttggacctggtgggggagaggaagaaggagggtagaaccttaaaaagagaccttgaactggaaagggtctcttgtcagggcttgaattttattttgttgttggtagtgtcttgatgtattttcagtggtagggtaaagaattatcaataatttatttaacagatttttttttaaagttaacagcttttaaattctttttttaaagctatttatttggaagatttctggagaaatatctcactaatttagatgtaagaatgtgaaggtttttaaattatttttgatagtgtgtgtgttacatgtggggaagggccacagtaacagtaactagtctggactcttaaatttgatattcaggttaaagtcttaaacagggatttgatgcattaattattttaaattaagatgtatatgaaaatcattttattttatatatttcatgtgttttttataagctattagcttcgcttttgctaacatccaaggtgcatactgttatccaggttgattaccttatatcccaccttccctctgcactccccatcattttgtgatgacccagtaagactcttctctttgcagggaaacactttcgtagccaatgtgtaagaactccatgaaagatccctcatttctcatttcgtttgacattgtgattttcttctcaacattaaaaaaaataggcttttgcattttcatttctgctgatgatatctgggtcccaaagagagcagctttaatatatttttcctacttgtgggaaaagtattataagtttggttaaattgtcatgtttatagtttttccaagtacatttgtaactacagcaggccttcttcgtactgctgctgttggacaacaggactggcacctgctgcagaggttataccttatgatacttttatgctccatacctgatttgttgggaaatgttatttaggatattcaaatctgcatcataagccgtaatataataggattaatactacattaagttgtatagaagcaagcatgttggaatagatcttttgtgtgtatttactttttttatttcttaattttctaaagaattacttaagatatggatttggagtaaaatgggtgcttttggcagtttcttccatctatcctaacctgaccagtacatattgaggttaagtatctggttaaactttaaggtattcatttatctcctttatgtatgatttttactaaatgccagttttcatttgcttatagtagcttctattttcccttttttccatccatggcataaaaataagtgatttctgggggtggggcagaaatgttcccaagtctgacaatagagcattttacaaattcctacaaagaaaatataggcaaatagataaaatttatttttatggagaagaaatatggccatattatggatttgtcttttttttactcagcaagatagcaggacttacccttctctattaagtatcacttgaattgctaagaagaaaaaagtctgtaccatcatctttcatggttgcattcaaatgtatattttcaaagagaaatacttcttgtgtccccattccaaaatgtcatgggataaatatgaaatagtttatgaagtagcctttctggttcagagtgactggaccaaagtctgaatcttatctgggtatcaggaaaaagaatttttatggaaatccttagtgtctataaacaacccgtgtaaaccctgtctacactatgccaaaaccagtggaaagatgggtagagtcatcttatctcaggatgtcaaaaatctgggtttgactgattcccctaccttcccacacagtatattcttgtgatttttgcttttctgtagatcctgagtcggtgttacaatagtcatgtttttattttgggttaagaaatacgaggtgtaagagctataatttccttttcgtgttatatcatgatctgggttttcttttttcctttacgtttttcacagctcttgagtattttctatttttttctttagtcacaaaaattaaaattaaactttatttttatgaattaaaatgaaatttaatttatttttatgaattaaaattgtggccagtatccactgtgtccttaggctgagaagtactaatttggagtagcccgtgtgtggaattctaaagtgaaggtactgtggattcatttttagtagttttagccccttaataagtggctaagttagaaaactttcagcgaggtaatagaaccacttgaatagaatccatgtgtctttttctgaattggtgaaaattcggccactgatccagtgactcctggtcaaacgtcttataacattactggccataatgcatccctttatctcatggaaatggctgaactttgtggtagctgctgcgagtacctgggcttaacagtaatagagaacctcatttataccatacagacacagcaacttaggaagacagcactgatagcatttagctagttgtaaccaaatacaaatatgtaaaattgagaattatgattaacatatgcaactttagtaataggaatagatgataattttcctgtattgtttcaaataagtgactgttcagctgggatccattggattataatttacaatgtcacataatattatgcttttcaatattgatgagtgatgtaaacaatataaagttggcagtttgtagtagttcagtatcctagaaatacattgaacttcataagtatcagttcatttttaagcatacagaattgaagattctgactgaaatcataaactcagaggaaacaagcccatctttatcactaattacttagcttgaatacttttctatttttaaataatcctaattattgccttttcaatatagtctactgtatttatttatatgggatcaacaggtatttatcaaacatctactgtgtgcccagcactacctagtactgttggggaacatcaatttgcagttgtggtctctgcccttgaaggtatcttctccaggaaattagcagtattattttcacttctaagcaaacatgagcaaaagaggacctgttcattaaaaaacatgctgacttttttagtttcaactgagatatgccactgtagaagtgaaagtaatttcacaattaaagaaatgcttcaacttggtaattaatatggtcatacagggacttggtgtagcatgcaaggaagcagaagacctgggcttttgtcgaagttctgccatttaggtatcagctgtgtaaccttgaataagtcacttaactctttctcttagttttctcatttgtaaatttggattaaagtgtttattatgataatcaattaagaaaatctcttaacacttcatacatacagagaacttatcattaagttaaaactggcaattaatgcacctttatatatatttttaaatgaaaactaatactattcatgatgtttattttatatcaaatatatgcccagggcatgctactttaaaaatccgaggaatctccaacaaggtgctggattaaaatcagattttgtgcttgaagtggaagaaaaatgaagttgtttatggataagagagtgagaatgtgtatcctcaagtacgttaagatgatttaactgaaagatggctttaggtttttcttgaagaattaggaaagtaccatccccacagattcagcatactcttcaggtactagataaaggtgaaggaagtcatggaattaaaatgacttagcaactccccagggaacttgtggggagaatgaggtggttagaaaggtgagaatgcacaaagacagctctgggttgggtaccaacagtttgcttggtagaaagaaaccagtgtaggaaaggagacgccaccagacatcttcaacagacaagattctttctgcctttttcaaaagatgctctctgcagcagtaagactatagatagagttgattggaatatcatgtgacccagtatgctactgctaggcataattatcaaaaattcatttttctcattaaatattgttaattgctcgccacataaagagaagctagagctcaccagtcttggtggtgtcctagaccttcctctaaagcagtcttgggaagctggatcatcagatctttagcctagacagagtgtcgctggtaaataaaggagacacaggtaacccagagtggacagtgatttgcgtggggagacacagtggatctggggcctctgatactttgcttcctaaaacagcccccagttttcggcttgccctatgagatgatgttcatgtgcttccttgaaaccaggtggaaagaaaggggaagaattaattttctcattctgttgctgttgaacgtaatgtaatcttaatactgtagccttcctagaagcccttccctctttttcatgctgtaaagtcaaatatttgatatccttaacataaattttaaaaattaaggtcattaggaagcaaatgtctatttccaaagcaatgagcttgttgtgactgtgattttattcttctatagtatttttttcctcattttaattgagaggagaaaataatactcttttgcaatatccttaggttctccccttccccctggtgccccttctagtgtcttaagactttgtcttaacaagtataacattacattttgttgttaaaacctttcgaaactgtattcagtgattcttccaagtttatctgctctgcactatttcactaataaaccctggctaccacgtagcccttgatctccaagtagtttacctatgcaagacctgtgacactctgaattcacttctctttctttcagaaagtagtcataaatggagcttaattataaaggtaaaacttgtctccaaccagtttcattttggccatttctttttcaaaatgtcagctgttttcctccaagatttttcaccaaaacaatgatcataagtgctggaatatataatactttgcaggcataaaataacccagacatactctcatatttctttggtgtattttggttggtaaaacttaccagcattaaatgtaaaatataatgaggagttaattccttacctagaactatttcttccttttaagattcataagtaaccttttatttttacagagctacgtataacttccacattacagtcagggacctgaggtgtaacttactaagtgaaccccaaggttattttatcttgcaaaagaaacctaaaccaaactaagggccttacagtttatggttagactgaatcaaaagctataacctcaatttttccaaaaacagcttctgactgcaaaagcaagtcatacagttgttaggtatgaaatagcactgatcaggaaatgcatcttcgcagatggtatttccttcagaaaagacttttctacttttaatataaattaagccataacagtttcatgctgtggaaagagggtgaaaaggttcattttaagagattatataatatgaactttcacatttactgtgaaatgtctaactttgccagtgcttcagcaagtttttttggggggtgatggggaggggtagtattggttttagaggtttcaaatctgtgaactttggagaggggacagttgttggctctggtatttactagttttgtagtaacgttttgctagcctgactgacttttcttactggtttttatgcccacggtccgaggggactgttcttcttgtttggggtgtctgcggaatagcgtctcgtcttgtttgtataggcagtcaatgtgtgtgacatgtgtgtcctttcagtccggaagcccactgtgtgacaatggcgtggggtgtggctgggaggtggggtgctgaagcttgaagagcatttctttgctgattcataacagtatttcccatcttttgcctgcaggcagggaaagtgtacagtatttattttgtttctgttttactttaaatttgtaagtctttaagtagcttacattgattattataggggaggacaagtgacttgtttaaagttgtatttagtattctttccaatttctgtattttaaaatattgaaattaaaattgtattacttctgttttgatttttttagcactcagtgtattttttgctcattttgtttgaaagtataaatgttgaaaattgtataaaatgcgtccttgaaagaaaaagaatctgaattctatatcc

SEQ ID NO: 3663 - protein, 377 aa, Homo sapien
STVPEWRAKDNDLRLLLTNGRIIKDERQPFADQSLYTADSENEEDKRRTKKAKMKIEESSGVEGVEHEESQKPLNGFFTSVKSELRSRSSGYSDISESEDSGPECTALKSIFTTEESESSGDEKKQEITSNFKEESNVMRNFLQKSQKPSRSEIPIKRECPTSTSTEEEAIQGMLSMAGLHYSTCLQRQIQSTDCSGERNSLQDPSSCHGSNHEVRQLYRYDKPVECGYHVKTEDPDLRTSSWIKQFDTSRFHPQDLSRSQKCIRKEGSSEISQRVQSRNYVDSSGSSLQNGKYMQNSNLTSGACQISNGSLSPERPVGETSFSVPLHPTKRPASNPPPISNQATKGKRPKKGMATAKQRLGKILKLNRNGHARFFV

SEQ ID NO: 3664 - DNA, 5048 bp, Homo sapien
tatctgtaaggacacattacaggcgtcaaagagaaattcctttggttcagaatgggcccaggccttgaagcctgctaagaataccaaagccagaagaacactaaagttctcaaggtccctcaatgatgtgggtgagaaggcgcaggatacttcagaaagttttgcctatgtggaaagaacttgttctgaagggaaattaatactccctcaagatacgtgtctcagaactaacaggtttcatcataaagaaaaaagaaccctgaaccacaaacctcttggcaattccaaacattcttgtgtttcatgcctttctgccggtcgctcaactgcctcagaggtggaagctggcaaggggggcaggcccggcctgctgctggaagagaaggcggatggtgaggccacgtcccgaagccggcaactgctccagtacctgttctcactctcgcacggcttgagcgccagcagcctgcacaggttccatgagctggagagctgcgctgctcgcctgcacactgccaagtcctccagcgggctggcagggagtatgggcttctgctctgacgagatgggagacgacgatgtctttgaggacagcacatctgcaaaactgaagagtagggttctgcgggcgcccctctgctccacggaaaaggacagcgacctggattgtccttctcccttctctgaaaaattaccccccatatctcccgtgtccacgtcaggggatgtctgcaggatctgccactgtgaaggagatgatgagagccccctgatcaccccctgccactgcacaggaagcctccacttcgtgcaccaggcctgcctgcagcagtggatcaagagctccgacacgcgctgctgcgagctctgcaagtatgagttcatcatggagaccaagctgaagccactgagaaaatgggagaagttgcagatgacgtccagcgagcgcaggaagatcatgtgctcagtgacattccacgtcattgccatcacatgtgtggtctggtccttgtatgtgctcattgaccgtactgctgaggagatcaagcaggggcaggcaacaggaatcctagaatggcccttttggactaaattggtggttgtggccatcggcttcaccggaggacttctttttatgtatgttcagtgtaaagtgtatgtgcaattgtggaagagactcaaggcctataatagagtgatctatgttcaaaactgtccagaaacaagcaaaaagaatatttttgaaaaatctccactaacagagcccaactttgaaaataaacatggatatggaatctgtcattccgacacaaactcttcttgttgcacagagcctgaagacaccggagcagaaatcattcacgtctgattgtgtgcgggttgtcattttcctggacatccatgaagagctgaaggaaattgtttactgccaattgtatacctttcttatgtcctttaatagcatagactggacaggtgactatttatagtggcttctctttttctaaaccctccttagtctcctagaaaaccttcctgtgggccaggcatgcctgggtcctgcctctgcctggcagctctgtgggaaagtggaagaccccatgatgacatcatggggagccagcagagttcctgcccatggtcttgagctgaatgagagaataaaatgccaatcccaagggaagaggaggagcaggggtgcccaggccctgatacccagccgcctccagcttgcagtggtccccagcctggagcagagcattggggagtgtctagccatgacgagaagattccctctgcatcacggcgaaccccaggagatggtattgaaacagacccccaaacacagactcctgcctgccctctgccgatgctgcctcctccatgctcttgagcaggtggagccatggtgctctgtggtggcgcatgattcactgagcaaacagcactttacagaagaaaatctttattttgtaatatgtgtgtccagcgggattgacactcaaaaaaagtctcacttagaaatcttcccttccttacctttgtatctcctttacatcatgagagatcaaaaatccattttgccttacatatgctaagaagcgtggcattctttctgttcataaaacagactcatgacttttaagacaggacaagcaggccagaggctttttttttaatcacagatctcatgggaattagtggatgctaaatggcaattaaagcatgattcctatgcttttgagcctgttttatgacaaggtgttactttgtaggcctggcccatacatttcttttttgtcaacactgaaaaagaacagtttctgagatcgaaatggaaggaaaggaagtgagtaatgacaacaaaactgaatatttaaaaaatattcctttatagttaaatctctccagttggtgttggcttcacattgaaagagcagccatgtgccaccctggccggggtgtgtgcactgcatgcaggttctcccttgcatgcaagatgggtgctggcccactgtgaggcttctgctcggggaagttctgtggagtcactaccagggccaagaggcaggtgggctggctctgggacgagggccaggtgtgagcaaactgccagggtccgctgtgccactgctccccggccacatgcccgcccagctgtcgccttaaccagactgaacagacaggatccttcagggcccttggccccactctcagtgcattctgtcatcagggattaccacctgtaccattttcataaaacaaaaccaaaatcactaccatcaaatggccttgtccctctaaaaagtctgcttaaaattctgtttttaaaacccagtttcctagttttccaggcaaatagttacctccgggaaagttgctgggggggcctgaagcacaatgtagcgcagatgcttcctttccaggccattctctcacccagcctgcacggaggagatgggagatgctgggggtcctgccctcagtctttttgggccttaggcgtttcgttcatcctgctaaggggatgaagcaaacacgaggtgattcctttgcctttcagagtggaagccctggagtttgttttgaaggccaggaggctgaaggatctctaagctacggtgtgggcttaatagcagcaggctttgtcctcctgtctcctccaagccagtgtctgattccttggcaacacaggtcttagtctgtggagtggctctgctgtggccttcctctggccgggcaggcactgtccagccatagccagctcctgagaataggtcagcctctcctttctgtctcccagggcacatccagcccgtgcctgtgttcactgtgccccgaagtgcaattacccataccccttctcagcctggggaccccaggcaaccacagactgtccactcaggggagctgaatcccaggtcagccctgccaatgtcccttaggaactgcccaggcaaggcccctggttttgtatacttgttcctgccacccagcagtagatgagtgtttcaggtgaagaccaggatagattttctaagtgtgaatccccacttcacatatggaaccccttatgctgaacttgaaaagcaccaagacttcctgtagacaagaaagtgcttaggtagggacagcccctgggcatcccacccaatgtagctggcaccccactatggcaaaggtgccttgataactgagccctgtatccctcccatgcccagccagattctcatgggaagccctctcccttcttttctgcctaacaccatctcatcgtttctggcctcactgtggacaatccacacacattcttctttcctctcctggcggggcacagagccacccccttgccttttcttttcttgaaggttctagttcagctcctgattcatcagacccttctagccccctgcatctagcagtgaagcatgaagcctggtggggatgtggtactcccatctggtgtggccaccagctctgccaatgttcctgtagccttggaaaacttgctctctcggttcttttgggtgctgtgtactccccagcttccccccttccccccccattttgcacctgggtttagtgaaaggatggcatttggttgacccatatagaaacccagaatgaggtctcagggccaggaggcctggtatttgtaggccagggaaggggaagaggcaagtggtctggggtatcaccagccagccctctctgatttggcctctactccccataagtcacagtaccataagcaggcttctggcctcagcaatttggtctttgtgcccaagtttattgtgagaatttcctgaaaactctataaaaggtctcttcctactgtaggcctctaatgtttctcccctttttgcttcagtccactcttcagtcttgtaggcctagttttcaaacctgcacatgtgtcctacctggccacaggcatgcaggcctcaggcagctgggccagtttgggagcctcgggtgatgtctgcacgatctggggctgcctctgcacccctgctgtgggcttcagggttggagaagggctgggaccaaccgggtgagatccacaagtctctggatgtggctgaaggcaaatacacaattgaagtactttctgttttgaagtgctttcccttttgaatctggtttgaaacatgcagcttctgtctctagcccaaggaaagaccaaaacatagggaaataaaagcatttatctttgtcttggaagtaattgttgaagttgtgcagttgatcagtgcacagttagatgcaatgtttatagaaattgattgttaaaccaaatttacactggcatgtgtggtgtagtttctaaaaggcacttcacatttgaaatttttcttaccttagaaagtttctagtgatctaaatgtctagttttgtattcttttgtgtgtgttcactgtttctcagtattaccacttgaataattctctgtacaggggggtttgtgctatacactgggatgtctaattgcagcaataaagcctttctttaaaaagcaaaaaaaaaaaaaaaaaaaaaaaaaa

SEQ ID NO: 3665 - protein, 455 aa, Homo sapien
ICKDTLQASKRNSFGSEWAQALKPAKNTKARRTLKFSRSLNDVGEKAQDTSESFAYVERTCSEGKLILPQDTCLRTNRFHHKEKRTLNHKPLGNSKHSCVSCLSAGRSTASEVEAGKGGRPGLLLEEKADGEATSRSRQLLQYLFSLSHGLSASSLHRFHELESCAARLHTAKSSSGLAGSMGFCSDEMGDDDVFEDSTSAKLKSRVLRAPLCSTEKDSDLDCPSPFSEKLPPISPVSTSGDVCRICHCEGDDESPLITPCHCTGSLHFVHQACLQQWIKSSDTRCCELCKYEFIMETKLKPLRKWEKLQMTSSERRKIMCSVTFHVIAITCVVWSLYVLIDRTAEEIKQGQATGILEWPFWTKLVVVAIGFTGGLLFMYVQCKVYVQLWKRLKAYNRVIYVQNCPETSKKNIFEKSPLTEPNFENKHGYGICHSDTNSSCCTEPEDTGAEIIHV

SEQ ID NO: 3666 - DNA, 2239 bp, Homo sapien
cgctccggctcctggggctccccgcagacgctgcttttcttgctccactgggggtgcctcttcctgggcgcccgccgcctgcatcctgctcgccctgtctgggaatggggccgcccccgggcttgggccggcccggctggggcccccgaggcgcttccgccccgtagtgaccgcctggtgccgcccccccccaggatgaagggcggcgagggggacgcgggcgagcaggccccgctgaaccctgagggcgagagccctgcaggctcggccacgtaccgggagttcgtgcaccgcggctacctggacctcatgggggccagtcagcactcgctgcgggcgctcagctggcgccgcctctacctcagccgggccaagctcaaagcttccagccgcacgtctgccttgctctcgggcttcgccatggtggccatggtggaggtgcagctggagagtgaccacgagtacccaccaggcctgctggtggccttcagtgcctgcaccaccgtgctggtggctgtgcacctctttgcactcatggtctccacgtgtctgctgccccacattgaagctgtgagcaacatccacaacctcaactctgtccaccagtcgccacaccagagactgcaccgctacgtggagctggcctggggcttctccactgccctgggcacctttctcttccttgctgaagttgtcctggttggttgggtcaagtttgtgcccattggggctcccttggacacaccgacccccatggtgcccacatcccgggtgcccgggactctggcaccagtggctacctcccttagtccagcttccaatctcccacggtcctctgcgtctgcagcaccgtcccaggctgagccagcctgcccaccccggcaagcctgtggtggtggtggggcccatgggccaggctggcaagcagccatggcctccacagccatcatggtacccgtggggctcgtgtttgtggcctttgccctgcatttctaccgctccttggtggcacacaagacagaccgctacaagcaggaactagaggaactgaatcgcctgcagggggagctgcaggctgtgtgagactggtgttagccaccgctcactgcaagcactgcctccctccggggtctgtaagaggccgcaggggcctacagacctcatccccccatcccctggctggagccacttccagtggccactctcaggcagagttcagattcctgcccgcagggtcctctgggctgggccttggggcagctcccacattcccagggattttccccatcagtctgtcccttgggttttgcaagctactctgcacctgggctggcctcagttgaaggatcatgcagtagatagaggggaggcagggagagcttgtgggaccttcagtgctgactttagccaccatttccattcctatacaggatgtgaaggtcagaaggcagccaattgttggtttaattttttttttttttgagacagtctgtttcccaggctggagtgtagtgatacagtcacagctcactgtagcctcgaccttccaggctcaaaagatgctcccaccacagcctcccaggtagtgagtagctggtactacaggtgtgtgctgccacacccgactaatttttttgtagagacggggtttcgctgttcccaggctggtctcaaactcctgggctcaagtgaacctcccgcctcggcctcccaaagtgctgggattcctttctttatttctgtagaatctattttatggttggcattttgggggaagatttcgatgggttccacattcttgctttagttgttgtagagggatttgggtgtttctacccaaggcattggtctagcttttcctacaatgaacctatctttggaggtttaagctccccaccttcccccactgtggtgacctgtggccacttgcagaagggatggtgcctgacccactgccctagccccacgctatgcaccaaacttgttctccccgtcctggtccagggctggggtctttagagactgacagcctctgccccaggcctgagtccttagcaagggttgggtaaggaggttttaagggagaaggtccagtccttagcccttgaaatacaaagctcttctgacactgaatttggatgcaccttgttttatataataaatcgtgtttcacagaaaaaaaaaaaaaaaaaaaaaaaaaaaaaaaaaaaaaaaaaaaaaaaaaaaaaaaaaaaaaaaa

SEQ ID NO: 3667 - protein, 295 aa, Homo sapien [sequence omitted]

SEQ ID NO: 3668 - DNA, 3033 bp, Homo sapien
  Unsure 712-736: Unknown base
gcgagacgtcattttgcgtcgcctcgggcagggtagccagcggctgcatctgaggcggacgccgcagtgtagggcacaccctgagggtagcgagagacgtgacaggaccgagcagctgggggctgcagcctgctctgtccccaccgatcccagagagaggctgtgagtctggatctgggcgttcgcaccctgagagagggggtcaaagctcccctgcggccccgaggaagaagagcaaggttgaggacagcctcgggtcaccagagtagtttggaggcaggcctgcaggcgcgtccccgctcctcagctccaagctgacgtatctacacctgccggcgggcattaagatggctggttatgccactactcccagccccatgcagacccttcaggaggaagcggtgtgtgccatctgcttggattacttcaaggaccccgtgtccatcagctgtgggcacaacttctgccgagggtgtgtgacccagctgtggagtaaggaggacgaggaggaccagaacgaggaggaagatgaatgggaggaggaggaggacgaggaagcggtgggggccatggatggatgggacggctccattcgagaggtgttgtatcgggggaatgctgacgaagagttgttccaagaccaagatgacgatgaactctggctcggtgacagtggtataactaattgggacaacgtagactatatgtgggnnnnnnnnnnnnnnnnnnnnnnnnntcaggactattacctaggaggcttgagacctgacctgagaattgatgtctaccgagaagaagaaatactggaagcatacgatgaggacgaagatgaagagctgtatcctgacatccacccgcctccttccttgccccttccagggcagttcacctgcccccagtgccgaaagagctttacacgtcgcagctttcgtcccaacttgcagctggccaacatggtccagataattcgccagatgtgccccactccttatcggggaaaccggagtaatgatcagggcatgtgctttaaacaccaggaagccctgaaactcttctgtgaggtggacaaagaggccatctgtgtggtgtgccgagaatccaggagccacaaataaattaaggaattccagaatttcttcatctactttctgcacgtcttgactctgagattaatgagctgtgatatatccaacttcagattctttaaaaacatcaagctcgcaaagaggctgaggcacggagaatgacatgaacctgggaaggcggaggcttgcagtaaagccgaggagctgaggcccctgcaactccagcctgggcaatagagcacagagctccatttccaaaaaaaaaaaaaatcggctcatcttttattgctgttggttgagatgaatctactgatgaagaaaactgtactttgcttacattcagaataaggctttcaaaactgtgggtgtgctgttttcgtgagccttctacttgaccaccaaagacagtatttttgcagctgtatcaaatgaaccgagttggaggaaattgtataggagtatatcttaatggcactacagcaaactgtgttaaatttgggtttttggcaaagattgaagaaaactggtattcaagatgtactgcagctgtcaccaccaagcatgaactttcactgattacccataacctactggaaatcttcagccttgctgtcagcatagaccactgtgagaaacagtacattccattccagtttgccctgctttttgaagatctaaatgccattccatgttttctgttacatattgaagtttcttggttgccaaagaaaaacggattctgctgaacttgtggacagaacaaccccaaggttggaagaacaatgaaaaataatctatacttgaacatttcaaaagttaaaattttcaacagagttttaacacactgaagcttaaaatacattgacactgaaatgtcaatgggcaaacaccaatttcgccgttcattatgaaatacatcaaacaaaacttgccaaaaatacaaccataaaaatatagcaaatgtatgtatgagcaaactaatgctaaaaatgtctaattttcttggctagtctttcaaggaccagattcatgagtgttatttgaagggaaaaagtgaaatacttggaattattttgagtgatgtgctcctgagcttgttcttaaaatctaccagtggtagcttttggaaagaatgtgtttcataccgatgtgcaggcctcactggaagagcttcaagaggagtttgtgaaactcaaagtctaatggttttgattagaaacttccaggcaaatactccagagaaacttgggtgtaaaatgactaaacagatgaaaaggctttatccactattccatttgctccttacaccttaaaaagcttttttattttttaatgttttgatatatctagctttggggagaaagcagtgcaagagtgttattaaaagcagcttgtgttttcttgcacctttcacaccacccaggaaagaaaagttcaggcttaacagtgacatggctatcacatcatctgaataaattttttccttctaaaattactactgctttcattaatttcaatcatgatacttaattttgaaattgtaaatggaggggcaaatgtgagattttcaggtatatgaaaagtagaagtgtgggttacaaaaacattgaggaaaaacatacagctcacctgtttattgaatgtcttccctattaggttcagctgttcactgctgtatcacaagtcagactgtttaaacttgttcctctacttctgtggctgtaccctggatctcatcttcagattggctacacatctgaaatcaactcccattgcactatgaccttagctcttagccttccaatacacttaagcacactccaattacacctgcccttcagctttagggagcccactgtttcactgactccatattttttccttcccaatttatcagacatttaacagccttactatcctactgagcctagactgcatgattcatttt

SEQ ID NO: 3669 - protein, 255 aa, Homo sapien
  unsure 122-130: unknown amino acid
  Unsure 712-736: Unknown amino acid
MAGYATTPSPMQTLQEEAVCAICLDYFKDPVSISCGHNFCRGCVTQLWSKEDEEDQNEEEDEWEEEEDEEAVGAMDGWDGSIREVLYRGNADEELFQDQDDDELWLGDSGITNWDNVDYMWXXXXXXXXXQDYYLGGLRPDLRIDVYREEEILEAYDEDEDEELYPDIHPPPSLPLPGQFTCPQCRKSFTRRSFRPNLQLANMVQIIRQMCPTPYRGNRSNDQGMCFKHQEALKLFCEVDKEAICVVCRESRSHK

SEQ ID NO: 3670 - DNA, 817 bp, Homo sapien
aaattgcagaagttacttattcttttaagaggtctgcctggttctgggaaaacaacattgtctcgaattctgcttggtcagaatcgtgatggcattgtgttcagcactgatgactattttcaccatcaagatgggtacaggtataatgttaatcaacttggtgatgcccatgactggaaccagaacagaggtttgttttgggctaagtgtcccaggatagaatatttggctaggagtcaaaagacctagattttattttcagcttaggtttttaccagctgaatgactgtaggcaagccgtttaaatagctttgagacctaatttctccatctgttagaggtggtgataattatacttgccctacctgatcagggtttttgtgaaaagcagagaatttagataaaacgctttgtaaactgtaaatagtttatcagtataagctggtaaaataatagcagcatgggatattttaagaggctttattttatacttgatgagtaaattcagagaactttgaatctgtaccattgttatgtagtcccaaagttatttccccgagaataatgctaatgttttccaaggcttaatatactggttgtgaatattaaaagtttttctcattgatattgctctacaagaaacctacttaatacattttttagcggacatgggtcaatttctgtttatcattaataggggttcttaacctgggctacacttttgaatttcttggggactttaaaaaaaagcaaaaaaatctatgtcgggtgcggagaaagaggtaatgaaatggcagaattcgatagcaagcttatc

SEQ ID NO: 3671 - protein, 82 aa, Homo sapien
KLQKLLILLRGLPGSGKTTLSRILLGQNRDGIVFSTDDYFHHQDGYRYNVNQLGDAHDWNQNRGLFWAKCPRIEYLARSQKT

SEQ ID NO: 3672 - DNA, 5414 bp, Homo sapien
ttgagaaacgaggtctagggttggcaggcaatacaatacaactcttgatgcctctcattcctctgtcaggctccacaaggacactttaaggactaatttgatttaaatcaattcattaaaaaatatctatagcttttagctagaagaaccccaaggagtgattattttgcaatagggctgagttgggccgggcatggtggctcacacctgtaatcccagcactttgggggccgcgcgtcggagtttccccctttctagggtgaggatggttctacacagccacccggagttccttagttgaaaggtgcgccctgctgtgacagcatggacaccacgttgctgaaaacatgctttgggactgccactgaatttatcttttgcggttttatgacaaagttattagtagtttcccttttttgaattagtattttgaagttaatatcacaatgagttcaggcttatggagccaagaaaaagtcacttcaccctactgggaagagcggattttttacttgcttcttcaagaatgcagcgttacagacaaacaaacacaaaagctccttaaagtaccgaagggaagtataggacagtatattcaagatcgttctgtggggcattcaaggattccttctgcaaaaggcaagaaaaatcagattggattaaaaattctagagcaacctcatgcagttctctttgttgatgaaaaggatgttgtagagataaatgaaaagttcacagagttacttttggcaattaccaattgtgaggagaggttcagcctgtttaaaaacagaaacagactaagtaaaggcctccaaatagacgtgggctgtcctgtgaaagtacagctgagatctggggaagaaaaatttcctggagttgtacgcttcagaggacccctgttagcagagaggacagtctccggaatattctttggagttgaattgctggaagaaggtcgtggtcaaggtttcactgacggggtgtaccaagggaaacagctttttcagtgtgatgaagattgtggcgtgtttgttgcattggacaagctagaactcatagaagatgatgacactgcattggaaagtgattacgcaggtcctggggacacaatgcaggtcgaacttcctcctttggaaataaactccagagtttctttgaaggttggagaaacaatagaatctggaacagttatattctgtgatgttttgccaggaaaagaaagcttaggatattttgttggtgtggacatggataaccctattggcaactgggatggaagatttgatggagtgcagctttgtagttttgcgtgtgttgaaagtacaattctattgcacatcaatgatatcatcccagagagtgtgacgcaggaaaggaggcctcccaaacttgcctttatgtcaagaggtgttggggacaaaggttcatccagtcataataaaccaaaggctacaggatctacctcagaccctggaaatagaaacagatctgaattattttataccttaaatgggtcttctgttgactcacaaccacaatccaaatcaaaaaatacatggtacattgatgaagttgcagaagaccctgcaaaatctcttacagagatatctacagactttgaccgttcttcaccaccactccagcctcctcctgtgaactcactgaccaccgagaacagattccactctttaccattcagtctcaccaagatgcccaataccaatggaagtattggccacagtccactttctctgtcagcccagtctgtaatggaagagctaaacactgcacccgtccaagagagtccacccttggccatgcctcctgggaactcacatggtctagaagtgggctcattggctgaagttaaggagaaccctcctttctatggggtaatccgttggatcggtcagccaccaggactgaatgaagtgctcgctggactggaactggaagatgagtgtgcaggctgtacggatggaaccttcagaggcactcggtatttcacctgtgccctgaagaaggcgctgtttgtgaaactgaagagctgcaggcctgactctaggtttgcatcattgcagccggtttccaatcagattgagcgctgtaactctttagcatttggaggctacttaagtgaagtagtagaagaaaatactccaccaaaaatggaaaaagaaggcttggagataatgattgggaagaagaaaggcatccagggtcattacaattcttgttacttagactcaaccttattctgcttatttgcttttagttctgttctggacactgtgttacttagacccaaagaaaagaacgatgtagaatattatagtgaaacccaagagctactgaggacagaaattgttaatcctctgagaatatatggatatgtgtgtgccacaaaaattatgaaactgaggaaaatacttgaaaaggtggaggctgcatcaggatttacctctgaagaaaaagatcctgaggaattcttgaatattctgtttcatcatattttaagggtagaacctttgctaaaaataagatcagcaggtcaaaaggtacaagattgttacttctatcaaatttttatggaaaaaaatgagaaagttggcgttcccacaattcagcagttgttagaatggtcttttatcaacagtaacctgaaatttgcagaggcaccatcatgtctgattattcagatgcctcgatttggaaaagactttaaactatttaaaaaaatttttccttctctggaattaaatataacagatttacttgaagacactcccagacagtgccggatatgtggagggcttgcaatgtatgagtgtagagaatgctacgacgatccggacatctcagctggaaaaatcaagcagttttgtaaaacctgcaacactcaagtccaccttcatccgaagaggctgaatcataaatataacccagtgtcacttcccaaagacttacccgactgggactggagacacggctgcatcccttgccagaatatggagttatttgctgttctctgcatagaaacaagccactatgttgcttttgtgaagtatgggaaggacgattctgcctggctcttctttgacagcatggccgatcgggatggtggtcagaatggcttcaacattcctcaagtcaccccatgcccagaagtaggagagtacttgaagatgtctctggaagacctgcattccttggactccaggagaatccaaggctgtgcacgaagactgctttgtgatgcatatatgtgcatgtaccagagtccaacaatgagtttgtacaaataactggggtcatcgggaaaggcaaagaaactgaaggcagagtcctaacgttgcatcttattcgagctggcagttctgttcacgtccattgccggcaatggatgtctttgtggtgatgatccttcagaaaaggatgcctctgtttaaaaacaaattgcttttgtgtccctgaagtatttaataagaagcattttgcactctagaaagtatgtttgtgttggttttttaagaagtctaaatgaagttattaatacctgaagctttaagttaagtgcattgatcatatgatatttttggaagcatacaattttaattgtggaagtttaaagcctcttttagtccattgagaatgtaaataaatgtgtcttctttatggaccaaggatatgaaatcatttttcttttgtagctaacggttgccttgaggaagaaataatttggttttattaagagtctactctcaatccagttattagagatgtactgagtttgatttgttaatcctttctatatactgctgatcttgcatgtctacaatctgctcagtttttctgtgtttctgcaatagtggtcagaaaaatacttaaattcccttaatggtgttgttttctatttgttctggttttgagataaatgagtgattctgtccccaaatgtccatttttgaagtgattttcctggaggattagggtatttagcagttgaagctcttcattcatagtagttactgtcagctaacaggttttttaaggcttttaactattaatattttatggaatggggcaaagtaaattgatgaaagaattggagtgataatagtcctttacaaacatacagtccataagaaaatgaatttggcatatagaattattacaatttcctgggagagatggatatttaaacctctattattttagacaagactgtctagaacttaagtttgatctgtcagccagtactcccattaaattcagtgtagtttcacttgatagaatcagatatgttatcgaaatgttagcagcagcttcatcctccttctgattaaagtaagtagaaatgggatgttttgtttaataacagccatagtgtgtgtttagaccacagcggatgttgtagaccaggaccatagatgatacatgtcagtgctgtggaatgtgcattctctgagtgttgttttgtggtatcattgtctttcctgaatgactttctaactgtgcagaaaggcagaaaagtcatcatatgtatatgtcatatgactttataaaatatttaatgtgacaaaaagtggaaagaatctttacaaaccctgcaattacttttttaaaggcacttttactctttggttttatcattccattttgctaatatttactagctttataaattacagtaaggtacaaaaactcatcttgtaatattttcatttttgaagtgaaaaagtacatatattttgcacaaggttttatactgctaagtgcttggttggggtggtgagatgatgattagatcaggggtgaggctgagagactctgggtttagggctagccctgcctccatctcccttgggtaaaatgaagggtgtggggtaaaagatgcataaggccttttctagctctgacagcctagaagtccaatcaccctgtaataaatatgtgttgaatgaagaaatgggtgaatgagcttgtcaatgtgattttaaaaaattgactacctggaggaatgattaggaatctaaatgaagccagccctcggtatctgcaggtttctcatccatggattcaaccaactgcaaatggaaaatacgattttttttaaaaaaaggatggttacatccgtattgaacatgtacagacttttttcttgtcattattctctgaacaatacaagaactctttatgtagcatttacatttattaggtattataagtaatctagagattatttaattaaaatatacaggaggatgtgtgtcagttatatgcaaattctgtaccattttgtatcagggaattgagcatcttcagatgttggtatctgcagggatcctggaaccaaacccctgcagatactaagggctgacgatctaggtaagactggatttaacagttgg

SEQ ID NO: 3673 - DNA, 926 bp, Homo sapien
ctgaattacgaaggcagtccaattaaagtaacactggcaactttgaaaatgtctgtacagccaacggtttcccttgggggctttgaaataacaccaccagtggtcttaaggttgaagtgtggttcagggccagtgcatattagtggacagcacttagtagctgtggaggaagatgcagagtcagaagatgaagaggaggaggatgtgaaactcttaagtatatctggaaagcggtctgcccctggaggtggtagcaaggttccacagaaaaaagtaaaacttgctgctgatgaagatgatgacgatgatgatgaagaggatgatgatgaagatgatgatgatgatgattttgatgatgaggaagctgaagaaaaagcgccagtgaagaaatctatacgagatactccagccaaaaatgcacaaaagtcaaatcagaatggaaaagactcaaaaccatcatcaacaccaagatcaaaaggacaagaatccttcaagaaacaggaaaaaactcctaaaacaccaaaaggacctagttctgtagaagacattaaagcaaaaatgcaagcaagtatagaaaaagcgcattgaacagtcctgggcactacatgtaaattaagcccaaagatggggagaaaggaaaaggagagacaaatatagtccatactgagtgtcatcaacaatccagactgaagtcttctattttaatctcaatccccttttctgatttgccacccatgcctcttcaggctggaaacaatctcttggttccctaaagcactttcttctgactgctgtgattcagtgaaccttgccctttgctttctattacttgtgcatttgcctcacctgacaatgttttaaatcgcctttgtatctccttagctgctcaataaatatttgaatgcatcaaaaaaaaaaaaaaaaaa

SEQ ID NO: 3674 - protein, 179 aa, Homo sapien
MSVQPTVSLGGFEITPPVVLRLKCGSGPVHISGQHLVAVEEDAESEDEEEEDVKLLSISGKRSAPGGGSKVPQKKVKLAADEDDDDDDEEDDDEDDDDDDFDDEEAEEKAPVKKSIRDTPAKNAQKSNQNGKDSKPSSTPRSKGQESFKKQEKTPKTPKGPSSVEDIKAKMQASIEKAH

SEQ ID NO: 3675 - DNA, 3492 bp, Homo sapien
aagccgtgcgctcccgggctgcgaggtctggctaggctacgggccacgcgccgccgccgctgccgccgccactgtcctcttcggaggcgcgggcccgacggaaaccatgtttgtggctcgcagcatcgcggcggaccacaaggatctcatccacgatgtctctttcgacttccacgggcggcggatggcaacctgctccagcgatcagagcgttaaggtctgggataaaagtgaaagtggtgattggcattgtacagctagctggaagacacatagtggatctgtatggcgtgtgacatgggcccatcctgaatttgggcaagttttggcttcctgttcttttgaccgaacagctgctgtatgggaagaaatagtaggagaatcaaatgataaactgcgaggacagagccactgggttaaaaggacaactctggtggatagcagaacatctgttactgatgtgaagtttgctcccaagcacatgggtcttatgttagcaacctgttccgcagatggtatagtaagaatctatgaggcaccagatgttatgaatctcagccagtggtctttgcagcatgagatctcatgtaagctaagctgtagttgcatttcttggaacccttcaagctctcgtgctcattcccccatgatcgccgtaggaagtgatgacagtagccccaacgcaatggccaaggttcagatttttgaatataatgaaaacaccaggaaatatgcaaaagctgaaactcttatgacagtcactgatcctgttcatgatattgcattcgctccaaatttgggaagatctttccatattctagcaatagcgaccaaagatgtgagaatttttacattaaagcctgtgaggaaagaactgacttcctctggtgggccaacaaagtttgaaatccatatagtggctcagttcgataatcataattctcaggtctggcgagtgagttggaatataacaggaacggtgctagcatcttcaggagatgatgggtgtgtaagattgtggaaagctaattatatggacaattggaagtgtactggtattttgaaaggtaatgggagcccagtcaatgggagttctcagcagggaacctcaaatccttccctaggttcaaatattccaagtcttcagaattcattaaatggatcttctgctggcagaaagcacagctgagacaagctaactggagtaactttgctgttttgctgcttgttgcatgcacactggaatggaaagcgagctcccttttccccttccccagcgccgtttgacctctcccaaggatacaccagcagcctgcttactactaaacgcaatccaaaaggcctttaaaaatacagtgtatattttttgtactagtcagtttattgacactatttgaaacttttgaaatataaacggagaggctttctgttgagacattgtcaccaaaacaattttttgaaatgttcctgaaactaatttgggtttaaagattaaaagggttgttaccattcttatctgagtagttgggaggaggggaataccactttagttcatttggaaaatatagacatatttcttttgctttcttaaaacagcttaaaatgatgaacttttataattttaatttgaagattgaataaatattttttataaagattgttttgagtgctgatttgtttactttttgtagatttgctttatccatgatattcagtacaactctgtcatttctttgtaatatttaaaaaatattagtaaaggagtgaattaataaagtagtaatagtaaaatgaaaggaacttgactgtacagtttgtagcccaggttaaggcatttgggtattgtttcatttaaccaatttggggactaagatgggaaacactttttttattaagtttttaattcatagtcactaaagagataaatgtttcttatatacatttgtgtatttttatggtgttatttattccatggcttagcttccttcaaatcaaaatttggacacacactattaagagaagccattaaaattttactaaaattgtgcatgtaaattaattgtcagcattccatgtctcaagattttcttaatttagttcgctgtttaaattaattcatgtcctgtaaagttctgaccttgataacaaagctataaatatttaagtttgctaatatgcgtaagtattatcggtaagttacaagatggaagaagaataacagtagggcacagtcattctgtgaatccttttacttatcaaaatttggtagctattctaaggcttttgcagaaaaataagtgttcaatgtttgtagttcttcaaaagcatgttgcagtagccagccatactatgtgtattcccagtatcatgtacgcactaaaaaaaatgtgtgcttgctgctgctgtgagtgaaccattgcttaagataaaaaacttaactagatctgtaaatgtacagaatagcatcagatgtttctgagagattaggaaaatgttttgaatttataaaattaatgtttttctttgtaacatttatatatattttttaacattttaagtttaacagattgtattcctttcaagtttctatacttgcttaagcaatcttgatttgagtaagggtcttgatttgtgctattatgttctgttagttttggcatgaatatactaaagcttttttttttttttttagcatgtgttttctcctctttggttctctttgtatttactacttttctctttttcttgtgttttttttttcctgtttttgttttgtttggtgttttgttcctgtcttcattgtttcaggtatttctttacccctctggattccccacgggctggatcgagatggtccagttatgcccagctccttcctcctcctcctcctcctctggtagagcactcttgcgatgctgacactgccaacctccagtatcctcaccctcgcagacgatatctctctcggcctcttaatcccttacctgagaatgaagggatttaaaacactgatttaacattgaaaggccttattcaagtgcttgtaaatgctttcatttctggctgctttttgtttttcattttctttcagaagatttttctaacttagggtctgtcttgcatgtattacaaccagaatacagtgtttggaacctaaatctgtttgtgcgtctgcatcaaaggaacatttgcttcactgggtgataacctttgatgaaatgagatatgtccaagtaacgttaactgtgaagttacacacagtagctgacttcaaagtgcctgttcctgtaaattttattttaaactgttaccatagtcttaagttgtttatgctttatcagactggctaatgtgaaagcataatattatgaagtttattctgccttatgagaccttaaaaaatggatttcattttacaggctaatgttgtaactgactagtatgtaaaataaatcattcctgtgtataaagcagcaaaacctaaaaaaaaaa

SEQ ID NO: 3676 - protein, 360 aa, Homo sapien
MFVARSIAADHKDLIHDVSFDFHGRRMATCSSDQSVKVWDKSESGDWHCTASWKTHSGSVWRVTWAHPEFGQVLASCSFDRTAAVWEEIVGESNDKLRGQSHWVKRTTLVDSRTSVTDVKFAPKHMGLMLATCSADGIVRIYEAPDVMNLSQWSLQHEISCKLSCSCISWNPSSSRAHSPMIAVGSDDSSPNAMAKVQIFEYNENTRKYAKAETLMTVTDPVHDIAFAPNLGRSFHILAIATKDVRIFTLKPVRKELTSSGGPTKFEIHIVAQFDNHNSQVWRVSWNITGTVLASSGDDGCVRLWKANYMDNWKCTGILKGNGSPVNGSSQQGTSNPSLGSNIPSLQNSLNGSSAGRKHS

SEQ ID NO: 3677 - DNA, 4559 bp, Homo sapien
ggaagagaaatcccaaagcttttgcaattcagtctgctgtggggatggcttgatcctttcacaggactcaggatttgaagacaaaaaagcatcatattccagtggttgatcagactccactagagccgccaccaatagtgatagtggtgacggggcctccaaaagttggaaagagcactttgatataatgcctcattgggaacttcacccagcagaagttgaccgagatcagaggccctgtgatgatcgtgtcaggtaaaaagctccgactcaccattattgaatgtgggtgtgacattaacatgatgattgatctggctgaagtagcagatctggttgccaagctgttctacctttctggaatggtgcatggagaatatcaagaccaagaaatccacaatctgggccattttattacagttatgaagtttaggcctctcacatggcagacgtctcatccttatatcctggcagacaggtaaaaagtgattgtaagcttttatttcctagaccatatatttcaaagctaaaaaggctagaaaaagaacagtgataggatttattttgtgcctatttgaatagtgggggtagaagtgtagttgatggaaaatgtctacttatatcattgctcaaagatgctgtgcctttgggagtaaattaattatgagatgtttaggaaaatgggaggacttggaagcatttaaagctacaggatatggccccatcctatgttcagcctcagttttcagtgatgctgccttcgtgcccgggtgcttgagtcctttatgtgtgccttcagtttccttcctttgtgctcttctttgtgctgtggttttctcagcctggaataccctttttccacctgccagaatccaagccacagtacaaatcccagagcacaggctcaccctcttccagaaagggattttctgaatatgttcttcactcttccctgaccccaggtggacgtcatctccctgtctggtgtcttacggaatgaatgtcactttcagcctagagacacagttgtgtgcctgccccttttcctctggtgggtggtgaatggtgcttccttatttctgtattttctagttttctaaacgacatgcttagtggacaagagtgtgatgagtcattgacacatgaaaggacgtataggaactttggcattcatttctgctgtatgattgagtttatttttctaggatggaagatttgaaaaacccagaggatatctgaacaaaatgtgactggcaggtgtcactttatggttatttaagaggagcacacttgaaaaataaaagccaaattcacatgccaggtattctcttgttgtagaacatactagaatcacacataggattcttgggatggcttcttttctcaggaaaactgaaaaatgaccaaacaagggaagatggctttggtggaggttttaaaagtaagccagctatgtgtaggcctgtaaaggtgttattgaatcccctcttctctgaccttttgtcttatagctagaggagcactgttccagtgtggcacaatactcttctttatggtcatgggttaagcccttggactgtgcatcgttttttttttgttttgttattggtgactgaccccatgagtcatgctctttacaaagcatgcatttggatgtttctttcttttttttattattatactttaagttctagggtacatgtgcacaatgtgcaggtttgttacatatgtatacatgtgccgtgttggtgtgctgcacctgtcaactcgagatttacattaaatatatctcccagtgctatccctccccactcccccaccccacgacaggcgctggtgtgtgatgttccccaaaaataaataaattaattaattaaataatagaaattctcggctgctttttatagctgtagaaaaaaaaatgaaatcttattttaaacttttcttttttttttttttttttgagacagagtctcactttgtctcccggcctggagtgcagtggcgcgaactcggctcactgcaagctccgcctcctgggttcaccccattctcctgtttcagcctcccgagtaactgggactacaggggcctgctaccacgcccggctaattttttgtatttttagtagagatggggtttcaccatgttaaccaggatggtctcgatctcctgacctcgtgatccgcccgcctccacctcccaaagtgctaggattacaggtgtgagccaccacgcccggcgaagctgacttttcccattatttttaacggtaattcataaaatccttgttaggtttgatgacaggtaccatattaagggcagcattttataacccatatcttaaacatcatctctggaagttgagagcctccaatgggttttctatagagtgcacatgataccacactcaggcagttcatggagtgtaagacatatcttagtgctttgtcatttgacattttaactgagaaaaaaatatactttgataagtttgacttacacttcccttccccttcaggtatctactgagcgtttcagtcaacaatacagctcgtgttcgacaatattccttgatggcagcacagccagccagcattatcttataatgacaataatatctgtgaccttggagatacatcatcatatcacggaaagagatgcagatagatctttgaccatacttgatgaacagttatactcatttgcgttttccaccgtgcacattacgaagaaaagaaatggaggtgggagtttaaataactattcctcctccattccattgactcccagcaccagccaggaggacctttatttcagtgttcctcccactgccaacacacccacgcccatttgcaagcagtccatgggctggtccaacctgtttacatctgagaaagggagtgacccagacaaagggaggaaagccctggagagtcacgctgacaccatcgggagcggcagagccatccccattaaacagggcatgctcttaaagcgaagtgggaaatggctgaagacatggaaaaagaaatatgtcaccctgtgttccaatggcgtgctcacctattattcaagcttaggtgattatatgaagaatattcataaaaaagagattgaccttcggacatctaccatcaaagtcccaggaaagtggccatccctagccacatcggcctgcgcacccatctccagctctaaaagcaatggcctatccaaggacatggaagctctgcatatgtcagccaattcagacatcgggctgggtgactccatatgcttcagccccagtatctccagcaccaccagccccaagctcaacctgcccccctcccctcatgccaataaaaagaaacacctaaagaagaaaagcaccaacaacttaaaagatgatggcctgtccagcactgctgaggaagaagaagaaaagtttatgattgtgtccgtcactggccaaacgtgccactttaaagccacgacgtatgaggagcgggatgcctgggtccaagccatccagagccagatcctggccagcctgcagtcatgcgagagcagtaaaagcaagtcccagctgaccagccagagtgaggccatggccctgcagtcgatccaaaacatgcgtgggaactcccactgcgtggactgtgagacccagaatcctaagtgggccagtttgaacttgggagtcctcatgtgtattgaatgttcaggaatccaccgcagtcttggcacccgcctttcccgtgtgcgatctctggagctggatgactggccagttgagctcaggaaggttatgtcatctattggcaatgacctagccaacagcatctgggaagggagcagccaggggcagacgaaaccctcaatagagtcaacgagggaagagaaggaacggtggatccgttccaaatatgagcataagctctttctggccccactaccctgcactgagctgtccctgggccagcacctgctgcgggccaccgctgatgaggacctgcggacagccatcctgctgctggcacatggctcccgtgaggaggtgaacgagacctgtggggagggagacggctgcacggcgctccatctggcctgccgcaaggggaatgtggtcctggcgcagctcctgatctggtacggggtggacgtcatggcccgagatgcccacgggaacacagcgctgacctacgcccggcaggcctccagccaggagtgcatcaacgtgcttctgcagtacggctgccccgacgagtgcgtgtagtatctgttttatttgactgcagtctccttggtgtaaaaacaaaatgggaaaaataaggataactcagaatttcaaaaggaaatcacaaattcagctaataatagcattttcagtacttttcgtaaactaagtaaatacacaaaatgttgatttttctgaccataagacatattttatgtccttttgccgaggtgggtgtgttagtctcaggccctcctggccacattgcccaagtcacacaggcttctgtattatgtatttagataagatgtgtgaaaatatatttgaaaaaaagttc

SEQ ID NO: 3678 - protein, 597 aa, Homo sapien
LRKKYTLISLTYTSLPLQVSTERFSQQYSSCSTIFLDGSTASQHYLIMTIISVTLEIHHHITERDADRSLTILDEQLYSFAFSTVHITKKRNGGGSLNNYSSSIPLTPSTSQEDLYFSVPPTANTPTPICKQSMGWSNLFTSEKGSDPDKGRKALESHADTIGSGRAIPIKQGMLLKRSGKWLKTWKKKYVTLCSNGVLTYYSSLGDYMKNIHKKEIDLRTSTIKVPGKWPSLATSACAPISSSKSNGLSKDMEALHMSANSDIGLGDSICFSPSISSTTSPKLNLPPSPHANKKKHLKKKSTNNLKDDGLSSTAEEEEEKFMIVSVTGQTCHFKATTYEERDAWVQAIQSQILASLQSCESSKSKSQLTSQSEAMALQSIQNMRGNSHCVDCETQNPKWASLNLGVLMCIECSGIHRSLGTRLSRVRSLELDDWPVELRKVMSSIGNDLANSIWEGSSQGQTKPSIESTREEKERWIRSKYEHKLFLAPLPCTELSLGQHLLRATADEDLRTAILLLAHGSREEVNETCGEGDGCTALHLACRKGNVVLAQLLIWYGVDVMARDAHGNTALTYARQASSQECINVLLQYGCPDECV

SEQ ID NO: 3679 - DNA, 958 bp, Homo sapien
aagacagataaggaacaactagagggagaagccaaggcaggcgtgtgtggtaacacataggaactgagggagaggacatttcaagatggtggggatgccatacaacaggactatgtgatggtttttggctgtgtccataggaagtcacaacaggcaagggaaagaaaccagaacccagtcatggagttaagaagtgagtcagagagtagatgggtagggacagtgaggtaaggcctctttctaaggaagtttggctgaaggatagactagctggacacatgctggctgtgtggggtagagggaggaatgatggagggtaggagagccttgagcctgcgagaagagtctcttagaatagagaagctgaagttaaagttgtggaagagagtggggataactgagtgacagataatcaggagaagaaaaggagatccagactcatgacagagagatgacctttgccaagagcacagccgtctttcacggtcacagagaggtaggacaaaatgagtggtgttcaagaattggtttgtagcacaatatttcaactatgtcctttaaaaagtttctccacagacactacccaaagcagtgcttcactacagtggcagacagacctgaaaattttcatctgaagcagcagagtgaactgcagaggcaggtcaccaaccagtgtggaggctaaaagcgggcctctttggggattccaggtggaagtgttggacatctgtagtattcctggtctcgaatcatcctgatattcttcattttgttattcacattggactaggcaggaacaaagatcaccacaactggctcgccttcaactatgttagatggcaacttgccttcagtatggtgaaacacatcagttaagaccggggttgtgcatggcaggactttctacaaggacacccagtctccttaataaacatgagatgctctctttcccgaaaaa

SEQ ID NO: 3680 - protein, 19 aa, Homo sapien [sequence omitted]

SEQ ID NO: 3681 - DNA, 1706 bp, Homo sapien
gttgtgagctgcggcagagactggtggctggaggagacgccggcgctggagagtgcgctgcgccgcccgccgctgagggaccgcggggttagccactgctggctgcttccagtgttcgccgagaggtaccgggggtgacagctccgggaccggccgaaaggcgaggaaccggtgtggaaattaaaagaacacacatattttgactggggctttgatcaaccaaatgctaaaaagccacacaaagaagatccctaatagtcatttctcaacaattatatagtcaactgatgtaacaatggtactaatattgggacgcagactaaacagagaggatcttggggtgcgtgattccccagcaactaagcgaaaagtttttgaaatggaccccaaatctctgacaggtcatgagttttttgacttctcttcaggatcatcccatgccgaaaacatactccagatatttaatgaatttcgtgatagccgcttattcacagatgttatcatttgtgtggaaggaaaagaatttccttgccatagagctgtgctctcagcctgtagcagctacttcagagctatgttttgtaatgaccacagggaaagccgagaaatgttggttgagatcaatggtattttagctgaagctatggaatgttttttgcagtatgtttatactggaaaggtgaagatcactacagagaatgtacagtatctctttgagacatcaagcctctttcagattagtgttctccgtgatgcatgtgccaagttcttggaggagcaacttgatccttgtaattgcttaggaatccagcgctttgctgatacccattcactcaaaacactcttcacaaaatgcaaaaattttgcgttacagacttttgaggatgtatcccagcacgaagaatttcttgagcttgacaaagatgaactttatgttgtcggtggctatgatgggcaaaacagacttagcagcgtagaatgttatgattccttttcaaatcgatggactgaagttgctccccttaaggaagccgtgagttctcctgcagtgactagctgtgtaggcaaactgtttgtgattggtggaggacctgatgataatacttgttctgataaggttcaatcttatgatccagaaaccaattcttggctacttcgtgcagctatcccaattgccaaaaggtgtataacagctgtatccctaaacaacctgatctatgttgccggtggactgaccaaggcaatatgctgttacgatccagttgaagattactggatgcacgtacagaatacattcagccgtcaggaaaactgtggtatgtctgtgtgtaatggtaaaatatatatcctgggcggaagacgggaaaatggagaagccacagacactattctctgttatgatcctgcaacaagtatcatcacaggggtagctgcaatgcccaggccagtgtcctatcatggctgtgtgactattcatagatacaatgagaaatgctttaaactctgaagacaggatacctcaccgaagaagccacactgatccaagatgggaggttttaaaaactctacagtgggaacttcacatatctcctttgtgccatatgcaaaaaatagtaaaaataataatttggtgcctttctcctcaaaatatcaatctttcaaactataataaagcctttcctataattgaaaaaaaaaaaaaaaaa

SEQ ID NO: 3682 - protein, 403 aa, Homo sapien [sequence omitted]

SEQ ID NO: 3683 - DNA, 2477 bp, Homo sapien
gcagaggtgcggccggggaggcgcgcggaggctggagctggaggcgcggcgccggtgagctgagaaccatgtgtgctcagtattgcatctcctttgctgatgttgaaaaagctcatatcaacattcgagattctatccacctcacaccagtgctaacaagctccattttgaatcaactaacagggcgcaatcttttcttcaaatgtgaactcttccagaaaacaggatcttttaagattcgtggtgctctcaatgccgtcagaagcttggttcctgatgctttagaaaggaagccgaaagctgttgttactcacagcagtggaaaccatggccaggctctcacctatgctgccaaattggaaggaattcctgcttatattgtggtgccccagacagctccagactgtaaaaaacttgcaatacaagcctacggagcgtcaattgtatactgtgaacctagtgatgagtccagagaaaatgttgcaaaaagagttacagaagaaacagaaggcatcatggtacatcccaaccaggagcctgcagtgatagctggacaagggacaattgccctggaagtgctgaaccaggttcctttggtggatgcactggtggtacctgtaggtggaggaggaatgcttgctggaatagcaattacagttaaggctctgaaacctagtgtgaaggtatatgctgctgaaccctcaaatgcagatgactgctaccagtccaagctgaaggggaaactgatgcccaatctttatcctccagaaaccatagcagatggtgtcaaatccagcattggcttgaacacctggcctattatcagggaccttgtggatgatatcttcactgtcacagaggatgaaattaagtgtgcaacccagctggtgtgggagaggatgaaactactcattgaacctacagctggtgttggagtggctgctgtgctgtctcaacattttcaaactgtttccccagaagtaaagaacatttgtattgtgctcagtggtggaaatgtagacttaacctcctccataacttgggtgaagcaggctgaaaggccagcttcttatcagtctgtttctgtttaatttacagaaaaggaaatggtgggaattcagtgtctttagatactgaagacattttgtttcctagtattgtcaactcttagttatcagattcttaatggagagtggctatttcattaagatttaatagttttttttggactaagtagtggaaaaacttttatacttaactgagacattttgtcaaggctaaaaaaaagtcttgcaaaatggggcagtggactgacaggctgacatagaaaataaactttgcccaatcacaacttgtgcctcccatccctggagtactgactggcaccggtaagacagaatctctctgaatccattactccatgcccccttgaggcactgttgaagaaatctcacttttcagccagggtactggttctggtacatatggatcataagtccatttggggaagactcgtttatacaggttcatcagtactgtgtcttgagattttagcttcccatcaaagctgcatttcatgtggccatgggtacctagaaagacatcagaacaagtcggtcaaattaaaagtagaaaattttaaagcaatgacttccaacccaacagtcatttagcaacactgcagaaatgcagacatggtctcaaatcccgtgtttccttacctaaaggttccttgatatgtcctctccggccccacttcgttctcagttccactggtttaaaccacagcacatcctcttagaatcaaacacattaaagaccaagatgaaacatttacccacaaaatgtaaacccaacctttataccacaaaggcaatcagatcccatcctcctccttcatacccacctctgttgaagaacatgtaacgtactactgccatcttagtaaaaattttgaaaggatgaccactcagaacaactctcttgatgaccattctgtctggatctactgacataagatggcctgtagcaatgaggctgtgcattcctaaaggacaaaagcaaagaagctatttaggaatttacaggccaaagtcttcatttattgcccagtccatttaaagacccatgcaagagcctggtttgtcatccctgccctagcccaatctgaggctaagattggtaaactgtaagcccacacttaaccttgtcaataggttcttgaaaacttgtacttcaagagaaatgatgtataacaaaaccatactttttctcatcagttgttacaaggaaaggatgttgaacaaaaggcagttatttgaggactggctatacactgtttcacgtaaaagttggagttttcattgttctattaacaatgttaaatgaagacttactgtattttgaaaaccatcattaccttctccataccatttggctcccaaatttaaataaacaagagaaaacggtgttcatct

SEQ ID NO: 3684 - protein, 340 aa, Homo sapien
MCAQYCISFADVEKAHINIRDSIHLTPVLTSSILNQLTGRNLFFKCELFQKTGSFKIRGALNAVRSLVPDALERKPKAVVTHSSGNHGQALTYAAKLEGIPAYIVVPQTAPDCKKLAIQAYGASIVYCEPSDESRENVAKRVTEETEGIMVHPNQEPAVIAGQGTIALEVLNQVPLVDALVVPVGGGGMLAGIAITVKALKPSVKVYAAEPSNADDCYQSKLKGKLMPNLYPPETIADGVKSSIGLNTWPIIRDLVDDIFTVTEDEIKCATQLVWERMKLLIEPTAGVGVAAVLSQHFQTVSPEVKNICIVLSGGNVDLTSSITWVKQAERPASYQSVSV

SEQ ID NO: 3685 - DNA, 2275 bp, Homo sapien
gcgcagttgtcgtctcttgcggtgccgttgctggttctcacaccttttaggtctgttctcgtcttccgttccgactctctctttttcgttgcagccactgaagatcctggtgtcgccatgggccgccgccccgcccgttggtgagtcttgaatccgtgtactttcactgctgggaaacgggcggggaaagaagtgcctatggccgctgaaaacaattgtggggtggagcctcccccgtgcggcggccctgtcttgggaactgaccctatgttttacacctcccggctattttttagtctgcaatattactgtctgttccttcgttcccgtgtcggtgtggaagcgacggttccctcgtatctctgcctgtgtcctgcaagctcaccgcattttcgggcgctagatacgctcttggggcctttgtgtgcgttctctgtcttatttccgggcgacgtgccgcgtgcgttgtcggacgtgaagggcagtccgggaaaaacgggtgcggccgcctcctgtgtcctacagggggcgccagacgcatttccactcggcttggaggtggatttagtgccacgtgcccgaaagtcttaaattgggtgacctgagctgtgcaatgataatgcggcgattttgtagtacgcagtgtcttgaagagagaatttttaactaggaaagtttgttgcaaagtgtttataggaagcgtaagacaaagtaacggaagatggtgtctgttgtttctagtcttgggtgttctctgtgttgcagcagccaactgttgctttgtagtttatttccccgaatggaaacggtttagaagtggacgtgcattccccacccttttcccgtccctcgtttgggttgttccttgaggggcaaagtgcctgttgggctttctgtgaacctcacctaacctgtgttttttcactcccctgcagttaccggtattgtaagaacaagccgtacccaaagtctcgcttctgccgaggtgtccctgatgccaagattcgcatttttgacctggggcggaaaaaggcaaaagtggatgagtttccgctttgtggccacatggtgtcagatgaatatgagcagctgtcctctgaagccctggaggctgcccgaatttgtgccaataagtacatggtaaaaagttgtggcaaagatggcttccatatccgggtgcggctccaccccttccacgtcatccgcatcaacaagatgttgtcctgtgctggggctgacaggtgagcttggtctgggccttttaaggcagttggagtctctacattattaggcttgcattattttatcagagcatagaggtggccccagtgactcagccactatggctactagaaaagccaggctggcaagtgactttcagtggtcactcaggaccccttcctgcagatacaaacaaagcatgagtaagtcttagcaagctcttccccacaggttaggggaaacactggtgatgggagtagctcttcttgcttttagctgaatgacaaccatcttgccagcaggtagctgaagctggcagaggagcccagtggcgccttttcagtggttcttgggatgctccgcagccaattaagccgactgagttcctttcctcatggggacccagtgtgcgatggctgcacacagcagcttccttggtagtgtacgcagcctgttggttgtatgggttgctctaagggaccttggagacaggcctttcaggtggatgttcatgtttctgaccttgcactaccccaatgtaggctccaaacaggcatgcgaggtgcctttggaaagccccagggcactgtggccagggttcacattggccaagttatcatgtccatccgcaccaagctgcagaacaaggagcatgtgattgaggccctgcgcagggccaagttcaagtttcctggccgccagaaggtatgtagtgctgcagcccccttctcccacctttgccccaggcctcctgactcagttctttccattgctccttagatccacatctcaaagaagtggggcttcaccaagttcaatgctgatgaatttgaagacatggtggctgaaaagcggctcatcccagatggctgtggggtcaagtacatccccagtcgtggccctctggacaagtggcgggccctgcactcatgagggcttccaatgtgctgcccccctcttaatactcaccaataaattctacttcctgtccaaaaaaaaaaaaaaaaaaaaaaaaaaaaaaaaaaaaaaaaaaaaaaaaaaaaaaaaaaaaaaa

SEQ ID NO: 3686 - protein, 130 aa, Homo sapien
MAAENNCGVEPPPCGGPVLGTDPMFYTSRLFFSLQYYCLFLRSRVGVEATVPSYLCLCPASSPHFRALDTLLGPLCAFSVLFPGDVPRALSDVKGSPGKTGAAASCVLQGAPDAFPLGLEVDLVPRARKS

SEQ ID NO: 3687 - DNA, 789 bp, Homo sapien
tccacacggatcacttccgaaacacttggcttcagcccctgcctcggccagaggtttcatttttaactgaatatttacgaaagctgaaagcgtgcgaggggggtggggtggaaatagcggctgcttcttttccaaggatttatttaatggggatgtgttcaaggcaagaccgaattcagaaggatatcgacgtcgtgatccagaagtccagagctgaggactgcctgtttgcagggcccgcctggcaggacgactgagcaagtccttggaaaaccagagatattagagcggtgaatcgcgctggtcacgttggacacctgcgcgttaggagattctggagccagagggagagaccccagaaactccccggtcggcgacccagcccgagacgcctggggtcccaagggaagctgaacgcccgcagaatggggaaatggagagagaacctgaaagagccccaaactcgaggacctattgctccccaagaataacatcttccagaactagacagaaaactaggcgtctgggaaccctgaaatccttggaggagtagatcatcatgaccctctgtgttccttttggcaaatgacttgcttccattgtttgttcaattgtctgtttgttaaataaataaaaccctttttatgtatctttaaaattacattggttctattattttatgattacaaacgatgctgcagtcatcattcttgtacacttctcattggtcactggtgtatttctatagggtggggcctggagagtagttgttccagcatagtgttacat

SEQ ID NO: 3688 - protein, 84 aa, Homo sapien
HTDHFRNTWLQPLPRPEVSFLTEYLRKLKACEGGGVEIAAASFPRIYLMGMCSRQDRIQKDIDVVIQKSRAEDCLFAGPAWQDD

SEQ ID NO: 3689 - DNA, 9618 bp, Homo sapien; identical to SEQ ID NO: 1745

SEQ ID NO: 3690 - protein, 2817 aa, Homo sapien
MKLNPQQAPLYGDCVVTVLLAEEDKAEDDVVFYLVFLGSTLRHCTSTRKVSSDTLETIAPGHDCCETVKVQLCASKEGLPVFVVAEEDFHFVQDEAYDAAQFLATSAGNQQALNFTRFLDQSGPPSGDVNSLDKKLVLAFRHLKLPTEWNVLGTDQSLHDAGPRETLMHFAVRLGLLRLTWFLLQKPGGRGALSIHNQEGATPVSLALERGYHKLHQLLTEENAGEPDSWSSLSYEIPYGDCSVRHHRELDIYTLTSESDSHHEHPFPGDGCTGPIFKLMNIQQQLMKTNLKQMDSLMPLMMTAQDPSSAPETDGQFLPCAPEPTDPQRLSSSEETESTQCCPGSPVAQTESPCDLSSIVEEENTDRSCRKKNKGVERKGEEVEPAPIVDSGTVSDQDSCLQSLPDCGVKGTEGLSSCGNRNEETGTKSSGMPTDQESLSSGDAVLQRDLVMEPGTAQYSSGGELGGISTTNVSTPDTAGEMEHGLMNPDATVWKNVLQGGESTKERFENSNIGTAGASDVHVTSKPVDKISVPNCAPAASSLDGNKPAESSLAFSNEETSTEKTAETETSRSREESADAPVDQNSVVIPAAAKDKISDGLEPYTLLAAGIGEAMSPSDLALLGLEEDVMPHQNSETNSSHAQSQKGKSSPICSTTGDDKLCADSACQQNTVTSSGDLVAKLCDNIVSESESTTARQPSSQDPPDASHCEDPQAHTVTSDPVRDTQERADFCPFKVVDNKGQRKDVKLDKPLTNMLEVVSHPHPVVPKMEKELVPDQAVISDSTFSLANSPGSESVTKDDALSFVPSQKEKGTATPELHTATDYRDGPDGNSNEPDTRPLEDRAVGLSTSSTAAELQHGMGNTSLTGLGGEHEGPAPPAIPEALNIKGNTDSSLQSVGKATLALDSVLTEEGKLLVVSESSAAQEQDKDKAVTCSSIKENALSSGTLQEEQRTPPPGQDTQQFHEKSISADCAKDKALQLSNSPGASSAFLKAETEHNKEVAPQVSLLTQGGAAQSLVPPGASLATESRQEALGAEHNSSALLPCLLPDGSDGSDALNCSQPSPLDVGVKNTQSQGKTSACEVSGDVTVDVTGVNALQGMAEPRRENISHNTQDILIPNVLLSQEKNAVLGLPVALQDKAVTDPQGVGTPEMIPLDWEKGKLEGADHSCTMGDAEEAQIDDEAHPVLLQPVAKELPTDMELSAHDDGAPAGVREVMRAPPSGRERSTPSLPCMVSAQDAPLPKGADLIEEAASRIVDAVIEQVKAAGALLTEGEACHMSLSSPELGPLTKGLESAFTEKVSTFPPGESLPMGSTPEEATGSLAGCFAGREEPEKIILPVQGPEPAAEMPDVKAEDEVDFRASSISEEVAVGSIAATLKMKQGPMTQAINRENWCTIEPCPDAASLLASKQSPECENFLDVGLGRECTSKQGVLKRESGSDSDLFHSPSDDMDSIIFPKPEEEHLACDITGSSSSTDDTASLDRHSSHGSDVSLSQILKPNRSRDRQSLDGFYSHGMGAEGRESESEPADPGDVEEEEMDSITEVPANCSVLRSSMRSLSPFRRHSWGPGKNAASDAEMNHRSMSWCPSGVQYSAGLSADFNYRSFSLEGLTGGAGVGNKPSSSLEVSSANAEELRHPFSGEERVDSLVSLSEEDLESDQREHRMFDQQICHRSKQQGFNYCTSAISSPLTKSISLMTISHPGLDNSRPFHSTFHNTSANLTESITEENYNFLPHSPSKKDSEWKSGTKVSRTFSYIKNKMSSSKKSKEKEKEKDKIKEKEKDSKDKEKDKKTVNGHTFSSIPVVGPISCSQCMKPFTNKDAYTCANCSAFVHKGCRESLASCAKVKMKQPKGSLQAHDTSSLPTVIMRNKPSQPKERPRSAVLLVDETATTPIFANRRSQQSVSLSKSVSIQNITGVGNDENMSNTWKFLSHSTDSLNKISKVNESTESLTDEGVGTDMNEGQLLGDFEIESKQLEAESWSRIIDSKFLKQQKKDVVKRQEVIYELMQTEFHHVRTLKIMSGVYSQGMMADLLFEQQMVEKLFPCLDELISIHSQFFQRILERKKESLVDKSEKNFLIKRIGDVLVNQFSGENAERLKKTYGKFCGQHNQSVNYFKDLYAKDKRFQAFVKKKMSSSVVRRLGIPECILLVTQRITKYPVLFQRILQCTKDNEVEQEDLAQSLSLVKDVIGAVDSKVASYEKKVRLNEIYTKTDSKSIMRMKSGQMFAKEDLKRKKLVRDGSVFLKNAAGRLKEVQAVLLTDILVFLQEKDQKYIFASLDQKSTVISLKKLIVREVAHEEKGLFLISMGMTDPEMVEVHASSKEERNSWIQIIQDTINTLNRDEDEGIPSENEEEKKMLDTRARELKEQLHQKDQKILLLLEEKEMIFRDMAECSTPLPEDCSPTHSPRVLFRSNTEEALKGGPLMKSAINEVEILQGLVSGNLGGTLGPTVSSPIEQDVVSPVSLPRRAETFGGFDSHQMNASKGGEKEEGDDGQDLRRTESDSGLKKGGNANLVFMLKRNSEQVVQSVVHLYELLSALQGVVLQQDSYIEDQKLVLSERALTRSLSRPSSLIEQEKQRSLEKQRQDLANLQKQQAQYLEEKRRREREWEARERELREREALLAQREEEVQQGQQDLEKEREELQQKKGTYQYDLERLRAAQKQLEREQEQLRREAERLSQRQTERDLCQVSHPHTKLMRIPSFFPSPEEPPSPSAPSIAKSGSLDSELSVSPKRNSISRTHKDKGPFHILSSTSQTNKGPEGQSQAPASTSASTRLFGLTKPKEKKEKKKKNKTSRSQPGDGPASEVSAEGEEIFC

SEQ ID NO: 3691 - DNA, 2967 bp, Homo sapien
cccagccagccctgcaccccagagctccctgcagggcctagagcccttcaagaggagagtctggggatggaggcccaggtggagagggccatggaagggaactcttcagaccaggagcagtccccagaggatgaggatgaaggcccagctgaggaggttccaacccagatgccagagcagaaccccacacatgcactgccagagtcccctcgcctgaccctgcagcccaagccagtcgtgggccacttctcagcacgggaactggatggggaccgttctaagcagttggccctaaaggtgctgtgcgttgcccagcggcagtactccctgctccaagcagccaacctcctgacgcccgacatgatcacagagtttgagaccctacagcagctggtgcaagaggaaaaaattgagcctggggcagaggccttgaggacttcaggcctggccaggggggcacctctggctcaggagctgtgttcagagtcaatccctgtgccgtctcctctctgcccagagcctccaggatacactggccctgtgacccggactatggcgaggcgactgagtggccccctgcacaccctgggaatcccgcctggacccaactgcaccccagcccaggggtcccgatggcccatggagaagaagaggaggagaccaagcgccttggaggcagacagtcccatggccccaaagcggggcaccaagcgccagcgccagtccttcctgccctgcctaaggagagggtctctgcctgacacccaaccttcacaggggcccagcacccccaaaggagaaagggcctcctccccctgccattcccctcgcgtttgcccagccacagtcatcaaaagccgggtgcccctgggcccttccgccatgcagaactgctccaccccgctggctctgcccactcgagacctcaatgccacctttgatctctctgaggagcctccctcaaagcccagtttccatgaatgcattggctgggacaaaataccccaggagctgagcaggctggaccagcccttcatccccagggcacctgtgcccctgttcaccatgaagggccccaagccaacatcttccctccctgggacctctgcctgcaagaagaagcgcgttgcgagttcctcagtctcccatggccgcagccgcatcgcccgcctccccagcagcactttgaagaggccagctgggccccttgtactcccaggtgactggcactagggacagggatagcctgggccatggaggccgatgaagacaagaaggaggaggggacggggagctgagacccagaagaaaggagggcctagggtattgccaagcatctcagggatgctgctgatgagacaggtgggaggtgggctggaggacggggacagagcgtcactttccttcctcgctgcactccccgccacccatccaactggcctgcagagctgcccttgagtcccctgtgccctagcaaccggaggaatggaaaggacctcatcagggtggggagagcactctcagcagggaacggcgtcaccaaggtgtcctgaccgccagaatgtcctgaccaccaaggtgtcctaacctaccggcccctctgctggatacccctcttggacctgtagccacctgcaccaggagctggacctgccttccttacctgggagcaattagtgccaacacacctttgctgtattaacatccctccccagacatccatcctgctactcaccctctgttaatctcctgttacactcagcttcttggcatgtacatattcatttgtgagtgttaatgtgctgctgttttttgttttttggtggtttttgttttttgttttttttgttttgagatggagtcttactctgtcgcccaggctggagtgcagtggtacgatcttggctcactgcaacctccgcctcctgggttcaagtaattctcctgcctcagctttccaagtagctgggattacaggcacccatcaccacacccagctaattttcgtctttttaatagagagggggtttttccatgttggccaggctggtcttgaactcctgacctcaggtgatccgcctgcctcagcttcccaaagtgctgagattacaggcatgagctaccacgcctggcccgtgttgctgttttaaaggtgctgccatgttcccccatcttttttttttttgagatggagtctcgctctgtcgcccaggctggagtgcagtggtggcgatcttggctcactgcaagctccgcctcccaggttcacaccattctcctgcctcagcctcccaagtagctgggactacaggcgcccaccaccacgcccggctaattttttgtatttttagtagagatggggtttcaccgtgttagccaggctggtctcgatctgacctcatgatccacccgcctcggcctcccaaagtgctgggattacaggcgtgagccactgcgcccggcctcccctctcatttatgatgccctctgtgcaggcagacggctcttgggctcttttccccacctgtctctaacacaggccccacggtgatggccacaggcagtagaggaggaatgaggatgggttggggagcggggagtcgcggcttggctcttcctggtttctgagagggacatcttcatccctactccccttggtccccaaccacagtcctggtgaagatgtggatgataatggtgccttgatttccaaatgaagacagctttattgcttaactctattgtacataggatacacgttcagtgtaaaataaagtgtaaaggggaattcaggcttaatgctgcacctagatataaatgctaatgatacttgggtttatagccttctgatcctttatttctgcatatatatatagatatatacatatatttttggtataacaataaaccgtctccatcaaaaaaaaaaaaaaaaaaaaaaaaaaaaaaaaaaaaaaaaaaaaaaaa

SEQ ID NO: 3692 - protein, 410 aa, Homo sapien
PSQPCTPELPAGPRALQEESLGMEAQVERAMEGNSSDQEQSPEDEDEGPAEEVPTQMPEQNPTHALPESPRLTLQPKPVVGHFSARELDGDRSKQLALKVLCVAQRQYSLLQAANLLTPDMITEFETLQQLVQEEKIEPGAEALRTSGLARGAPLAQELCSESIPVPSPLCPEPPGYTGPVTRTMARRLSGPLHTLGIPPGPNCTPAQGSRWPMEKKRRRPSALEADSPMAPKRGTKRQRQSFLPCLRRGSLPDTQPSQGPSTPKGERASSPCHSPRVCPATVIKSRVPLGPSAMQNCSTPLALPTRDLNATFDLSEEPPSKPSFHECIGWDKIPQELSRLDQPFIPRAPVPLFTMKGPKPTSSLPGTSACKKKRVASSSVSHGRSRIARLPSSTLKRPAGPLVLPGDWH

SEQ ID NO: 3693 - DNA, 2794 bp, Homo sapien; identical to SEQ ID NO: 3241

SEQ ID NO: 3694 - protein, 422 aa, Homo sapien; identical to SEQ ID NO: 3242

SEQ ID NO: 3695 - DNA, 4520 bp, Homo sapien
atctttgaagaggcactagcatcagacctcaaggcttttgtcccaccaaagatagtgggggagtttttgaacccttgtgggagcctggtccaggtgaattgtgttcctccccattggaatgcaaaaataggctgactcattggagctagcctgaagcagaaaaaggcaccttttaagtccaaacaggaaaaccaggcagcatgagcaggaatgtggctcgtcattgtatacgggttcaaaaactcccccactatctttgaagaggcactagcatcagacctcaaggcttttgtcccaccaaatgacaagtgtgtattgttacaatacattggtgatcttttgtttgcggcacctaccgaggaagattgcttccagggcaccaaagatctccttcgccttctatggaaggcaggttacaagatgtctaaggaaaaagctcaggtctgtgcaaaaagagtaagatatctaggtttcctagtagcccaagggcagcgtgaactcggcagtgggcagaaggaagccatatgtgcgctccccactcctgtcacccggcgacaagtaagggagtttttaggggcagcaggcttttgctgtacttcaatgccaaacttttcactcacggcaaagccattgtatgaagccacaaagtgggggagaaaaagagcccctcctctggggtaatgagcagaagaaggcctttaatgagatcaaaaaggccttaagccaagctcgagccctgggattgccagacctgactaagcctttctttttctatgtccatgaaagaaaaggaatgactacaggagtttcagttcaaacagtaggatcatggtattgaccagtagcctatttatcaaagcggttagaccttgtggccctgggtggcccccctgcttaaaagcattagctgccactgccatgctggcagaaaatgctggaagctgacactaggacaaaagctaataatacgggtgccacacacagtgatcaccttaatggagcaaagaggatatatcactggctatctaatccaagaatgttaagatatcaggggctcttatgtggaaatccatacgtaactttaaaaaccgcgaataccctcaacccggctaccctgttgcctgtagaaatgccgaagttgcaagaccggtttccccaacgctattgcgtagacgtagtagatgaggtgttctcaagccggaaagacttaagagaccaaccctttaaggacccagacgctgaatatttcacagagggaagcaggtttgtatcagaaggggtctgcagagccgggtatgcagggtgactctaaattcagtagccaaggcacaggccctccctaccaggacctcagcacaaaaagcagaatagctctaaatagagcactactagtagccaaaggaaggacagttaacatctatactgattcaaagtatgcttttgctacattacatgcccatggagccatttacaaagaaaggggactcttaactgctggagggaaagaaattaaagaagaaatcttacaactcttagaagctgtgtgggccccagacaaggtggccgttattcactgtaaaggacatcagacaagaggcggcatagaagcaaaaggaaataggaaggcagacagagaagccagacaagcagctatgtccaactcaagtactaaaaagaaaaccccaaccctgctgcttctactagaaccttccttacctgaaaccccaagctactctcccaatgaaaaagcttggtttgaacaagagagcggaagttacatacaaggaggcaggtggaagttctcagatgggaggctagctattccggaagcaatagccccccaatttatgaagcagtttcatcagggaacacacatgggaaagactgcattagaaactcttgtaggatggcatttctatgtgccatgccttactgccatcactcgagccgtttgtgagcaatgtttaacctgcgcccagaacaatccatggcaagtgccaactcagcccccagggattcaagagaccggagctacaccctgtgaaaacttgcttgtggactttaccgaactgccccgagcacggggttatcagtacatgctagtgtttgtttgcactttctcagggtgggtcgaggcattccctaccaggatagagaaagcccaagaagtaaccagactgttgctaaaagacattattcctaggtttggactgcctctaactttaggatcagataatggcccagcattcatggctgaagtagttcagcagctgtcgcagctgctaaagataaagtggaaactgcacatagtctaccacccacagagctcaggaaaggtacaatggatgaaccagacactaaaacatctgctgaagttttgtcaagaacctcatcttaggtgggatcaggtcttgcccatggcctttctccaagtcaggtgtacccttaccaaattgactgggctttcaccctgtgaaattgtgttcggccgaccacccccgattataaatcaggtaaaaggtgatctgtgggaactaggggaactaactttaaaaaggcaaatgcaagctttaggattagctatgcaaaagattcatggctgggtacgagaaaaattgcctataagcctaacagacccagttcacccctttacacctggggacttggtttgggttaagaaatggaacccaaccacactagggcccatatgggatgggcccacactgtaatcttgtctactcccactgctgttaaagttgcaggtatcacaccttggattcatcacagtcgactgaagctggctgcgcaggaccagtgaaccagtcaacaagactcagaccatccaacatgactaatcctgtggcaaaaccacgacaccactgagaaagtcaaccaccctgctgtgatcactctggaggctggtcagtctacgcacaactgaagcttgagaagtcaaaccctgctgtagtcacacactggaagctgactagtctacgcatggccaaagcttgaggagtcttcactagataagtaaatgtggatagaacttataagcctagtagtgatcttagtaatactgattatcttattattatgttactgtttttgttcaggaaaaggcctatattggatctgtggagcacaggcatatcagcaactgccagctaaatggacaagagcatgtgtattaggaacaatcaagccatccttctttctaattcctctaaagcaaggggaactcttaggataaccagtctataatgagaataaaagaactaaaaggagcatgatctcaaaaataaatataaatatcaaaaaagacatagacataggagactagaaaaataatcaatggcctcctgaaaaaatcattaaatagtatgggccagctacctaggcacaaaataggtaatggggataccacaccccaatttatatgctcaactgtatcataaggttacaggctgttcttgaaataataacctatgaaacatcaagagctttttgatgaacctatgaacatcaagatttactagctgtacaagctacacagataaggaatgccatatatcaaaacaggctggcactagattacctcctagcctcagaaggaggagtatgtgggaagtttaatctaacaaactgctgtttagacgtagacaataggcgagctgtcatgggaattactgccaggatgtggaagttagcccaagttccagttcaaacctggtcaggttggtctccagattctctctttgaaggatggttttcaacctttagtgggttcaaaaccttaataggtgggttcctgcttatcacaggtgcctgcctaattcttccttgtctcctacctcttctcatcagaagtgttcagtcaactatagaggcagttgtggccaaatacactactactcaaataatggcattgactaagtattgccccaagaataatatgtaccgactcaagaaaaaataaacaactgtggtgctattaaccaacatttatatagagcaccaaaggggggaatgaagtggaaaattaaaataggataatagcataagtaataatagtaaaattatagtaacagaaataatagctcatagaatgaattgctgtaccaaccaaggctaaaaagaatttaagtagcccccctgaagttagagttaaagaaggatattaactgccagtcccaagaaacattaaccatatctgcccttcaggtattttgtaggctctgtaagctcgtgttttcttccctccttgtacagctgcaaggtcacaagacagataagcataagctgcatactaagttttcccagagatgtaagacatgttgcaaaagtgtcacaagataattaatggactttgttcttgcttctgtaagcctgcttcctgcttcacgtaattcctgcctcaaaatgcttaaaagacattcgttttctttgatctatgcttagattttctggatgcaattccactgagccgatgtacacctaaaaataaaaactttcctgcatcc

SEQ ID NO: 3696 - protein, 505 aa, Homo sapien
ETNPLRTQTLNISQREAGLYQKGSAEPGMQGDSKFSSQGTGPPYQDLSTKSRIALNRALLVAKGRTVNIYTDSKYAFATLHAHGAIYKERGLLTAGGKEIKEEILQLLEAVWAPDKVAVIHCKGHQTRGGIEAKGNRKADREARQAAMSNSSTKKKTPTLLLLLEPSLPETPSYSPNEKAWFEQESGSYIQGGRWKFSDGRLAIPEAIAPQFMKQFHQGTHMGKTALETLVGWHFYVPCLTAITRAVCEQCLTCAQNNPWQVPTQPPGIQETGATPCENLLVDFTELPRARGYQYMLVFVCTFSGWVEAFPTRIEKAQEVTRLLLKDIIPRFGLPLTLGSDNGPAFMAEVVQQLSQLLKIKWKLHIVYHPQSSGKVQWMNQTLKHLLKFCQEPHLRWDQVLPMAFLQVRCTLTKLTGLSPCEIVFGRPPPIINQVKGDLWELGELTLKRQMQALGLAMQKIHGWVREKLPISLTDPVHPFTPGDLVWVKKWNPTTLGPIWDGPTL

SEQ ID NO: 3697 - DNA, 3474 bp, Homo sapien
  Unsure 541: Unknown base
gatcattctagctatcccagaagccttttggaaaaagccccacatgtcttctttctttggtgttcaagctgaccttcctacctctttgccattgataattaggggcagaattaagtattgtaagttgttattctaagtttaaatagcttcctgtggtttttagaacaagcaggatatctttggagatgcaaaaagctcttgaattggatctgtctttgtgagatccttatgaacaatataacctgataacttgagaatcagaaaaacactgcatcttctggataagttaaccattgttagttttctgtagctactgatgttcatttgtactatatgttgcctttcagaatgtggtaattgtaatctttaacattttcatgtaaaacatatttcctgatcatctttccattgtcttcatggaaaattgataaatatttgtgccttccaactctcgtcttggttgaatgacttcatcttaatacaagcattttgatttcctttctttttacagcatggacaccacgttgctgaaaacatgctntgggactgccactgaatttatcttttgcggttttatgacaaagttattagtagtttcccttttttgaattagtattttcgaagttaatatcacaatgagttcaggcttatggagccaagaaaaagtcacttcaccctactgggaagagcggattttttacttgcttcttcaagaatgcagcgttacagacaaacaaacacaaaagctccttaaagtaccgaagggaagtataggacagtatattcaagatcgttctgtggggcattcaaggattccttctgcaaaaggcaagaaaaatcagatcggattacaacattctagagcaagctcatgcagttctcttggtgatgacaaggatgtcgtagagataaatgaaaagttcacagagttacttttggcaattaccaattgtgaggagaggtcagcctgtttaaaaacagaaacagactaagtaaaggcctccaaatagacgtgggctgtcctgtgaaagtacagctgagatctggggaagaaaaatttcctggagttgtacgcttcagaggacccctgttagcagagaggacagtctccggaatattctttggagttgaattgctggaagaaggtcgtggtcaaggtttcactgacggggtgtaccaagggaaacagctttttcagtgtgatgaagattgtggcgtgtttgttgcattggacaagctagaactcatagaagatgatgacactgcattggaaagtgattacgcaggtcctggggacacaatgcaggtcgaacttcctcctttggaaataaactccagagtttctttgaaggttggagaaacaatagaatctggaacagttatattctgtgatgttttgccaggaaaagaaagcttaggatattttgttggtgtggacatggataaccctattggcaactgggatggaagatttgatggagtgcagctttgtagttttgcgtgtgttgaaagtacaattctattgcacatcaatgatatcatcccagagagtgtgacgcaggaaaggaggcctcccaaacttgcctttatgtcaagaggtgttggggacaaaggttcatccagtcataataaaccaaaggctacaggatctacctcagaccctggaaatagaaacagatctgaattattttataccttaaatgggtcttctgttgactcacaaccacaatccaaatcaaaaaatacatggtacattgatgaagttgcagaagaccctgcaaaatctcttacagagatatctacagactttgaccgttcttcaccaccactccagcctcctcctgtgaactcactgaccaccgagaacagattccactctttaccattcagtctcaccaagatgcccaataccaatggaagtattggccacagtccactttctctgtcagcccagtctgtaatggaagagctaaacactgcacccgtccaagagagtccacccttggccatgcctcctgggaactcacatggtctagaagtgggctcattggctgaagttaaggagaaccctcctttctatggggtaatccgttggatcggtcagccaccaggactgaatgaagtgctcgctggactggaactggaagatgagtgtgcaggctgtacggatggaaccttcagaggcactcggtatttcacctgtgccctgaagaaggcgctgtttgtgaaactgaagagctgcaggcctgactctaggtttgcatcattgcagccggtttccaatcagattgagcgctgtaactctttagcatttggaggctacttaagtgaagtagtagaagaaaatactccaccaaaaatggaaaaagaaggcttggagataatgattgggaagaagaaaggcatccagggtcattacaattcttgttacttagactcaaccttattctgcttatttgcttttagttctgttctggacactgtgttacttagacccaaagaaaagaacgatgtagaatattatagtgaaacccaagagctactgaggacagaaattgttaatcctctgagaatatatggatatgtgtgtgccacaaaaattatgaaactgaggaaaatacttgaaaaggtggaggctgcatcaggatttacctctgaagaaaaaggtgaccatcttaacttatatgcgttaaaaataactgaagagcatattcacatgtcaaagtattagctgaaatgtgtgtctgtgtagttggggggttttcttttaaattagaaatttctttttatgtgatatatggttagctcctctttttgtaaattcttcctctcttctaaaagtgattgatgatgtggaataatgaactcctttaagaagctggctggttctagtatattaaatgcttaaataaaaagtcctttcctttccacctagcaatgatattctcagttgtttctctcttgtggtgcagagttgcattgggttttctacattttcccactgagtcttccctgttgtaaaagggagttagaaagctgctaactaggattaagtttatagtcagggaacagtgttataatctcttcctagctaatgggcttactcaaagattcaccacctgactttgaatttgtcagcagcatactgtaaacagctgtaatgttcagaggcttgcaggaaaaaacagagcatacttcagattgtactccatttaccttaacccctccaaaggaaataacagctatttcattatgtgcaatgtgttacaccctttcaaatgtaataaactcacaacaaaattgaaacataatacttgattataacttattaaatgtcttttatgtttttcctttgtcaggaaaacttgaaaactgtgcttttaattgaaataatattggatgaatgaaactgaattcagtattaaaatttgactgttagaaatgaaaaataaaatgatttaaaaatttaaaaaa

SEQ ID NO: 3698 - protein, 698 aa, Homo sapien
  Unsure 541: Unknown amino acid
MSSGLWSQEKVTSPYWEERIFYLLLQECSVTDKQTQKLLKVPKGSIGQYIQDRSVGHSRIPSAKGKKNQIGLQHSRASSCSSLGDDKDVVEINEKFTELLLAITNCEGEVSLFKNRNRLSKGLQIDVGCPVKVQLRSGEEKFPGVVRFRGPLLAERTVSGIFFGVELLEEGRGQGFTDGVYQGKQLFQCDEDCGVFVALDKLELIEDDDTALESDYAGPGDTMQVELPPLEINSRVSLKVGETIESGTVIFCDVLPGKESLGYFVGVDMDNPIGNWDGRFDGVQLCSFACVESTILLHINDIIPESVTQERRPPKLAFMSRGVGDKGSSSHNKPKATGSTSDPGNRNRSELFYTLNGSSVDSQPQSKSKNTWYIDEVAEDPAKSLTEISTDFDRSSPPLQPPPVNSLTTENRFHSLPFSLTKMPNTNGSIGHSPLSLSAQSVMEELNTAPVQESPPLAMPPGNSHGLEVGSLAEVKENPPFYGVIRWIGQPPGLNEVLAGLELEDECAGCTDGTFRGTRYFTCALKKALFVKLKSCRPDSRFASLQPVSNQIERCNSLAFGGYLSEVVEENTPPKMEKEGLEIMIGKKKGIQGHYNSCYLDSTLFCLFAFSSVLDTVLLRPKEKNDVEYYSETQELLRTEIVNPLRIYGYVCATKIMKLRKILEKVEAASGFTSEEKGDHLNLYALKITEEHIHMSKY

SEQ ID NO: 3699 - DNA, 3907 bp, Homo sapien
  Unsure 266-400, 2897-3191: Unknown base
ggggaccctcgggaagccgctgcagccccggatctgctctgtctccttcctcctgtgctgcaggagggggtcagctgctcttcctgaacctgtttgcacctctacagtcttgagagagatcttttaaaaatcaaaatagaacagaacttcaaaggaataatcctagaaagttgtgattatttcaaagatgttgctttcactgttcaaaatattttatttttaaacttgttttaaaaaatattcttttcagggctgagcacagtgannnnnnnnnnnnnnnnnnnnnnnnnnnnnnnnnnnnnnnnnnnnnnnnnnnnnnnnnnnnnnnnnnnnnnnnnnnnnnnnnnnnnnnnnnnnnnnnnnnnnnnnnnnnnnnnnnnnnnnnnnnnnnnnnnnnnnntggattgttgaattcaatgcttgggtcacctccagattcattttcacagtctttcatgttttggtcatatgacattgtattttgctgccatatgactgatctttttttgttaaatgtgagatacttgttaaaaaatgtttagcaatgaattgaggcctagtagcatgttatcttgctgcagaagagatgggagtctacttctgggggatggtcaggggtcctccatacaggctgcaattgaagtcgtcggtgcaggctcagtccctacaaaggccagggtatttcctgtccacctttattctgatgcatgactcttctgggtctcaaccagagccagtggacttcagtatgggtcgctttcattggcagaccctcaatccacttgttttccatctaatcccacgcatgtgtgcaaaagctgctgtgcttctttgcatctcagtagttccttctggaattcagcaatgaaactcagggaaatgggttccaaatgcgaggctgactttcgtcctgggtttccttcttctccatcttcacctcatgtctgtttactgccatgttagcaatttgatgtattcaatcatgggttttatattctgtttggtgtcccccattgttctcatcggagatcagaagcttcagatgcacttatgtcaactcaagagtagaatgcttccttagcttccctccagagtcaggttttgtgtttctagttcccaagtgcacagcaggagtagtgatgtcctcactggcttctcatttgcattaagctgtgagcttctttagcgtggggacaggaccctgctcccattgcattctcagcaccacaccacacactccttgtttgaggccactccagacagcatgtgctgaaggatgccttgtggtcagaaacaagttcattaactttctctttgaagtgttttcgcccctgtttcctagcgttctgggaattttacacatccttcctataaaaccaagtatcaggtgagatccttaggatcaggaccatgaatcaagtggagtgagggcaacacagcaaacttaccctttttaggccgtttcctttttctgccctcaatctctgtgaactgaaccttgttaaagtcagtcaacaccagggtggatggtttgccgttgtcacctattttcaggacataacaccctgacttaggagccattccgatcatttctaattcaatagatgcgcccagcattcagattgccttttctctcaaccaggatctttaaagtcgatgacaagagttccagtcctgaatcatggcaaagtgcagtagtgaactgcggggttattctggaaggatctctctatggctgatggtctcagttccggcatcagcctctgactgagaatcaggtctcacacaggaggagtcagatgaggagcaatcctctgcttccgatggagttagttgtgatgaattggtgaggtctggtttttcacactgaactaaaatgagctttcgctgtgtcaagcacaagactgaccccagagacacacatagtgcacctcatagaagcttttaatagtctttatatttactaaagaataggactaactatggaactatgaagatgagctggaaatgacaggtgacttgccagcaggccagagtgtgacttttttttgtccctcaatgggaggtgtcaattctcccttcggttgtgagaatcagttggttcatttgtgggaaggttgcaggggggatctttgaatcacagccttcagatgccagaagggcagagggaatcccacacgggctggtggatcatgtgtgtgcatttctctcccttctaatctgaggaaactaagcgtgaaagaatgtgagcatgcagaaaaggagaggcaggtatcagaggcagaggaaaatgggaaattggatatgaaagaaatacacacctacaagtgagttcagaaactgaaccccaccctcctgggaaacgcccattggagtgttgtttttaacctttgtacagtatttagacccagtaaatgcagaaatagaaacaaacggtcagaagacatatcgtgagagagagcgagagagagttcacaaaacagaaaacaaagtaccttaatatttaccagtgaccaaaagatgtgaagtagcaaaacgtctcctgaccccattgccagctagactgtgtggaaactcggttcataccagccattctaggggtggggtgagttgttgtcatccttaggaaagtgtgttgttgtaggatcaaccacatccttcaaaaggactatgcctgtttataagcccagctgtttctgccctgtgaaacacggtaaggatattaatacaaagagaatacagctttatgataaaagatgctcaatgaaggatgaattagggatgtactgagaatggggaaggaaactatcatctcagaagtcagcaggcagtaagcaagaggaggaatcaatacagcaacagtttggatcagactgtacagtttttttgtttttgtnnnnnnnnnnnnnnnnnnnnnnnnnnnnnnnnnnnnnnnnnnnnnnnnnnnnnnnnnnnnnnnnnnnnnnnnnnnnnnnnnnnnnnnnnnnnnnnnnnnnnnnnnnnnnnnnnnnnnnnnnnnnnnnnnnnnnnnnnnnnnnnnnnnnnnnnnnnnnnnnnnnnnnnnnnnnnnnnnnnnnnnnnnnnnnnnnnnnnnnnnnnnnnnnnnnnnnnnnnnnnnnnnnnnnnnnnnnnnnnnnnnnnnnnnnnnnnnnnnnnnnnnnnnnnnnnnnnnnnnnnnnnnnnnnnnnnnngactgtactcttctagccatctgaaatacgttttctaggtagagatagattgtgtaagggtacagttgtgaggataacagaaacatggcagattatttaaaatcatcctgaaagtggtgctttatctgatgaaagtgattgtaatccataggaaaatgtttcaacgtgcgcaagagttgcggcggcgagcagaggactaccacaaatgcaaaatccccccttctgcaagaaaggctctttgcaactgggtcagaatggcggcagcggagcatcgtcattcttcaggattgccctactggccctacctcacagctgaaactttaaaaaacaggatgggccaccagccacctcctccaactcaacaacattctataactgataactccctgagcctcaagacacctcccgagtgtctgctcactccccttccaccctcagcggatgataatctcaagacacctcccgagtgtgtgctcactccccttccaccctcagcggatgataatctcaagacacctcccgagtgtgtgctcactccccttccaccctcagcggatgataatctcaagacacctcctgagtgtctgctcactccccttccaacctcagcggatgataatctcaagacacctcccgagtgtctgctcactccccttccaccctcagctctaccctcagcggatgataatctcaagaaactaaggaagaataaataa

SEQ ID NO: 3700 - protein, 195 aa, Homo sapien
  Unsure 266-400, 2897-3191: Unknown amino acid
MKVIVIHRKMFQRAQELRRRAEDYHKCKIPPSARKALCNWVRMAAAEHRHSSGLPYWPYLTAETLKNRMGHQPPPPTQQHSITDNSLSLKTPPECLLTPLPPSADDNLKTPPECVLTPLPPSADDNLKTPPECVLTPLPPSADDNLKTPPECLLTPLPTSADDNLKTPPECLLTPLPPSALPSADDNLKKLRKNK

SEQ ID NO: 3701 - DNA, 1236 bp, Homo sapien
ataatcttcattcctgggttctccacttcaatagtcgtggcagtgctgctgaatttgcagtttttcacatcatgaccaggattctggaagctacaaacagtttgtttttacctctgcctcctggttttcatactctgcacaccatcctcggggtccagtgtctccctttgcataacctgctgcattgcattgacagtggagtgttgcttctcactgaaacagctgtcataaggctcatgaaagatctggataatacagagaaaaatgaaaaactgaaattcagtatcattgtgcggcttcctccgcttattgggcagaagatttgtagactttgggatcatcctatgagttctaacatcatttcgcggaaccacgtgacgcgactgcttcagaactataagaaacagcctcggaattctatgattaacaagtcatcgttcagtgtagaatttctgcctctgaactacttcattgaaattctgacagatatagagtcctccaatcaagccctgtatccttttgaaggacatgacaatgtggatgcagaatttgtagaggaagcagctctgaaacacaccgcgatgcttttaggcttatgaaaaagaaaacgcaattggatctgctgctgccattttaatcttgctcattaaccttactcctctgagaattctttaacaatatttaaaattggtaacaaaaatagtttagccataattgtttagccatgtgagtttcaggttggtacacgttcagacagaactgctgtatcacattccaattttgaatagccagtgagcaatcaagtgtagagaaatgataaatggcctaagaaggcatacagtggcataaacgatgctcttcctagtagcttaataggcccacaagctagtttctgttgcactctgaaataaaatatgctttaaaaatgtagggaacagtgcttagaaaagcaaaaactaggtgtgtcattgaaataataggcataaaaattaaatgttacataagaacactatttggaaagagggtccttttaaaaactgaatttgtactaaatcagatttgccatgtccagtacagaataatttgtacttagtatttgcagcagggtttgtctttgtgaattcagatgaaacatatttatttttttttatttataaaaggttgatttaggaatattttgtcagtcattaaaaaacctgaaaacataaaaaaaaaaaaaaaaaaaaaaaaaaaaaa

SEQ ID NO: 3702 - DNA, 1853 bp, Homo sapien
ggcacgagggtccctgggccggacggcggtgtcccggcgtggcgggaagccggcactggagcgggagcgcactgggcgcgggaccgggaggcgcagggaccggacggctcccgagtcgcccacctgacgctagaagaagtcttcacttcccaggagagccaaagcgtgtctggccctaggtgggaaaagaactggctgtgacctttgccctgacctggaagggcccagccttgggctgaatggcagcacccacgcccgcccgtccggtgctgacccacctgctggtggctctcttcggcatgggctcctgggctgcggtcaatgggatctgggtggagctacctgtggtggtcaaagagcttccagagggttggagcctcccctcttacgtctctgtgcttgtggctctggggaacctgggtctgctggtggtgaccctctggaggaggctggccccaggaaaggacgagcaggtccccatccgggtggtgcaggtgctgggcatggtgggcacagccctgctggcctctctgtggcaccatgtggccccagtggcaggacagttgcattctgtggccttcttagcactggcctttgtgctggcactggcatgctgtgcctcgaatgtcactttcctgcccttcttgagccacctgccacctcgcttcttacggtcattcttcctgggtcaaggcctgagtgccctgctgccctgcgtgctggccctagtgcagggtgtgggccgcctcgagtgcccgccagcccccatcaacggcacccctggccccccgctcgacttccttgagcgttttcccgccagcaccttcttctgggcactgactgcccttctggtcgcttcagctgctgccttccagggtcttctgctgctgttgccgccaccaccatctgtacccacaggggagttaggatcaggcctccaggtgggagccccaggagcagaggaagaggtggaagagtcctcaccactgcaagagccaccaagccaggcagcaggcaccacccctggtccagaccctaaggcctatcagcttctatcagcccgcagtgcctgcctgctgggcctgttggccgccaccaacgcgctgaccaatggcgtgctgcctgccgtgcagagcttttcctgcttaccctacgggcgtctggcctaccacctggctgtggtgctgggcagtgctgccaatcccctggcctgcttcctggccatgggtgtgctgtgcaggtccttggcagggctgggcggcctctctctgctgggcgtgttctgtgggggctacctgatggcgctggcagtcctgagcccctgcccgcccctggtgggcacctcggcgggggtggtcctcgtggtgctgtcgtgggtgctgtgtcttggcgtgttctcctacgtgaaggtggcagccagctccctgctgcatggcgggggccggccggcattgctggcagccggcgtggccatccaggtgggctctctgctcggcgctgttgctatgttccccccgaccagcatctatcacgtgttccacagcagaaaggactgtgcagacccctgtgactcctgagcctgggcaggtggggaccccgctccccaacacctgtctttccctcaatgctgccaccatgcctgagtgcctgcagcccaggaggcccgcacaccggtacactcgtggacacctacacactccataggagatcctggctttccagggtgggcaagggcaaggagcaggcttggagccagggaccagtgggggctgtagggtaagcccctgagcctgggacctacatgtggtttgcgtaataaaacatttgtatttaaaaaaaaaaaaaaaaaaaaa

SEQ ID NO: 3703 - protein, 445 aa, Homo sapien
MAAPTPARPVLTHLLVALFGMGSWAAVNGIWVELPVVVKELPEGWSLPSYVSVLVALGNLGLLVVTLWRRLAPGKDEQVPIRVVQVLGMVGTALLASLWHHVAPVAGQLHSVAFLALAFVLALACCASNVTFLPFLSHLPPRFLRSFFLGQGLSALLPCVLALVQGVGRLECPPAPINGTPGPPLDFLERFPASTFFWALTALLVASAAAFQGLLLLLPPPPSVPTGELGSGLQVGAPGAEEEVEESSPLQEPPSQAAGTTPGPDPKAYQLLSARSACLLGLLAATNALTNGVLPAVQSFSCLPYGRLAYHLAVVLGSAANPLACFLAMGVLCRSLAGLGGLSLLGVFCGGYLMALAVLSPCPPLVGTSAGVVLVVLSWVLCLGVFSYVKVAASSLLHGGGRPALLAAGVAIQVGSLLGAVAMFPPTSIYHVFHSRKDCADPCDS

SEQ ID NO: 3704 - DNA, 2952 bp, Homo sapien
acaaactactccctgagatcctacaatccgcttcatttctaactgctaatggggccttgtatatggctttcttttgcattttaaggaagatacttggaaaattctactcatggactcctggctttggtgccgctctgccagcatcttatgtggccattctcattgaaagaaaaagcaggagagggctgctcacaatttatatggccaacttggtccttttgttttgcatcacagctgccatgtacatgttctttttcaggtgcaaggatggcttgaaaggatttacattttctgcacttaggttcattgtagggaaggaagaaattcccacacattctttttcaccagaggcagcatatgcaaaagtggaacaaaagagagagcaacatgaggaaaaacccagaagaatgaatatgattggtctagtcaggaaatttgtggattcaatatgcaaacatggaccaaggcatagatgttgcaaacattatgaagataattgcatctcttattgcattaaaggtttcatcagaatgtttagcgtggggtacttgatccagtgctgcctccgaatcccttctgcatttaggcatctgtttacacagccatctcggctactttctctcttctacaataaagaaaacttccagcttggagcttttcttggctcttttgttagtatatacaagggtactagttgcttcctgcgctggatcagaaacttagatgatgaactacatgctattatagctggatttttggcaggtacatcaatgatgttttataaaagcacaacaatttccatgtatttagcgtccaaattggtagagacaatgtatttcaaaggcattgaagcagggaaggttccctattttcctcatgcagatactatcatctattccatctctacagcaatttgcttccaggcagctgtcatggaagttcagactttgagaccatcttactggaagttccttttaagactcaccaagggcaaatttgctgtcatgaaccgaaaagtccttgatgtttttggtactggtgcatctaaacactttcaggatttcatccccaggttggatccaagatacacaactgtaacaccagagttgcccacagagttttcctgaagatgactgtaacttattaatgtgactaaatgtttcatcttgaagagttaattatgttgaacacaaaggagggggcccaagctcgaacttcagtgttatttcagttagagatactcttttcatttgttttgtttttcttatgaatcagaaattcagaagctttttaggaagatgttgcttaataattaagcttcctccatagccagaataagattctggatcactgtagtgactgacattatatattattgatcaaattatgtccacaagcaatattatataatctacgtagaagtgtaataacaaacaagagtacacttaaaattactttaaaagatgtctttagttcattccaatataattcttgattaaaattaggattatttctacattttaggatttacaaaggatcacgggtacatgggtttggtctatatatttttttaaagttttgaattggtatctgtagtagtggaatgttatagatttgaagtaactctccacggacagtgctgctttcgtgtagagcaatttaattggagaagtggccattcttacttcagggatgcaaagatgggtctcataccatttggataaatgtcgtggtatccatgctttttttcaactaataacatcatctctcttcatgaccagttaattgggctatttggcagcccagtgaacctatgtactaatggcaagttaggggcaaatggaaatggacacatccgttaaagttgaaatgtatgttttaatctttcacagaagtattacacttgaatatttaaaaacaaaacttttaaacttcctataggtttatgatgtttgttttcatttatatggacataatccttcatagctcagtttatatgccattgttgtattagaagggatcaaaatcctatggaacaaagtagtcttggcaagttggcagtttgtgtcctctcagctgtttaacttatgtaatggatgttttgcacctgaaaacactataaaaatccagtggttgtttaaaaagtccatttgtcactaattccattcaggttctccaaccttcttcttgaatatcattgtcaccatttatactgttagaataaagaggtgacaccataaagtcctgctgataatgagagtagttcaggacagctgtgattgaaatatggtcgctatttacagtttttcagggaaaagttatacttttctatgttaataaagagctgaagtggtctacagttaatgtgacatgtagggatgatgatatttttaaaatacattttgttgctaaaaagttgttaggccagtgcaaattatgcagtagaacttgtgttgcaaaaggaattataacccatactttaaaaatgcttaatccctcatattcaatttcatcaagccttgtatacttctgcttaaatgtaattcaatccttggttgttatggcaaacagaaacccaacaaaaagacagactctggtactatggtaacagagccactttatcatttggtcaaaatttgacattatgattagctttgtagaactgacctgtttatttggcaatgctgttaaaggatcatttcggtttcagacttcaaagttgattaataaatttaatcttaactttttattcactggaatcaaaacgatggttggtactgtgtttactgtttaaaatgaagtactaaagccctgagaactgcacctcattttctttatccagaaattgtgcttatatattttcctgtcaggtttaaaaagatgttttaattcataaattattgttttcattgacattaaaggactgtgatattgaaaaaaaaaaaaaaaaaa

SEQ ID NO: 3705 - protein, 354 aa, Homo sapien
MAFFCILRKILGKFYSWTPGFGAALPASYVAILIERKSRRGLLTIYMANLVLLFCITAAMYMFFFRCKDGLKGFTFSALRFIVGKEEIPTHSFSPEAAYAKVEQKREQHEEKPRRMNMIGLVRKFVDSICKHGPRHRCCKHYEDNCISYCIKGFIRMFSVGYLIQCCLRIPSAFRHLFTQPSRLLSLFYNKENFQLGAFLGSFVSIYKGTSCFLRWIRNLDDELHAIIAGFLAGTSMMFYKSTTISMYLASKLVETMYFKGIEAGKVPYFPHADTIIYSISTAICFQAAVMEVQTLRPSYWKFLLRLTKGKFAVMNRKVLDVFGTGASKHFQDFIPRLDPRYTTVTPELPTEFS

SEQ ID NO: 3706 - DNA, 2430 bp, Homo sapien
cacacccgcactcctcccgggtttctgctctccgcccgtgtggagtggtgggggcctgggtgggaatgggcgtgtgccagcgcacgcgcgctccctggaaggagaagtctcagctagaacgagcggccctaggttttcggaagggaggatcagggatgtttgcgagcggctggaaccagacggtgccgatagaggaagcgggctccatggctgccctcctgctgctgcccctgctgctgttgctaccgctgctgctgctgaagctacacctctggccgcagttgcgctggcttccggcggacttggcctttgcggtgcgagctctgtgctgcaaaagggctcttcgagctcgcgccctggccgcggctgccgccgacccggaaggtcccgaggggggctgcagcctggcctggcgcctcgcggaactggcccagcagcgcgccgcgcacacctttctcattcacggctcgcggcgctttagctactcagaggcggagcgcgagagtaacagggctgcacgcgccttcctacgtgcgctaggctgggactggggacccgacggcggcgacagcggcgaggggagcgctggagaaggcgagcgggcagcgccgggagccggagatgcagcggccggaagcggcgcggagtttgccggaggggacggtgccgccagaggtggaggagccgccgcccctctgtcacctggagcaactgtggcgctgctcctccccgctggcccagagtttctgtggctctggttcgggctggccaaggccggcctgcgcactgcctttgtgcccaccgccctgcgccggggccccctgctgcactgcctccgcagctgcggcgcgcgcgcgctggtgctggcgccagagtttctggagtccctggagccggacctgcccgccctgagagccatggggctccacctgtgggctgcaggcccaggaacccaccctgctggaattagcgatttgctggctgaagtgtccgctgaagtggatgggccagtgccaggatacctctcttccccccagagcataacagacacgtgcctgtacatcttcacctctggcaccacgggcctccccaaggctgctcggatcagtcatctgaagatcctgcaatgccagggcttctatcagctgtgtggtgtccaccaggaagatgtgatctacctcgccctcccactctaccacatgtccggttccctgctgggcatcgtgggctgcatgggcattggggccacagtggtgctgaaatccaagttctcggctggtcagttctgggaagattgccagcagcacagggtgacggtgttccagtacattggggagctgtgccgataccttgtcaaccagcccccgagcaaggcagaacgtggccataaggtccggctggcagtgggcagcgggctgcgcccagatacctgggagcgttttgtgcggcgcttcgggcccctgcaggtgctggagacatatggactgacagagggcaacgtggccaccatcaactacacaggacagcggggcgctgtggggcgtgcttcctggctttacaagcatatcttccccttctccttgattcgctatgatgtcaccacaggagagccaattcgggacccccaggggcactgtatggccacatctccaggtgagccagggctgctggtggccccggtaagccagcagtccccattcctgggctatgctggcgggccagagctggcccaggggaagttgctaaaggatgtcttccggcctggggatgttttcttcaacactggggacctgctggtctgcgatgaccaaggttttctccgcttccatgatcgtactggagacaccttcaggtggaagggggagaatgtggccacaaccgaggtggcagaggtcttcgaggccctagattttcttcaggaggtgaacgtctatggagtcactgtgccagggcatgaaggcagggctggaatggcagccctagttctgcgtcccccccacgctttggaccttatgcagctctacacccacgtgtctgagaacttgccaccttatgcccggccccgattcctcaggctccaggagtctttggccaccacagagaccttcaaacagcagaaagttcggatggcaaatgagggcttcgaccccagcaccctgtctgacccactgtacgttctggaccaggctgtaggtgcctacctgcccctcacaactgcccggtacagcgccctcctggcaggaaaccttcgaatctgagaacttccacacctgaggcacctgagagaggaactctgtggggtgggggccgttgcaggtgtactgggctgtcagggatcttttctataccagaactgcggtcactattttgtaataaatgtggctggagctgatccagctgtctctgacctacaaaaaaaaaaaaaaaaaa

SEQ ID NO: 3707 - protein, 730 aa, Homo sapien
MGVCQRTRAPWKEKSQLERAALGFRKGGSGMFASGWNQTVPIEEAGSMAALLLLPLLLLLPLLLLKLHLWPQLRWLPADLAFAVRALCCKRALRARALAAAAADPEGPEGGCSLAWRLAELAQQRAAHTFLIHGSRRFSYSEAERESNRAARAFLRALGWDWGPDGGDSGEGSAGEGERAAPGAGDAAAGSGAEFAGGDGAARGGGAAAPLSPGATVALLLPAGPEFLWLWFGLAKAGLRTAFVPTALRRGPLLHCLRSCGARALVLAPEFLESLEPDLPALRAMGLHLWAAGPGTHPAGISDLLAEVSAEVDGPVPGYLSSPQSITDTCLYIFTSGTTGLPKAARISHLKILQCQGFYQLCGVHQEDVIYLALPLYHMSGSLLGIVGCMGIGATVVLKSKFSAGQFWEDCQQHRVTVFQYIGELCRYLVNQPPSKAERGHKVRLAVGSGLRPDTWERFVRRFGPLQVLETYGLTEGNVATINYTGQRGAVGRASWLYKHIFPFSLIRYDVTTGEPIRDPQGHCMATSPGEPGLLVAPVSQQSPFLGYAGGPELAQGKLLKDVFRPGDVFFNTGDLLVCDDQGFLRFHDRTGDTFRWKGENVATTEVAEVFEALDFLQEVNVYGVTVPGHEGRAGMAALVLRPPHALDLMQLYTHVSENLPPYARPRFLRLQESLATTETFKQQKVRMANEGFDPSTLSDPLYVLDQAVGAYLPLTTARYSALLAGNLRI

SEQ ID NO: 3708 - DNA, 2270 bp, Homo sapien
agtgtaagcagtgtgcaaacaaggtgttacagcacatgaaggccgtgcaggcagatcaggagcgggagaggcagcggcggctggaagtagaacgtgaggcagagaagaagcgtgaggctaagcagcgagctaaggaagctcaggagcgggaactgcggaagcgggagaaggcggaagagaaggagcgccggagaaaggagtatgatgccctcaaagcagccaagcgggagcaggagaagaaacctaagaaggaagcaaatcaggccccgaaatctaagtctggctcccgtccccgcaagccaccaccccggaagcacactcgttcctgggctgtgctgaagctgctgctgctgctgctgctatttggtgtggcgggagggctggttgcttgtcgggtgacagagctgcagcagcagcccctctgcaccagcgtgaacaccatctatgacaatgcggtccagggtctacgccgccatgagatcctccagtgggtccttcagaccgactctcagcagtgagcttgttcccagcacctgctgcctcccagccttggagtttggattcctatggaattgggttctgctggacacaacctctttttagcatcagacctacctgccatcatcaaatggctgcagattggtacatgagacctcctctttgtaggacttcttcattccttagtcagggttccctgaaggaatgaggagaaatgggaggtggcgggggggcgtggggggcagttacctgcatgcctaaaggagtaggcttgggggtggggagagagaaaacatagccttttctagttgttatataaagctgtgtaaaggcaaggctcgtttctactaaatggtcagctgtcactacatttatacttttgtatgccacaaaccctttcattcctccctgggaatcagggtagatcaggaggaactgggggggactagaacaccacgctcagtaaatccagtctaaactgggaggtaggggtattcctgttttctttaggacctcagagatgtaagcattttagcagccacacaaaatctctggctatgaaagggacttcatgaccatccagtccaatataacacttgcagacagagaaactgaggtcttccatgacttgcctagtctcccagctagtttgaggcaaaactggattcccactctggtattctttcttccctttacatcattttccctcctttataatgtcctgagagaccagaactcacaccagaatcgattattcctcaggtgaagcatagactctttcatggtagacagatttcacgactcagagatagaaatctcttgctatcatcaggtcacgggcagctcctgtggagtcctgcccaacttatgtggcttccataaaatggcaacagtccaggctccttgcctaattttagagcattaactccctaattgccagtaagcaaggaggtggatctctgcaaacctacactgtctatgacagctctagttgtacttggtgtgactaaatacctcaaaggcaacctgcttctgcaggttttgaagtgtcagcttcataagacactgaggtttagaattgtttgattctagaccataactgaagggcataaatggaaacaggatatgaagggaaacaagtagcatcatggagctgaaaagtggtgcatcacccaatggctagcacaaacaaggatcacactgtccattctcttgtctgctaaattaagcattttcttgcctcctttgcttcatcttttcacaacagctggatagagggatcagaaatgactgtgtcatggtgctcattcactgcaaactcccagttgcaagctccttggctcccccggagggagcaagaatctcatagttcagagacacagagggccttttagccctaatgaccttttggatgggactgcaactcatgactatcctgatattggaagaaaggactttgttaatcttctcccccatagctctgctgcgtaggtctacatcttactcagaatcactacacattcctttagtcttcctccaagctccagagccattggtacaaatgctttattgaaactaaatacataatacacacaatgagatgaagacaatatagaagtccgcatagtcatcataatcccgttccttggccggttgaggcagctcagtggctgagcccagtcaagccaacccgcagcttcactcacgacttcaagatttgatgctaattcttttggatttctacagttattaaataagtgtctgagtggaca

SEQ ID NO: 3709 - protein, 160 aa, Homo sapien
MKAVQADQERERQRRLEVEREAEKKREAKQRAKEAQERELRKREKAEEKERRRKEYDALKAAKREQEKKPKKEANQAPKSKSGSRPRKPPPRKHTRSWAVLKLLLLLLLFGVAGGLVACRVTELQQQPLCTSVNTIYDNAVQGLRRHEILQWVLQTDSQQ

SEQ ID NO: 3710 - DNA, 390 bp, Homo sapien
ctttttttttttttttttttgagacagagtcttgctctgttgctgaggctggagtgcagtggtgtgatcttggctcactgaaatctccgcctccgggttcaagtgattctcctgcctcagcctcccgagtagctgggattacaggcatgcaccatcatactcagctaatttttgtatttttagtagagacaggttcacatatgcagctgtctgactcgactctagtgatcaccactgctcaaaatgctaagattacagctagagcaccacgcgatctttttttttttttttttttttttttttgagacagagtctgctctgttgtcgaggtcggagtgcagtggtgtgatctggctcactgaatctcgctcggttcagtgatctcgctca

SEQ ID NO: 3711 - protein, 100 aa, Homo sapien [sequence omitted]

SEQ ID NO: 3712 - DNA, 1676 bp, Homo sapien
ccgacaacaggaattttctccgagagcgggccgggctcagttcagctgctgtccagacccggatcggcaacagtgccgcctccagacgttctcctgccgctcgcccgcccgtcccagcgcccccagccctcccgcgagggcgccccgggacggaaggatccaccagtctgtcggcgcccgccgttctcgtggtcgccgtcgccgtcgtcgtggtggtagtctccgccgtcgcctgggccatggccaattacatccacgtccctcccggctccccggaggtgcccaagctgaacgtcaccgttcaggatcaggaggagcatcgctgccgggagggggccctgagcctcctgcaacacctgcggcctcactgggacccccaggaggtgaccctgcagctcttcacagatggaatcacaaataaacttattggctgttacgtgggaaacaccatggaggatgtagtcctggtgagaatttatggcaataagactgagttattagtcgatcgagatgaggaagtaaagagttttcgagtgttgcaggctcatggggtgcaccacaactctactgtaccttcaataatggactatgctatgaatttatacaaggagaagcactggatccaaagcatgtctgcaacccagccattttcaggctaatagctcgtcagcttgctaaaatccatgctattcatgcacacaatggctggatccccaaatctaatctttggctaaagatgggaaagtatttctctctcattcccacaggatttgcagatgaagacattaataaaaggttcctaagtgatatcccaagctctcagattctccaggaagagatgacttggatgaaggagattctttccaacctgggctcacctgttgtgctttgccataatgacctattgtgtaagaatataatctacaatgagaaacaaggtgatgtacagttcattgattatgaatattctggatacaactacctggcatatgatattggaaatcatttcaatgaatttgcaggtgtgagtgatgtagactatagtctgtatccagatagagaactacagagtcagtggctgcgtgcttaccttgaagcctacaaagaatttaagggctttgggactgaagttactgaaaaggaggtagaaatactcttcattcaagtcaatcagtttgcattgggtgaaaacttgaattttatcattggcaacaaatattgtcagttattttcactgaaatggcttctcatttcttttggggattgtgggctttgattcaagccaaatactccactattgagtttgatttccttgggtatgcaattgttcgttttaaccagtactttaaaatgaagcctgaggttactgcattaaaagtgcctgagtaaagaagagatttaattattctccagtagctgagcaatgcttgtgaatcttttcttaagaaatcccaaaaagccaatattagttaaaattctgttgtttaatttggttatcttgctttataaattatgcctctaaacaatcaaatctatttttgaaatagactgaatgatgtcaagaaatatacctactgctatccgtatgtggtggattagaaatgtgttaaatctgcaaaaggtataaagatgtcagtttaatttctttgataatttaaaaaaaaaaaaaaaaaaaa

SEQ ID NO: 3713 - protein, 218 aa, Homo sapien
DNRNFLRERAGLSSAAVQTRIGNSAASRRSPAARPPVPAPPALPRGRPGTEGSTSLSAPAVLVVAVAVVVVVVSAVAWAMANYIHVPPGSPEVPKLNVTVQDQEEHRCREGALSLLQHLRPHWDPQEVTLQLFTDGITNKLIGCYVGNTMEDVVLVRIYGNKTELLVDRDEEVKSFRVLQAHGVHHNSTVPSIMDYAMNLYKEKHWIQSMSATQPFSG

SEQ ID NO: 3714 - DNA, 1222 bp, Homo sapien
ttgatgccaccaatgatgagtttagtgtacttaatcttttgcctctttgacttttttttttcttttttaagatgaatgatttcggaatcaagaatatggaccaggtagcccctgtggctaacagttacagagggacactcaaggtgagtgggcaagtcttaatttttttttttaattggaaaactcgatctctaggaggaaagaaaaaaaaggcctgggtcccagaaaactggttgtagccctagcttcttaatttattggccatgtgactatagactatttgcttactcgctctggtcctcagttttctggtctgcagaatgggtatcttgatgtgtgttgttcttctcctccacgatatgaaaccaaaggcctttatagcttgttttctgaggctccttccaggtgaaaatcctataactcccaataaaacagctggagaggctgtctctactgccttttctgtctacccaggagtttccttggttgatgggaagctgtttaagaactgaaatgagagagaagaggcagacagacccaaccgctacagctcctatcagaaagggcagcgcccgtggaattgtaggtagcctgttactggctcagagaacaagcaggcctacttatgttaaaccaaaaaccagatgaaaaatgaaagcgccctctctgctgcataaacattttatgtagcttctatcatcattccttttgggaacattctttagtagcacaaactggtaatctcccacttgtcttctccaaatatgacagcaagatttgattgttttcagtattatgtagtaaacatgtttcagaagcatgattttaaaattggcctcctcaaagtttagcgtcttgcataatgatgatgtacgtctctggcatattacattttcctttgtatatcattattgaggttatttgtctgatatgacccaaagaggcaaaactcagcacagtcctttctgcagtattctaaaggtcatcaaacttcagcctagtgagtctgcttgtttgatttggccggacattttaagcatggcagaagtggtacaagaaatcatggtattaagttgaaaccacaccccttagaaaaatccttctattaattcaaataatttgacgatgcttatgcggtttctgaaaagaagcagtcgttgctgaaattgatgtgttgaaataggaagcacagatttgtattgtcttttggcttcctggcttt

SEQ ID NO: 3715 - protein, 24 aa, Homo sapien
LMPPMMSLVYLIFCLFDFFFSFLR

SEQ ID NO: 3716 - DNA, 973 bp, Homo sapien
gggattacaggcgtgagccactgtgcctgacccactcacctgtcattgtagtacttaagatgccttgttcatttattgtgcctgtgcaataaatacaccttgatttgagtttacaaagattctcagcagttggtggtcatcctcatctcctgggcgggggcctcctggtgtggccagtatctgaattagtctcataactcatgttcactttttaaaatcggagcttcccagacctcagttttgttttgttattttccattatctgcagctgtctcctttcccctctctcacctatactctactgatcagtgactgctggctcctttgttacccatccttctctttctccacattttttctcttctcatccctttcagttctggactgtttccttcttcctccctgtctttcatttagtcattcattgaatgtacttactaagcacatatagcataatcaggctgtgttgggtaggcatcccgagttctatgagataaagaaagaatgggatatgattaccaattttaagaagcatctaaaacaacctgttatgttttagcaaattgcccccaaaggacccattagggaggaaaacgttcatgtcctttttgcgtatcatctcaagcagtacccatgatggctgggatcccagaacccacctttgagaatgctgccgtatttgcgtgtggttgacaaggttgggccagacactcaggaaatagggttgtcgtcctacctcccccactaacttcctgtaagaacttcagcccctctcaggacctttttctttaccaataaaattcagaaattgggctcaatcagtaattcccaagttattttccaaagaacatgaattttgtggaactttaatagatatcatgcaaaaaaaaatgtgggagggattgttccatggtcaaatggtcttggaaataactcgtttaaacaaaaataaaactgtttctttacccacaaa

SEQ ID NO: 3717 - protein, 31 aa, Homo sapien
MQKKMWEGLFHGQMVLEITRLNKNKTVSLPT

SEQ ID NO: 3718 - DNA, 1540 bp, Homo sapien
  Unsure 867-1008: Unknown base
aattatgtaacaaagtttacataagggtctctgacagaagaagcattttcccacattgcatagtgacagccaaaatcttaataggtacaataattaaagttatgaaagaattgctattgaatgaagaaaatatttgtctttagtgctttactttagattattttgagaggactatagtgtatagctaagaagcaatcattcaactcagggtaggtgggttaggtttaagaaaatctgatgactccattgagaattgtattaaagctcagccaagagagctgagctgtaacaatatttaatttgccacattgcagtttcatccatctagaagtgtaggaaattcaggttttcaggttcactcaggatatgaattgttaacttcctcttagcagagataatatattactatttaccagataatcttaatactctaacttatatttttacttcagaagtttttctagaatttatctaggttacttttagataagtaaatcaggccatttgtttgtatttattattggtatatttctgtataatttccttatgcctgtgtagatcgtggagttcttttgaagtcaatttcaagtcaagattatatttatgtacatgatttttttctcatatttctcactttcccaccatatgatctaggtttgctacatcagaattggagagtgacatttaacttagtgtttccggaataaagaatctggagcttttactaccccataagtaatctattttagcctttctaagtctgcagcttcctttcactttgctttccaatctagcatttcacctctagttttaccccagttatgctttatagattaaacctctgaaatgtgtttaatctgtatgaannnnnnnnnnnnnnnnnnnnnnnnnnnnnnnnnnnnnnnnnnnnnnnnnnnnnnnnnnnnnnnnnnnnnnnnnnnnnnnnnnnnnnnnnnnnnnnnnnnnnnnnnnnnnnnnnnnnnnnnnnnnnnnnnnnnnnnnnnnnnnaaataaataactaacagtaaccttaaaatgaaattatggttcttaatgatagtggcttgttacatctcttatagccccacataggttagatttttcaatataaaattagaggataggcacattctttctttttagatgcttaagaaattacctcacataaacattttaccatttaaaaaatgatgtttaccagtccatttcagttcttcaactgaggtccattataaaatatactacttttgctgtataccaagctacagttgtagatattgattcaagtaaaggtgatacttcctcttccagttgatttttatactcttaatttgtgtatacatacattttcacacatgaatatgtgtgtgtaagagacagagtgcattcatttgcacccagggttggaggaaagaagagaaagaaatgagaatatgtatattggagatacttggctatttgtacctcacctgcccatgaaggctaaaaatggatggttaaacacctgtctctgtgctcatgatgaaaatgacctttgcac

SEQ ID NO: 3719 - protein, 46 aa, Homo sapien
  Unsure 867-1008: Unknown amino acid
LCNKVYIRVSDRRSIFPHCIVTAKILIGTIIKVMKELLLNEENICL

SEQ ID NO: 3720 - DNA, 3655 bp, Homo sapien
agcgatccgaggcccggccccggccccgccccgcgccgcgccgcgccgcttgccgccgggctagcactgacgtgtctctcggcggagctgctgtgcagtggaacgcgctgggccgcgggcagcgtcgcctcacgcggagcagagctgagctgaagcgggacccggagcccgagcagccgccgccatggcaatcaaatttctggaagtcatcaagcccttctgtgtcatcctgccggaaattcagaagccagagaggaagattcagtttaaggagaaagtgctgtggaccgctatcaccctctttatcttcttagtgtgctgccagattcccctgtttgggatcatgtcttcagattcagctgaccctttctattggatgagagtgattctagcctctaacagaggcacattgatggagctagggatctctcctattgtcacgtctggccttataatgcaactcttggctggcgccaagataattgaagttggtgacaccccaaaagaccgagctctcttcaacggagcccaaaagttatttggcatgatcattactatcggccagtctatcgtgtatgtgatgaccgggatgtatggggacccttctgaaatgggtgctggaatttgcctgctaatcaccattcagctctttgttgctggcttaattgtcctacttttggatgaactcctgcaaaaaggatatggccttggctctggtatttctctcttcattgcaactaacatctgtgaaaccatcgtatggaaggcattcagccccactactgtcaacactggccgaggaatggaatttgaaggtgctatcatcgcacttttccatctgctggccacacgcacagacaaggtccgagcccttcgggaggcgttctaccgccagaatcttcccaacctcatgaatctcatcgccaccatctttgtctttgcagtggtcatctatttccagggcttccgagtggacctgccaatcaagtcggcccgctaccgtggccagtacaacacctatcccatcaagctcttctatacgtccaacatccccatcatcctgcagtctgccctggtgtccaacctttatgtcatctcccaaatgctctcagctcgcttcagtggcaacttgctggtcagcctgctgggcacctggtcggacacgtcttctgggggcccagcacgtgcttatccagttggtggcctttgctattacctgtcccctccagaatcttttggctccgtgttagaagacccggtccatgcagttgtatacatagtgttcatgctgggctcctgtgcattcttctccaaaacgtggattgaggtctcaggttcctctgccaaagatgttgcaaagcagctgaaggagcagcagatggtgatgagaggccaccgagagacctccatggtccatgaactcaaccggtacatccccacagccgcggcctttggtgggctgtgcatcggggccctctcggtcctggctgacttcctaggcgccattgggtctggaaccgggatcctgctcgcagtcacaatcatctaccagtactttgagatcttcgttaaggagcaaagcgaggttggcagcatgggggccctgctcttctgagcccgtctcccggacaggttgaggaagctgctccagaagcgcctcggaaggggagctctcatcatggcgcgtgctgctgcggcatatggacttttaataatgtttttgaatttcgtattctttcattccactgtgtaaagtgctagacattttccaatttaaaattttgctttttatcctggcactggcaaaaagaactgtgaaagtgaaattttattcagccgactgccagagaagtgggaatggtataggattgtccccaagtgtccatgtaacttttgttttaacctttgcaccttctcagtgctgtatgcggctgcagccgtctcacctgtttccccacaaagggaatttctcactctggttggaagcacaaacactgaaatgtctacgtttcattttggcagtagggtgtgaagctgggagcagatcatgtatttcccggagacgtgggaccttgctggcatgtctccttcacaatcaggcgtgggaatatctggcttaggactgtttctctctaagacaccattgttttcccttattttaaaagtgatttttttaaggacagaacttcttccaaaagagagggatggctttcccagaagacactcctggccatctgtggatttgtctgtgcacctattggctcttctagctgactcttctggttgggcttagagtctgcctgtttctgctagctccgtgtttagtccacttgggtcatcagctctgccaagctgagcctggccaagctaggtggacagacccttgcagtgatgtccgtttgtccagattctgccagtcatcactggacacgtctcctcgcagctgccctagcaaggggagacattgtggtagctatcagacatggacagaaactgacttagtgctcacaagcccctacaccttctgggctgaagatcacccagctgtgttcagaattttcttactgtgcttaggactgcacgcaagtgagcagacaccaccgacttcctttctgcgtcaccagtgtcgtcagcagagagaggacagcacaggctcaaggttggtagtgaagtcaggttcggggtgcatgggctgtggtggtgttgatcagttgctccagtgtttgaaataagaagactcatgtttatgtctggaataagttctgtttgtgctgacaggtggcctaggtcctggagatgagcaccctctctctggcctttagggagtcccctcttaggacaggcactgcccagcagcaagggcagcagagttgggtgctaagatcctgaggagctcgaggtttcgagctggctttagacattggtgggaccaaggatgttttgcaggatgccctgatcctaagaagggggcctgggggtgcgtgcagcctgtcggggagaccccactctgacagtgggcacacggcagcctgcaaagcacagggccaccgccacagcccggcagaggggcacactctggagaccttgctggcagtgctagccaggaaacagagtgaccaagggacaagaagggacttgcctaaagccacccagcaactcagcagcagaaccaagatgggccccaggctcctccatatggcccagggcttaccaccctatcacacgtggccttgtctagacccagtcctgagcaggggagaggctcttgagacctgatgccctcctacccacatggttctcccactgccctgtctgctctgctgctacagaggggcagggcctcccccagcccacgcttaggaatgcttgcctctggcaggcaggcagctgtacccaagctggtgggcagggggctggaaggcaccaggcctcaggaggagccccatagtcccgcctgcagcctgtaaccatcggctgggccctgcaaggcccacactcacgccctgtgggtgatggtcacggtgggtgggtgggggctgaccccagcttccaggggactgtcactgtggacgccaaaatggcataactgagataaggtgaataagtgacaaataaagccagttttttacaaggtaaaaaaaaaaaaaaaaaaaaa

SEQ ID NO: 3721 - protein, 476 aa, Homo sapien
MAIKFLEVIKPFCVILPEIQKPERKIQFKEKVLWTAITLFIFLVCCQIPLFGIMSSDSADPFYWMRVILASNRGTLMELGISPIVTSGLIMQLLAGAKIIEVGDTPKDRALFNGAQKLFGMIITIGQSIVYVMTGMYGDPSEMGAGICLLITIQLFVAGLIVLLLDELLQKGYGLGSGISLFIATNICETIVWKAFSPTTVNTGRGMEFEGAIIALFHLLATRTDKVRALREAFYRQNLPNLMNLIATIFVFAVVIYFQGFRVDLPIKSARYRGQYNTYPIKLFYTSNIPIILQSALVSNLYVISQMLSARFSGNLLVSLLGTWSDTSSGGPARAYPVGGLCYYLSPPESFGSVLEDPVHAVVYIVFMLGSCAFFSKTWIEVSGSSAKDVAKQLKEQQMVMRGHRETSMVHELNRYIPTAAAFGGLCIGALSVLADFLGAIGSGTGILLAVTIIYQYFEIFVKEQSEVGSMGALLF

SEQ ID NO: 3722 - DNA, 1890 bp, Homo sapien
ccgctccgctccgctcggccccgcgccgcccgtcaacatgatccgctgcggcctggcctgcgagcgctgccgctggatcctgcccctgctcctactcagcgccatcgccttcgacatcatcgcgctggccggccgcggctggttgcagtctagcgaccacggccagacgtcctcgctgtggtggaaatgctcccaagagggcggcggcagcgggtcctacgaggagggctgtcagagcctcatggagtacgcgtggggtagagcagcggctgccatgctcttctgtggcttcatcatcctggtgatctgtttcatcctctccttcttcgccctctgtggaccccagatgcttgtcttcctgagagtgattggaggtctccttgccttggctgctgtgttccagatcatctccctggtaatttaccccgtgaagtacacccagaccttcacccttcatgccaaccstgctgtcacttacatctataactgggcctacggctttgggtgggcagccacgattatcctgatyggctgtgccttcttcttctgctgcctccccaactacgaagatgaccttctgggcaatgccaagcccaggtacttctacacatctgcctaacttgggaatgaatgtgggagaaaatcgctgctgctgagatggactccagaagaagaaactgtttctccaggcgactttgaacccattttttggcagtgttcatattattaaactagtcaaaaatgctaaaataatttgggagaaaatattttttaagtagtgttatagtttcatgtttatcttttattatgttttgtgaagttgtgtcttttcactaattacctatactatgccaatatttccttatatctatccataacatttatactacatttgtaagagaatatgcacgtgaaacttaacactttataaggtaaaaatgaggtttccaagatttaataatctgatcaagttcttgttatttccaaatagaatggactcggtctgttaagggctaaggagaagaggaagataaggttaaaagttgttaatgaccaaacattctaaaagaaatgcaaaaaaaaagtttattttcaagccttcgaactatttaaggaaagcaaaatcatttcctaaatgcatatcatttgtgagaatttctcattaatatcctgaatcattcatttcagctaaggcttcatgttgactcgatatgtcatctaggaaagtactatttcatggtccaaacctgttgccatagttggtaaggctttcctttaagtgtgaaatatttagatgaaattttctcttttaaagttctttatagggttagggtgtgggaaaatgctatattaataaatctgtagtgttttgtgtttatatgttcagaaccagagtagactggattgaaagatggactgggtctaatttatcatgactgatagatctggttaagttgtgtagtaaagcattaggagggtcattcttgtcacaaaagtgccactaaaacagcctcaggagaataaatgacttgcttttctaaatctcaggtttatctgggctctatcatatagacaggcttctgatagtttgcaactgtaagcagaaacctacatatagttaaaatcctggtctttcttggtaaacagattttaaatgtctgatataaaacatgccacaggagaattcggggatttgagtttctctgaatagcatatatatgatgcatcggataggtcattatgattttttaccatttcgacttacataatgaaaaccaattcattttaaatatcagattattattttgtaagttgtggaaaaagctaattgtagttttcattatgaagttttcccaataaaccaggtattctaaaaaaaaaaaaaaaaaa

SEQ ID NO: 3723 - protein, 193 aa, Homo sapien
  unsure 143, 164: unknown amino acid
MIRCGLACERCRWILPLLLLSAIAFDIIALAGRGWLQSSDHGQTSSLWWKCSQEGGGSGSYEEGCQSLMEYAWGRAAAAMLFCGFIILVICFILSFFALCGPQMLVFLRVIGGLLALAAVFQIISLVIYPVKYTQTFTLHANXAVTYIYNWAYGFGWAATIILXGCAFFFCCLPNYEDDLLGNAKPRYFYTSA

SEQ ID NO: 3724 - DNA, 1689 bp, Homo sapien
cgggagcgtggggtatctcgaggtgccgggttgcaggcgctcaggggcgctagggtttgaggcctgctttctgctcgcgccagcagagcactacctgaggcagcgaggcgcagcgagcctagcctccccgcgccctgggcagtgtggccatggagaatcaggtgttgacgccgcatgtctactgggctcagcgacaccgcgagctatatctgcgcgtggagctgagtgacgtacagaaccctgccatcagcatcactgaaaacgtgctgcatttcaaagctcaaggacatggtgccaaaggagacaatgtctatgaatttcacctggagttcttagaccttgtgaaaccagagcctgtttacaaactgacccagaggcaggtaaacattacagtacagaagaaagtgagtcagtggtgggagagactcacaaagcaggaaaagcgaccactgtttttggctcctgactttgatcgttggctggatgaatctgatgcggaaatggagctcagagctaaggaagaagagcgcctaaataaactccgactggaaagcgaaggctctcctgaaactcttacaaacttaaggaaaggatacctgtttatgtataatcttgtgcaattcttgggattctcctggatctttgtcaacctgactgtgcgattctgtatcttgggaaaagagtccttttatgacacattccatactgtggctgacatgatgtatttctgccagatgctggcagttgtggaaactatcaatgcagcaattggagtcactacgtcaccggtgctgccttctctgatccagcttcttggaagaaattttattttgtttatcatctttggcaccatggaagaaatgcagaacaaagctgtggttttctttgtgttttatttgtggagtgcaattgaaattttcaggtactctttctacatgctgacgtgcattgacatggattggaaggtgctcacatggcttcgttacactctgtggattcccttatatccactgggatgtttggtggaagctgtctcagtgattcagtccattccaatattcaatgagaccggacgattcagtttcacattgccatatccagtgaaaatcaaagttagattttccttttttcttcagatttatcttataatgatatttttaggtttatacataaattttcgtcacctttataaacagcgcagacggcgctatggaaaaaaaagaaaaagatccactaaaaagaaagatttagatggcttcttgccagtttgagcctaatctgattcttacagttttaccttcttgaaccaatgtaaaagtttttttaatgttaaatgattaaattctcagtgaggctatcttccttttccccagtaacattcctgaatttactgttatcttattgtagtacttgcatgacatggattcctgatatctgatgagaggttcattcttgtgtattcagttaatgacaccaaaaggctcagcccaccccaaccctatctcatgttcagtctgtctaatacatgccagagatttttttttcaaaaagtgctttatccctacaatgtactgacagttcttacagttgaggatttggttcttttcagctaattgcttggtggattaaaaaaagcaagactaatgtcaactctaatggaaggctggttaaaagtggactcaggcaagg

SEQ ID NO: 3725 - protein, 373 aa, Homo sapien
MENQVLTPHVYWAQRHRELYLRVELSDVQNPAISITENVLHFKAQGHGAKGDNVYEFHLEFLDLVKPEPVYKLTQRQVNITVQKKVSQWWERLTKQEKRPLFLAPDFDRWLDESDAEMELRAKEEERLNKLRLESEGSPETLTNLRKGYLFMYNLVQFLGFSWIFVNLTVRFCILGKESFYDTFHTVADMMYFCQMLAVVETINAAIGVTTSPVLPSLIQLLGRNFILFIIFGTMEEMQNKAVVFFVFYLWSAIEIFRYSFYMLTCIDMDWKVLTWLRYTLWIPLYPLGCLVEAVSVIQSIPIFNETGRFSFTLPYPVKIKVRFSFFLQIYLIMIFLGLYINFRHLYKQRRRRYGKKRKRSTKKKDLDGFLPV

SEQ ID NO: 3726 - DNA, 3221 bp, Homo sapien
actgcgcaggcgcggcccgggagcgtggggtatctcgaggtgccgggttgcaggcgctcaggagcgctagggtttgaggcctgctttctgctcgcgccagcagagcactacctgaggcagcgaggcgcagcgagcctagcctccccgcgccctgggcagtgtggccatggagaatcaggtgttgacgccgcatgtctactgggctcagcgacaccgcgagctatatctgcgcgtggagctgagtgacgtacagaaccctgccatcagcatcactgaaaacgtgctgcatttcaaagctcaaggacatggtgccaaaggagacaatgtctatgaatttcacctggagttcttagaccttgtgaaaccagagcctgtttacaaactgacccagaggcaggtaaacattacagtacagaagaaagtgagtcagtggtgggagagactcacaaagcaggaaaagcgaccactgtttttggctcctgactttgatcgttggctggatgaatctgatgcggaaatggagctcagagctaaggaagaagagcgcctaaataaactccgactggaaagcgaaggctctcctgaaactcttacaaacttaaggaaaggatacctgtttatgtataatcttgtgcaattcttgggattctcctggatctttgtcaacctgactgtgcgattctgtatcttgggaaaagagtccttttatgacacattccatactgtggctgacatgatgtatttctgccagatgctggcagttgtggaaactatcaatgcagcgattggagtcactacgtcaccggtgctgccttctctgatccagcttcttggaagaaattttattttgtttatcatctttggcaccatggaggaaatgcagaacaaagctgtggttatctttgtgttttatttgtggagtgcaattgaaattttcaggtactctttctacatgctgacgtgcattgacatggattggaaggtgctcacatggcttcgttacactctgtggattcccttatatccactgggatgtttggcggaagctgtctcagtgattcagtccattccaatattcaatgagaccggacgattcagtttcacattgccatatccagtgaaaatcaaagttagattttccttttttcttcagatttatcttataatgatatttttaggtttatacataaattttcgtcacctttataaacagcgcagacggcgctatggacaaaaaaagaaaaagatccactaaaaagaaagatttagatggcttcttgccagtttgagcctaatctgattcttacagttttaccttcttgaaccaatgtaaaagtttttttaatgttaaatgattaaattctcagtgaggctatcttccttttccccagtaacattcctgaatttactgttatcttattgtagtacttgcatgacatggattcctgatatctgatgagaggttcattcttgtgtattcagttaatgacaccaaaaggctcagcccaccccaaccctatctcatgttcagtctgtctaatacatgccagagatttttttttcaaaaagtgctttatccctacaatgtactgacagttcttacagttgagatttgttcttttcagctattgcttgtgaaaaaaagcaagactatgtcactctatagaaggctgttaaagtgactcaggcaggaattaattattctgtacctaaggggttacttgtttaatgggatggcattgactttttgaaaatcaagtggactgagtcattgataaaacatttctaagagtggggctagagaacatactttacatctgacatcctttggcctaacaacatctattattatagtgctcagcagtgtgggcattgaagaggcgcagaatgctttgaaagaaactaatcagaatcttggaacatcatgatcatgccattcttaagtaaatcaactattttcaacactgaagaaaaatgaaacattatttagaaaacaatgagattacaagttccaaactcagccaggaatgtggctcacacctgtaatcccagcactttgggacacctaggtgggagcatcgcttgaagccaggagttcaagaccagcttgggcaacgtagtgagacccctatctctacaaaaaataaaaaaattagctgggtgtgatggcacacacctgttgtcccagctactcaagaagctgagatgggaggatcctgagctcaggaggtcaaggctgcagtgagccgagattgtgccactgcactgcagctggggtgacagtgcaagaccctgtctcaaaccaaaccaaaccacacacacacaaacacacatacacacacacacacacgaggtccaaatggtagcagggatccaaagggaacacagtatgtaggtcaaactggcagtaacagtgtacagcctttgacaaactagaaatattagagtaggccaaacacacctccaaactgtaaggctgtgcacaaacataaaaaatggcagccttccatctcctgcactggctgagtccatttacttgtgtacttgttctagtgagtggtgggactgtacatttttgaatagacctcaaaaatacttcattctgctgctgttcagttggctttttaaacctgtctgcagtaggacactgaaaacagcaagaacttcggggtgaacacccgctgatcctttaacaaggatttctggcaggaaactcacaaaaaggagaactgaaaatttagacatacagttggccattgtaaaaaacatcagtttcctctcatacattccaagtaaaccaagtaaaataagtgttggagtaacacttgcataaaagaatttaaggagtgatagctctttctgttctgccattcccaacattcctgggggaaaggagactcaatgagttaatactatttcactgagcccaagatggaaacttggtttgacctaaaacatctgattaatataggctagctgatttcttaaaaattcgttgcattgaaggatattttgcatgtctgtaacacctgtcaatacttgtttgtattgatttctgatattcttgcagctgactacgtgtaattgggcagatcagctttgcagtagattatgctgcatcctcgtggcaaaattctgtattcttagtgattgttacaaacccctttattgctgtctgagaaagtgaaagattgtgtatttctattaaaacatttacaatc

SEQ ID NO: 3727 - protein, 362 aa, Homo sapien [sequence omitted]

SEQ ID NO: 3728 - DNA, 3828 bp, Homo sapien; identical to SEQ ID NO: 3641

SEQ ID NO: 3729 - protein, 474 aa, Homo sapien; identical to SEQ ID NO: 3642

SEQ ID NO: 3730 - DNA, 2944 bp, Homo sapien
atatgatccgctcggcttcctgggtctggctgctgccgcccgccggtgtccgcccgtgtcgcgccggggcaccaaggagccgttggagggtccgggcggaggcccgctcgtgtggaagtcgtcgacgccgccgctcgtccgtcctcccgtccgttctcgctcccggccgccatcatgctggcgctcatctcccgcctgctggactggttccgttcgctcttctggaaggaagagatggagctgacgctcgtggggctgcagtactcgggcaagaccaccttcgtcaatgtcatcgcgtcaggtcaattcagtgaagatatgatacccacagtgggcttcaacatgaggaaggtaactaaaggtaacgtcacaataaagatctgggacataggaggacaaccccgatttcgaagcatgtgggagcggtattgcagaggagtcaatgctattgtttacatgatagatgctgcagatcgtgaaaagatagaagcttcccgaaatgagctacataatcttctagataaaccacagttacaaggaattccagtgctagtgcttggaaacaagagagatcttcctaatgccttggatgagaaacagctaattgaaaaaatgaatctgtctgctattcaggatagagaaatttgctgctattcaatttcttgcaaagaaaaggataatatagatatcacacttcagtggcttattcagcattcaaaatctagaagaagctgaagcatctcttgaagtcttccagtccttcttggctataatcctagaattattgtccgttcctctgaagtaattcccagaatacggtccttcctaaaccccagaaattgcctttttcagagtctatttctcatgtgcactgctgaagatgaatatccctaatccttcataaagaatcagctagagttgtcatgataaagtcagcacacacaaaaaggcttcttacacataccaaaaaaaatgtcttaaaccatgtgtagagctttaaaaacagaaaaaaaaccccatatacttatgaccatcttaaatcaagaaaattgcatatttccattctggtctttctgggccagatttttatattggttttcagtaaatgtctatctataatatttcattatagagtccagtagcttaatactgacactgacttgatacagcacgaagtttctagtgccacacacagtatttagaaaacctttaggcgtgaatgactcatgtgggatatatgtaaacataatgtttattttatctcacaaatgcatgtgaaatgtataattacatcttaggaatccaaaatggtctgcagagagtgagcggaggcaccagatcaatgttggttctttgcactggtgagattctgcctgatgaatattaaagatatcctgctttctgagaactctatcaccagatggcagttgggatatgggaggaactaaagcatcctgttttgtatctgtccagatcattatttctgtctcttgttttttcttcctggttcaggatacttttttaaggggttgagaattgaagattttccaaaagcgttcatgaatttagagcattccacccaatataataaaacctgttaagaatgtcagtctttgttcaaacatctgtttgttctatctccagtcattaaatcagtgctgctgcatgacactcttaactcctgactttttatatccagtcataaagttgactttcagcacaaaagatacttataaacaaataaaaaatttttatttttctctcttactgatgtaagctttggcactcttttgactggtgccattagacatcttgattattgtgacaactctagacctgcctgctttatctaatgtaatcatgctcaatgtctacaggttgtttaataatcagtcacacagagaactgaggaactgatgctgtttgtttgcttctatgatacagagatgtctaaaaacttcaaatggacatgttttgtagtttagcgacttccgtatacataaagggacatattaatactggttcatttgtaaattattattcatatagaccactgtagtagataaaactctatggtacacctgcttatgtgttgcctcacactgtgtgtgattttgtttcttttgttaagcagcacttatgtagactgcatttccaaatgtgttgagcactcggagtgtagtcaacagtaagttcttttaatgaatatcagttttaatttatagactgccatggccttaaaaatattctgtacaatatactgcactgtgttgcacagacactacttgcttttctccattcatatttttatgagtagaatctgggcttttaaatttctcttcttattctttgaagcatgttgcatactaccctggtgggatggatggttctgtaaatgaagggatatttaaacttgctactgttgttcaacaccattaatggtcagtgtgaaccattacaaagaatgtggcaacttgcttgtgcctaaaaggaggaattggaactagaatgtgtgactctgtggggactgcataggtttgttaattgacctatagctaaaccttaatgtgtttgtgtgtctatacattgctttccgcatttcaagacatccagacgctattaccaacattttcctgtgcattaacctctgcatgtgaaaacttttaacagttactgaactatgtaaatatgtgaatttttttatttaggtggatgcattttttgtctgtttactgctcttctcagctttattcaataaacttgcattttaagggttgtattggcaattttaacttaaaatgtgcatcatgatggaaggtgcagacttttttggaagtttccgagaggagggtctatagaccatttgtcagaaatcagatcagccctcaaagaatggggtctgtgggctagttaaaatagaaataaacttttaaaatatccacag

SEQ ID NO: 3731 - protein, 186 aa, Homo sapien
MLALISRLLDWFRSLFWKEEMELTLVGLQYSGKTTFVNVIASGQFSEDMIPTVGFNMRKVTKGNVTIKIWDIGGQPRFRSMWERYCRGVNAIVYMIDAADREKIEASRNELHNLLDKPQLQGIPVLVLGNKRDLPNALDEKQLIEKMNLSAIQDREICCYSISCKEKDNIDITLQWLIQHSKSRRS

SEQ ID NO: 3732 - DNA, 2787 bp, Homo sapien; identical to SEQ ID NO: 2872

SEQ ID NO: 3733 - protein, 174 aa, Homo sapien; identical to SEQ ID NO: 2873

SEQ ID NO: 3734 - DNA, 3655 bp, Homo sapien; identical to SEQ ID NO: 3100

SEQ ID NO: 3735 - protein, 759 aa, Homo sapien; identical to SEQ ID NO: 3101

SEQ ID NO: 3736 - DNA, 4113 bp, Homo sapien
tgaggcgcgggaggcccgcgccccgcggctcgctgtgcgtgggagggcgcgagcgaacgcgggcgaggagcggccgagccgctgaagaggagctgggcgccggccgcccggccgcgctcggcccgcggatcgcctccgcccggtcttcgccggccccggcccctggcgagatgccgtgtggggaggattggctcagccacccgctgggaatcgtgcagggattcttcgcccaaaatggagttaatcctgactgggagaagaaagtaattgagtattttaaggaaaagctgaaggaaaataatgctcctaagtgggtaccatcactgaacgaagttccccttcattatttgaaacctaatagttttgtgaaatttcgttgcatgattcaggatatgtttgaccctgagttttacatgggagtttatgaaacggttaaccaaaacacaaaagcacatgttcttcattttggaaaatatagagatgtagcagagtgtgggcctcaacaagaacttgatttaaactctccacgaaataccactttggaaagacagactttctattgtgttccggtgcctggggaatctacgtgggtaaaagaagcctatgttaatgcaaaccaagctcgagtcagtccctcaacatcctacactcctagtcgccacaagaggagttatgaagatgatgacgatatggacctacagcccaataagcagaaagaccaacatgcaggtgccagacaagcagggagtgttggtggtcttcaatggtgtggagagccaaaacgtttagaaactgaagcttctactgggcaacagctgaactctctgaacttgtcttctccttttgatttgaattttccattgccaggagagaagggccctgcatgccttgtgaaggtttatgaagattgggattgtttcaaagtaaatgacattcttgagctatatggcatactgtctgtggatcctgtgctgagtatactgaataatgatgaaagggatgcctctgcactgctggatccgatggagtgcacagacacagcagaggagcagagagtacacagtcctcctgcttcattagtgccgagaattcatgtgatcttagcccagaagttgcaacacatcaacccattattgcctgcctgccttaacaaagaggagagcaaaacctgtaagtttgtttcaagtttcatgtccgaattgtctccagtcagagcagaacttcttgggttccttactcatgcccttctgggggatagtttggctgctgaataccttatattacatctcatctccacagtatatacaagaagagatgtccttccactaggaaaatttacagttaacttgagtggttgcccacggaatagtaccttcacagaacacttgtatcgaattattcaacatcttgttccagcatcttttcgtctgcagatgactatagagaacatgaaccatttgaaattcattccccacaaagactacacagccaatcgcttggtcagtgggctcctccagctgcccagcaatacttcccttgtaatcgatgagactctcctggaacaggggcagctggataccccaggtgttcataatgtgacagccctgagcaacctcataacgtggcagaaggtggattatgacttcagctaccatcagatggaattcccctgcaatattaacgttttcattacttcggaggggaggtcactcctcccggcagactgccagattcacttacagccccagctaattccaccaaacatggaggagtacatgaacagccttctctcagcggtgctgccttccgtgctgaacaaattccgcatttatctaactcttttgagattcttggaatatagcatatctgatgaaataaccaaggcagttgaagatgactttgtggaaatgcggaagaacgaccctcagagcatcactgctgatgatcttcaccagctgctcgtggtggctcggtgtctgtctctcagtgctggtcagacaacgctgtcaagagaacgatggctgagagcaaagcagctagagtctttaagaagaacgaggcttcagcagcaaaaatgtgtgaatggaaatgaactttaaagatgtaatacctatgaagagtaatgggcaaactgtagccacataattgtaaaattcagatattcatttataccacattgttttataggtaatttctatcacaaaccagtgacatttcctgaaatcaagcctggtaacacctgatgtttatatgatattcagtaaggacttttaccttactgatttcatggagcttttgaagtttgttttataataattatataaattagtaatgatgtaaaaaaagtatttgatattaaaagtttaatattgataatgttgctgattgtaccatttccttagcttcagctgagtcataggccagactgttgaaatgctgaaatgaagaaggttgttgcagtttcaaagtcagaggaatcgtgcttcggatttcttatgttttctagttctctgtttttccagttcacagtgggttggggtgcattcagtagtccatctttggggaacggaggcgtacttgccattgattcacatgactacatgaaattctgtactgtcatttcccagatgtttggccacagaaactttttcccacttaacatttgttaacagcctgcaaaactaaacttgtacatggcagtggttcccagacttttgtattttatggaccggtagtaatatttccaaaaatctggggtactataaggttgccaatttaccttgccaagtaatccgaataaatcactgtattatcaccatttttttcataaaaggaaaggacaatctatctctgaataagaggagtcctttaaacggaatgaatgtggcttttgggggcaaaagaaaccaagacactacattgtctttattttctcctatcccagtgcatttgagaaccatgcataagggaatgctgtgctacaaagctgtgcccaaatatgaaaacaaaataggaaacttaaaaagcaataccccctttagaaagtttttattttcttaaatgtcattgagttgctttgattctattggatttttggcattttttatgggatcatcagttggttccaagtatgttagatcagctaacatctgctactccagtaacagcctcgtacaactgcaggtaggttttctccagaccaattagttttaatagagcaaactaacaacagactgtagtagcatggttatggcaaccagaatcttcagaaaggttaggacattactttttaagctgtcagtggtatcaaataacttacctagttggaggcagataaaggatcccttacgttttttcctataaggcctaaattgaaattgttaaccaaggaaacagggtcagccttgaaaaatcaaggaattcattgtacctaataactgaagtaaaaataactagttgttcaacttttcctaaactcaaatctatttttataaacaaatgtaaataatgtttatattagagttgaactggttttcatttttataactggtagactagaccttccttaaacttttagaaataaaatgaaggcttcactggatttgtgaggataaaatacattttctttaattgtcctagagcaaagtacattagtcaccatgtgttttttgtgccaatgtaacttgtaatttaccaaagaaaaatacatacattgcttggtcttgcagaaaagttcccttgaaagaacctttccaataaataaaacgtcccaaattagcagtaccttgggctgtttttcatgagtaagaagattcaccatcccatgtgatctgtgtggaaaaagaccatgtcctcttggtggaagacatgagagagctgaactgaagtggaggaggtggtgcaagagggaccttcctgctcaaggcccgcccaggcagcggaatagagtgcagtgcttggctgcagaaaccctttgtccctcacctatatatacacggacagtcaagtttgttgctctaacgtaaggcacagcgttaatcctgtatggccaggaaactgagtagactcctgtgtaaccctgtttggaactttgccttcttaaaatgatttttc

SEQ ID NO: 3737 - protein, 642 aa, Homo sapien
MPCGEDWLSHPLGIVQGFFAQNGVNPDWEKKVIEYFKEKLKENNAPKWVPSLNEVPLHYLKPNSFVKFRCMIQDMFDPEFYMGVYETVNQNTKAHVLHFGKYRDVAECGPQQELDLNSPRNTTLERQTFYCVPVPGESTWVKEAYVNANQARVSPSTSYTPSRHKRSYEDDDDMDLQPNKQKDQHAGARQAGSVGGLQWCGEPKRLETEASTGQQLNSLNLSSPFDLNFPLPGEKGPACLVKVYEDWDCFKVNDILELYGILSVDPVLSILNNDERDASALLDPMECTDTAEEQRVHSPPASLVPRIHVILAQKLQHINPLLPACLNKEESKTCKFVSSFMSELSPVRAELLGFLTHALLGDSLAAEYLILHLISTVYTRRDVLPLGKFTVNLSGCPRNSTFTEHLYRIIQHLVPASFRLQMTIENMNHLKFIPHKDYTANRLVSGLLQLPSNTSLVIDETLLEQGQLDTPGVHNVTALSNLITWQKVDYDFSYHQMEFPCNINVFITSEGRSLLPADCQIHLQPQLIPPNMEEYMNSLLSAVLPSVLNKFRIYLTLLRFLEYSISDEITKAVEDDFVEMRKNDPQSITADDLHQLLVVARCLSLSAGQTTLSRERWLRAKQLESLRRTRLQQQKCVNGNEL

SEQ ID NO: 3738 - DNA, 1723 bp, Homo sapien
aagtttgcattttcctctgttcttgagcccagcttcttctcgtctcccaccccagcttcccggcattggaagaagggaccgtcctcttccttgtcttggccacccaaatcctggtatcgaaagggttgaacggaccggaagtgtgcagcagcgacgggtccccagctaatcgacgccggaagtagcaattactagacaagcattccgccgccggcttcgctatggcggcaattcccccagattcctggcagccacccaacgtttacttggagaccagcatgggaatcattgtgctggagctgtactggaagcatgctccaaagacctgtaagaactttgctgagttggctcgtcgaggttactacaatggcacaaaattccacagaattatcaaagacttcatgatccaaggaggtgacccaacagggacaggtcgaggtggtgcatctatctatggcaaacagtttgaagatgaacttcatccagacttgaaattcacgggggctggaattctcgcaatggccaatgcggggccagataccaatggcagccagttctttgtgaccctcgcccccacccagtggcttgacggcaaacacaccatttttggccgagtgtgtcagggcataggaatggtgaatcgcgtgggaatggtagaaacaaactcccaggaccgccctgtggacgacgtgaagatcattaaggcatacccttctgggtagacttgctaccctcttgagcagctcttctgagatggccccagtgaaccagcttctagatgacatagaatgacatgtaatgctaaatttcattttggctttgcaagtcatgaagcttaggaggcctggcatcttgggtgagttagagatggaagtacattttaataggatgcttcttttctcttcccccagtgcctaggttgccagagcatttgcacaaatgcccctgtttatcaataggtgactacttactacacatgaaccataatgctgcttcttgtgcatgtctgctctgatatacgtcgaacaatgtagcagccactgtcatttctcagtggttttgcctaaccaaacttcttcctaaggagatttatattctggcctacacagcagtccttgatggctgacagccacagaattccaaaccaagtagtgtctgtcagccctcttaactctgtgcacgccctatttcagtcttttacatttgttcttctagggaatgtatgcatctctatatatattttccctctcaaaaccagaacatcaacagtgctgtttctgacacttcagacatcccacgcaaagccacattgaatttttgccaaatgaaaaacacatccaacaatcaagtttctaagaaggtgtcaagtggggaataataataatgtataataatcaagaaattagtttattaaaaggaagcagaagcattgaccattttttcccagagaagaggagaaatctgtagtgagcaaaggacagaccatgaatcctccttgagaagtagtactctcagaaaggagaagcgccactcaagttcttttaacccaagactttagagaaattaggtccaagatttttatatgttcagttgtttatgtataaaaataactttctggattttgtggggaggagcaggagaggaaggaagttaatacctatgtaatacatagaaacttccacaataaaatgccattgatggttgaaaaaaaaaaaaaaaaaaa

SEQ ID NO: 3739 - protein, 166 aa, Homo sapien
MAAIPPDSWQPPNVYLETSMGIIVLELYWKHAPKTCKNFAELARRGYYNGTKFHRIIKDFMIQGGDPTGTGRGGASIYGKQFEDELHPDLKFTGAGILAMANAGPDTNGSQFFVTLAPTQWLDGKHTIFGRVCQGIGMVNRVGMVETNSQDRPVDDVKIIKAYPSG

SEQ ID NO: 3740 - DNA, 2112 bp, Homo sapien
ggtcgggaccggcaagatggcggcgcggacagcgttcggtgctgtgtgccggcgcctctggcagggattggggaatttttctgtaaacacttctaagggcaatacagccaaaaatggtggcttgcttctcagtaccaatatgaagtgggtacagttttcaaacctacacgttgatgttccaaaggatttgaccaaacctgtggtaacaatctctgatgaaccagacatattatataagcgcctctcggttttggtgaaaggtcacgataaggctgtattggacagttatgaatattttgctgtgcttgctgctaaagaacttggtatctctattaaagtacatgaacctccaaggaaaatagagcgatttactcttctccaatcagtgcatatttacaagaagcacagagttcagtatgaaatgagaacactttacagatgtttagagttagaacatctaactggaagcacagcagatgtctacttggaatatattcagcgaaacttacctgaaggggttgccatggaagtaacaaagacacaattagaacagttaccagaacacatcaaggagccaatctgggaaacactatcagaagaaaaagaagaaagcaagtcataaagcctcagggaggccatttttgcctaaatttgaaatgagggtgggccagatgagtatgtttaagtggagagtgcttccagctgagatgatttgagtctgtcctaactgctccattgagttctcgtgccctcatcagctgagggcagggaatggaactttaatggaagaaccacttttatctattctttttattcattgtttcagttctgatttcagcaaacatgagcaaaccactttgactgaaagcagaaagagtgaaaattctattttgttacgctactggtgttcaattattagtttgtaccatttttaatttatgtcagttgatgcatctgaaaataagtgcttggagtgttcgtacccttatttttttttaagattcctagaaggaatctttggttaattcagattgagcagttaaagtttttgctatttacctttgtgcaggctggcatatgctaatttgggggtggtaaccaaccgattttatctcatgtaagcattacattttgaagactgaatatacttcacagcagatcaaacacatttatggcatgcactgacctcttcttggagcccagaactttatagagttgcctaccagggttactgtaatggaatttatgatcttaagaaattactagttgtattatttatcctatgattcattcattcaataagcttttactgcataaactttacatccagcactgtagttaagtacccaaaattgaatagaaataatggcttttgaaaattgcacaaagcaggccaggcacggtggctcacgcctgtaatcccagcactttgggaggccgaggcaggcggatcacgaggtcaagagatccagaccatcctggctaacacggtgaaaccccgtctctaataaaaatacaaaaattagctggacatggtggcacgtgcctgtaatcccagctactcaggaggctgaggcaggagaatcgcgtgaacccgggcccggtggaggctgcagtgagacgagatcgcgccactgcactccagcctggcgacagagcgagacaccgtctcaaaaaaaaaaaaaaagaaaattgtgcaaagcataggtaaatatttttctttattaagcttctcactgagaagccctctttattttggtaaatgtcactctgtttgttaggagatgtctgcttttccatgaaatgaaatagtggctaaagccctgaaagaggcaagactacaatgggctgaaacagttggtatagcaaccccagagaagtgcttcattttctttttatagtagaagcaggtccatgtcttttgtggtttcctgcacatctttggagtagttatgacttctcagtttttccccccttaaactgcattgcctattcttttttcctgacatgctatcaggtatcagtgtgttgaatacataatgcttgtgtatcagacttacgttactgtcatcaccattaaaagaattgcagccttgtgccccatgaccttca

SEQ ID NO: 3741 - protein, 201 aa, Homo sapien
MAARTAFGAVCRRLWQGLGNFSVNTSKGNTAKNGGLLLSTNMKWVQFSNLHVDVPKDLTKPVVTISDEPDILYKRLSVLVKGHDKAVLDSYEYFAVLAAKELGISIKVHEPPRKIERFTLLQSVHIYKKHRVQYEMRTLYRCLELEHLTGSTADVYLEYIQRNLPEGVAMEVTKTQLEQLPEHIKEPIWETLSEEKEESKS

SEQ ID NO: 3742 - DNA, 5008 bp, Homo sapien
ggcgcggggaccgggctgtctgaggtgcgcgccgcgctggggctcgcgctctacctgatcgcgctgcggacgctggtgcagctctcgctgcagcagctcgtgctacgcggggccgctggacaccgcggggagttcgacgcgctccaagccagggattatcttgaacacataacctccattggccccaggactacaggaagtccagaaaatgaaattctgaccgtgcactaccttttggaacagattaaactgattgaagtgcaaagcaacagccttcataagatttcagtagatgtacaacggcccacaggctcttttagcattgatttcttgggaggttttacaagctattatgacaacatcaccaatgttgtggtaaagctggaacccagagatggagcccagcatgctgtcttggctaattgtcattttgactcagtagcaaactcaccaggccagtcatggtttcattactcagcacccctgggctagcttgattcgtgcattcattaacctagaggcagcaggtgtaggagggaaagaacttgtattccaaacaggtcctgaaaatccttggttggttcaagcttatgtttcagcagctaaacacccttttgcttctgtggtggctcaggaggtttttcagagtggaatcattccttcagatactgactttcgtatctacagggattttgggaacattccaggaatagacttagcttttattgagaatggatacatttatcacaccaagtatgacacagcggacagaattctaacagattccattcagagagcaggtgacaacattttagcagttcttaagcatctagctacatctgatatgctggctgctgcttctaagtatcgacatggaaacatggtcttctttgatgtgctgggcctgtttgtcattgcctacccctctcgtattggctcaatcataaactacatggtggtaatgggtgttgttttgtacctgggcaaaaaatttttgcagcccaaacataagactggtaactacaagaaggacttcttgtgtggacttggcatcactttgatcagctggttcactagccttgttaccgttctcattatagcagtgttcatctctcttattggacagtctctctcatggtataaccacttctatgtctccgtttgtctgtatggaactgcaactgtagccaaaataatacttatacatactcttgcgaaaagattttattacatgaatgccagtgcccagtatctgggagaagtattttttgacatttcgctgtttgtccattgctgttttcttgttaccctcacttaccaaggactttgctcggcgtttattagtgctgtctgggtagcattcccattgctcacaaagctctgtgtgcataaggacttcaagcagcatggtgcccaaggaaaatttattgctttttaccttttggggatgtttattccttatctttatgcattgtacctcatctgggcagtatttgagatgtttacccctatcctcgggagaagtggttctgaaatcccacctgatgttgtgctggcatccattttggctggctgtacaatgattctctcgtcctattttattaacttcatctaccttgccaagagcacaaaaaaaaccatgctaactttaactttggtatgtgcaattacattcctccttgtttgcagtggaacattttttccatatagctccaatcctgctaatccgaagccaaagagagtgtttcttcagcatatgactagaacattccatgacttggaaggaaatgcagttaaacgggactctggaatatggatcaatgggtttgattatactggaatttctcacataacccctcacattcctgagatcaatgatagtatccgagctcactgtgaggagaatgcacctctttgtggttttccttggtatcttccagtgcactttctgatcaggaaaaactggtatcttcctgccccagaagtttctccaagaaatcctcctcatttccgactcatatccaaagaacagacaccttgggattctataaaattgacttttgaagcaacaggaccaagccatatgtccttctatgttcgagcccacaaagggtcaacactttctcagtggtctcttggcaatggcaccccagtcacaagtaaaggaggagactactttgtcttttactcccatggactccaggcctctgcatggcagttctggatagaagtgcaggtttcagaagaacatcctgaaggaatggtcaccgtggccattgctgcccactatctgtctggggaagacaagagatcccctcaactggatgctctgaaggaaaagttcccagattggacatttccctctgcctgggtgtgcacctacgatctctttgtattttaatcttgtggatgagctctaagtacatgcccagtggatactccatgtgacatggtttctccctatgttacgtggatgtttgtaacgtaagtcaatgaattttaatgatcatatgttcaaagagctttctgggttaacgcttttcagggccaagcactataagggtttagctgtggcgcagtgatgcatggcctgttgacacttgaaaatgccagtcttttggcacttcagcacatgtgggtactgccactacacacacgtcattttatatgaccttaaggacaaagccaacaatccacttcaatagctgcccctttaggatcaagaaagatgtacactgtcagagcattgttaatgagacaaaagttgtttccaatttaagccccaaaaccatttgttgtattagtggatggtgggtaaaatatcattcactgaggtaatgattccccttgagaatataactctgtgtaggtcactggaaagtgattgccatagggctgggagagaagcattgcactcttgaggctgtagcctgtgtcaagctgtttcttcaggcagcctctcaaatgtgctttgtctctctgtgctgaggcctggaccctgtgctgagctggtgactcactgtcctgacaagtggacacacagatgcactgctgtgctgctttcctgaggtggttttctatgcctgttttcctctgaaacatgtctgttacccctctccatcttaccaagttgaaaaggggaatatttggccacatacccctctggttttcgtaggttcttttggttcagaatattgtttgtgccagtacatgaccttaacttccttcctcagagcactgagctgccatctgggctattctggggtagaaggaaggctgggagtggtgggaattttataaatatttattctcttttctttgtttcataggagtcttgtgttatacaaggttagtccttcatggtataatcttactgatgcactgggcctatctttttgttttccagccagttgaatagattagtttttctcagtaacttactatccagcagactggctttcctgagacttgaggttgtggcttatactggaatgagaccactgtacgtgtaggtggttcagatcctgcgtaatggcagcatgaggacttaaaaggtggttttcattttgaagatggctatgtagcttgtaaggtgtatcacagcagtacctctcatggctttttggttccagcagtgagggcattggtgagatcaatggtaaactgtgcaagctttctttttatcattaggaaatgtgaaacgttggacaaattttgagttttaacaaggacaaaaagttgaaagaaaaggcacagttaacaaaaaagggtggctagatttatcttgggtgatggaggaaatgagagaggaatgctcttgaaaggtggtctgtggatctgtctgaatagaaagagcacagtaagtatgcattgccggagaaaacgtccttgaagctgcttgtctcatgtgtatgatgtgctttttaaatcatgcccctcgttgcctgcctaatctgtgactccctaaaaactaactgggcccatgtagatggggctgcaaccagagctgaataacatgttaggctcacacatgcatcagcactgcacactggaatcattgctcttcctggactttgtagaaatcagtctcaagtgcttcaagagtctggctcctgctacttttatctgtcaggtagcacataaggtttgcagggtttatattttgtatagaatcacagttgtggagaaaaagtaataatttctcaatgaattttaaaaatgggcctattttctatccccgtggttcatctgatataattagtgttccctgtgaattccccccctctatgggaaggatgcctttactctttatcagtaataaattatgactgttttcatattgccttagggttatttccctgtgtaaaccattgtcttttgttttggttttctttagcattatgaagctttggtattgtacaaggtcagtagtaagatgctcactagtctcagggcttgtgtaatattctgggaggtcatttaaatgccagaaatggtcaagcaattatacacagtatttatgactctgttaagcataccgtttgtctgtcacattagtagattctgagattaaaaaaaatttttaaagagtgatcatttaaataatttctaaaagggtcttttcaagctctaacaaagtcactaacaaatgcattattttctacagaattagatgttagtagtacagtactgcatattcagggaaaaagtgtgaggaattgatttcaaaatagttcgttcttgtgtttgacctaagaatgattgtcgcatgaagtgtttgtttttacagtttagcatatataaacaaacatgataggattccttaagatgttaccacccagggggccacaagccagcctgctgtctcaggaagctgtagaaggagtgtttgtcaatttcttgtcactggtttgctgacttactgaggattaattgttgccttacaatgttactgaaataaactgtttaatataaaaaaaaaaaaaaaaaaaaaaaaaaaaaaaaaaaa

SEQ ID NO: 3743 - protein, 799 aa, Homo sapien
GAGTGLSEVRAALGLALYLIALRTLVQLSLQQLVLRGAAGHRGEFDALQARDYLEHITSIGPRTTGSPENEILTVHYLLEQIKLIEVQSNSLHKISVDVQRPTGSFSIDFLGGFTSYYDNITNVVVKLEPRDGAQHAVLANCHFDSVANSPGQSWFHYSAPLGSLIRAFINLEAAGVGGKELVFQTGPENPWLVQAYVSAAKHPFASVVAQEVFQSGIIPSDTDFRIYRDFGNIPGIDLAFIENGYIYHTKYDTADRILTDSIQRAGDNILAVLKHLATSDMLAAASKYRHGNMVFFDVLGLFVIAYPSRIGSIINYMVVMGVVLYLGKKFLQPKHKTGNYKKDFLCGLGITLISWFTSLVTVLIIAVFISLIGQSLSWYNHFYVSVCLYGTATVAKIILIHTLAKRFYYMNASAQYLGEVFFDISLFVHCCFLVTLTYQGLCSAFISAVWVAFPLLTKLCVHKDFKQHGAQGKFIAFYLLGMFIPYLYALYLIWAVFEMFTPILGRSGSEIPPDVVLASILAGCTMILSSYFINFIYLAKSTKKTMLTLTLVCAITFLLVCSGTFFPYSSNPANPKPKRVFLQHMTRTFHDLEGNAVKRDSGIWINGFDYTGISHITPHIPEINDSIRAHCEENAPLCGFPWYLPVHFLIRKNWYLPAPEVSPRNPPHFRLISKEQTPWDSIKLTFEATGPSHMSFYVRAHKGSTLSQWSLGNGTPVTSKGGDYFVFYSHGLQASAWQFWIEVQVSEEHPEGMVTVAIAAHYLSGEDKRSPQLDALKEKFPDWTFPSAWVCTYDLFVF

SEQ ID NO: 3744 - DNA, 3455 bp, Homo sapien
tgtgaagtcaactttatcccagacagttccatccaagggagaattaagtagagaaatttgtctgcaatctcaatctaaagacaaatctacgacaccaggaggaacaggaattaagcctttcctggaacgctttggagagcgttgtcaagaacatagcaaagaaagtccagctcgtagcacaccccacagaacccccattattactccaaatacaaaggccatccaagaaagattattcaagcaagacacatcttcatctactacccatttagcacaacagctcaagcaggaacgtcaaaaagaactagcatgtcttcgtggccgatttgacaagggcaatatatggagtgcagaaaaaggcggaaactcaaaaagcaaacaactagaaaccaaacaggaaactcactgtcagagcactcccctcaaaaaacaccaaggtgtttcaaaaactcagtcacttccagtaacagaaaaggtgaccgaaaaccagataccagccaaaaattctagtacagaacctaaagaagtgatacgtgaaattgagatgagtgtggatgatgatgatatcaatagttcgaaagtaattaatgacctcttcagtgatgtcctagaggaaggtgaactagatatggagaagagccaagaggagatggatcaagcattagcagaaagcagcgaagaacaggaagatgcactgaatatctcctcaatgtctttacttgcaccattggcacaaacagttggtgtggtaagtccagagagttcagtgtccacacctagactggaattgaaagacaccagcagaagtgatgaaagtccaaaaccaggaaaattccaaagaactcgtgtccctcgagctgaatctggtgatagccttggttctgaagatcgtgatcttctttacagcattgatgcatatagatctcaaagattcaaagaaacagaacgtccatcaataaagcaggtgattgttcggaaggaagatgttacttcaaaactggatgaaaaaaataatgcctttccttgtcaagttaatatcaaacagaaaatgcaggaactcaataacgaaataaatatgcaacagacagtgatctatcaagctagccaggctcttaactgctgtgttgatgaagaacatggaaaagggtccctagaagaagctgaagcagaaagacttcttctaattgcaactgggaagagaacacttttgattgatgaattgaataaattgaagaacgaaggacctcagaggaagaataaggctagtccccaaagtgaatttatgccatccaaaggatcagttactttgtcagaaatccgcttgcctctaaaagcagattttgtctgcagtacggttcagaaaccagatgcagcaaattactattacttaattatactaaaagcaggagctgaaaatatggtagccacaccattagcaagtacttcaaactctcttaacggtgatgctctgacattcactactacatttactctgcaagatgtatccaatgactttgaaataaatattgaagtttacagcttggtgcaaaagaaagatccctcaggccttgataagaagaaaaaaacatccaagtccaaggctattactccaaagcgactcctcacatctataaccacaaaaagcaacattcattcttcagtcatggccagtccaggaggtcttagtgctgtgcgaaccagcaacttcgcccttgttggatcttacacattatcattgtcttcagtaggaaatactaagtttgttctggacaaggtcccctttttatcttctttggaaggtcatatttatttaaaaataaaatgtcaagtgaattccagtgttgaagaaagaggttttctaaccatatttgaagatgttagtggttttggtgcctggcatcgaagatggtgtgttctttctggaaactgtatatcttattggacttatccagatgatgagaaacgcaagaatcccataggaaggataaatctggctaattgtaccagtcgtcagatagaaccagccaacagagaattttgtgcaagacgcaacacttttgaattaattactgtccgaccacaaagagaagatgaccgggagactcttgtcagccaatgcagggacacactctgtgttaccaagaactggctgtctgcagatactaaagaagagcgggatctctggatgcaaaaactcaatcaagttcttgttgatattcgcctctggcaacctgatgcttgctacaaacctattggaaagccttaaaccgggaaatttccatgctatctagaggtttttgatgtcatcttaagaaacacacttaagagcatcagatttactgattgcattttatgctttaagtacgaaagggtttgtgccaatattcactacgtattatgcagtatttatatcttttgtatgtaaaactttaactgatttctgtcattcatcaatgagtagaagtaaatacattatagttgattttgctaaatcttaatttaaaagcctcattttcctagaaatctaattattcagttattcatgacaatatttttttaaaagtaagaaattctgagttgtcttcttggagctgtaggtcttgaagcagcaacgtctttcaggggttggagacagaaacccattctccaatctcagtagttttttcgaaaggctgtgatcatttattgatcgtgatatgacttgttactagggtactgaaaaaaatgtctaaggcctttacagaaacatttttagtaatgaggatgagaactttttcaaatagcaaatatatattggcttaaagcatgaggctgtcttcagaaaagtgatgtggacataggaggcaatgtgtgagacttgggggttcaatattttatatagaagagttaataagcacatggtttacatttactcagctactatatatgcagtgtggtgcacattttcacagaattctggcttcattaagatcattatttttgctgcgtagcttacagacttagcatattagttttttctactcctacaagtgtaaattgaaaaatctttatattaaaaaagtaaactgttatgaagctgctatgtactaataatactttgcttgccaaagtgtttgggttttgttgttgtttgtttgtttgtttgtttttggttcatgaacaacagtgtctagaaacccattttgaaagtggaaaattattaagtcacctatcacctttaaacgcctttttttaaaattataaaatattgtaaagcagggtctcaacttttaaatacactttgaacttcttctctgaattattaaagttctttatgacctcatttataaacactaaattctgtcacctcctgtcattttattttttattcattcaaatgtattttttcttgtgcatattataaaaatatattttatgagctcttactcaaataaatacctgtaaatgtctaaagg

SEQ ID NO: 3745 - protein, 573 aa, Homo sapien [sequence omitted]

SEQ ID NO: 3746 - DNA, 1510 bp, Homo sapien
gcggcaatcatggcgccacctgtgagatactgcatccccggcgaacgtctgtgtaacttggaggagggcagcccgggcagcggcacctacacccgccacggctacatcttttcgtcgcttgccggctgtctgatgaagagcagcgagaatggcgcgcttccagtggtgtctgtagtgagagaaacagagtcccagttactgccagatgtgggagctattgtaacctgtaaggtctctagcatcaattcacgctttgccaaagtacacatcctgtatgtggggtccatgcctcttaagaactcttttcgaggaactatccgcaaggaagatgtccgagcaactgaaaaagacaaggttgaaatttataagagtttccgcccaggtgacattgtcttggccaaagtgatctccttaggtgatgcacagtccaactacctgctaaccaccgccgagaacgagctgggagtggtggtagcccacagtgagtcaggtatccagatggttcccatcagctggtgtgagatgcagtgccctaagacccacactaaagaattccggaaagtagcccgagtacaacccgaattcttgcagacctaagaagccactttttaccctatggaagggggtaagctgttcctgagtataacaccaagatgctgctgtctttattcaaacacctggcgtcggccaacagccacttccagaaaaatcttccagtttacgctgtagatggaacatgtttctgtgaacctatcagtggatttcattctcttgagtaataaatcttatcttttcaaggcaccaacaaacaaaactgtgatattggaaatagcctatccctcctgacagtccttataaatacatattttttgctatgataaaacttttttactaaaaggatgttatagagtctgttgtcttaagcagagaaagacatctaaatggtgtcaggacatttcagtacttctgcttattgagtacttactgtgctaggcactgagtcaggtgctttacatacgtccccttcatttaggtacattgtgatttaatgaaaatttgaggacacgtggtgatacagatagcatgtgaggcaggcatggtggctcatgtttgtaaatcccagcactttgggaaggccgagttggttttgaactcctggcctcccaaggtgctgatagtacaggcatgaaccactgtgcttggccttttaaaattttgtagagatgcagtcttactatgttgcccaggctgtctcaaactcctggcctcaagtggtcctcctgccttggcctcccaaaatgttgcaattacaggcatgagcactgtgcttggcaagctaaggaggattttcactagcagtttcatttgacaataccaatctagaggtgagcttctcaatctttaatgtgtatccaaatcacctggggaatagatgccgattctgaaacaggtctggagtgagacctgaggttctgcatgtataacaagctcccagggggtccagctgtca

SEQ ID NO: 3747 - protein, 195 aa, Homo sapien
MAPPVRYCIPGERLCNLEEGSPGSGTYTRHGYIFSSLAGCLMKSSENGALPVVSVVRETESQLLPDVGAIVTCKVSSINSRFAKVHILYVGSMPLKNSFRGTIRKEDVRATEKDKVEIYKSFRPGDIVLAKVISLGDAQSNYLLTTAENELGVVVAHSESGIQMVPISWCEMQCPKTHTKEFRKVARVQPEFLQT

SEQ ID NO: 3748 - DNA, 1041 bp, Homo sapien
gggcggcgatggcggcggcggaggccggtggcgacgacgcccgctgcgtgcggctgagcgccgagcgggcacaggcgctgctggccgacgtggacacgctgctgttcgactgcgacggcgtgctgtggcgcggggagaccgccgtgcctggcgcgcccgaggccctgcgggcgctgcgagcccgcggcaagcgcctgggcttcatcaccaacaacagcagcaagacccgcgctgcctacgccgagaagctgcggcgcctgggcttcggcggccccgcggggcccggcgccagcctggaggtcttcggcacggcctactgcaccgcgctctacctgcgccagcgcctggccggcgcccccgcgcccaaggcctacgtgctgggcagcccagccctggccgcggagctggaggccgtgggcgtcgccagcgtgggcgtggggcccgagccactgcagggcgagggtcccggcgactggctgcacgcgccgctggagcccgacgtgcgcgcggtggtggtgggctttgacccgcacttcagctacatgaagctcaccaaggccctgcgctacctgcagcagcccggctgcctgctcgtgggcaccaacatggacaaccggcttccgcttgagaacggccgcttcatcgcgggtaccgggtgtctggtccgagccgtggagatggccgcccagcgccaggccgacatcatcgggaagcccagccgcttcattttcgactgcgtgtcccaggaatacggcatcaaccccgagcgcaccgtcatggtgggagaccgcctggacacagacatcctcctaggcgccacctgtggcctgaagaccatcctgaccctcaccggagtctccactctaggggatgtgaagaataatcaggaaagtgactgcgtgtctaagaagaaaatggtccctgacttctatgttgacagcatagccgaccttttgcctgcccttcaaggttaaagattgagtgtctttaatctgcagaataaaaaaaaagaaattgaaaaaaaaaaaaaaaaaaaaaaaa

SEQ ID NO: 3749 - protein, 321 aa, Homo sapien
MAAAEAGGDDARCVRLSAERAQALLADVDTLLFDCDGVLWRGETAVPGAPEALRALRARGKRLGFITNNSSKTRAAYAEKLRRLGFGGPAGPGASLEVFGTAYCTALYLRQRLAGAPAPKAYVLGSPALAAELEAVGVASVGVGPEPLQGEGPGDWLHAPLEPDVRAVVVGFDPHFSYMKLTKALRYLQQPGCLLVGTNMDNRLPLENGRFIAGTGCLVRAVEMAAQRQADIIGKPSRFIFDCVSQEYGINPERTVMVGDRLDTDILLGATCGLKTILTLTGVSTLGDVKNNQESDCVSKKKMVPDFYVDSIADLLPALQG

SEQ ID NO: 3750 - DNA, 2064 bp, Homo sapien
ctgttccaaaccacgtggacgcgtctgggctgctggaggcagcccgagccgccgccgtcggtgtcgccgccaccaccaccatcggagtcacgagtcccgcgtctgtccgaagtcgccgctctcgggctgctcacgtctcttcggagagcgcgcacatggcgactcaggcgtactccctcagctacgcagggtgcaacttcttgcgccaacgtctggtcctgtctaccctgagcgggcgccccgtcaaaatccgaaagattcgggccagagacgacaacccgggcctccgagattttgaagccagcttcataaggctattggacaaaataacgaatggttctcgaattgaaataaaccaaacaggaacaaccttatattatcagcctggcctcctgtatggtggatctgtggaacatgactgtagcgtccttcgtggcattgggtattacctggagagtcttctttgcttggctccatttatgaagcacccgttaaaaatagttctacgaggagtgaccaatgatcaggttgacccttcagttgatgttcttaaggcaacagcactccctttgttgaaacaatttgggattgatggtgaatcatttgaactgaatattgtgcgacggggaatgcctcccggaggaggaggcgaagtggttttctcatgtcctgtgaggaaggtcttgaagcccattcaactcacagatccaggaaaaatcaaacgtattagaggaatggcgtactctgtacgtgtgtcacctcagatggcgaaccggattgtggattctgcgaggagcatcctcaacaagttcatacctgatatctatatttacacagatcacatgaaaggagtcaactctgggaagtctccgggctttgggttgtcactggttgctgagaccaccagtggcaccttcctcagtgctgaactggcctccaacccccagggccagggagcagcagtacttccagaggaccttggcaggaactgtgcccggctgctgctggaggaaatctacaggggtggatgcgtagactcgaccaaccaaagcctggcgctactactcatgacccttggacagcaggatgtttccaaagtcctgctaggccctctctctccctacacgatagaatttttgcggcatttgaagagctttttccagattatgtttaaaattgaaaccaagccatgtggtgaagaactcaagggtggggataaagtgctgatgacctgtgttggcattggtttctccaaccttagcaagaccctcaagtgataaccatcacaagataaggccccagtgcctacagacaaagcagaagctgccacggacaccaatgggaccaagtccaaatggattaatccaggacagaatagccacttgcttaattttctgtgaagaaatatcaatatacaaataaaagacatccctgtagcatatggtttccagctgtttctccagtggcattgccattgcccaggaggggcccagtcaccatgagagctcccttgccttacctggaggaagaatgtgccttcaggccacagtcgtgctgctagaacagtctcatagctgcagttcagctgtgcttcctcagcctactatcataggcttcctcagccctctgtcatatggctgttttgcaaacctgtggagtctgttactgttctttctgcaaggactcacctccttgagccttggtttttgttgtagggattaaatgagataatatgagtggcagctcttcatgagtcctgcagtgctaagcaaatgtcagaaattggtgtattagactatttatctttgatcttctgaatggattgctgtcatggacacggacacggatcttcatctggttcattgtatttatatgtgagggatggatggctgcggggctccaagtaagttattgggatgttttttatattccaggtgtgctgtacattcttattttattttcacaacagctctgtgatgtaaatgctatctccatgagaaaattcataaagggtgttttgttcctttgaaatgtataatgtaaagacattaaatctcctcattt

SEQ ID NO: 3751 - protein, 373 aa, Homo sapien
MATQAYSLSYAGCNFLRQRLVLSTLSGRPVKIRKIRARDDNPGLRDFEASFIRLLDKITNGSRIEINQTGTTLYYQPGLLYGGSVEHDCSVLRGIGYYLESLLCLAPFMKHPLKIVLRGVTNDQVDPSVDVLKATALPLLKQFGIDGESFELNIVRRGMPPGGGGEVVFSCPVRKVLKPIQLTDPGKIKRIRGMAYSVRVSPQMANRIVDSARSILNKFIPDIYIYTDHMKGVNSGKSPGFGLSLVAETTSGTFLSAELASNPQGQGAAVLPEDLGRNCARLLLEEIYRGGCVDSTNQSLALLLMTLGQQDVSKVLLGPLSPYTIEFLRHLKSFFQIMFKIETKPCGEELKGGDKVLMTCVGIGFSNLSKTLK

SEQ ID NO: 3752 - DNA, 1843 bp, Homo sapien
ggcccttgaattccgcggaacgaggtggtgccaacgctgtgtttcaacccggtcactaaacatccgcgagcatcctgtcagagctctcagctcattggcgaaagtaaaacgccaaggaaaagcacctccctttttgggcgtggaaagatggcggtaaaagccacaatgcgcaggcgtcatcgctcacttctcccctcccggcttctgctccacctgacgcctgcgcagtaagtaagcctgccagacacgctgtggcggctgcctgaagctagtgagtcgcggcgccgcgcacttgtggttgggtcagtgccgcgcgccgctcggtcgttaccgcgaggcgctggtggccttcaggctggacggcgcgggtcagccctggtttgccggcttctgggtctttgaacagccgcgatgtcgatcttcacccccaccaaccagatccgcctaaccaatgtggccgtggtacggatgaagcgcgccaggaagcgcttcgaaatcgcctgctacagaaacaaggtcgtcggctggcggagcggcttggaaaaagaccttgatgaagttctgcagacccactcagtgtttgtaaatgtttcctaaggtcaggttgccaagaaggaagatctcatcagtgcgtttggaacagatgaccaaactgaaatctattttgactaaaggagaagttcaagtatcagataaagacacacacaactggagcagatgtttagggacattgcaattattgtggcagacaaatgtgtgactcctgaaacaaagagaccatacaccgtgatccttattgagagagccatgaaggacatccactatttggtgaaaaccaacaggagtacaaaacagcaggctttggaagtgataaagcagttaaaagagaaaatgaagatagaacgtgctcacatgaggcttcagttcatccttccagtgaatgaaggcaagaagctgaaagaaaagctcaagccactgatcaaggtcatagaaagtaaagattatggccaacagttagaaatcgtatgtctgattgacctgggctgcttccgagaaattgatgagctaataaaaaaggaaaccaaaggcaaaggctctttggaagtactcaatctgaaagatttgaagaaggagatgagaaatttgaatgacacccatcagtctcttcacctctaaaacactaaagtgttttcgtttccaacagcactgtttcatgtctgtggtctgccaaatacttgctcaaactatttgacattttctatctttgtgttaacagtggacacagcaaggctttcctacataagtataataatgtgggaatgatttggttttaattataaactggggtctaaatcctaaagcaaaattgaaactccaggatgcaaaatccagagtggcattttgctactctgtctcatgccttgatagctttccaaaatgaaagttacttgaggcagctcttgtgggtgaaaagttttttgtacagtagagtaagattattaggggtatgtctatacgacaaaaggggggtctttcctaaaaaagaaaacatgatgcttcatttctacttaatggaacttgtgttctgagggtcattatggtatcgtaatataaagcttggatgatgttcctgattatctgagaaacagatatagaaaaattgtgtcggacttaaataattttcgttgaacatgctgccataacttagattattcttggttaaaaaataaaagtcacttatttctaattcttaaagtttataatatatattaatatagctaaaattgtatgtaatcaataaaaccactcttatgtttattaaactatggcttgtgtttctaga

SEQ ID NO: 3753 - protein, 122 aa, Homo sapien
MKDIHYLVKTNRSTKQQALEVIKQLKEKMKIERAHMRLQFILPVNEGKKLKEKLKPLIKVIESKDYGQQLEIVCLIDLGCFREIDELIKKETKGKGSLEVLNLKDLKKEMRNLNDTHQSLHL

SEQ ID NO: 3754 - DNA, 3333 bp, Homo sapien
cggcgccagcggccgcacgccgcggagcaggggctcggaggtcccgggattacggtgctcgagcacgctggtgggaaaggacccgggacttgaacagtgttgtgcggcgccatgcaggtctccagcctcaatgaggtgaagatttacagcctcagctgcggcaagtcccttcctgagtggctttctgataggaagaagagagcgctacagaagaaagatgtagatgtccgtaggagaattgaacttattcaggactttgaaatgcctactgtgtgtaccactattaaggtgtcaaaagatggacagtacattttagcaactggaacatataaacctcgggttcgatgttatgacacctatcaattatccttgaagtttgaaaggtgtttagattcagaagttgtcacctttgaaattttgtctgatgactactcaaagattgtcttcttacataatgatagatacattgaatttcattcgcaatcaggtttttactacaaaaccagaataccaaagtttgggagagatttctcttaccactatccatcctgtgacttgtactttgttggtgcaagttctgaagtttataggttaaacttagaacaaggacgatacctgaatcctctacaaactgatgctgcggagaataatgtttgtgacataaattcagtgcatggcttgtttgccacaggaaccatagagggtagagtggagtgctgggacccaagaactcgaaacagagttggcctgttagactgcgccttaaacagtgtcacagcagattcagagataaacagtttaccaacaatctctgctttgaaatttaatggtgccttgaccatggcagttggaacaaccacagggcagggaaaaatatttacttccttggagccagagcatgaccttaatgatgtttgtctctaccccaactcaggcatgctcctgacggccaatgaaacccccaagatgggcatctattacattccagttttgggtcctgctcctcggtggtgttccttcttagacaacttgaccgaagaattagaagagaatccagaaagcacagtctatgatgattataaatttgtcaccaagaaagaccttgaaaatttagggctcacccacctcattggatctcctttcctccgggcatatatgcatgggtttttcatggatataagactctatcacaaggtgaaactgatggtaaatccatttgcttatgaagaatataggaaagataaaatacgacagaaaatagaagaaacacgtgcacagagagtccagttaaagaaattgccaaaagttaacaaagagctggcacttaaattaattgaggaagaagaggagaagcagaaatctacatggaaaaagaaagttaagagtcttcctaatattctcaccgatgatcgatttaaagttatgtttgagaaccctgacctccaagtagatgaagagagtgaagaatttaggcttctgaatccacttgtttcaaaaattagtgaaaaaaggaagaagaaactaagactcttagagcaacaagaacttcgtgaaaaagaagaggaggaagagccggaaggaaaaccaagtgatgcagaaagttcggagagttcagatgatgaaaaagcctgggttgaagaggtcaggaagcaacgcagactcctccagcgggaggaaaaagtgaagcggcaggaacgactcaaggaggaccagcagacagtcctaaagccccagttttatgagatcaaagcaggagaagaatttagaagcttcaaagattctgccacaaagcagaaactgatgaacaaaacccttgaagatcgtttgaaaattgaagcaaaaaatgggacattgagtgtatccgacaccaccgttggcagcaaacaattgacattcacgttaaagaggtctgaacagcagaagaagcaacaggaggctgagaaactacatcgacaagaaaggaaaagactccgtcgttcggccggacacctgaagtcaagacacaaaagaggacggtcgtttcattgatttgggaagtggtcctacctgtgattagggaggggtacgtctcccccaaactgatcatcgttagggtgttaaacacagacgaggaaacacacgtttttaaagttcatgtacgttcttgtacacagaggtaaagatttgaaaacctgtgccttgtgggttggactttgaagctggccccgccgacggccaccgcacagccccaggggtgtacttgcaagtcgttgctccctgggaacattgtcctttccccacggctttaatcatgaaaaccaggttggggttttttttttaatattgtgaaatgtacaccatgaaatgaaaggtttatcctgtgccagaaaccaaggtttatcatgctctaggaacttttttcttacactgcctaccgccattcatgattaaaccatccagaaataccatccctgttttacctggtgtctgtgtattgcctgtgtttgtgtttataagtttatgctgataggtttgttcggcttgtttatgtattagtttgggatttgtttttaaataatttataccaagagagtataatctaatggtgcaggttgagagcatcccaaatccgaaaatctaaaactgtttgagcactgtatttatctgttcttgcactgctataaagaactacctgaaactgggtaatttataagtaaagaaaagaggtttaattgactcacagttctacaggtgatacaggaagcatggctgtggaggccctgggaagcttacaatcgtggcggaaggtgaagcggaagcaggtatgtcctgcgtggctagagccagaggaggagggcaaaggggcagatgctgcacactttcaaacaccagatctccaagaactcactaacacagaatagcaagggggaagtctgcccccatgtttcagtcacctccctccaggcccctcctccaacaccgaagattacaatttgacatgagatttgtgtggggacacagagcaaaaccatatcaagcactgacatgacactggaggaaaatgctcattagagcttttcaggttttggattttcggatttgggatacttgactagtaaatataatacagatattccaaaacacacaaaaaaaccaaagtctaaaagacttctggtcccaagcatttcagataagggatacccaacctgtaataatgggaaacaagcagtagaggctgttggttaatcttggcacaagtttaattacaggtttttttttttcctgtttcttaagtacagtcaaacataaacttactggaggaaacatttataaaaataaatatactttcatttg

SEQ ID NO: 3755 - protein, 638 aa, Homo sapien
MQVSSLNEVKIYSLSCGKSLPEWLSDRKKRALQKKDVDVRRRIELIQDFEMPTVCTTIKVSKDGQYILATGTYKPRVRCYDTYQLSLKFERCLDSEVVTFEILSDDYSKIVFLHNDRYIEFHSQSGFYYKTRIPKFGRDFSYHYPSCDLYFVGASSEVYRLNLEQGRYLNPLQTDAAENNVCDINSVHGLFATGTIEGRVECWDPRTRNRVGLLDCALNSVTADSEINSLPTISALKFNGALTMAVGTTTGQGKIFTSLEPEHDLNDVCLYPNSGMLLTANETPKMGIYYIPVLGPAPRWCSFLDNLTEELEENPESTVYDDYKFVTKKDLENLGLTHLIGSPFLRAYMHGFFMDIRLYHKVKLMVNPFAYEEYRKDKIRQKIEETRAQRVQLKKLPKVNKELALKLIEEEEEKQKSTWKKKVKSLPNILTDDRFKVMFENPDLQVDEESEEFRLLNPLVSKISEKRKKKLRLLEQQELREKEEEEEPEGKPSDAESSESSDDEKAWVEEVRKQRRLLQREEKVKRQERLKEDQQTVLKPQFYEIKAGEEFRSFKDSATKQKLMNKTLEDRLKIEAKNGTLSVSDTTVGSKQLTFTLKRSEQQKKQQEAEKLHRQERKRLRRSAGHLKSRHKRGRSFH

SEQ ID NO: 3756 - DNA, 6334 bp, Homo sapien
cttaagggcgggagtctcggtttgtggtggcttcgctgaggcagtggtggccgcactataccgttagaaactcaatttcccggaggttgtgaggccctttgaggcgaaatcgctctgggcgtgaaaggagcaggcgttggcaatggaaggaccaccgcgacctcaggctgaccgtagggagggatcttgagggccctccgagtcccctgggcttgcgctttctttctttgcagccaccgtgcctaccgcgaggatgagctcggcctcggtcaccgctttcgagaaggagcatctctggatgtatctgcaggcgctcggcttcgagccaggcccggcaaccattgcctgcggaaagatcgtgtcgcacacgcacctcggagtgaacatgtttgacaagctgaaccgtgatgcctttcatataatttcttattttttgtttcaagttctggaccagtctctcaccaaagaagttttcaaattttgttggcccccatttgaccaaaaaagtgacactgaattccgaaaacattgctgtgaatggataaaaaggatttctggtgaatgtggaagtagctttcctcaagttgttggttcactatttctttctcctggtggtcctaagtttattcatctgatgtatcattttgcaagatttgttgcaatgaaatatattaaatccaattctaaaaattcttctcatcattttgtagagacatttaacataaaaccacaggacttgcacaaatgcattgccagatgccatttcgcacgtagcagatttttacaaattttgcaaagacaagattgtgttacccaaaaatatcaggaaaatgcacaattatcagttaagcaggtacgaaacttgagatctgaatgtataggattggaaaaccaaataaagaaaatggaaccctatgatgaccacagtaatatggaagaaaaaattcaaaaggttcggtctttgtgggcttcagtgaatgaaacgctcatgtttttggaaaaagagagagaagttgttagttcggtccttagtcttgttaaccaatatgctttagatggaactaatgttgctattaatattccaaggctcttacttgacaaaattgagaaacaaatgtttcagttgcacataggaaatgtttatgaggctggaaaactgaacctcttaacagttattcagttattaaatgaagtcttgaaggtgatgaaatatgaacgttgtcaggctgatcaagcaagattgacggtagaccttcactaccttgaaaaagagaccaaatttcagaaggaaagattatcagatctgaaacatatgaggtatagaataaaagatgatctcacaactataagacattctgttgttgaaaagcaaggagaatggcataaaaagtggaaagaatttcttggtttgtctcctttcagtctaattaaaggttggactccatctgtagatcttttaccaccaatgtctccgctttcgtttgatcctgcctcagaagaagtgtatgcaaagagtattctttgtcagtatcctgcttcacttccagatgcacataagcaacataaccaagaaaatggttgcagaggagacagtgataccttgggagcgctacatgatctagccaacagccctgcctctttcttgtcgcagtcagtttcatcatcagatagaaacagtgttacagtacttgaaaaggacacaaagatgggaactcccaaagaaaaaaatgaagcaatttctaagaaaataccagaatttgaagtggaaaattctccattgtcagatgttgcaaagaatacagagagtagtgcatttggagggtctttgccagctaaaaaaagtgatccatttcaaaaagagcaagatcatctggtagaagaggttgccagagcagttttatctgattcaccacagctctctgaaggaaaagaaataaaattagaggaactaattgactctctgggttctaaccccttcttaacaaggaatcagattccccgtactccagaaaacttgataactgaaattaggagctcatggagaaaagctattgaaatggaagaaaacagaactaaagaaccaattcaaatggatgctgaacatagagaagtattgccagaatcattacctgtgttgcacaatcaaagagaatttagcatggctgattttctcttagaaaccactgtatcagattttggccagtctcatttgactgaagagaaagttatttcagattgcgagtgtgtgcctcagaaacatgtgctgaccagtcacatagatgaaccaccaacacaaaatcagtcagatttgttaaataagaaagtaatttgcaagcaagatttggaatgtttagccttcaccaagctttcagaaactagccgaatggagacattctcccctgctgtcggcaataggatagatgtgatgggtggcagtgaagaggagtttatgaaaatattggaccacttagaagtttcttgtaacaaaccttccacaaataaaactatgttgtggaattcttttcagatatcaagtggaattagttctaagagttttaaagataatgattttggcatattacacgaaactctcccggaagaagttggtcatctaagttttaatagttccagtagttcagaggccaattttaaactggagccaaatagtcctatgcatggtggcactcttctagaagatgttgtgggagggagacagactactccagaatcagactttaatttacaggctcttcgcagtagatacgaggctctgaagaaatctctttccaagaaaagggaagaatcttacctctcgaattcccaaacacccgaaagacacaaaccagaattgagccctactccccaaaatgtacaaacagatgatacgcttaactttttggacacctgtgatttgcatactgagcatataaagccatctttacgcacgtccatcggtgaaagaaaacggtctctttcaccactaattaagttttctccagtggaacaaagattgagaaccacaatagcatgtagtcttggagaactacctaatttaaaggaagaagacattttgaataagagccttgatgcaaaagaaccaccgtctgacttgacaagatgaagacgtacccatttaatataactatgatgcacttaaattgaagctatgccacaggatagaaaatgaattacaacttaaatacatgttggaagtgtaacactgtttttcaaggtttaaaaaaattcctaatgccttttagccttctttaatatttttaggtaaggaaagtatgtttggattttttcctctttgtaggtatatgagattgaaatgtgaagtatttggacaacaaacgtcaagcaatgggaagccattttgatttcttgagtaatcttgtaagcattaagtgaatgacaaagtagtagtgtaacttatttcttatgttataacttcagtcaattaatataaggatagtttttgttgtatgttcactaaatggttaatataatagccattgaatatactaatctttcatcttagagaactatacaacttttattgtttcttaatggaacattctggctaaccagaaaaagtgagaaaagtagtaccttgggatgtgtagtcaagatgacaaattttaagactggaaaagctctaaacaggcttaatgattcttcaggtagaatgatcctgagaagtgatgtttgatggaataaagtgcatgtgatgattaagtgaagactggggcagaatgatttaaaaaaaggaaaaagatggaagatgagtagacacttgcaaggaacactgtcaaactataaatccattcagtgggttgtataacatttatatttagtctaatttagactttgataatttaatgctacttttatattttaacaaaaatataaattaaaattttcattagtctgttttgttgttgggtttttttgtgaggtactccctgttgggggaaaggaacaaggaacaaccatcagaatcccccagtccctacagaatagcctcacagtaacttgagaaaactgaacttggggttaaataacttgtcacacttgcagtctcctgcctcactccttcaggtgccctgcctagaaaaagacttgtgtctagcatccaagtgaacacatactattgccctctgtgaaccaggaggaatggaacaggcaatggaagggtgatagtacctacaataccctttgtagaccccatctcactaccatcaaaatcttgtccactagcccccaaaaaactggcaaggaaagaaggtggaggggaaatttatggaagtagatggcttaatagttatttcttttatcttgggctgcctttctctaagttggttgtcctgtcccagtgtgaagacccatctttttgtgagaaaagacaaaagaaagcacatgtaactaccttctttgcaatggaaaaggagaaagaaaaaatcttctcctaagttgctgttttcttttattagttaataaaacaaatcagggactatgcaggtctatggggaaacctttagtctgctttaagaaaactcagtatctgaaaatcttaacttagcatgtgatactgtcttatcagcatctgcagaagtgccaaagccactgctagacacttaatgtgtattatttcatttaattatattttaaatgtgcttccttggtaattcttaagctcgagaaagagtttgagaactgctgctaggaaatagagattcacatttaaccctgtggtacttttaagaagcaggtacgttgttgcatatatacttgggtagagattggtaactatctgatagggaagctcaagttggccacccaagtctgagaaacccttaattactgagaatcaaaagagcagaatgtctgtagacattttggatttgtaaaaatcacattgttgagttatacctgtgatgggctgaaagtttttggcattctttcctgttcttcatatgccagtaccataaacaaaaagtatctcagatctgtcactttcttctcctaaaccaatgtgattgcagctttttgccttcagccttttccctatccagtatctcctacatagttaccttttgatcttaaggaactgttttgattgggtcacttccttgcctaaaattccattgattgttcattgttaattctaaaatagagttcaaatttaaaggcatgtaagttcccctgtaacggatttcctctactcccccttccgctgtaatctcccatttttttactgaaatgcttcagtgagcatgggtctttagaggtcttgatatacaattttcctgaagcaggaataccttgctttcctctactagtttaccacaattacagctctcttttaagcctcagaaaaaaatctcacttccgtcttgaagtcttaatccacgctttttatatccatgtgcctactccttctctgaaatctcctatggtttatctttttattcatttaatatcccacgaattgattttattatatattttttatggttgcatgtggtctttctagttatagcaatatacacatacatgcataaatacatatacacctatgtaaatgtgtgttgggagtatgtattcacacacatacatataccccaaggccatgtgtcatctttatcaatatttaagttttggaattgttttgtttgcctcctatatcatggaataaatggtaaagagggctaatttattactctaagtggatttcttattacattaatatcagacatatagaatgtactttgttttactatttgtaagatacaaaggtatataaactgacatacatcagcttgaaacctgagataatgctaaaatgttctaattattttaaatgtttaaagaggacaaccatgtaatgttgctaaacatgaaaaatgtcatcaagtggaataaagaatagctgaagttaacatttgggggaaattgagctgaaaacaaaaatatgagtattttgataccttttctttaccatgagactcttgactatgaagtcaaatttatctaaaggaaaaacaggaattctggagacctgtgtaaaagcagactattatcttcctactgtgagagtactaaaattaaaatacgtttaatgacgttttcctcaatgtaaaagcattgaagtaaatgtttcttttatgttgcagatacatagttgctctagagatcacctttttctttatgcattgtgaatagcagtctgcatcctaagtttaaaatatttgagaatcctctatgggactctctgtaaatgttttaaatactgttgttttcaataaatattttatactaaaaaaaaaaaaaa

SEQ ID NO: 3757 - protein, 955 aa, Homo sapien
MSSASVTAFEKEHLWMYLQALGFEPGPATIACGKIVSHTHLGVNMFDKLNRDAFHIISYFLFQVLDQSLTKEVFKFCWPPFDQKSDTEFRKHCCEWIKRISGECGSSFPQVVGSLFLSPGGPKFIHLMYHFARFVAMKYIKSNSKNSSHHFVETFNIKPQDLHKCIARCHFARSRFLQILQRQDCVTQKYQENAQLSVKQVRNLRSECIGLENQIKKMEPYDDHSNMEEKIQKVRSLWASVNETLMFLEKEREVVSSVLSLVNQYALDGTNVAINIPRLLLDKIEKQMFQLHIGNVYEAGKLNLLTVIQLLNEVLKVMKYERCQADQARLTVDLHYLEKETKFQKERLSDLKHMRYRIKDDLTTIRHSVVEKQGEWHKKWKEFLGLSPFSLIKGWTPSVDLLPPMSPLSFDPASEEVYAKSILCQYPASLPDAHKQHNQENGCRGDSDTLGALHDLANSPASFLSQSVSSSDRNSVTVLEKDTKMGTPKEKNEAISKKIPEFEVENSPLSDVAKNTESSAFGGSLPAKKSDPFQKEQDHLVEEVARAVLSDSPQLSEGKEIKLEELIDSLGSNPFLTRNQIPRTPENLITEIRSSWRKAIEMEENRTKEPIQMDAEHREVLPESLPVLHNQREFSMADFLLETTVSDFGQSHLTEEKVISDCECVPQKHVLTSHIDEPPTQNQSDLLNKKVICKQDLECLAFTKLSETSRMETFSPAVGNRIDVMGGSEEEFMKILDHLEVSCNKPSTNKTMLWNSFQISSGISSKSFKDNDFGILHETLPEEVGHLSFNSSSSSEANFKLEPNSPMHGGTLLEDVVGGRQTTPESDFNLQALRSRYEALKKSLSKKREESYLSNSQTPERHKPELSPTPQNVQTDDTLNFLDTCDLHTEHIKPSLRTSIGERKRSLSPLIKFSPVEQRLRTTIACSLGELPNLKEEDILNKSLDAKEPPSDLTR

SEQ ID NO: 3758 - DNA, 5498 bp, Homo sapien
  Unsure 3395-3416, 4332-4374, 5476, 5479-5481, 5483-5484, 5486: Unknown base
ctcgagccgaattcggctcgagcgcctgggcggcggcggcggcggcgtgatggctccggccgcggaccgagagggctactggggccccacgacctccacgctggactggtgcgaggagaactactccgtgacctggtacatcgccgagttctggaatacagtgagtaacctgatcatgattatacctccaatgttcggtgcaattcagagtgttagagacggtctggaaaaacggtacattgcttcttatttagcactcacagtggtaggaatgggatcctggtgcttccacatgactctgaaatatgaaatgcagctattggatgaactcccaatgatatacagctgttgcatatttgtgtactgcatgtttgaatgtttcaagatcaagaactcagtaaactaccatctgctttttaccttagttctattcagtttaatagtaaccacagtttaccttaaggtaaaagagccaatattccatcaggtcatgtatggaatgttggtctttacattagtacttcgatctatttatattgttacatgggtttatccatggcttagaggactgggttatacatcattgggtatatttttattgggatttttattttggaatatagataacatattttgtgagtcactgaggaactttcgaaagaaggtaccacctatcataggtattaccacacaatttcatgcatggtggcatattttaactggccttggttcctatcttcacatccttttcagtttgtatacaagaacactttacctgagatataggccaaaagtgaagtttctctttggaatctggccagtgatcctgtttgagcctctcaggaagcattgatgaatcattccaccaagaaaacaaacaagcacctaccatagacctggcagaataaataaggaaatccttaaagatctacaagttcaaatatgtcatgaccatcacagcagaggagtgactttctgactaatgctgccacccacacagagaataaggagtagggcctgctgggtgtttagctcatggctttatcttatttgtccccctcctcctttcacgctccagtttataaagaaacagagatgatgtgtgtgtatgcctcaaatgcagaaacagttgggcttttcttaacaggttaacagtttgtgctggttataagaaattaaccttcttttctttttgccaagggttgcatgtgaattatacctttcttaatatttgattaaataatgcagtcagctaagagccaacaaaaccccatatccagatagttagctgtgagccagcactcagctgtgtcagatttgattaatattgtattaatctcatggatggttctcaaaggtaaaaaaagagagagaaagagagagagctagctgtgggattctgtgtagttcttcactatctgttccagggctagtcggaggatcataagcaagctcagacctgcccccagttcagtacttgaccacatcccaggatttatggtgtctgtctatggccacagccaaccagaatgagtgggtcatcttataacctttctgaagctccatgaggacatgtatagaatgctgcaccttcagccagctctgctctgatctttgcagatctttaagttgtcactgtttctacggctagacaaatatgactggtggtctagactacccatagttcatcctcctcacataacttatttgaagttgtcagggaatgtcattacactctgatttttaaaattatgcagtattttccagttctcagagaggtcatggttgtacccagggaagtgtgttgcattaactaaagctaaaattatcagaatcctatttacataaagcatattaaaatatctgctccttaattttctgaaggaaatagatgtaagtttctgctacttgaaacctacagaaccgacaaaaattagggtgctaaaaaaatgacagtgaaatctcatcgtaaggcagctagttctaatttgcatttgaatgtataacaaattgcatcacttttcacaaacttaacacctgcctggagtaaaaatctgatttgacccctctgctcatgtttcatcatatttgtagctctgcatcatttagcatttttatgactttttttgctttatataaattattgtaaaatccagattgtttttaccacatgatgacgtgactcaggattaaatcctgagctacagtttcaaaaggaaaatcatttttttcttatgcaaagatggtaaaacactgttgtcattttttccagtattcaataagtagcctttgtacaaatttaaaaccaaaaactattctgttgtttttcttcacctactagccttagtttttaaccaagtatccaaggatgtcaacttgacatccttcccttagcatgccaacaagccattagactgattcttccacctatttttatgaacctccaggaagaaaaacacttgccaaaacattaagagaactttgattctgccttaagagggtataaaactaaaccatttgaaggcacagcccataagactatacttgattttgccccaagattctgacttctggctacatttcacctgcagttacctgggctatcggccgtgatacattttttaattcatttgttttccaccattatatttttatacttttcagttagatatacttctgcataaagagtatatatacagtgtaggataaaggcatatcgtacatggcaatgctgttaaacatggtaagactgaggttctgcaggattaaagtcagattaagggtacagaaagcacaccttgatactgaggccatttagagcaatttgtttaatgagtggttcagccatcaccaccagtggccacctgttcaataaaattgcctagcaccacagtggagagtcatctacaccccaaggtgagctgtaagactggccaattctttgaagacctttttttctgttgggagaatggaaagcagaaagggaagccaggctctttaatgttccaagtcagctgtgcctcacacaaggctctctttttagctactaagtaacatactcaagactttgtatctgtgcagcattttatggaaatcactggtgacctataggatattactaaattatttcaatagctttatttttttcctacttggattctaggtggacattacagagttgaattcctcactaccccctcccgctgtcatttgttttattggaaaacttcatgttaactagagtgtacaaaaagtctgtttcctgctgagccaatagtgatttgtttgcatatcacctaatgtgaaaagtgctcatctgtgaactctatagcaaattatattttagaaaatactttgtgaggccgggcatggtggcagagcgagactccgtctcnnnnnnnnnnnnnnnnnnnnnnctctataaggatgtaaaagaagcaatttgcttgcacatctgaatatccttcttgtgtctccattttcactcttgaaaactgaaagcaatttgacttttatttttgtttttctaaagaacagctaggtgaaaggaggttaagctgattgtcactctgcctgcccactacctactccccaccatggtgtttcatgaaacatccccaccacctgaagtgatctttttaatccttgtgatagtaaatgcattgataattaacaggaaaaacatgtttttaaataatctacaaatgagaacccaaatggtagtgttttgtttgacagaagtaaatcaaatattatggtttaaatataatgcaaaatttcaggacagttaatttgggcttcccttaccctaagagggtttttcttataataaggagaagaggtgtggttcaaagaaaattaagagacaaaaccttcaggtacataatgcatgaaaatctttaaatgcctgcaaaaattaagttctgttataataccagccaattctgaattagccaatgccctaaaagcatctaacaatttaaggttatcttatgagtcctatgaaaacaattatttgttgctaaatttgagttttagctaccaacgccatgtttacgtgacaagaaattgttttggccctgtggtttatgacgtgctgctggataagcatttatgtaaaactgagtatttcaaagagaaccatttacaattggaatttccacctgtgtggctgtttgcagacctacctctgtcttccattttgcatcctgtcagtgctataattagtttgatcactttgtcttgtttttcagtgtctacaattatagcttattcactatgttctaactatttaaaaataatgggccgggcgcggtggctcatgcctgtggnnnnnnnnnnnnnnnnnnnnnnnnnnnnnnnnnnnnnnnnnnntggtttttacattttaaaaacgtttagagaaagaagaatatgcaacagaaactgtatgtagcctgcaaagcctaaaatgtttactctctggcttgggagtttgtctcccctgctctagactgtcagcaagtggtacagtggtacagtacagtggtactgcccaactgcacttctctgcaaggtgattctagtgtgcacttgtcagaatgaaaatatgttattcatttaagacatctcatgtctttgaatgtaatcacatgatttgtatttaatatttacatgacctaattattttttcacgtcagtttttctagattggcaatagcctgttgcaaagtgcctaaacctttgagaaaaattactatgagcaaggtccatgatttagttttcaatataaagggaattccattctatactgtaaaatccaaaaatgctagttgccctcagcttttgagttgacttccagaaagttgagatcttttgaccattttttctcgtgtcatataaaatgtgccacatggtagttgtcaagctgtggtagtcatgtacacttttttcttttttttaactttctaaaaggaaaagttcaaagtcctttccacagttagtcttcgcttcttttggatttttctttttagagctaaattattcataccaatgaataagtgagtctgttctaagatataggggccattatctatttttgcttaatggactcatgtggcattgttcactatcatgcctttccatacttgtaatatttctgagtcacttattaatgtgaccaacagataaactgttcaagctaatacagcatttcctaacttcatagttgtcgcagatgtttgttctagtagcgattatttaataaacatacattgtactgaatcttactagcaactaactattttcaggtaatctcagtctgcttattcactttttccatttgatttgctaatgccacaatcatttttctagaaaatagtaggataatgtattttttcctgtctgctataatggagactatatttctgcattcattacctctcataggtgaaaatattaaattaaataatattgttttgaataagaaaaaaaaaanaannnannanaaaaaaagggcg

SEQ ID NO: 3759 - protein, 283 aa, Homo sapien
  Unsure 3395-3416, 4332-4374, 5476, 5479-5481, 5483-5484, 5486: Unknown amino acid
SSRIRLERLGGGGGGVMAPAADREGYWGPTTSTLDWCEENYSVTWYIAEFWNTVSNLIMIIPPMFGAIQSVRDGLEKRYIASYLALTVVGMGSWCFHMTLKYEMQLLDELPMIYSCCIFVYCMFECFKIKNSVNYHLLFTLVLFSLIVTTVYLKVKEPIFHQVMYGMLVFTLVLRSIYIVTWVYPWLRGLGYTSLGIFLLGFLFWNIDNIFCESLRNFRKKVPPIIGITTQFHAWWHILTGLGSYLHILFSLYTRTLYLRYRPKVKFLFGIWPVILFEPLRKH

SEQ ID NO: 3760 - DNA, 2568 bp, Homo sapien; identical to SEQ ID NO: 3259

SEQ ID NO: 3761 - protein, 306 aa, Homo sapien; identical to SEQ ID NO: 3260

SEQ ID NO: 3762 - DNA, 1493 bp, Homo sapien
ctacagatactgccgtgtgagagtacctgaggggctcctgaaagacctactgccaggaccagtgaccctggtgatggaacgctcggaggagctcaacaaggacctaaacccttttacgcctcttgtaggcattcggattcctgatcatgcttttatgcaagacttggctcagatgtttgagggtccgcttgctctcactagtgccaacctcagctcccaggccagttctctgaatgtcgaggagttccaggatctctggcctcagttgtccttggttattgatgggggacaaattggggatggccagagccccgagtgtcgccttggctcaactgtggttgatttgtctgtgcccggaaagtttggcatcattcgtccaggctgtgccctggaaagtactacagccatcctccaacagaagtacggactgctcccctcacatgcgtcctacctgtgaaactctgggaagcaggaaggcccaagacctggtgctggatactatgtgtctgtccactgacgactgtcaaggcctcatttgcagaggccaccggagctagggcactagcctgacttttaaggcagtgtgtctttctgagcactgtagaccaagcccttggagctgctggtttagccttgcacctggggaaaggatgtatttatttgtattttcatatatcagccaaaagctgaatggaaaagttaagaacattcctaggtggccttattctaataagtttcttctgtctgttttgtttttcaattgaaaagtaattaaataacagatttagaatctagtgagagcctcctctctggtgggtggtggcatttaaggttcaaaccagccagaagtgctggtgctgtttaaaaagtctcaggtggctgcgtgtggtggctcatgcctgtaatcccaacattctgggaggcccaggcgggagaactgcttgagcccaggagttcagaatcagcctgggcaacatagcaatactccgtctcataaaaattaataaataaaaagtctcaggtgaccaaaggctcctgaagctagaaccaggtttggataaagattgaagagccacaggccactcttccctctgagccattgggcctagtggtgtcatgtattgtaattgctcgcagggagagcagtctttttggtgtaatagtgggatgtctgcttagttggcaggggttcagtccaaatggaagaatattgggaaataaacctccactatcctttatagccagggacttttttcttatttattcataaaataaattatagttaattatacccataacacctttatttaaatccagtgttctccgcagccttttgtctatttatatgtgtaccaagtgttaaacataattattattgggcatttgaactttgtttttctttaaagaaatgctgctattaaacatatttgtaaatggaaaaaaaaaaaaaaaaaaaaaaaaaaaaaaaaaaaaaaaaaaaaaaaaaaaaaaaa

SEQ ID NO: 3763 - protein, 127 aa, Homo sapien
MERSEELNKDLNPFTPLVGIRIPDHAFMQDLAQMFEGPLALTSANLSSQASSLNVEEFQDLWPQLSLVIDGGQIGDGQSPECRLGSTVVDLSVPGKFGIIRPGCALESTTAILQQKYGLLPSHASYL

SEQ ID NO: 3764 - DNA, 2798 bp, Homo sapien
cccttctcaagatggcgctgcactcaatgcggaaagcgcgtgagcgctggagcttcatccgggcacttcataagggatccgcagctgctcccgctctccagaaagacagcaagaagcgagtattttccggcattcaacctacaggaatcctccacctgagcaattacctgggagccattgagagctgggtgaggttacaggatgaatatgactctgtattatacagcattgttgacctccactccattactgtcccccaagacccagctgtccttcggcagagcatcctggacatgactgctgttcttcttgcctgtggcataaacccggaaaaaagcatccttttccaacaatctcaggtgtctgaacacacacaattaagttggatcctttcctgcatggtcagactacctcgattacaacatttacatcagtggaaggcaaagactaccaagcagaagcacgatggcacggtgggcctgctcacatacccagtactccaggcagccgacattctgttgtacaagtccacacacgttcctgttggggaggatcaagtccagcacatggaactagttcaggatctagcacaaggtttcaacaagaagtatggggagttctttccagtgcccgagtccattctcacatccatgaagaaggtaaaatccctacgtgatccttctgccaaaatgtcgaaatcagaccctgacaaactggccaccgtccgaataacagacagcccagaggagatagtgcagaaattccgcaaggctgtgacagacttcacctcggaggtcacctatgacccggctggccgcgctggcgtgtccaacatagtggcggtgcatgccgcggtgacggggctctccgtggaggaagtggtgcgccgcagcgcgggcatgaacactgctcgctacaagctggccgtggcagatgctgtgattgagaagtttgccccaattaagcgtgaaattgaaaaactgaagctggacaaggaccatttagagaaggttttacaaattggatcagcaaaagccaaagaattagcatacactgtgtgccaggaggtgaagaaattggtgggttttctataggaagtttcaacgaatcacagcaaggcttttgtgccttgcactccatgcattctgataacggcagctttcctaaaaagaaaaagttatagttttgggacatttaatttggtatagctgattattggctttatttgatgaatattgctttgtagctttgaaatacgacagtgttccaaatcccatcaacaaaatgctgtgaacaacaacaacaaaaaataaatcaagaaggcatagctgtctgaatcccgaattattgaggcacactccttggcctgcagaaatgtgattgaagtaaggagtaatttgggaaatggagtatcatttgtgcttctctctggagtacttactgtaacagatgcacacgttatctacttcaacccttttataaagcaatatatagaggtcttagatgtataatccttgagatgccatttgatcagatgccaatttgtattcagagctcataaaaacaagtccattcttatagtttgtttgtcactgagacggtgcctgatttaatatatttaagctgcttaacttgttttccaagagataacaccaactgttccagcaataatttgttttttaattcagagatatgggatatgatcttctaaggaggttgcattattttgacctgatttatttattgtacaagagcccaagtccctgaattatattcttaataagtgctttcttgcattcatttcagtttagtctcaccaacccactatgaattaggagaattattgtcattttacacatgaggaaagtgaggctgagagaatccaattagcttgtacgatatcactccataagagaagcaaatctgagagtaaaacccttaccccttattcttaagaatagtgcttgtttattcagtacaaaaaaaatgctgaaaggcagcgttttttagactctaaacattctgattttgaaggtgggtattggaacgactgatgatgttttttatatcatcaattcagccaatggatgcgaacttaaaatctggattcacagaaccgtggtcacatttccccatcaaaatccccaaggcgggtcccaagttctctcctctacgctcattgcagaaatactttgaaataggttctgccagtctacaatagcagtgaagactgacaaatcagatattcccaatgactgacagcttctcatcttgcctctacctcagttaagtaatgtcaccctgaaacctagcttttctgcacttccatttctgacacctgaaaatgaaaatgataatcctaacttatacaccaagacctgttagcaagatcgattttgtaacagaaattgcttataagttttttatcagtaaggaccatgatcaccatttgtacatacataactaggttgttgagcaaagcatttttgctcatgtttcttaaggaagtagagtagtccttgtgtcagaacacatgttaatccacaaaacgccgcatcccagattccaaattaaaacatcgtttttaggattcttggagctagcctggatcatgggtaaaggaaacattttgccttttgtatcttatactggaatgggatgtctgtaagtcctagaacctctttgagcatatttcttacaagcctctgttttttcccctttaaaggaaactttgaaaggattgtgaatactggaaaatgacaaaactaaaggtagatctaccaaaaaaaaaaaaaaaa

SEQ ID NO: 3765 - protein, 360 aa, Homo sapien
MALHSMRKARERWSFIRALHKGSAAAPALQKDSKKRVFSGIQPTGILHLSNYLGAIESWVRLQDEYDSVLYSIVDLHSITVPQDPAVLRQSILDMTAVLLACGINPEKSILFQQSQVSEHTQLSWILSCMVRLPRLQHLHQWKAKTTKQKHDGTVGLLTYPVLQAADILLYKSTHVPVGEDQVQHMELVQDLAQGFNKKYGEFFPVPESILTSMKKVKSLRDPSAKMSKSDPDKLATVRITDSPEEIVQKFRKAVTDFTSEVTYDPAGRAGVSNIVAVHAAVTGLSVEEVVRRSAGMNTARYKLAVADAVIEKFAPIKREIEKLKLDKDHLEKVLQIGSAKAKELAYTVCQEVKKLVGFL

SEQ ID NO: 3766 - DNA, 2721 bp, Homo sapien
gccggcgcggaggagcgggcggccgcggctgtgccctctcctactcctcaccgcgcgagcgcggggaaccagtagccgcggctgcttcggttgccgcggtcggtggtcgttatggattctccatgggacgagttggctctggccttctcccgcacgtccatgtttcccttttttgacatcgcgcactatctagtgtcagtgatggcggtgaaacgtcagccgggagcagctgcattggcatggaagaatcctatttcaagctggtttactgctatgctccactgttttggtggaggaattttatcctgtctactgcttgcagagcctccattgaagtttcttgcaaaccacactaacatattactggcatcttcaatctggtatattacatttttttgcccgcatgacctagtttcccagggctattcatatctacctgttcaactactggcttcgggaatgaaggaagtgaccagaacttggaaaatagtaggtggagtcacacatgctaatagctattacaaaaatggctggatagtcatgatagctattggatgggcccgaggtgcaggtggtaccattataacgaattttgagaggttggtaaaaggagattggaaaccagaaggtgatgaatggctgaagatgtcataccctgccaaggtaaccctgctggggtcagttatcttcacattccagcacacccagcatctggcaatatcaaagcataatcttatgttcctttataccatctttattgtggccacaaagataaccatgatgactacacagacttctactatgacatttgctccttttgaggatacattgagttggatgctatttggctggcagcagccgttttcatcatgtgagaagaaaagtgaagcaaagtcaccttccaatggcgttgggtcattggcctcaaagccggtagatgttgcctcagataatgttaaaaagaaacatactaagaagaatgaataaatttacgtgatgagctctacaaggccaaaaattttttttcttatctacctgttatattgtgctaatttttctatgtatgtgatgtgaaatgaagactatatatatggaatggaggtgacagaaagaaagaaattctttgtttgagggagacttcccctttctggattgtatttgtagagtgttacgagtgtatcatgtgattatgctttaccggtataagagattctgttgtgattatttgaatagttttatattaataaaagaagacaaaattttttaaatgttagaaaaagcagatctgtcattgcaaagtaacaaaaattttaagcttttaaaaatgtagatttttcatatttttaaaatttgaatctatttgagctttagttcagcagaattaaatttttacttgacattatcattaaaattgctaggtatggagaacaattcctattttattttgaacactgagaagagtaaacttttcctaaaacactttatattataaatgaaaataaattgctagtttatattttagatataaacatcatattttttattaatacctacatcaaatggaaaatatctgaaattttttttccatagcaggtattttctactagaagtagttttactacttttcatttagaacagagtatgagtcttaatctgaagtctttttcatgcccttgttttaaaaaaactactttttttggcctcaaaaaaatcaagggtgtaatttttaataaattgttaatcctatgttttgtaattttcattttaggagcttgacttatttttttctctctcataaaaacacatttgttttaattgtaggagaaattttctcagcattttgcatgttctttctaatctttgttggtctgaatatattggtagtaattactgtaattattcaacaaaaagcatatccgttcaaaaatttttccactatgtcttttttctagtggctactgttttagttttctagttgaatatctctgacaagctttcgtatggttttgttatattttcatctacatgtaatgtgttattaattttattaaatgaaaactaatcaccttcatgtggaaatgctctgagaattgtccttaggcatttggtagtaaccagctaaccaagaagaaacagagaaaccagaacttcatatggcagtccatttagatgaagaatgatgatataaaatctggttccttcttagcaaaataaaaaacaaacaagaaaagatactaaatgatgttaattttcttactttatgatttagaagtccagttataatattaaaactctgtgacatagtttcttttaccaaaaccatgaacctactccccgtatcaggtattttcgatggtttagaagtactcaagtcacatcacattcaagttagaagttttttttttgttgttgttattttaaatttttaacaaatataaacaccagcagatactattacttgcttaaaaaattgggagggggcacttttcatagtcttggaatgctaagaagttttatttttaatattgtgacagaaagctttaagtatttaagagctctgtattatatttgatactcttacagttaaaaacttttcaaaattaatacattgttaattattgaccagttttgaagtttgggtttaactgtagttgaaatggaaggactcttgttttacacttgtattaaagataaatttattaaaataagttatttagcacc

SEQ ID NO: 3767 - protein, 291 aa, Homo sapien
MDSPWDELALAFSRTSMFPFFDIAHYLVSVMAVKRQPGAAALAWKNPISSWFTAMLHCFGGGILSCLLLAEPPLKFLANHTNILLASSIWYITFFCPHDLVSQGYSYLPVQLLASGMKEVTRTWKIVGGVTHANSYYKNGWIVMIAIGWARGAGGTIITNFERLVKGDWKPEGDEWLKMSYPAKVTLLGSVIFTFQHTQHLAISKHNLMFLYTIFIVATKITMMTTQTSTMTFAPFEDTLSWMLFGWQQPFSSCEKKSEAKSPSNGVGSLASKPVDVASDNVKKKHTKKNE

SEQ ID NO: 3768 - DNA, 4916 bp, Homo sapien; identical to SEQ ID NO: 3283

SEQ ID NO: 3769 - protein, 1390 aa, Homo sapien; identical to SEQ ID NO: 3284

SEQ ID NO: 3770 - DNA, 2085 bp, Homo sapien; identical to SEQ ID NO: 3285

SEQ ID NO: 3771 - protein, 301 aa, Homo sapien; identical to SEQ ID NO: 3286

SEQ ID NO: 3772 - DNA, 3857 bp, Homo sapien
agtaacgccttctccaagtggatggcggggtggacacgcgtcccggcgccccgggctccctgggatatgtagttcgcgacaggacgagcggaaatactgccaggattttaccacctctcgcccatttatttacttctcggtcaccgctttcgggggacagataaacaccacagatgcccatcaaaggggcgcacgggtctggaggcgcagctcaggtttttgcgttggtcaccctgccctccgcacgtggagagggcaggcataaagcaccttgaaaggaaggtgctgtcaatgctatccgacgacctgtcgccgggcaccgcagcatcctcgctcgctccgatgggacgagggacgccggccccagggtaacaggaggcgcctcgccggccgcgcgctggatgctgtgatccaggtccggagccgggttccgccgcggccgcagcgacccgaccccacccgacaggccagaggaatcagtttagacttgaaattcagtttttcctgaaactgatcagaagttagtgacaccttgattggatccgtttttctgtcaggagctcattttgcagctctcaagcttttatagcatgctgtaaacaattgtcaaagttgtttatcaagaaacagatagagttgcaacttgtttctagtaatagaaacttttacactgcattcaatgcctaacgttgcagaaacagaaaggtcaaatgattctggaaatggtgagcacaaatctgagagaaagtcacctgaagagaatctacaaggtgctgtaaaatctttctgcacaagtgcctcaggagcacccttgggtcccaaaggagatggtcattatccatggagttgtccagtgactcatacacgggaaaaaatttatgccatctgttcggactatgcctttctcaaccaggcgacctcaatctataaaactccaaatccatcccgctctccttgcctccctgatagtacctctttatctgctggaaataattcatcaagatacattggtatcccgactagtacatcggaaattatctacaatgaagaaaatagcttggaaaacttatccaacagcctgggcaagctacctctcgcatgggaaattgataaatctgaatttgatggggtgaccacaaattcgaaacacaaatcaggcaatgcaaagaaacaagtttccaagagaaaaacttcagataaaaagggaagatatcagaaggaatgtcctcagcattctcctcttgaagatattaaacagcggaaagtattagacctcagacgatggtactgcataagccgaccacagtataagacttcttgtggcatctcttcattaatttcttgttggaatttcttatacagcacaatgggagctggaaaccttccacctattacccaagaagaagctttacatattctgggctttcaacctccatttgaagatattaggtttggtcctttcacggggaatacaacacttatgaggtggtttagacaaattaatgaccacttccatgtaaaaggatgctcttatgttctatataagcctcatgggaagaataaaacagcaggagaaactgcttcaggggccctgtcaaagttaacccgtggattgaaagatgaatcgctggcttatatctatcattgccaaaatcattatttttgtccaattggcttcgaagcaacccctgttaaagctaataaagcattcagcaggggacctctctcaccacaggaagttgaatattggatcttaattggagaatcaagtagaaaacatcctgccattcactgtaaaaaatgggcagatattgttactgatctaaacactcaaaatccagaatacctggatatccggcacttagagaggggactgcagtatagaaaaacaaagaaggttgggggaaatttgcattgcatcatagcattccagagacttaactggcaaagatttggcctttggaactttccatttggaaccattagacaagaatcacaacctccaacacatgcccagggaattgccaaatctgagagtgaagacaatatttccaagaagcagcatgggcgtctgggccggtctttcagtgctagtttccatcaggactcggcatggaaaaagatgtctagtatccatgagagaaggaacagtggttaccagggttacagtgattacgatgggaatgattgactatgcttgctactgaacagctggcattatatatgaaactgctatatacaggactgtataaagacagtagaagattttagtaagcctacattaaataggagcagatcttgtggtataaaaaataaccttgtagttctccagatactaagcttgtatatgattatggtgggtgatttcagatatataagcagataagcacagattattgtcctttcaagttaagagtatataatctggacagaaaatttcacaaaattcaataaaattacaactgttgtctaaataagtgaaacacaaattcacttaatagcatcaagatttgaaatacttaagcatgaagtgacttttataatgactcgatccctagacatttgttacagatagttttatgcctaagaccaagatgtaaagtaccatctgcccttaaaaaaaattggggctgtcaatttctagttttcactcatggttaacacgcatttaaaattatttcatgagtctagtagttctttgatttatagcaggatcttgcttgcctcatttgtttcctggttatgttcttaggattctgactaagaggcaaaagagaaaagactcaagaaactgatcctggagatcgagaccatcctggctaacatggtgaaaccccgtctctactaaacatacaaaaaattagccgggtgtagtggtgggcacctgtagtcctagctactcgagaggctgaggcaggagaatggcgtgaacccgggaggtggagcttgcagtgagcggagatcgcgccactgcactccagcctgggcgacagggcaagactctgtctcaaaaaaaaaaaaaaaaaaaaagacggatccttttttttggtgcaaatgggtgacttagtgcattgattcagatttttaaaatttcttgatgtggtttgtaataatcaaatattgacaagaaccttaggtctcgaaagacttttataagtctagatgacgtttgccttaggggtaaagtaaaagaacaattggcaccttaagtttctatacccaaggttatctgtgaaatgagatctcctgatatttgattgctttctcagtatggagtcatatgttgataacagtactgaagatgcataagaaatgcccaagtcactcagaggacaactacccatattccagactctgagctgtttcctttttaaaaatcatatagacaattagctgtttgaagtgagtattaaatatttcagaagtgtgaatttcatgtatttgagctcctctagttgctgttggtttttcttctgctgccaacctgtgactcacaaatgactaggatctcttgttctttaattttagggtcttgttccaggactcaaatcagtaacttggtgattacaaggtgctgaatgtgttggtaaccatatcgcaatacacctcaaggaaaaggttcagatttttatttttaaaatattttcatttttttcttgaattttatatccgtttgttcactcgtacatgcctagcctacagaaggggatatatattatgaaatggtcatttttctgaagagaatattttgcttgaaatgcaaaggactgaaagagatttgtaggttgttgattttgttacttcatactggaacttttaaaaagatttcatcaaataaagttttgttttctactttt

SEQ ID NO: 3773 - protein, 503 aa, Homo sapien
MPNVAETERSNDSGNGEHKSERKSPEENLQGAVKSFCTSASGAPLGPKGDGHYPWSCPVTHTREKIYAICSDYAFLNQATSIYKTPNPSRSPCLPDSTSLSAGNNSSRYIGIPTSTSEIIYNEENSLENLSNSLGKLPLAWEIDKSEFDGVTTNSKHKSGNAKKQVSKRKTSDKKGRYQKECPQHSPLEDIKQRKVLDLRRWYCISRPQYKTSCGISSLISCWNFLYSTMGAGNLPPITQEEALHILGFQPPFEDIRFGPFTGNTTLMRWFRQINDHFHVKGCSYVLYKPHGKNKTAGETASGALSKLTRGLKDESLAYIYHCQNHYFCPIGFEATPVKANKAFSRGPLSPQEVEYWILIGESSRKHPAIHCKKWADIVTDLNTQNPEYLDIRHLERGLQYRKTKKVGGNLHCIIAFQRLNWQRFGLWNFPFGTIRQESQPPTHAQGIAKSESEDNISKKQHGRLGRSFSASFHQDSAWKKMSSIHERRNSGYQGYSDYDGND

SEQ ID NO: 3774 - DNA, 1192 bp, Homo sapien
agagcgtgcgttcggtggcccataggggaagatggcggctgctcctttggaggagcgggattgagaggatcggggtggggagaccaaacaagagagacatttctggctctgaaggcgaacgcttcgctggccatttaggagctctgctcaaagccagacgtatcctagaaggaaaacatcaccatggctacagaaattggttctcctcctcgttttttccatatgccaaggttccagcaccaggcacctcgacagctgttttataagcgacctgattttgcacaacagcaagcaatgcaacagcttacttttgatggaaaacgaatgagaaaagctgtgaaccgaaaaaccatagactacaatccatctgtaattaagtatttggagaacagaatatggcaaagagaccagagagatatgcgggcaattcagcctgatgcaggttattacaatgatctggtcccacctataggaatgttgaataatcctatgaatgcagtaacaacaaaatttgttcggacatcaacaaataaagtaaagtgtcctgtatttgttgttaggtggactccagaaggaagacgcttggtcactggagcttctagtggggagtttaccctgtggaatggactcactttcaattttgaaacaatattacaggctcacgacagcccagtgagggccatgacgtggtcacataatgacatgtggatgttgacagcagaccacggaggatatgtgaaatattggcagtcgaacatgaacaacgtcaagatgttccaggcacataaggaggcgattagagaggccaggtttatacacaatataccattttctgtagtccctattgtcatggttaaattattctctaagtgtattctgggtgcagagatgcatgggctctgtcagtttctgggaaactttctgcaccctataaacacaatatttttctttgttttcacacattcaccattttgctggcacctttctgaagtagtgttgtcccggtatcagcctttgcaatatgttagagatgtactgtctgccgcattttgcactggttttctcttttcatttatgattaataatgtgtatacgttatccctttttattatctactgtgtaagacaagaatatttcattccaaataaagaattcagtcttgaaaaaaaaaaaaaaaaaaaaaaaaaaaaaa

SEQ ID NO: 3775 - protein, 335 aa, Homo sapien
MATEIGSPPRFFHMPRFQHQAPRQLFYKRPDFAQQQAMQQLTFDGKRMRKAVNRKTIDYNPSVIKYLENRIWQRDQRDMRAIQPDAGYYNDLVPPIGMLNNPMNAVTTKFVRTSTNKVKCPVFVVRWTPEGRRLVTGASSGEFTLWNGLTFNFETILQAHDSPVRAMTWSHNDMWMLTADHGGYVKYWQSNMNNVKMFQAHKEAIREARFIHNIPFSVVPIVMVKLFSKCILGAEMHGLCQFLGNFLHPINTIFFFVFTHSPFCWHLSEVVLSRYQPLQYVRDVLSAAFCTGFLFSFMINNVYTLSLFIIYCVRQEYFIPNKEFSLEKKKKKKKK

SEQ ID NO: 3776 - DNA, 3653 bp, Homo sapien; identical to SEQ ID NO: 3311

SEQ ID NO: 3777 - protein, 525 aa, Homo sapien; identical to SEQ ID NO: 3312

SEQ ID NO: 3778 - DNA, 6461 bp, Homo sapien
agcggacggcggccgcgcgctccaggccggtcgctccacgccccggctcccgggactgtggactccacgaccctgtcctcggccctgtccgcgccgaagcagcccgggactgcgcagcgccccgcgtgccgatcttttcctaattcagcagcgatttaaccaagagcctggaatattttaaggagtaataagagacatttacaaactattctctctgaagcctgctacctggaggcatcatctagataatcagaaccttggcttccacatcctcctcccttgtcttaactacaaacatttctttctgctgacttcaactcctcagacatgggaaagtctctttctcatttgcctttgcattcaagcaaagaagatgcttatgatggagtcacatctgaaaacatgaggaatggactggttaatagtgaagtccataatgaagatggaagaaatggagatgtctctcagtttccatatgtggaatttacaggaagagatagtgtcacctgccctacttgtcagggaacaggaagaattcctagggggcaagaaaaccaactggtggcattgattccatatagtgatcagagattaaggccaagaagaacaaagctgtatgtgatggcttctgtgtttgtctgtctactcctttctggattggctgtgtttttccttttccctcgctctatcgacgtgaaatacattggtgtaaaatcagcctatgtcagttatgatgttcagaagcgtacaatttatttaaatatcacaaacacactaaatataacaaacaataactattactctgtcgaagttgaaaacatcactgcccaagttcaattttcaaaaacagttattggaaaggcacgcttaaacaacataaccattattggtccacttgatatgaaacaaattgattacacagtacctaccgttatagcagaggaaatgagttatatgtatgatttctgtactctgatatccatcaaagtgcataacatagtactcatgatgcaagttactgtgacaacaacatactttggccactctgaacagatatcccaggagaggtatcagtatgtcgactgtggaagaaacacaacttatcagttggggcagtctgaatatttaaatgtacttcagccacaacagtaaaaactggaagagatggatttaaagaagaaatatctattgatatttcctatactctcaatgaagaggtatttcctaataggagaccttaaattgaacaaacctaaagtttacacttctaagagtacagttaaaagtatgtggacctgcagttcttgtaactctccactctgtgttaatgatatatttgtactaggatcttttacttgaatctaaatttactggttgatttccttctccagcctatcccctacagggaaaagctgatacttcccctatagtacaataaataattatttaaaagtcatagctccagtcactactgaaaacataattttggtgataaacataatttgagaaacttaatttctgaatgtttttatagaaaattactgaaagtctattactcatggaagacttttaaagaataaccttttttcctgttttataaattcccattgttatatggtagtatttcagctacacaatattttagcttttagctagacatttatagcttttcatttgttgaaatggtaatcatctgcatgtttttgtcacttatttcaggttagtgattgcctaacacttataagccaaaataatccttgcaaaattccatacctaaaattttgaaagcccctaatgttttcacacatctttctgtattagttatagttttgtgaaatctttgtgtgatcttcaaacattatcatttaatgtacaatactgtaaataaactgtgcatggcttttatacagctttagtaaatgtcaaataaagtggtacagactcattacaacaagtttctcataaaaatacaataaataggaaaatgaaattcagaaacccatagactgggaataggttccagttacagcttggatctggcataaaataaatttgaaataaaatattttgatgctccatttttttatgttgcttttcatactaaagaatggtgtagacatgttttgcaactgttaggtacccagttatcaattttatcaatgttttagaggaggaaattatttttttggtagaaattgttcaagaaatccttaattgaatgtcattaaatgatggtggccaaaataaaacctatttagaaatttaatcactttgcacatcacttggaatatgatgcctctagtagttacttttttatagttttctacttttggttttatttaaaattgttttcaaatatagattattgacttattcaactttgctgttttatattttcagtatcatttttcatttttttttttttttttttttgtcttttcacttaccaagttctagggacatttaaaatatgtactaagtgtaggagtggttatgataccaaaaaatgtagctgggttgagattaatttcgttctgttttctcatgacagaaatcaggtttccctttccccacccctaagtgcctaacttaggtctgaaacagcctgtttattagtctgactctctcaaccataaaacataagctttatttaattctgcctttaaacacactcaggtttccccttaattttcatattattttctgcaagttttcttgagtatcttcaattcgttgaatgtggtttttggtttttttttgttttaacactagtcttcccttaattcattgctaactcaagccatccttactattaaacccaaatcagtcctttaagttcattatggcctttctagtatttaaaaaaaaaaaaatcattttcatttttcttctgctacgtttcctgactactactgcatacttctctgatacaggttctgtttgtattttttatatcattctcattttctcatttgacatgatctatgtctatatatgatataggtccccttttgtctcaaaatttttaattatgtgacttcaaaaatcacctgtatctgtagtagggcttccaaatctgcttctccatatgtgaccagtcacctgtctgctttcacatttagctagtgaactacacatttactaaaatgtgtaaattttacacatttagtgactgtgtaaaataaaaaaaaagttattttatcatatcctttctattatgttcccatcctgtcctcatgtcccatttactttattatcacaattcatttcttcaaaattatcttttagatacgctcatacaaaaatcaatccttgttttcttgcttgtgtcttttaaccttggaaaattacatcgtgtaaattaaacagatttttctgatgatctgtgcttcttatatactattagagtgcatgatagtatctcctgaaaaggatggaaagtagaagcatttgcttttagtcacttaattttgaatcttttttcttcatcttttgaattaattttttttattatatctacttttagtggagtttgagtcagaaaaaaacaagaatttgaaacaagtaaaaagatagaagagaaataaagatggtatgtgactactttcagagagagttaagtaactgtcagaataagcctggaacaaaacaggctgtaaattaataaaactacaaacacacattcaggtgaagcagaagtatagccataaaacatctagaaagagtgaatgaggcttttagcttttcttaggtcaatgtccagtgtgcttttttccatgggaataggataggtattaatacgcttttctaaactgctctcagaccttatccagaggacatggtaaagatatgttacagaaatttttctgatacttcctggaataactttaagttacaccctagtagactggtcattctaataaaatccagtactataacaaacctctgtatgttgatagcacattggccctttttagagttctttcctatgtttttcttacgtgatttcccacagttccatgagtccaacaaaggagagtgataggctccttatcttttagaagaggaaggaaaggcatgaagaagttgagggactggctgaagatcacgtacttactaagtagtacaactggagcaagatcaagtatctctgtctcccatatctgtgttctatcatttaaaatatatattggaaatccctgctgactcagattggtatgattaaaaatgagaggaaagttcaaatagttagtagtgacaaactaatactgctggactaagattttggtagcattgttttctaaaatattttaaatggagaatgaacacttataaaatgctttggaacataatctttagcttaattttctgttaaaatttagtaccccttcatcattccaataaagataagactgatccattgtctaaggaaattatttataaataatagagattaatttatttgagatttgaaataagaatagtatgaaaatattagataccacataaattgtttgaaattactgaataaccatcttaagtatggaacatttaaatggctatattttatttgtgtacagtttttctgtgccttgttaggccagtgaagcaattattttctctaagaaaatgacaataaaatataacacacttcagattgtctgatttacagtttggaaaggacaccgcaatgttcaaataggtaggagaccatcaaaaacacaattaaagtaacatattaggagacttgaaacttcagcctaataaatccttcatggttcttagccttattattgtgatataattctagatattttcttggagggcatgtgcccaactctcccgcaccccattttgtttgtcttttaaagttcttagaataaacagttctttatataataattatattttatttaagaaaatagtttgttaggtactttttaaaagatgtaaatttttaaatttacaaatacatatgggtctttgataagcaataggaattgaattacaagttactagggttataagcaaaaggttgcttaccataatgtcattaggtcacgatttttagctcacatctggaagcagcaactacttggctcaagtacatataagagtaattagttttattctctcttttttataaaatcgggtttcagatgagatgtttatcttagactattttagggaaaaattttacatgtttgagatggtggagtaaaaagactgttaaacatttcttttaaaaaattatttttacattacaacaatatatttatgatgtgttcagatcaaaaatttaacttctgtgtcccagatctactttcaaagtgagattttcacttgtcagcttaaatttctgactagaactaacatttgtgtatttttgtgcttagtcggaatacaaatttcacagtggatttttgaagtttgtccttaaattggataaaatcaagtgattaaagttactaaagagataaaaatggtaatttccatttttaaaagtaatttggttgtgtttatagttatttgtacaagtatttatcacagactctaaattgaaaaatgtagtatgatctatatttgaccctaaaaatgttggattaatttaacaaatatggcagatttttcataactaagtcttaagtcttctaaaaggaagctgttacccttctgtttttaattacattaattgaaatgtgttttaagagatacaatttcagcatattttatatattaaaaaacaaaaaaggattagtattgagccagtggccaaaaggtaatattactaccatgtagactgttatagttcaaattgtcccacttcacccagaattttagaaactagaagtctgggaggtactatatcagctgtagttgggtaattccaagtgctgatagtactattcatcttttttattattgtgtcagatgaaacaaatgccaagttgcaaaatatgcagatttttattatataatggttttaggcataaattattaacaagccatgccttatgtgtttcatcttatatttttctttagaactaaactataacagattttggaaaatgatttgatgtgcttgctcacttgattgacttggtcagatatttgaatgatggtattacctagattctaatccttgattctagttatataataaataatatagaatatgaaaatatgtttgggcatttactgtttatattatgtagtagcctccatcatgacacacttactacatttatgaattgagcagttctgtaattgtaattattattgctgttcatgtaacaaaacatgcttatgataatagcaaacaaatagaaatgcccccaaaatgctatttttttaattcagttataactgttactcttgtagttgtgtatgacgcaataaaatttgtaaaaaaatttcagcatgaaaaataaaatttgtatcacctaaaaaaaaaaaaaaaa

SEQ ID NO: 3779 - protein, 274 aa, Homo sapien
MGKSLSHLPLHSSKEDAYDGVTSENMRNGLVNSEVHNEDGRNGDVSQFPYVEFTGRDSVTCPTCQGTGRIPRGQENQLVALIPYSDQRLRPRRTKLYVMASVFVCLLLSGLAVFFLFPRSIDVKYIGVKSAYVSYDVQKRTIYLNITNTLNITNNNYYSVEVENITAQVQFSKTVIGKARLNNITIIGPLDMKQIDYTVPTVIAEEMSYMYDFCTLISIKVHNIVLMMQVTVTTTYFGHSEQISQERYQYVDCGRNTTYQLGQSEYLNVLQPQQ

SEQ ID NO: 3780 - DNA, 2026 bp, Homo sapien
attgataatacttttaatgtgttggtaatgatgtttaaaattgaaagatttttaaaataaaaatgatagattttcttactaaaaatgtttttattaaccttgcttttattggaaaaaatcaagcaatatttctttttcttttgtgttatattgtactttactgattcatttactggtgatacatatgtttttatggattttccagtttaatttgcatatacaaatgaatgcaatggtctattggtgagcattgagcaacactgtataaagttttaaaaatgtaaacactttttaatctactttcctctaaaaatcaataatattctattatttctaatccttttccacttgggaaataacaatgaagaatctgagaatttgacatctataactttacagattcatttttccatttaaatttcagtttcttggatcactgaatatgggaagggagagcttcactaattagacgcagcttcttaagaacttatattctctttgacatacatctctattgtagttttttgttttgttttgttttttgagatggagtcttgctctgtcacccaggctggagtgcagtggtgcaatctcagctcactgcaacctctgcctcctgggttcaagtgattctcgtacctcagactcccgagtagttgggattacaggtgcccaccaccacacccgactaatttttgtatttttagtagccatgtggttttgccatgttggccaggctggtttcgaactcctgacctcaggtgatccacccacctcagcctcccaaagtgctgggattacaggtgtgagccaccgttcccggcctattgtagattttcttaactacttgctaaggaaatcatatccttttacatgaactacaggtttagaacttggttttaagacaactgctatggccagaaggtaaatgggaattgccttattgaaggtaacattgattgcctaataagaaaatgaattgtttgccacagagttgaatttaatttgagttagatagttcagaatgtagcacttgccctataaatgaatcagatttgttctatttatataatattagaattaatatattatcatgtaagtgggaattttattttgttaagtggactctcaaattttagaacttgtgtgaaatatctcccagaaaacacaaaaggtttcaaggtatcacccaaagctagggaatcaacgaacgtactttattaatgcaagaccacaatttaagccccaggcaggaatccaacagtaacatttttcctttaggttaagcagtaatttttttgaattgtcatttttaatgggtctcacacatgcatattgctaatatcattcatgtttgaggttttcaacaaagaaccaatttgttaatataatgtacaaaaatagttggttcattttctgaattcagtctttgaaataaaactccttgttttggccgtgtttctgaatgtattggtgattcacccccaagctaattttttaaagtcatttttgaagttgggaagtctcatgagagatgttgaagtatgtatttaatcaagagtcatgatttcaaactagttttacatattaagcagttggtgttctaatttaatgggtaaatgtgtgtttggataaatatctgaaaattttatccttaagtatatataattatttgcctcttatatgtcttaaagctatttaaacaaggtgttaaatgagccaaaacaattaagtaattagaacagtacatttttatcagagtgtctgtcatatgcaatgaatgtatgtaatactaaaaaatcatgactacttttatcaaagaaaaaccacacattaatcctattaatcatgaaagcgtagcattgtaaattaaaggttttctttgaggctcttgaaagtgatcccattgctttcctgttttaaaaatattttatgctctttatttccacttctgtgaatgtgatatttctattttgtgattatgttactgaataaacaaacttgctacataaaattcttagcaatt

SEQ ID NO: 3781 - DNA, 5574 bp, Homo sapien
ttttggctgcctctgtcggtctgttcagttaccacgtgaaccgccgacggagacccgtagtgggggaggcggcggcagcgttaagtgagaaaggaaaaaagacaacgaggaaaaaggaggtgtccgggtagggcaacgcggcgacacccgaggcctggtggtggcggcggatcgagatattcaaggctgaagcagctacggaacggcagcggcggcggtcggacaaactgactgaccgagccgggtggtggcgggagcagcgggagcagccggaacgatgccggccgtgagcctcccgcccaaggagaatgcgctcttcaagcggatcttgaggtgttatgaacataaacagtatagaaatggattgaaattctgtaaacaaatactttctaatcccaaatttgcagagcatggagaaaccttggctatgaaaggattaacattgaactgtttggggaaaaaggaagaagcttatgaattggttcgtagaggtttgagaaatgacttgaagagtcatgtgtgttggcacgtttatggccttcttcagaggtcagacaagaagtatgatgaagccattaagtgttacagaaatgcactaaaatgggataaagacaatcttcaaatcttaagggacctttccttactacagattcaaatgcgagatcttgagggttacagggaaacgaggtatcagttacttcagcttcgacctgcgcagagagcatcatggattggttatgctattgcttaccatttattagaagattatgaaatggcagcaaagattttagaagaatttaggaaaacacaacagacatcccctgacaaggtggattatgaatatagtgaactactcttatatcagaatcaagttcttcgggaagcaggtctctatagagaagctttggaacatctttgtacctatgaaaagcagatttgtgataaacttgctgtagaagaaaccaaaggggaacttctgttgcaactatgtcgtttggaagatgctgcagatgtttatagaggattgcaagagagaaatcctgaaaactgggcctattacaaaggcttggaaaaagcactcaagccagctaatatgttagaacggctaaaaatttatgaggaagcctggactaaatatcccaggggactggtgccaagaaggctgccgttaaactttttatctggtgagaagtttaaagaatgtttggataagttcctaaggatgaatttcagcaagggttgcccaccagtcttcaatactttaagatcattatacaaagacaaagaaaaggtggcaatcatagaagagttagtagtaggttatgaaacctctctaaaaagctgccggttatttaaccccaatgatgatggaaaggaggaaccaccaaccacattactttgggtccagtactacttggcacaacattatgacaaaattggtcagccatctattgctttggagtacataaatactgctattgaaagtacacctacattaatagaactctttctcgtgaaagctaaaatctataagcatgctggaaatattaaagaagctgcaaggtggatggatgaggcccaggccttggacacagcagacagatttatcaactccaaatgtgcaaaatacatgctaaaagccaacctgattaaagaagctgaagaaatgtgctcaaagtttacaagggaaggaacatcagcggtagagaatttgaatgaaatgcagtgcatgtggttccaaacagaatgtgcccaggcttataaagcaatgaataaatttggtgaagcacttaagaaatgtcatgagattgagagacattttatagaaatcactgatgaccagtttgactttcatacatactgtatgaggaagattacccttagatcatatgtggacttattaaaactagaagatgtacttcgacagcatccattttacttcaaggcagcaagaattgctatagagatctatttgaagcttcatgacaacccccttacagatgagaataaagaacacgaagctgatacagcaaacatgtctgacaaagagctaaagaagctacgtaataaacaaagaagagctcaaaagaaagcccagatagaagaagagaaaaaaaatgcagaaaaagaaaagcagcagagaaatcagaaaaagaagaaggatgatgatgatgaggagataggaggtccaaaagaagaacttattccagagaaactggccaaggttgaaactccattggaagaagctattaaatttttaacaccgttgaagaacttggtgaagaacaagatagagactcatctttttgcctttgagatttactttaggaaagaaaagtttcttttgatgctacaatcagtaaagagggcatttgctattgattctagtcatccctggcttcatgagtgtatgattcgtctctttaatactgcagtgtgtgaaagtaaagatttatctgatacagttagaacagtattaaaacaagaaatgaatcgtctttttggagcaacgaatccaaagaattttaatgaaacttttctgaaaaggaattctgattcattgccacacagattatcagctgccaaaatggtatattacttagatccttctagtcagaagcgagctatagagttggcaacaacacttgatgaatctctcactaacagaaacctccagacatgtatggaggtattggaagccttgtatgatggtagcctaggagactgtaaagaagctgctgaaatttatagagcaaattgtcataagcttttcccttatgctttggctttcatgcctcctggatatgaagaggatatgaagatcacagttaatggagatagttctgcagaagctgaagaactggccaatgaaatttgaacatcactaaacaagcaaatggaatgactttggaccatatctagtatataatatttttgtcacgcacctgctgcattgctctaacttacacagaatgagaggagtaaatgttcttgccttcaaatagtgttttacgttttttatcctgctgaaaaagtatatataaaatatctaacattacaggatagaggttcagtttcttaaaaaattaaagctgctaaaattgagtggttaaaaaagataccttatcctattcctccccacccacccatgtttttaaactaatttatataaaatctggaggctgttacagctaacaaagcaggtgtgtggcagaaatattactttaaatttgtcttgtgagattttactatatctcagacagcataaatgctgttttagcactggattctttcactgagcacaaagagttgttggggctttagcatctgactgattttgttacggggttgattctgaccataggaagtatgcaatgtgaatcactatttacagagaaacctacaacagatgcttgatgttgtagaaactgggacatatagataccaagcaaaattataagaaacctataaggtgttcaatacgcttgtgtttccaaaattcactgtacatgatcagtttggtgttcttgtaccacagtttttaactgaaggaaccagttgtaacagtctcaattttaactaaaacttgaagaactaaaacaacaatgcaaacctttcagcattgtttggccaaacttgttaaaactgtaatgcaagaaccaaatgcactgtgatgtggcaccaactaattagcaagcatgaatttttcacccaagagtgaaaaaaggaaaatctaccatggcttgaagttaaagagcagaactcctgactaccattctatgactgatcaaaagactaatagttaaaaacctcagcaggccttgttcacgatatgcagaaaaaaaagtgctgcagtttagatacctctggaatttttccacagtgtcacaggtttgtaatacttgaagccctacatttctaagaatatatttcttgctcagttgtttcaggcaagcccaagactttgtaatttttaaagggcccaagatttttttttttttttttttttcaaataacagaccagcttctttttcttgcagttacagatgtaatttcctttttgttgtcaaacataaggtaccaaatatgatgcaataaattgttttgaaaaacagttgtgtgaatatttcaactaatctgtgttgggcttctgtgaaatacacaggtggaaacagaggtgcaagccagaggcaatgtaatatgctgtaaggctagtgcagatgggagctttttagaaggggctaagtgctggtgtcagggaaattccataatgaagtagaatgctgctcctgcattaagatttcattgagggcaaggctggtggcaggtactatgaatgtaattcataatttaaaaggaaaactaaaaactattttgatttgggaaaatgagccttaatttgttaaacctatacactgagaactagcctcaggcttaatattctcattgcatttgcaagatctgagcaaataagattaagtaaaacaaatcaattgtatatataattgacctttttgtggaacatgtagtttatagaaagtatactctaaagggaatttgccgaagaccttttactgattgaacagttgtgctacaatcaacttttcatagtacatgacctgcattccacatctcagtctaacagtttagtagtgatgtaaagagaagtacaaaccgaactccagtgctttgttatgttttattaactggccctgtctcaggaacatcttaacagatggcaaaaaaacaaaaactttttttcaactcctatgagtggcaactgaagttcttattgttgggaaagaacactagtcctacctctgccactaatgaggtgtttggaggaggtaccagccatataatagggggtgtatgtgtgaattttgtttaaactctactgtatattgaaatgaaattcatttatttgtcttgacaatgttcaaatgatgtagattgtcttagaatgaatattcataagtactcagaactcttaagatgcagatgccacccgtgaggagctaaattcctaatgtgtattgtattccaacccaattttactggaactattgaataaatcttttattttctttcaggtttacttgatagtggatacattggtgtcagaggaccttgactgggttcattttatgtccagacatcacccctgaaacactgtactgtactatcttgctctgagtagtatcaactggatcgtctcatatttgcctcattcatcctattaatttcaaatgatactgtgggggaaaaacagggttagaaaaacaagtggaaaaaatggagtgatgttgtaatctaaacaagtgccttatgtttattgctaagaactggtgttaccaacccttttgagaagaaagggtctcttgacctgtattaacataggaaagtaaagttctttttgtttttctttataagctactcttgtcatttctcgttgaaaaactaaaatctgactaggttagtttactcagctttaattagatagttgagtcatatattttcaacatttttctgtatcgtatttattatgcacaaaaataaagtgtgatctctaat

SEQ ID NO: 3782 - protein, 866 aa, Homo sapien
MPAVSLPPKENALFKRILRCYEHKQYRNGLKFCKQILSNPKFAEHGETLAMKGLTLNCLGKKEEAYELVRRGLRNDLKSHVCWHVYGLLQRSDKKYDEAIKCYRNALKWDKDNLQILRDLSLLQIQMRDLEGYRETRYQLLQLRPAQRASWIGYAIAYHLLEDYEMAAKILEEFRKTQQTSPDKVDYEYSELLLYQNQVLREAGLYREALEHLCTYEKQICDKLAVEETKGELLLQLCRLEDAADVYRGLQERNPENWAYYKGLEKALKPANMLERLKIYEEAWTKYPRGLVPRRLPLNFLSGEKFKECLDKFLRMNFSKGCPPVFNTLRSLYKDKEKVAIIEELVVGYETSLKSCRLFNPNDDGKEEPPTTLLWVQYYLAQHYDKIGQPSIALEYINTAIESTPTLIELFLVKAKIYKHAGNIKEAARWMDEAQALDTADRFINSKCAKYMLKANLIKEAEEMCSKFTREGTSAVENLNEMQCMWFQTECAQAYKAMNKFGEALKKCHEIERHFIEITDDQFDFHTYCMRKITLRSYVDLLKLEDVLRQHPFYFKAARIAIEIYLKLHDNPLTDENKEHEADTANMSDKELKKLRNKQRRAQKKAQIEEEKKNAEKEKQQRNQKKKKDDDDEEIGGPKEELIPEKLAKVETPLEEAIKFLTPLKNLVKNKIETHLFAFEIYFRKEKFLLMLQSVKRAFAIDSSHPWLHECMIRLFNTAVCESKDLSDTVRTVLKQEMNRLFGATNPKNFNETFLKRNSDSLPHRLSAAKMVYYLDPSSQKRAIELATTLDESLTNRNLQTCMEVLEALYDGSLGDCKEAAEIYRANCHKLFPYALAFMPPGYEEDMKITVNGDSSAEAEELANEI

SEQ ID NO: 3783 - DNA, 1669 bp, Homo sapien
  Unsure 446: Unknown base
ctgtcatggcggcggccgcccccaatgccggaggctcggcccctgagacagcgggttccgccgaagctccgctgcagtacagcctgctcctgcagtacctggtgggtgacaagcgtcagccccggctcctggagcctgggagcctgggcgggatcccaagtccagccaagagtgaggagcagaagatgatcgagaaggcgatggaaagctgcgctttcaaggctgcgctggcctgcgtgggaggatttgtcttaggaggtgcatttggggtgtttaccgctggcatcgataccaacgtgggctttgaccctaaggatccttaccgtacaccgactgcaaaagaagtgctgaaagaacatgggcagagaggaatgtcctatgccaaaaatttcgccattgtgggagccatgttttcttgtacctggtgtttgatagaatcttaccgnggaacatcagacttgaagaacagtgtcatcagtggctgcatcacgggaggagcctattggttcagagctggcttaaaggctggggcccttttgtgtggaggttttgctgctttctctgctgcgattgattattacctccggtgagagtaattgcctgcagggaaggatgatgccagccccggatccgggctgctctctggaggacagtttctgtaccacaccagggccttgcttcagggcctgaagacattcattttccctcatgtcgttggtattctgagggagctgcctggcttctctgcctccagcctttggggtagccacactttgctgctcctggactccagccagccttcacagaggacgtcccgtgccagattctctcacagcagatcgggagacaggatgttgacatataggaattcagctccacaaagcttcaggcctgaccacagctggccctctaggttgtttggtgttgtgggcacagaggtgacagtgtctctgcaggcactcaggaagctgttctaccttggaactccatgcaactatccgtctcgaataccagggcagggcaaggcggactgatgccgtccaaccaattatctcacttgttttgtgttctgtcatccttgttttttttttaaaaatacactcccctcccccaccgccacacaccttacagttcaaaaggttggtttatttgtattttattttcaaattccctattccaaaaatagtgccgggtggcccaaagataacatctgaagggaaagaatgagaaagctcccagggaagygggggatggggcgctgaggcagggttgttagaggactgtgtcatcctcaccaagctcattacatctgccagggcctgcctcaagaagcccagcccagccttttcctgggatgcagtgaaatcccatccatgaactcgatgggcccctcctgtgccggccgagaggcacacactgccttcacgacgtgactgctggacctggccgagcttgaggccacatgtgaagggtcctgctgtggtcatcttggtgactcggtcacagcagctactggccaagatcagacgtcgctgaggggctgttcaccaccatcctcgttctccagggtcaaggaagtgttttaacatgtcgtgttttcgacttgaccttgtggtatttttcttggcctagttgtgtgccatggatatttaaaaaaaaaaaaaaaaaa

SEQ ID NO: 3784 - protein, 194 aa, Homo sapien
  Unsure 446: Unknown amino acid
MAAAAPNAGGSAPETAGSAEAPLQYSLLLQYLVGDKRQPRLLEPGSLGGIPSPAKSEEQKMIEKAMESCAFKAALACVGGFVLGGAFGVFTAGIDTNVGFDPKDPYRTPTAKEVLKEHGQRGMSYAKNFAIVGAMFSCTWCLIESYRGTSDLKNSVISGCITGGAYWFRAGLKAGALLCGGFAAFSAAIDYYLR

SEQ ID NO: 3785 - DNA, 3076 bp, Homo sapien
cgggtggattacctgagaacctctaaaatgcagacctccagctctagatctgtgcacctgagtgaatggcagaagaattacttcgcaattacatctggcatatgtaccggaccgaagcagatgcataccgtgcacagatattacgcattcagtatgcatgggcaaactctgagatttcccaggatctcaacaaacagatagtgacaagtggcagtctggattgtcaataaataatgttttcaaaatgagtagtgtacagaagatgatgcaagctggcaaaaaattcaaagactctctgttggaacctgctcttgcatcagtggtaatccataaggaggccactgtctttgatcttcctaaatttagtgtttgtggtagttctcaagagagtgactcattacctaactcagctcatgatcgagaccggacccaagacttcccggagagcaatcgtttgaaactccttcagaatgcccagccacctatggtgactaacactgctaggacttgtcctacattctcagcacctgtaggtgagtcagctactgcaaaattccatgtcacaccattgtttggaaatgtcaaaaaggaaaatcacagctctgcaaaagaaaacataggacttaatgtgttcttatctaaccagtcttgttttcctgctgcctgtgaaaatccacagaggaagtctttttatggttctggcaccattgatgcactttccaatccaatactgaataaggcttgtagtaaaacagaagataatggcccaaaggaggatagcagcctgcctacatttaaaactgcaaaagaacaattatgggtagatcagcaaaaaaagtaccaccaacctcagcgtgcatcagggtcttcatatggtggtgtaaaaaagtctctaggagctagtagatcccgagggatacttggaaagtttgttcctcctatacccaagcaagatgggggagagcagaatggaggaatgcaatgtaagccttatggggcaggacctacagaaccagcacatccagttgatgagcgtctgaagaacttggagccaaagatgattgaacttattatgaatgagattatggatcatggacctccagtaaattgggaagatattgcaggagtagaatttgctaaagccaccataaaggaaatagttgtgtggcccatgttgaggccagacatctttactggtttaaggggaccccctaaaggaattttgctctttggtcctcctgggactggtaaaactctaattggcaagtgcattgctagtcagtctggggcaacattctttagcatctctgcttcatccttaacttctaaatgggtaggtgagggggagaaaatggtccgtgcattgtttgctgttgcaaggtgtcagcaaccagctgtgatatttattgacgaaattgattccttgttatctcaacggggagatggtgagcatgaatcttctagaaggataaaaacagaatttttagttcaattagatggagcaacaacatcttctgaagatcgtatcctagtggtgggagcaacaaatcggccacaagaaattgatgaggctgcccggagaagattggtgaaaaggctttatattcccctcccagaagcttcagccaggaaacagatagtaattaatctaatgtccaaagagcagtgttgcctcagtgaagaagaaattgaacagattgtacagcagtctgatgcgttttcaggagcagacatgacacagctttgcagggaggcttctcttggtcctattcgcagtttacaaactgctgacattgctaccataacaccggatcaagttcgacccatagcttacattgattttgaaaatgcttttagaactgtgcgacctagtgtttctccaaaagatttagagctttatgaaaactggaacaaaacttttggttgtggaaagtaagtgggatacttggaatcaaggcatctctgtattacagtcttctttattttttagcatagaaagttggggatgtgttaattgtatttttaagaatatattctaaattctgtacttcaaataatagcacagattttacatctgattgacatagtgtatgttaatgtaagttttgctttccagtgattacctgatacgtaagcctatttgaacaaagtgagaatgaacttttgtttctaagaagtctttatcttgaagctatataacatgaaaagtgagctcaaattttttttagttgaagattacatataaagttgtgtctgattaatattcatcttttattgaagaaagtgccttctgatggccacataattcttaatgtcagctagtataatggtttacatttggacaaagtattgcttagtgttatttaagtagatttaagatctcaaagctaaagtgccaatttttactttcttcagccaatttgttacctcttttatggtttttaatttttatcaggactaacattttcagaaatagcaaggtgtgatctagtattagattcacagaactgaaaggttaattaagaatgttggttattttcacgggagcgtgtgatatttaacattaatattttatttgacactacagcctgtaatactgctctctttcaaaagcaagttttcagatttttataacagacccattttgttttatgaaacatgttcattacagaaacatgagaaaatagagataagtaaaaagaataaaagtcactattatcctaccactttgcgggacacactattaatatttaagcatagattcttccagatgttttgttttatacagcagtaggattgtgtaatgtattctctcttgtagcctattcttcaaagcgtatcttcactttccatgttaacataaatgtccttttatgattgtctaggattccatggatggatggaatataattgagtcatctggtagagcgcatataggacaggacgctaggttgtttatcttttgtttattgtaaaggaactatgtgggatgcatttggtgatctttttaaaaaatgtataaatttcttgagtaattcctggattaaagaatatgcactttttaaaaaaaaaaaaa

SEQ ID NO: 3786 - protein, 563 aa, Homo sapien
MSSVQKMMQAGKKFKDSLLEPALASVVIHKEATVFDLPKFSVCGSSQESDSLPNSAHDRDRTQDFPESNRLKLLQNAQPPMVTNTARTCPTFSAPVGESATAKFHVTPLFGNVKKENHSSAKENIGLNVFLSNQSCFPAACENPQRKSFYGSGTIDALSNPILNKACSKTEDNGPKEDSSLPTFKTAKEQLWVDQQKKYHQPQRASGSSYGGVKKSLGASRSRGILGKFVPPIPKQDGGEQNGGMQCKPYGAGPTEPAHPVDERLKNLEPKMIELIMNEIMDHGPPVNWEDIAGVEFAKATIKEIVVWPMLRPDIFTGLRGPPKGILLFGPPGTGKTLIGKCIASQSGATFFSISASSLTSKWVGEGEKMVRALFAVARCQQPAVIFIDEIDSLLSQRGDGEHESSRRIKTEFLVQLDGATTSSEDRILVVGATNRPQEIDEAARRRLVKRLYIPLPEASARKQIVINLMSKEQCCLSEEEIEQIVQQSDAFSGADMTQLCREASLGPIRSLQTADIATITPDQVRPIAYIDFENAFRTVRPSVSPKDLELYENWNKTFGCGK

SEQ ID NO: 3787 - DNA, 4877 bp, Homo sapien
  Unsure 4105-4123, 4128: Unknown base
attggcgggcacgccccctcgcccgcggccccctccccgcctctctccaccgcctcctctggctccccggtcagagggccggagcgagaagatggcgaagacgtacgattatctcttcaagctcctgctgatcggcgactcgggggtaggcaagacctgcctcctgttccgcttctcagaggacgccttcaacaccaccttcatctccaccatcggaattgattttaaaattagaacgatagaactagatggaaagaaaattaagcttcagatatgggacacagcgggtcaggaaagattccgaacaatcacgacagcgtactacagaggagccatgggcattatgctggtctatgacatcacaaatgaaaaatcctttgacaatattaaaaattggatcagaaacattgaagagcatgcctcttccgatgtcgaaagaatgatcctgggtaacaaatgtgatatgaatgacaaaagacaagtgtcaaaagaaagaggggagaagctagcaattgactatgggattaaattcttggagacaagcgcaaaatccagtgcaaatgtagaagaggcattttttacacttgcacgagatataatgacaaaactcaacagaaaaatgaatgacagcaattcagcaggagcaggtggaccagtgaaaataacagaaaaccgatcaaagaagaccagtttctttcgttgctcgctactttgatgaactctttctgagagactgcagcacacctagagggccctttcctgcttctctgaaagcacaggtcacccagcctcagaatcacacctcccggctgctgctgagagcaccactgaacttagacctctcaacacagtatgccaagtggattccagcctcatggcctagcaaaagaacagactccctttttcaaacatggaagcaatgaagtggagacacatgcaggacctaactcgttttttccttgttttattacctgttgcagaagcggttatctttcttttttactttgcacatcagtgttagcctttccctatttcagcacaatcttagactcatatttgcacacttttgtgtcgtgaagttctagacaaatttgtacatgtggcaatgttaaaagagcatttacagcagaggttaatatactaaaattaaagggtatttggtctggttcatatggtcaaatattactgccttggtagcatttatttaagggctttttcttaaataagaatcattaaagtcattaaaaaaatttactgaaatgcccatcttgtcatcaaaggccacaatttctttatttcttcagattaagagctttgcctcatccccgacctgttttccagagtctgggtagctgaatgaatcactttaaaatgattacctctgcctaatctatagaaactgcatttggaaatcaccataatctcatttttccctggggtttgtatttgctattctttcccatgtttgacttaagtgtaatcactcttaagtaatatttgaacattattatctgtttctatttgtgaacttcttgagctgaaattttacgtgggctgagagatataccatttagggttttagtgcagcatctaactgtgattctgtcaataaggatatgtaatatattttttcttaggttcactccttagctggctggtttagttgtaataccaaattcctaccataatccctgtctacaaaagttaggtttagattttagtttgcggaaaccttccctatatagagacagattaacttgttgatataaatttaatagagctagctcttggtaatggtgaaaataatgagttttggttggttttatttggcagatgtttttagaaataaaagtacttagacctagtgcagcctctaggaaaagtcttgccttttcattagagaaaacaggaccaaggtttcagttttcaaacagctgttgttgaatgtgtagaacccagttccatctgttttggttcattgttacagaacttagtccagtcatttgggctaaagccaaccaaaagcttagttgcctttctcaacaaacactggtactggtatacttttgtagatgaaaccatcacaaggtatttagtgttaacttgtgtgccaaattcagatcactatgtcgttgttgctctagccttcagtgtcataacacaggggggataaaacagaggggatgagggaaatgaattctgttaataattattcttcctggtatgcctgttttgcttcacaaaggctactatcatgctggatagataagaacaggagatggcagtggaaagggattgcttgttaccacagagaattctcttcaaattaagatatgtcattagaatgcttggaccagtcaatcttttgtacttatttgaaaatataggaacaatttagcagctgcaaatatgcccaagctatttttaatagatatactaaacttattgttgacaaatttcagcctccttaattttttttttttttggtaattacctataggcttaaaagtcattcgttgctgttctagtataattagtagttccgtgattgaaagtttatggtaattctactatcttcaaattagatacattttcaaaaggaaaagataattttttagaaacatcttaatattcactatttcctgaaaaaatccaagcagttaacgctttctggatggtaacaaagtaccttctaaaagataagtgctatgacaccatgtatgaatgtaattctcttagtaatttacctctgactatttggtgtcttaacgctttggtttatataatctcaggggttgtctgcaaaccaaaactgacatattctgtggttagcttttattacttttttttttaacagaatgctttgctttggttatatttcttctttcttcttttgtcttatatggattaataactagtctccatgaacttcacttgaaagagcctgtaaaagttagatgagtctaaaagtgctctttgaagtagcagcaaattgggagtatatgctctgttatatagaaataaattgtccttgctattttcttacatttagctttgctagattgtatatacattgagctaagaccttaggaaattcactttctgcatgataaaatgacccaataaatattccactttgcttaataatgtacatacagtgcattattttttctatttgtagatgaatttaatgacagataattgtctgttccccgctgaaactgaagaaatctagtttttttgtgaacatttttgtggtcttatggataaggtacatgaagatttttgcagcagtattagtggttcagtggctgcactttattaatcagtgtgttaatttttgacagtgattggactagaccttttcaaatagagtctgagggtatcagacagtgaaaatgtgctgtaactaagtagcatgtaaatcagttgattgtaaaacgtttcgctgggaacttattttagctatattttacttcagacagattatgatacaataatctacctgtgcatcagttagtaggtgctgcagggtttcttactatttacagaaacattttgtgcagtctttgttataaattttcagaagactatactctttactttgaaggtctattttttaattatacctcatttagctaactagtattctaatacctggtagaaaaacagtgagccagcctttaagcatctaacaaaatttagactctttgttttgttttgaactgaagacatcattgggaaaggtaggaaatattagtttaggatagagcatacatgtcatatccagtagcataaaaaaagtattatctccctgtctccattaataaatttagctgtgcaatataggtgcgtttttgcagaagtttctagtaagagattataactccattttacaggttctgaatgctcagagtctatattaaggcttataaagtttttcctgtgatcagtaagtgacacatttaagcagacattcttttcaagttcatgacttagattcctttacaaatttagttctcaatctttaaaaaccacatttcattatgttggttaattattataaattttaagcactcatttctgcaatcaggtttctcagaannnnnnnnnnnnnnnnnnnggggncattcctttttccttgttacatccaaggggggcacaggggtgggtggaaaggaatgtctaaaaatgaaatcccttgatatagagggacctagacggacaggatatgctaaaataatttcaaattctagcacaattttagagtagaataagtcatttttttagactaataaaattaatggctgtcatgttcactctgaaaaaaatctaaatgactgaaatgtacagaaataaaaattagcaaacaattattctagggatattttcagattttacttcatttcttgaaatgcgtgtgccatatgcaattgcatttcttgtgccaagaaactaatagaacttatttcactttacctttttttaaaatgtgaatttagttattatagttcaattttatggccttacagatggcttttattttgtttgcagctgacactgcagttcctttcatgcaaaataccataaactgtttgatgaaaatcatgcccctaatggaaactctctagtttttccatataactatcctactgtacatgtttaaacatattttatttttgctccaatggcttaatgtgaaaagctcctgcagataagtggacctgtcatgtggttaatcttgtttaagccaattcattaactgtgtactgatactgatgctatgttttttttaaatggattttattccaggtgaactttttttttataataatgttcgtctaaaataaaaactacataatgaaaatgaaaatgct

SEQ ID NO: 3788 - protein, 237 aa, Homo sapien
  Unsure 4105-4123, 4128: Unknown amino acid
LAGTPPRPRPPPRLSPPPPLAPRSEGRSEKMAKTYDYLFKLLLIGDSGVGKTCLLFRFSEDAFNTTFISTIGIDFKIRTIELDGKKIKLQIWDTAGQERFRTITTAYYRGAMGIMLVYDITNEKSFDNIKNWIRNIEEHASSDVERMILGNKCDMNDKRQVSKERGEKLAIDYGIKFLETSAKSSANVEEAFFTLARDIMTKLNRKMNDSNSAGAGGPVKITENRSKKTSFFRCSLL

SEQ ID NO: 3789 - DNA, 1707 bp, Homo sapien
ggcacgaggaggcgccctccgactccttgcgccgcactgctcgccgggccagtccggaaacgggtcgtggagctccgcaccactcccgctggttcccgaaggcagatcccttctcccgagagttgcgagaaactttcccttgtccccgacgctgcagcggctcgggtaccgtggcagccgcaggtttctgaaccccgggccacgctccccgcgcctcggcttcgcgctcgtgtagatcgttccctctctggttgcacgctggggatcccggacctcgattctgcgggcgagatgcccctgggacacatcatgaggctggacctggagaaaattgccctggagtacatcgtgccctgtctgcacgaggtgggcttctgctacctggacaacttcctgggcgaggtggtgggcgactgcgtcctggagcgcgtcaagcagctgcactgcaccggggccctgcgggacggccagctggcggggccgcgcgccggcgtctccaagcgacacctgcggggcgaccagatcacgtggatcgggggcaacgaggagggctgcgaggccatcagcttcctcctgtccctcatcgacaggctggtcctctactgcgggagccggctgggcaaatactacgtcaaggagaggtctaaggcaatggtggcttgctatccgggaaatggaacaggttatgttcgccacgtggacaaccccaacggtgatggtcgctgcatcacctgcatctactatctgaacaagaattgggatgccaagctacatggtgggatcctgcggatatttccagaggggaaatcattcatagcagatgtggagcccatttttgacagactcctgttcttctggtcagatcgtaggaacccacacgaagtgcagccctcttacgcaaccagatatgctatgactgtctggtactttgatgctgaagaaagggcagaagccaaaaagaaattcaggaatttaactaggaaaactgaatctgccctcactgaagactgaccgtgctctgaaatctgctggccttgttcattttagtaacggttcctgaattctcttaaattctttgagatccaaagatggcctcttcagtgacaacaatctccctgctacttcttgcatccttcacatccctgtcttgtgtgtggtacttcatgttttcttgccaagactgtgttgatcttcagatactctctttgccagatgaagttatttgctaactccagaaattcctgcagacatcctactcggccagcggtttacctgatagattcggtaatactatcaagagaagagcctaggagcacagcgagggaatgaaccttacttgcactttatgtatacttcctgatttgaaaggaggaggtttgaaaagaaaaaaatggaggtggtagatgccacagagaggcatcacggaagccttaacagcaggaaacagagaaatttgtgtcatctgaacaatttccagatgttcttaatccagggctgttggggtttctggagaattatcacaacctaatgacattaatacctctagaaagggctgctgtcatagtgaacaatttataagtgtcccatggggcagacactccttttttcccagtcctgcaacctggattttctgcctcagctccattttgctgaaaataatgactttctgaataaagatggcaacacaaaaaaaaaaaaaaaaaaaaa

SEQ ID NO: 3790 - protein, 239 aa, Homo sapien; identical to SEQ ID NO: 3382

SEQ ID NO: 3791 - DNA, 1794 bp, Homo sapien
cacatataataatagcaactcctggtcgactgattgaccacttgaaacctttcgtattttccaagtgctggcaagcgcttcctgcgcaggccgaggcgacctggagtttgtgacgctgtgatggtctagaggctggagattcaagatctgggtgccatcattttctggttctgttgatgaccctcttccaggttacatacagcttacatcttgcatcctcaagcgtttttcttataaggctaaaaattcacaaagcatatatcaatgaatcaggaggatctagatccggatagtactacagatgtgggagatgttacaaatactgaagaagaacttattagagaatgtgaagaaatgtggaaagatatggaagaatgtcagaataaattatcacttattggaactgaaacactcaccgattcaaatgctcagctatcattgttaattatgcaagtaaaatgtttaaccgctgaactcagtcaatggcagaaaaaaacacctgaaacaattcccttgactgaagacgttctcataacattaggaaaagaagagttccaaaagctgagacaagatcttgaaatggtactgtccactaaggagtcaaagaatgaaaagttaaaggaagacttagaaagggaacaacggtggttggatgaacagcaacagataatggaatctcttaatgtactacacagtgaattgaaaaataaggttgaaacattttctgaatcaagaatctttaatgaactgaaaactaaaatgcttaatataaaagaatataaggagaaactcttgagtaccttgggcgagtttctagaagaccattttcctctgcctgatagaagtgttaaaaagaaaaagaaaaacattcaagaatcatctgtaaacctgataacactgcatgaaatgttagagattcttataaatagattatttgatgttccacatgatccatatgtcaaaattagtgattccttttggccaccttatgttgagctgctgctgcgtaatggaattgccttgagacatccagaagatccaacccgaataagattagaagctttccatcagtaaaaggatgttttcttttttcacacagtaaaaattcttatcattcaaggatattggaaccacaggactatttggataaaaaacattatttgcaaattaatgcgcatagtacttttattgcaaaatggcatgtgctgccatctattattcatttttaaatggtcatttcttattcagtgagtgctttagtgttttaaactatatggataagaatgcaggtagataatattctaggcataaaacatttaatgtaccttacctcatgcaatattctttggattctttgttgatttatgatattgctaatataatattttcttaaaatatataacaatatcttttatgcatttgagttccagctggtgcttctttatatttagaaattataatgggaaggtcatttaatttacagatggttttaaaattgaggtaatatctgaggtggcataatttaaaaatatttagcaaatttgtttcatatatactgtcttatttctagatttgtttaaaattggaatatgaaaaactaatggataaagctagcataaaattgatattttagtttgtattattaatatatcatgttaccttatatattaatctactcttgattctgctaattattaccaacaaaattgtattcatgacattttattaatcctctgtgaattttctgtaaataaaattatttctgaaaatctctaaaaaaaaaaaaaaaaaaaa

SEQ ID NO: 3792 - protein, 269 aa, Homo sapien
MNQEDLDPDSTTDVGDVTNTEEELIRECEEMWKDMEECQNKLSLIGTETLTDSNAQLSLLIMQVKCLTAELSQWQKKTPETIPLTEDVLITLGKEEFQKLRQDLEMVLSTKESKNEKLKEDLEREQRWLDEQQQIMESLNVLHSELKNKVETFSESRIFNELKTKMLNIKEYKEKLLSTLGEFLEDHFPLPDRSVKKKKKNIQESSVNLITLHEMLEILINRLFDVPHDPYVKISDSFWPPYVELLLRNGIALRHPEDPTRIRLEAFHQ

SEQ ID NO: 3793 - DNA, 4075 bp, Homo sapien
acatgccggaggaggcgggcttcccgccggccaagagattccggccaggctctggacctccgagccgcgctgggtccttccctcccgggaggcaagtggtgatgctgctgactgcgggcagcggcggcagaggaggaggaggaggccggaggcagcagccgcccctggcccagccctcggccagtccctaccctgaagctgtggagctgcagcgccggagtctgcccatcttccaagcgcgggggcaactgttggcccagctccgaaacctggacaacgcggtcctcatcggggaaactggctctgggaagacaactcagatccctcagtacctgtatgaaggagggatcagccgccagggcatcattgctgtgacccagcctcgtcgagtagctgccatctctcttgctactagagtctcagatgagaagagaactgaacttgggaagctggttggctatacagtgcgctttgatgatgtcacctcagaagacaccaggatcaagtttctgacagatggcatgcttctgcgtgaagcaatttcagactctttgcttcggaaatacagctgtgtcattttggatgaagctcacgaacggactatccacacagatgtgctctttggagtggtgaaagctgcacagaagaggagaaaggaactcgggaaacttcctctgaaagtgattgtgatgtcagctacgatggatgtggacctgttctctcagtatttcaatggcgcccccgtcctctacctagagggtcggcagcatccgatccaggtgttttacaccaaacagcctcagaatgattacctgcacgccgcgcttgtctccgtcttccagatccaccaggaagccccttcttcacaggacatcctggtgttcctcactgggcaggaggagatcgaagccatgagcaagacgtgccgagacattgcaaagcacctcccagacggctgccctgcgatgctggtccttcctctgtacgcctccctgccctatgcacagcagctccgagtcttccaaggggccccaaagggctatcgcaaagtgatcatttcaaccaacatcgctgaaacctccataaccattacaggaataaaatatgtagttgacacgggcatggttaaagcaaagaagtataaccctgacagtggtcttgaggtgttagcagtgcagcgggtatcgaagacgcaggcttggcagcgcacagggagggctggcagagaggacagtggcatctgctaccggctctacacggaggacgagtttgagaagtttgataagatgaccgtgccagagatccagaggtgtaacctggccagtgtgatgcttcagcttctagcaatgaaagtcccaaatgtgctcacctttgacttcatgtcgaagccatctccagatcacattcaggcggccattgcccaactggacctgttaggtgctcttgaacataaggatgaccagcttaccctgactccaatgggaagaaagatggcagcatttcctttagaacccaaatttgccaaaaccatcctcatgtcccccaaattccactgtacagaggagatcctgaccattgtctccctgctgtctgtggacagcgtcctccacaaccctccttcccggcgagaggaagtgcaaggggtccgcaagaagttcatatccagcgagggggatcacatgaccctgctcaatatctatcggaccttcaaaaacctaggcggaaataaggattggtgcaaagagaattttgtcaacagcaagaatatgacgctggtagcagaagtcagagcacagctgagggacatctgcttaaagatgtcaatgccaatcgcatcatcccgaggagacgtggagagtgtccgccgctgcctggctcacagcctcttcatgagcaccgccgagcttcagccagatggcacctatgccaccacggacacccaccagccagtggccatccacccgtcgtctgtcctcttccactgcaagccggcctgcgtcgtgtacactgagctgctctacaccaacaagtgctacatgcgggacctctgcgtcatagatgcacagtggctgtacgaggctgcccctgagtactttaggaggaagctgagaaccgccagaaactgagccgccccaggatgccgccagaatcactggtccctgggagcttggactacagttgtccttacagcaggcttccaggttggcgcttagagaagccttggaatcagctgaaggtgcctgacttccaggagcgtgaaagcatctttgctcaactcctgggactgaaccatatagacatggacatatcatttgtacctggaaacctcaaaattatgcttttggttcttactgggtgactttgacttaatttaacacctgagcctcagttttctcatctgccaaatgggagtaataataataatccttataaaattgggttcataaagtttagagaaaaggaatggaaagtacccagaactatgcctggagcacgcacgacacacgtacagtgagttgggagccgttaggctgaatgttactgcttgccatatgatgtgaagtacagcaatatcccaagttcttgtgactgagggagattttctggaagggccacaggaggttgcggagcttggatgttgcccttagttcttgtttaatgtctctctgaatgcagttttaaaatagaaaacaaaactgacttctgtagaagtttccagagggaggtgctgttatctcgtacctcctgggatggcgatccctactgaacgcttgtgtctcagggtggaccactctgtgtctgtctccaagcagagaccagtaaaggagcctcctggtcctcagtgcgtgaccctgtcagtgctttcaggagacatgtaagcttcctgggtgaaggttgatttgtaccttctgaatcctgtcacgtgtagacatgggaaactgacctatcagtgttttgtgtgtgtaggtgactcccacatacacagttgccatttttctctctaactgggcaccagtgaacatgcgggcatgaggagtgactgtgtaccatttcagctgtttcttttcgggcagtcccctggtcagagggggtgggggtgggggaggggagaggggtacctagaacccagagaacattggcttatgccagataccacaccacatctgggcttacattcttgtatcttttttggtgtgtgggcggggggggtggggggcagttcagtgaagtctagaagacctgctggacaaattctaaaagagctagagctgtaacacttattcttgcatcttattaattttctatgatattttttccttcttcgtagggacttgggacaatctggctttgctgctttctactgctaggcacctctctctaaccctcattgtcagagggaattggaggatatccacagtctgttcctgttctgatattctgagcagagaaaaggcactaacggttcctcttagctatttaattatcagaagcaagtaatctttccccagataatattttgccctagaagaagccgtgatttagctcttttattgtgcttacttggtccaaatacatctgtggggtgttttgtcatttcttaatgaatgaatcatagttataaccaggggccaagctgcccaagaggctcttcagagatcatggatgctctctttctggaagctgtggcctgatggagcagccccattccagggtcccatctgtccggagttgtgtatgtcaagtccggctcagtctttatttccaacactagccgtggtcctgtgcagtcaagctctcagctagtgtttagggctgtctgtcagaaatggttatacgtgggcaaaagaagatctgacagctcctatataccttatcttactgaattcttaaactttgaaccagttcttccacttactgacttgttaccactgctgactttctgaaaagttttccagtttttgttttttgttttttgttttccagtaggggattagaatgtttagtcctacttagtaagaaaaatattgtatttttaatcattcatagtgctggtaaaaaaaaaaaaaaaaaaaaa

SEQ ID NO: 3794 - protein, 707 aa, Homo sapien
MPEEAGFPPAKRFRPGSGPPSRAGSFPPGRQVVMLLTAGSGGRGGGGGRRQQPPLAQPSASPYPEAVELQRRSLPIFQARGQLLAQLRNLDNAVLIGETGSGKTTQIPQYLYEGGISRQGIIAVTQPRRVAAISLATRVSDEKRTELGKLVGYTVRFDDVTSEDTRIKFLTDGMLLREAISDSLLRKYSCVILDEAHERTIHTDVLFGVVKAAQKRRKELGKLPLKVIVMSATMDVDLFSQYFNGAPVLYLEGRQHPIQVFYTKQPQNDYLHAALVSVFQIHQEAPSSQDILVFLTGQEEIEAMSKTCRDIAKHLPDGCPAMLVLPLYASLPYAQQLRVFQGAPKGYRKVIISTNIAETSITITGIKYVVDTGMVKAKKYNPDSGLEVLAVQRVSKTQAWQRTGRAGREDSGICYRLYTEDEFEKFDKMTVPEIQRCNLASVMLQLLAMKVPNVLTFDFMSKPSPDHIQAAIAQLDLLGALEHKDDQLTLTPMGRKMAAFPLEPKFAKTILMSPKFHCTEEILTIVSLLSVDSVLHNPPSRREEVQGVRKKFISSEGDHMTLLNIYRTFKNLGGNKDWCKENFVNSKNMTLVAEVRAQLRDICLKMSMPIASSRGDVESVRRCLAHSLFMSTAELQPDGTYATTDTHQPVAIHPSSVLFHCKPACVVYTELLYTNKCYMRDLCVIDAQWLYEAAPEYFRRKLRTARN

SEQ ID NO: 3795 - DNA, 671 bp, Homo sapien
cttttgccctctagaaagcaactgagccaccgcacccggccttcattcactttctttaaatgcctccaagttgattattctcctagctcatatctccttgatgtgcatgagggagcactgggtctaatttttgggggctgagaaggtaagaaggtgaggtcagtttttcccaggagtcctaaaaaattctggtaccttacattgagggtgtgggagaaagggtgtcatagttctgaaaataggcagtagcatgaagcaccagacctgtctcattccttattagatgtctatctcaaatgacagagtttgaaaaatattggttttatcatttgatatttccatgcctgactcgggaaaataacattttctgacttttttctattttcttgccctgcacagaccctacctggtacaattttctatttcttagctcaaagtgtctatacaatgggttgcctggtatgtcagctgccctcactcttgtgtaatagaaatatattgccaggctggggacgtggaggagacgaactggattcctccctcctcctgttgccaggcctctctgcattggcactttatcctttcagtgtttctggctgtgttgggttcatttgtgagactgatgtaacaataaagtgaaatcttcccctctgaaaaaaaaaaaaaaaggg

SEQ ID NO: 3796 - protein, 46 aa, Homo sapien [sequence omitted]

SEQ ID NO: 3797 - DNA, 2794 bp, Homo sapien
aggagcctactttattctgataaaacaggtctatgcagctaccaggacaatggaatctacgttgactttagcaacggaacaacctgttaagaagaacactcttaagaaatataaaatagcttgcattgttcttcttgctttgctggtgatcatgtcacttggattaggcctggggcttggactcaggaaactggaaaagcaaggcagctgcaggaagaagtgctttgatgcatcatttagaggactggagaactgccggtgtgatgtggcatgtaaagaccgaggtgattgctgctgggattttgaagacacctgtgtggaatcaactcgaatatggatgtgcaataaatttcgttgtggagagaccagattagaggccagcctttgctcttgttcagatgactgtttgcagaagaaagattgctgtgctgactataagagtgtttgccaaggagaaacctcatggctggaagaaaactgtgacacagcccagcagtctcagtgcccagaagggtttgacctgccaccagttatcttgttttctatggatggatttagagctgaatatttatacacatgggatactttaatgccaaatatcaataaactgaaaacatgtggaattcattcaaaatacatgagagctatgtatcctaccaaaaccttcccaaatcattacaccattgtcacgggcttgtatccagagtcacatggcatcattgacaataatatgtatgatgtaaatctcaacaagaatttttcactttcttcaaaggaacaaaataatccagcctggtggcatgggcaaccaatgtggctgacagcaatgtatcaaggtttaaaagccgctacctacttttggcccggatcagaagtggctataaatggctcctttccttccatatacatgccttacaacggaagtgtcccatttgaagagaggatttctacactgttaaaatggctggacctgcccaaagctgaaagacccaggttttataccatgtattttgaagaacctgattcctctggacatgcaggtggaccagtcagtgccagagtaattaaagccttacaggtagtagatcatgcttttgggatgttgatggaaggcctgaagcagcggaatttgcacaactgtgtcaatatcatccttctggctgaccatggaatggaccagacttattgtaacaagatggaatacatgactgattattttcccagaataaacttcttctacatgtacgaagggcctgccccccgcatccgagctcataatatacctcatgacttttttagttttaattctgaggaaattgttagaaacctcagttgccgaaaacctgatcagcatttcaagccctatttgactcctgatttgccaaagcgactgcactatgccaagaacgtcagaatcgacaaagttcatctctttgtggatcaacagtggctggctgttaggagtaaatcaaatacaaattgtggaggaggcaaccatggttataacaatgagtttaggagcatggaggctatctttctggcacatggacccagttttaaagagaagactgaagttgaaccatttgaaaatattgaagtctataacctaatgtgtgatcttctacgcattcaaccagcaccaaacaatggaacccatggtagtttaaaccatcttctgaaggtgcctttttatgagccatcccatgcagaggaggtgtcaaagttttctgtttgtggctttgctaatccattgcccacagagtctcttgactgtttctgccctcacctacaaaatagtactcagctggaacaagtgaatcagatgctaaatctcacccaagaagaaataacagcaacagtgaaagtaaatttgccatttgggaggcctagggtactgcagaagaacgtggaccactgtctcctttaccacagggaatatgtcagtggatttggaaaagctatgaggatgcccatgtggagttcatacacagtcccccagttgggagacacatcgcctctgcctcccactgtcccagactgtctgcgggctgatgtcagggttcctccttctgagagccaaaaatgttccttctatttagcagacaagaatatcacccacggcttcctctatcctcctgccagcaatagaacatcagatagccaatatgatgctttaattactagcaatttggtacctatgtatgaagaattcagaaaaatgtgggactacttccacagtgttcttcttataaaacatgccacagaaagaaatggagtaaatgtggttagtggaccaatatttgattataattatgatggccattttgatgctccagatgaaattaccaaacatttagccaacactgatgttcccatcccaacacactactttgtggtgctgaccagttgtaaaaacaagagccacacaccggaaaactgccctgggtggctggatgtcctaccctttatcatccctcaccgacctaccaacgtggagagctgtcctgaaggtaaaccagaagctctttgggttgaagaaagatttacagctcacattgcccgggtccgtgatgtagaacttctcactgggcttgacttctatcaggataaagtgcagcctgtctctgaaattttgcaactaaagacatatttaccaacatttgaaaccactatttaacttaataatgtctacttaatatataatttactgtataaagtaattttggcaaaatataagtgatttttttctggagaattgtaaaataaagttttctatttttccttaaaaaaaaaa

SEQ ID NO: 3798 - protein, 875 aa, Homo sapien
MESTLTLATEQPVKKNTLKKYKIACIVLLALLVIMSLGLGLGLGLRKLEKQGSCRKKCFDASFRGLENCRCDVACKDRGDCCWDFEDTCVESTRIWMCNKFRCGETRLEASLCSCSDDCLQKKDCCADYKSVCQGETSWLEENCDTAQQSQCPEGFDLPPVILFSMDGFRAEYLYTWDTLMPNINKLKTCGIHSKYMRAMYPTKTFPNHYTIVTGLYPESHGIIDNNMYDVNLNKNFSLSSKEQNNPAWWHGQPMWLTAMYQGLKAATYFWPGSEVAINGSFPSIYMPYNGSVPFEERISTLLKWLDLPKAERPRFYTMYFEEPDSSGHAGGPVSARVIKALQVVDHAFGMLMEGLKQRNLHNCVNIILLADHGMDQTYCNKMEYMTDYFPRINFFYMYEGPAPRIRAHNIPHDFFSFNSEEIVRNLSCRKPDQHFKPYLTPDLPKRLHYAKNVRIDKVHLFVDQQWLAVRSKSNTNCGGGNHGYNNEFRSMEAIFLAHGPSFKEKTEVEPFENIEVYNLMCDLLRIQPAPNNGTHGSLNHLLKVPFYEPSHAEEVSKFSVCGFANPLPTESLDCFCPHLQNSTQLEQVNQMLNLTQEEITATVKVNLPFGRPRVLQKNVDHCLLYHREYVSGFGKAMRMPMWSSYTVPQLGDTSPLPPTVPDCLRADVRVPPSESQKCSFYLADKNITHGFLYPPASNRTSDSQYDALITSNLVPMYEEFRKMWDYFHSVLLIKHATERNGVNVVSGPIFDYNYDGHFDAPDEITKHLANTDVPIPTHYFVVLTSCKNKSHTPENCPGWLDVLPFIIPHRPTNVESCPEGKPEALWVEERFTAHIARVRDVELLTGLDFYQDKVQPVSEILQLKTYLPTFETTI

SEQ ID NO: 3799 - DNA, 2657 bp, Homo sapien
tatatcaatacaccagtggctgaaattatcatgaaaccaaatgttggacaaggcagcacaagtgtgcaaacagctatggaaagtgaactcggagagtctagtgccacaatcaataaaagactctgcaaaagtacaatagaactttcagaaaattctttacttccagcttcttctatgttgactggcacacaaagtaaggctgttgctttcaatgcatgcaatattaactttgagtgtttactaactctgtgttttgcttacctggcttttcttccttgaagttgcttttttttttcctccaagaggaattatttaaaaagactttagtctgtgacataaccaagatttattctgtttacctaaggaacttattttcttttttgcaatttcatttattctgagtcactttatttgtaataagtgaagaattttaatacttagaaataagttgtaaagaaaataatgagaatcttaccatgctttagaggaacgtaatttctagaaatagttaaaagatgaaatactaagatattattttaccttctttatatagctgtatatactggtagtatgaaagcaactagtgtcattgatgattttttgggggggtatttttgtattctaggcttgctgcaacctcatttagagagggttgccatcgatgctctacagttatgttgtttgttacttcccccaccaaatcgtagaaagcttcaacttttaatgcgtatgatttcccgaatgagtcaaaatgttgatatgcccaaacttcatgatgcaatgggtacgaggtcactgatgatacataccttttctcgatgtgtgttatgctgtgctgaagaagtggatcttgatgagcttcttgctggaagattagtttctttcttaatggatcatcatcaggaaattcttcaagtaccctcttacttacagactgcagtggaaaaacatcttgactacttaaaaaagggacatattgaaaatcctggagatggactatttgctcctttgccaacttactcatactgtaagcagattagtgctcaggagtttgatgagcaaaaagtttctacctctcaagctgcaattgcagaacttttagaaaatattattaaaaacaggagtttacctctaaaggagaaaagaaaaaaactaaaacagtttcagaaggaatatcctttgatatatcagaaaagatttccaaccacggagagtgaagcagcactttttggtgacaaacctacaatcaagcaaccaatgctgattttaagaaaaccaaagttccgtagtctaagataactaactgaattaaaaattatgtaatacttgtggaactttgataaatgaagccatatctgagaatgtagctactcaaaaggaagtctgtcattaataaggtatttctaaataaacacattatgtaaggaagtgccaaaatagttatcaatgtgagactcttaggaaactaactagatctcaattgagagcacataacaatagatgataccaaatactttttgtttttaacacagctatccagtaaggctatcatgatgtgtgctaaaattttatttacttgaattttgaaaactgagctgtgttagggattaaactataattctgttcttaaaagaaaatttatctgcaaatgtgcaagttctgagatattagctaatgaattagttgtttggggttacttctttgtttctaagtataagaatgtgaagaatatttgaaaactcaatggaataattctcagctgccaaatgttgcactcttttatatattctttttccacttttgatctatttatatatatgtatgtgtttttaaaatatgtgtatattttatcagatttggttttgccttaaatattatccccaattgcttcagtcattcatttgttcagtatatatattttgaattctagttttcataatctattagaagatggggatataaaagaagtataaggcaatcatatattcattcaaaagatatttatttagcaactgctatgtgcctttcgttgttccagatatgcagagacaatgataaataaaacatataatctcttccataaggtatttattttttaatcaagggagatacacctatcagatgtttaaaataacaacactacccactgaaatcagggcatatagaatcattcagctaaagagtgacttctatgatgatggaacaggtctctaagctagtggttttcaaactggtacacattagactcacccgaggaattttaaaacagcctatatgcccagggcctaacttacactaattaaatctgaattttggggatgttgtatagggattagtattttttttaatctaggtgattccaatattcagccaactgtgagaatcaatggcctaaatgctttttataaacatttttataagtgtcaagataatggcacattgactttattttttcattggaagaaaatgcctgccaagtataaatgactctcatcttaaaacaaggttcttcaggtttctgcttgattgacttggtacaaacttgaagcaagttgccttctaatttttactccaagattgtttcatatctattccttaagtgtaaagaaatatataatgcatggtttgtaataaaatcttaatgtttaatgactgtt

SEQ ID NO: 3800 - protein, 242 aa, Homo sapien
MKATSVIDDFLGGYFCILGLLQPHLERVAIDALQLCCLLLPPPNRRKLQLLMRMISRMSQNVDMPKLHDAMGTRSLMIHTFSRCVLCCAEEVDLDELLAGRLVSFLMDHHQEILQVPSYLQTAVEKHLDYLKKGHIENPGDGLFAPLPTYSYCKQISAQEFDEQKVSTSQAAIAELLENIIKNRSLPLKEKRKKLKQFQKEYPLIYQKRFPTTESEAALFGDKPTIKQPMLILRKPKFRSLR

SEQ ID NO: 3801 - DNA, 2974 bp, Homo sapien
ggaggaagcggtggctgctgcggatgtcggtgtgagcgagcggcgcctgaacacacggcggctgccgagcgcctgacccgggcctgcgccagagcctgcaccgagctccggggccccacacccgctacggtggccctgcgcccgttgctactgaggcggcgtgctctgcattcttcgctgtccaggcctgccggctctggtgtctgctggctcctccttgctcgcctgctccctcctgcttgcctgagtcaccgccgccgccgccgccacagccatggccgagagtggtgaaagcggcggtcctccgggctcccaggatagcgccgccggagccgaaggtgctggcgcccccgcggccgctgcctccgcggagcccaaaatcatgaaagtcaccgtgaagaccccgaaggaaaaggaggaattcgccgtgcccgagaatagctccgtccagcagtttaaggaagaaatctctaaacgttttaaatcacatactgaccaacttgtgttgatatttgctggaaaaattttgaaagatcaagataccttgagtcagcatggaattcatgatggacttactgttcaccttgtcattaaaacacaaaacaggcctcaggatcattcagctcagcaaacaaatacagctggaagcaatgttactacatcatcaactcctaatagtaactctacatctggttctgctactagcaacccttttggtttaggtggccttgggggacttgcaggtctgagtagcttgggtttgaatactaccaacttctctgaactacagagtcagatgcagcgacaacttttgtctaaccctgaaatgatggtccagatcatggaaaatccctttgttcagagcatgctctcaaatcctgacctgatgagacagttaattatggccaatccacaaatgcagcagttgatacagagaaatccagaaattagtcatatgttgaataatccagatataatgagacaaacgttggaacttgccaggaatccagcaatgatgcaggagatgatgaggaaccaggaccgagctttgagcaacctagaaagcatcccagggggatataatgctttaaggcgcatgtacacagatattcaggaaccaatgctgagtgctgcacaagagcagtttggtggtaatccatttgcttccttggtgagcaatacatcctctggtgaaggtagtcaaccttcccgtacagaaaatagagatccactacccaatccatgggctccacagacttcccagagttcatcagcttccagcggcactgccagcactgtgggtggcactactggtagtactgccagtggcacttctgggcagagtactactgcgccaaatttggtgcctggagtaggagctagtatgttcaacacaccaggaatgcagagcttgttgcaacaaataactgaaaacccacaactgatgcaaaacatgttgtctgccccctacatgagaagcatgatgcagtcactaagccagaatcctgaccttgctgcacagatgatgctgaataatcccctatttgctggaaatcctcagcttcaagaacaaatgagacaacagctcccaactttcctccaacaaatgcagaatcctgatacactatcagcaatgtcaaaccctagagcaatgcaggccttgttacagattcagcagggtttacagacattagcaacggaagccccgggcctcatcccagggtttactcctggcttgggggcattaggaagcactggaggctcttcgggaactaatggatctaacgccacacctagtgaaaacacaagtcccacagcaggaaccactgaacctggacatcagcagtttattcagcagatgctgcaggctcttgctggagtaaatcctcagctacagaatccagaagtcagatttcagcaacaactggaacaactcagtgcaatgggatttttgaaccgtgaagcaaacttgcaagctctaatagcaacaggaggtgatatcaatgcagctattgaaaggttactgggctcccagccatcatagcagcatttctgtatcttgaaaaaatgtaatttatttttgataacggctcttaaactttaaaatacctgctttatttcattttgactcttggaattctgtgctgttataaacaaacccaatatgatgcattttaaggtggagtacagtaagatgtgtgggtttttctgtatttttcttttctggaacagtgggaattaaggctactgcatgcatcacttctgcatttattgtaattttttaaaaacatcaccttttatagttgggtgaccagattttgtcctgcatctgtccagtttatttgctttttaaacattagcctatggtagtaatttatgtagaataaaagcattaaaaagaagcaaatcatttgcactctataatttgtggtacagtattgcttattgtgactttggcatgcatttttgcaaacaatgctgtaagatttatactactgataattttgttttatttgtatacaatatagagtatgcacatttgggactgcatttctggaaacatactgcaataggctctctgagcaaaacacctgtaactaaaaaagtgaagataagaaaatactcttaaagctgagtatttcctaattgtatagaatcttacagcatctttgacaaacatctcccagcaaaagtgccggttagtcaggtttgttgaaaatacagtagaaaagctgattctggttatctctttaaggacaattaattgtacagacacataatgtaacattgtctcaacattcattcacagattgactgtaaattaccttaatctttgtgcagactgaaggaacactgtagtataccccaaagtgcatttgcctaggacttctcagcttctcccataggtagtttaacaggcattaaaatttgtaattgaaatgttgctttcactcaaaaaaaaaaaaaaaaaaaa

SEQ ID NO: 3802 - protein, 589 aa, Homo sapien
MAESGESGGPPGSQDSAAGAEGAGAPAAAASAEPKIMKVTVKTPKEKEEFAVPENSSVQQFKEEISKRFKSHTDQLVLIFAGKILKDQDTLSQHGIHDGLTVHLVIKTQNRPQDHSAQQTNTAGSNVTTSSTPNSNSTSGSATSNPFGLGGLGGLAGLSSLGLNTTNFSELQSQMQRQLLSNPEMMVQIMENPFVQSMLSNPDLMRQLIMANPQMQQLIQRNPEISHMLNNPDIMRQTLELARNPAMMQEMMRNQDRALSNLESIPGGYNALRRMYTDIQEPMLSAAQEQFGGNPFASLVSNTSSGEGSQPSRTENRDPLPNPWAPQTSQSSSASSGTASTVGGTTGSTASGTSGQSTTAPNLVPGVGASMFNTPGMQSLLQQITENPQLMQNMLSAPYMRSMMQSLSQNPDLAAQMMLNNPLFAGNPQLQEQMRQQLPTFLQQMQNPDTLSAMSNPRAMQALLQIQQGLQTLATEAPGLIPGFTPGLGALGSTGGSSGTNGSNATPSENTSPTAGTTEPGHQQFIQQMLQALAGVNPQLQNPEVRFQQQLEQLSAMGFLNREANLQALIATGGDINAAIERLLGSQPS

SEQ ID NO: 3803 - DNA, 1511 bp, Homo sapien
ctcattcgttcccagcaggccctgcgcgcggcaacatggcggggtccaggtggaggtcttgaggctatcagatcggtatggcattggcgtccgggcccgcaaggcgggcgctagctggctccgggcagctcggccttgggggcttcggggccccgagacgcggggcgtatgagtggggcgtgcgctccacgcggaagtcggagcctcctcccctggatagggtgtacgagatccctggactggagcccatcacctttgcggggaagatgcacttcgtgccctggctggcgcggccgatctttccgccctgggaccgcggctacaaggacccaaggttctaccgctcgccccctcttcacgagcatccgctgtacaaagaccaggcctgctatatctttcaccaccgttgccgccttctcgagggtgtaaagcaggccctctggctcaccaagaccaagttaatagaaggccttcccgagaaagtgcttagccttgttgatgatccaaggaaccacatagagaaccaagacgagtgcgttctgaatgtgatctctcacgcccgtctctggcagaccactgaggaaatccccaagagagagacctactgcccggtcatcgtggacaacctaatacagctgtgtaaatctcagattctcaagcatccttctctggccaggaggatctgtgtccaaaactccacgttttctgctacctggaaccgagagtctcttctccttcaagtccgtggttctggtggagcccgactgagcactaaggatcctctgcccaccatcgcctccagagaggagattgaagctactaagaatcatgttctagagaccttctaccccatatcacccatcatcgatcttcatgaatgcaatatttatgatgtgaaaaatgacacaggattccaggaaggctatccttacccctatccccataccctgtacttactggacaaagccaatttacgaccacaccgccttcaaccagatcagctgcgggccaagatgatcctgtttgcttttggcagtgccctggctcaggcccggctcctctatgggaatgatgccaaggtcttggagcagcccgtggtggtgcagagcgtgggcacggatggacgtgtcttccatttcctagtgtttcaactgaataccacagacctggactgtaacgagggtgtcaagaatttggcctgggtggactcagaccagctcctctatcagcatttttggtgtctcccagtgatcaaaaagagagtggttgtggaacctgttgggccagttggtttcaagccagagacattcagaaagtttttagctctatatttgcatggtgctgcgtgagcggaggacccctctgaatcctgaaacccctcttgcctctcttccacggaagagggcctgggccccgtggagcctcagtgcccgtttggcctgctgctctcgctgacaataaagagcccttgcgttgcaaaaaaaaaaaaaaaaaaaaaaaaaaaaaaaaaa

SEQ ID NO: 3804 - protein, 423 aa, Homo sapien [sequence omitted]

SEQ ID NO: 3805 - DNA, 2165 bp, Homo sapien
ggcggctgagaggcgggcgggccgggggcgccgggcgcggggccgccatgtggagcggccgcagctccttcaccagcttggtggtgggcgtgttcgtggtctacgtggtgcacacctgctgggtcatgtacggcatcgtctacacccgcccgtgctccggcgacgccaactgcatccagccctacctggcgcggcggcccaagctgcagctgagcgtgtacaccacgacgaggtcccacctgggtgctgagaacaacatcgacctggtcttgaatgtggaagactttgatgtggagtccaaatttgaaaggacagttaatgtttctgtaccaaagaaaacgagaaacaatgggacgctgtatgcctacatcttcctccatcacgctggggtcctgccgtggcacgacgggaagcaggtgcacctggtcagtcctctgaccacctacatggtccccaagccagaagaaatcaacctgctcaccggggagtctgatacacagcagatcgaggcggagaagaagccgacgagtgccctggatgagccagtgtcccactggcgaccgcggctggcgctgaacgtgatggcggacaactttgtctttgacgggtcctccctgcctgccgatgtgcatcggtacatgaagatgatccagctggggaaaaccgtgcattacctgcccatcctgttcatcgaccagctcagcaaccgcgtgaaggacctgatggtcataaaccgctccaccaccgagctgcccctcaccgtgtcctacgacaaggtctcactggggcggctgcgcttctggatccacatgcaggacgccgtgtactccctgcagcagttcgggttttcagagaaagatgctgatgaggtgaaaggaatttttgtagataccaacttatacttcctggcgctgaccttctttgtcgcagcgttccatcttctctttgatttcctggcctttaaaaatgacatcagtttctggaagaagaagaagagcatgatcggcatgtccaccaaggcagtgctctggcgctgcttcagcaccgtggtcatctttctgttcctgctggacgagcagacgagcctgctggtgctggtcccggcgggtgttggagccgccattgagctgtggaaagtgaagaaggcattgaagatgactattttttggagaggcctgatgcccgaatttcagtttggcacttacagcgaatctgagaggaaaaccgaggagtacgatactcaggccatgaagtacttgtcatacctgctgtaccctctctgtgtcgggggtgctgtctattcactcctgaatatcaaatataagagctggtactcctggttaatcaacagcttcgtcaacggggtctatgcctttggtttcctcttcatgctgccccagctctttgtgaactacaagttgaagtcagtggcacatctgccctggaaggccttcacctacaaggctttcaacaccttcattgatgacgtctttgccttcatcatcaccatgcccacgtctcaccggctggcctgcttccgggacgacgtggtgtttctggtctacctgtaccagcggtggctttatcctgtggataaacgcagagtgaacgagtttggggagtcctacgaggagaaggccacgcgggcgccccacacggactgaaggccgcccgggctgccgccagccaagtgcaacttgaattgtcaatgagtatttttggaagcatttggaggaattcctagacattgcgttttctgtgttgccaaaatcccttcggacatttctcagacatctcccaagttcccatcacgtcagatttggagctggtagcgcttacgatgcccccacgtgtgaacatctgtcttggtcacagagctgggtgctgccggtcaccttgagctgtggtggctcccggcacacgagtgtccggggttcggccatgtcctcacgcgggcaggggtgggagccctcacaggcaagggggctgttggatttccatttcaggtggttttctaagtgctccttatgtgaatttcaaacacgtatggaattcattccgcatggactctgggatcaaaggctctttcctcttttgtttgagagttggttgttttaaagcttaatgtatgtttctattttaaaataaaaaaaaaaaaaaaaaaa

SEQ ID NO: 3806 - protein, 538 aa, Homo sapien
MWSGRSSFTSLVVGVFVVYVVHTCWVMYGIVYTRPCSGDANCIQPYLARRPKLQLSVYTTTRSHLGAENNIDLVLNVEDFDVESKFERTVNVSVPKKTRNNGTLYAYIFLHHAGVLPWHDGKQVHLVSPLTTYMVPKPEEINLLTGESDTQQIEAEKKPTSALDEPVSHWRPRLALNVMADNFVFDGSSLPADVHRYMKMIQLGKTVHYLPILFIDQLSNRVKDLMVINRSTTELPLTVSYDKVSLGRLRFWIHMQDAVYSLQQFGFSEKDADEVKGIFVDTNLYFLALTFFVAAFHLLFDFLAFKNDISFWKKKKSMIGMSTKAVLWRCFSTVVIFLFLLDEQTSLLVLVPAGVGAAIELWKVKKALKMTIFWRGLMPEFQFGTYSESERKTEEYDTQAMKYLSYLLYPLCVGGAVYSLLNIKYKSWYSWLINSFVNGVYAFGFLFMLPQLFVNYKLKSVAHLPWKAFTYKAFNTFIDDVFAFIITMPTSHRLACFRDDVVFLVYLYQRWLYPVDKRRVNEFGESYEEKATRAPHTD

SEQ ID NO: 3807 - DNA, 4200 bp, Homo sapien
ccagcggctgggcctgagcgtcgagactcggggccgaggcggaggagcggccgccgcgccggggcccagccggagccgccgccctcgcccttgcctttgcctgcgcggctcagaatcaccatccgcggcgcgggagacgagccggccgtcccgggccgggggacccgcccgccatggccaccaaggctcgggttatgtatgattttgctgctgaacctggaaataatgaactgacggttaatgaaggagaaatcatcacaatcacaaatccggatgtaggtggaggatggctggaaggaagaaacatcaaaggagaacgagggctggttcccacagactacgttgaaattttacccagtgatggaaaagatcaattttcttgtggaaattcagtggctgaccaagccttccttgattctctctcagccagcacagctcaggccagttcgtcggctgccagcaacaatcaccaggttggcagtggcaatgacccctggtcagcctggagtgcctccaaatctgggaactgggaaagctcagaaggctggggggcccagccagagggggctggagcccaaagaaacacaaacactcccaacaactgggacactgccttcggccacccccaggcctaccaaggaccagcaactggtgatgatgatgactgggatgaagactgggatgggcccaaatcctcttcctactttaaggattcagagtcagctgatgcaggcggcgctcagcgaggaaacagtcgtgctagttcctcatccatgaaaattccccttaacaaatttcctggatttgcgaaacctggcacggaacagtatttgttggccaaacaactagcaaaacccaaagagaaaattcccatcattgttggagattatggcccaatgtgggtttatcctacctctacttttgactgtgtggtagcagatcccaggaaaggctccaaaatgtatggtctaaagagctacatcgaatatcagctaacacctactaacactaatcgatctgtaaaccacaggtataagcactttgactggttatatgagcgtctcctggttaagtttgggtcagccattccaatcccttctcttccagacaaacaagtcacaggccgctttgaagaggaatttatcaaaatgcgcatggagagacttcaggcctggatgaccaggatgtgtcgccatccagtaatctcagaaagtgaagttttccagcagttcctaaatttccgagatgagaaggaatggaaaactggaaagaggaaggccgagagagatgagctggcgggagtcatgatattttccaccatggaaccagaggcacctgacttggacttagtagaaatagagcagaagtgcgaggctgtggggaagttcaccaaggccatggatgacggcgtgaaggagctgctgacggtggggcaggagcactggaagcgctgcacgggcccattacccaaggaatatcagaagataggaaaggccttgcagagtttggccacagtgttcagttccagtggctatcaaggtgaaacagatctcaatgatgcaataacagaagcaggaaagacttatgaagaaattgccagtctcgtggcagaacagccaaagaaagatctccatttcctgatggaatgtaatcacgagtataaaggttttcttggctgcttccctgacatcattggcactcacaagggagcaatagaaaaagtgaaagaaagtgacaaactagttgcaacaagtaaaatcaccctacaagacaaacagaacatggtgaagagagtcagcatcatgtcttacgcgttgcaagctgagatgaatcactttcacagtaaccggatctatgattacaacagtgtcatccgcctgtacctggagcagcaagtgcaattttacgaaacgattgcagaaaagctgaggcaggccctcagccgctttccagtgatgtaggacagaacgggccttgaagagaatgccgcgtgctttctcctgacttggggcaatgcaattcaaaactttttttcccctattattcagaaaaaaaaggaaacaaaaccaaaaagaaagagttgcaaaaaactgcatttattttattagccaccctaaatgcgtcagttatttagggatggtcttttgttcatttccgcatccattatttaaaccagtggaaattgtctctatttttggaaagtacttaaaagttaccagaattttcaatggaaaatgaggggtttctccccactgatattttacatagagtcataatttatatgtcttataaattataagtcttatataatttataagtctcccacaatcttccagttcttacccagtgtcagataattaattactaattactttcttaaaaacatgaactatgccagaataaaaaatatctatgtttgtatatttttataactcctttcagtcctctggggctcctgtcattgagggaagtcgttacgcctttcactgccacagttacagctcaagtgcttacacttcaagagggaggacgctgggggcccctggggctgctagtgccatcgtggtgtgtggcaggtgggccatcccatgtccctccagggggaccccacagcctggcagatgagcagatacccctggccacccatgtcctcagcgacatttctgatgtgctgctcttatgtgaggaccagtgctttctctctttgcacttccttcctaatcttggttaaggcatgttttatgccatgaagaatacattagaagaattgagggactttgtagagaattttgtggctttggtccaacgggtgagtggctgtgcggaggcctgtgttcgggagggcctgggagaaggagggcacccagcaccccggcgtctctggccctttcttattctttggctcctcatccaccgtgatgagaagcgctgctgtggccacggcacactgcttggcttgggtggcgggttcatggccagttggtgtcatcagcaaagagaaaaagcacaggttagctccccattagatggaaaagtgtagggactgagaagggctgcagcctcagcagtgtacagagtccccggcgctctgaggttggagagaaagaacagaccagcgcccttcccgactacatccgaaacttcacacagggtgtttctgagcaccagcacttccagcgcttcacttaacggcataaagcaaaacaggaccttggcacaccgtcagctcgaactcaacactggcagccaccgtctcacccctgcggaggagcgctcccgtctcccacaggtgccttaccgcgttccctcccgctgctttcatttttctgacctaataattacgggaaatggaaagtctgggccagcatcaataaaatgacaccaaaaataagtagatgaaatcaaatgaatatgagaacatcttgttcttcaatatcacgggtttttgttaatgtttcataagtaattctccccacttgatttttcttctataaaatcccatagaacaatgtttatgctatagccatttaatatatgtacaaattgtaaagaatatgtataaatgttttacacgaatgtaagagcatgtagaagccaacatataaataaattgtttaaaaaaactgtacagtaaattctcaaagcactttttcaaaacactttttggactttgtgtgtgatttttgttgttgttgttaagtactttttattccagctgctgaaaatggtccaggtaatgaattcttccccaaatcctatttcttctgacatgaattcatcatttcagttccgtaggtcagtgttgcggtccgggaagcgtatcataaccacctgggagttgccaagaagcagacagtctcccagtgtctgactctcggatatttggatttgactggtgtgaggcaaagtgaaaaagggatgggggaaatggagatggcacgggctcctcagagcgtggtagccgactgtgaggaaaagcagagggaatgtgaaagaaaataagagaatccacgggatttgatgcctggaagattctccttcaagtggcaacatggcatatatatccttctccggggagtcacatgcaccatttggttcttagatacgttgatgttttgatttttaatgatttgtatcaacctgtaggtaccacagaagagctgtagtcatacaatcacataacttttacaaatatagtgg

SEQ ID NO: 3808 - protein, 595 aa, Homo sapien
MATKARVMYDFAAEPGNNELTVNEGEIITITNPDVGGGWLEGRNIKGERGLVPTDYVEILPSDGKDQFSCGNSVADQAFLDSLSASTAQASSSAASNNHQVGSGNDPWSAWSASKSGNWESSEGWGAQPEGAGAQRNTNTPNNWDTAFGHPQAYQGPATGDDDDWDEDWDGPKSSSYFKDSESADAGGAQRGNSRASSSSMKIPLNKFPGFAKPGTEQYLLAKQLAKPKEKIPIIVGDYGPMWVYPTSTFDCVVADPRKGSKMYGLKSYIEYQLTPTNTNRSVNHRYKHFDWLYERLLVKFGSAIPIPSLPDKQVTGRFEEEFIKMRMERLQAWMTRMCRHPVISESEVFQQFLNFRDEKEWKTGKRKAERDELAGVMIFSTMEPEAPDLDLVEIEQKCEAVGKFTKAMDDGVKELLTVGQEHWKRCTGPLPKEYQKIGKALQSLATVFSSSGYQGETDLNDAITEAGKTYEEIASLVAEQPKKDLHFLMECNHEYKGFLGCFPDIIGTHKGAIEKVKESDKLVATSKITLQDKQNMVKRVSIMSYALQAEMNHFHSNRIYDYNSVIRLYLEQQVQFYETIAEKLRQALSRFPVM

SEQ ID NO: 3809 - DNA, 4200 bp, Homo sapien; identical to SEQ ID NO: 3807

SEQ ID NO: 3810 - protein, 595 aa, Homo sapien; identical to SEQ ID NO: 3808

SEQ ID NO: 3811 - DNA, 1217 bp, Homo sapien
caactcatggcggcggcggcggcggcggcagctgcttgggcgcggtgcggtggtgactgagctacgagcctggcggcgggtgtgcgccgagccccggcccggcccggccctcgcgtgcctcccaggctccgcacccctgatgctgcgcgggtgctgagcccgcttcggccgggacgatggtgaagtatttcctgggccagagcgtgctccggagttcctgggaccaagtgttcgccgccttctggcagcggtacccgaatccctatagcaaacatgtcttgacggaagacatagtacaccgggaggtgacccctgaccagaaactgctgtcccggcgactcctgaccaagaccaacaggatgccacgctgggccgagcgactatttcctgccaatgttgctcactcggtgtacgtcctggaggactctattgtggacccacagaatcagaccatgactaccttcacctggaacatcaaccacgcccggctgatggtggtggaggaacgatgtgtttactgtgtgaactctgacaacagtggctggactgaaatccgccgggaagcctgggtctcctctagcttatttggtgtctccagagctgtccaggaatttggtcttgcccggttcaaaagcaacgtgaccaagactatgaagggttttgaatatatcttggctaagctgcaaggcgaggccccttccaaaacacttgttgagacagccaaggaagccaaggagaaggcaaaggagacggcactggcagctacagagaaggccaaggacctcgccagcaaggcggccaccaagaagcagcagcagcagcaacagtttgtgtagccagtctaccaccaccacagcaccccagacagctaggcttagcccctctgccctcccttcattgtactttatcattaaaaatcaacttccagccctgtctgctgtctacgtggtgggttgtggggatgcagtttggcatctgcagtacaccaagcacatgattcatgtctgagccaggtctgcttattctcccattgggcagctgaggaccgaggcacagaggtgcggtgacttgcccggggctccaggtagcctgcaggttaactggcggtaagtgctagactgtaagcccgacaagggcagggcttttggttttgttctctgatgtgtctcagtatctagcacataatagacactcaataaatacttgttgaattcaaa

SEQ ID NO: 3812 - protein, 219 aa, Homo sapien
MVKYFLGQSVLRSSWDQVFAAFWQRYPNPYSKHVLTEDIVHREVTPDQKLLSRRLLTKTNRMPRWAERLFPANVAHSVYVLEDSIVDPQNQTMTTFTWNINHARLMVVEERCVYCVNSDNSGWTEIRREAWVSSSLFGVSRAVQEFGLARFKSNVTKTMKGFEYILAKLQGEAPSKTLVETAKEAKEKAKETALAATEKAKDLASKAATKKQQQQQQFV

SEQ ID NO: 3813 - DNA, 5231 bp, Homo sapien
agctgtcgtgcctcgtggtcccgggactgcagtggtgtgcgctctcggcgcgtggcgctaggcatggcgatggatcaagtaaacgcgctgtgcgagcagctggtgaaagcggtgacggtcatgatggaccccaactccacccagcgctaccggctggaagccctcaagttttgtgaggagtttaaagaaaagtgtcctatctgtgtcccctgtggcttgaggttggctgagaaaacacaagttgccatcgtcagacattttggccttcagatcctggaacacgttgtcaagtttcggtggaacggcatgtctcgattggagaaggtgtatctgaagaacagtgtcatggagctgattgcaaatggaacattgaacattttggaagaggagaaccatattaaagatgctctgtctcgaattgtagtggaaatgatcaagcgagagtggccacagcattggcctgacatgctaatagaattggacactctttccaaacaaggggaaacacagacagaattggtgatgtttatccttttgcgactggcagaggatgtagtgacttttcagacacttccccctcaaagaagaagggacatccagcaaacattaacccagaacatggaaaggatcttcagttttctgcttaacacacttcaagaaaatgtaaacaagtatcagcaagtgaagacagatacttctcaggagtcaaaggcgcaagcaaactgtcgagtaggagttgcagcactgaatactctagcaggctatattgactgggtgtctatgagtcacatcactgctgaaaactgtaaactcctggagatactgtgtttgctgttgaatgaacaggaacttcagttgggagccgctgagtgtcttctcattgcagtcagcagaaaaggcaagttggaagaccggaagcccttgatggtcttatttggagatgttgccatgcattatatactctccgccgcacagactgctgatggaggaggtttggtagaaaaacactacgtctttctgaagaggctctgtcaggtgttgtgtgcgctgggcaatcagctgtgtgcattgctgggtgcagattctgatgtagaaacaccatcaaactttggaaaatacctggaatcttttcttgctttcacaacccatccaagtcagtttctacgctcttcaactcagatgacttggggagccctcttcaggcatgaaatcctgtcccgtgatcctttgctattagcaataataccaaaatatcttcgtgcttccatgactaacttggtcaagatgggctttccttctaaaacagacagccctagctgtgaatattctcggtttgattttgatagcgatgaggacttcaatgctttcttcaactcctcccgagcacaacaaggagaggtgatgaggttggcatgtcgtttggatcccaaaactagcttccagatggctggggagtggctaaagtatcaactatcaacttttcttgatgctggttctgtgaattcttgttctgcagttggaactggagaaggaagcctctgttccgtcttctcaccttcattcgtgcagtgggaagccatgactctttttttggaaagtgttatcacccagatgtttcgaacactaaatagagaagaaattcctgttaatgatggaatagagctattgcagatggttctgaactttgataccaaggatcccctcatcctgtcctgcgtccttactaatgtctctgcactctttccatttgtcacctacagaccagagttcctgccccaggtcttctctaagctattttcatctgtcacttttgaaactgttgaagaaagtaaggcccccagaacccgggcagtgaggaatgtgaggaggcatgcttgttcctccatcatcaagatgtgtcgtgactacccccagcttgtgctgcccaattttgacatgctttataaccatgtgaagcaactcctctccaatgagctactcctgacacaaatggagaagtgtgccctcatggaagccctggttctcattagcaaccaatttaagaactacgagcgtcagaaggtgttcctagaggagctgatggcaccagtggccagcatctggctttctcaagacatgcacagagtgctgtcagatgttgatgctttcattgcgtatgtgggtacagatcagaagagctgtgacccaggcctggaggatccgtgtggcttaaaccgtgcacgaatgagcttttgtgtatacagcattctgggtgtggtgaaacgaacttgctggcccactgacctagaagaggccaaagctgggggatttgtggtgggttatacatccagtggaaatccaatcttccgtaacccctgcacagagcagattctgaaacttcttgacaatttgcttgcgcttataagaacccacaatacattatatgcaccagaaatgctagccaaaatggcagagcctttcaccaaggctctggatatgcttgacgcggaaaaatctgctatattaggattacctcaacctctcttggaactcaatgactctcctgtcttcaaaaccgtcttggaaagaatgcagcgtttcttctctaccctctatgaaaactgttttcatatcctagggaaggcaggcccttccatgcagcaagacttctatactgtggaggaccttgctacccagcttctcagctcagcctttgtcaacttgaacaatattcctgactaccgactcagacccatgcttcgtgtctttgtaaagcctctggtgctcttctgtcccccagagcactatgaagccctggtatcccccatcctcggacctcttttcacctacctccatatgaggctttctcagaaatggcaagttatcaaccaaaggagcctgctgtgtggagaagatgaggctgcagatgaaaacccagagtctcaagagatgctggaggagcaactggtgaggatgttaacccgagaagtcatggacctaatcacggtttgctgtgtttcaaagaagggtgctgaccacagtagtgctcccccagcagatggagacgatgaagaaatgatggccacagaggtcaccccctcagctatggcagagcttacagacctgggcaaatgtctgatgaagcatgaggatgtttgtacagcgctattaattacagccttcaattccctggcctggaaagatactctgtcctgccagaggacaacctcacagctctgctggcctctcctcaaacaagtgctgtcagggacactgctcgcagatgcagttacgtggcttttcaccagtgtgctgaaaggcttacagatgcacgggcagcacgacgggtgcatggcttccctggtccatctggccttccagatatatgaggcactgcgccccaggtacctggagataagagctgtaatggagcaaatccctgaaatacagaaggactcactggaccagtttgactgcaagcttttaaacccctccctgcagaaagtggctgacaagcgccgaaaggaccaattcaaacgcctcattgctggttgcattgggaaacccttgggagagcagttccgaaaagaagttcacattaagaatcttccctcacttttcaaaaaaacaaagccaatgctggagacggaggtgctggacaatgatgggggtggcctggccaccatctttgaaccctgaatcaagcttttgggcatccttcctcggcctttcttgtcatctcttctttccctttgtagccgatctctaggcccttcttgcactgccacctcactttccaccactgtcagcctggaaagagatccaggtctggagctggagagaacaggccctgtgcaggaccagaagtaattatactaaagtatcaagaaagggagttagggcttaaactattctgtctagatgtcccagatagttcccattctacttggagatttggcttttccaagaaaagctagagcagagcagcccttctcccacaagccctcccacccccgtgcagccacatacctgtacagaatggtaactaagggtgctgtgcccaaccctgcgactagcaaggctcgcagcaagagcacagccctcaactacttgtgccagagtttctcttggaccactccaactcccactgagcccttttgctgctgggctggcaggaaactttccccactccctaaggggcatgtctgggttaggtgctaagtgctgaagagaacttggtcagttctctcaactttgctttgggcaagaatctggtcacctgatgggatccatggtacaggctactgctaaacttggcacagtatcaagtatagtacctccaaggaccagggctgggaagtctttagtgctaacatcccctttagagttcacacatcttgcccttccatgaatgacccctcagtctggcctccccagcctcaaggtccactcaggcacaagagccacagtaccctagatagtgtcacatgacaccgttgtcatccaaggataatacagaccaactaggctacatctgtgatgagcagctagcaaagccgctggtcttctcctaggactaagtccaggtgccttccacaatctcatggtctttcaggtccctggttacttttctcaaaggccatttccaaaagaatacatgccttcacatcacaacctgtactgtgagtccattctagaggtcactgaaaggccctgtaaagagaggacatggatacgggacctggccctgaggttattactggccgtaaggcagagttaatccatacagaaaccagtgtgtccatgtgctctgcacaaaaacagacctgttgtccatccagtccactgacaagagggtttccccgagagccgaagtggactgaagctacagtttttagctggtgcgggccacaggcagggtcagattgagaagaagcaaagctggggaagcagaagttgggagtcttgtgttgctccctcttcctgtgtggtgctctgggtttctgtggatcgtgaaggcgatctcaagagtgtttccctccaaacctgatagctgcctattcctgtctggttggggctgtggaggatgtagttgtatttattgcattgtaatatttttaacatcctgtgacttcatgctagaaattttctattgtttatagaaactttttgtagaaacattaactctaaagcacatctgcatgtcagtaaaaatctcagtttcgtacagaaaaaaaaaaaaaaaaaaaaaa

SEQ ID NO: 3814 - protein, 1204 aa, Homo sapien
MAMDQVNALCEQLVKAVTVMMDPNSTQRYRLEALKFCEEFKEKCPICVPCGLRLAEKTQVAIVRHFGLQILEHVVKFRWNGMSRLEKVYLKNSVMELIANGTLNILEEENHIKDALSRIVVEMIKREWPQHWPDMLIELDTLSKQGETQTELVMFILLRLAEDVVTFQTLPPQRRRDIQQTLTQNMERIFSFLLNTLQENVNKYQQVKTDTSQESKAQANCRVGVAALNTLAGYIDWVSMSHITAENCKLLEILCLLLNEQELQLGAAECLLIAVSRKGKLEDRKPLMVLFGDVAMHYILSAAQTADGGGLVEKHYVFLKRLCQVLCALGNQLCALLGADSDVETPSNFGKYLESFLAFTTHPSQFLRSSTQMTWGALFRHEILSRDPLLLAIIPKYLRASMTNLVKMGFPSKTDSPSCEYSRFDFDSDEDFNAFFNSSRAQQGEVMRLACRLDPKTSFQMAGEWLKYQLSTFLDAGSVNSCSAVGTGEGSLCSVFSPSFVQWEAMTLFLESVITQMFRTLNREEIPVNDGIELLQMVLNFDTKDPLILSCVLTNVSALFPFVTYRPEFLPQVFSKLFSSVTFETVEESKAPRTRAVRNVRRHACSSIIKMCRDYPQLVLPNFDMLYNHVKQLLSNELLLTQMEKCALMEALVLISNQFKNYERQKVFLEELMAPVASIWLSQDMHRVLSDVDAFIAYVGTDQKSCDPGLEDPCGLNRARMSFCVYSILGVVKRTCWPTDLEEAKAGGFVVGYTSSGNPIFRNPCTEQILKLLDNLLALIRTHNTLYAPEMLAKMAEPFTKALDMLDAEKSAILGLPQPLLELNDSPVFKTVLERMQRFFSTLYENCFHILGKAGPSMQQDFYTVEDLATQLLSSAFVNLNNIPDYRLRPMLRVFVKPLVLFCPPEHYEALVSPILGPLFTYLHMRLSQKWQVINQRSLLCGEDEAADENPESQEMLEEQLVRMLTREVMDLITVCCVSKKGADHSSAPPADGDDEEMMATEVTPSAMAELTDLGKCLMKHEDVCTALLITAFNSLAWKDTLSCQRTTSQLCWPLLKQVLSGTLLADAVTWLFTSVLKGLQMHGQHDGCMASLVHLAFQIYEALRPRYLEIRAVMEQIPEIQKDSLDQFDCKLLNPSLQKVADKRRKDQFKRLIAGCIGKPLGEQFRKEVHIKNLPSLFKKTKPMLETEVLDNDGGGLATIFEP

SEQ ID NO: 3815 - DNA, 5231 bp, Homo sapien; identical to SEQ ID NO: 3813

SEQ ID NO: 3816 - protein, 1204 aa, Homo sapien; identical to SEQ ID NO: 3814

SEQ ID NO: 3817 - DNA, 3301 bp, Homo sapien
gagagccctcctcaggggctgtctctgccttcccttcttcccatgtgtatctggggcagctgaggcagggctaggagaagagcccaggttcctcctgccacctccaagcgatgaagcagccctgggccaactccagcattctcgtgtgaactgcagaggagccctgcgcttccagctacttgcagccagacagcccacctgaggatattgaccataaggactcatatctcattacaagaagcatcatggccgagccagactacatagaagatgacaatcctgaactcattaggcctcagaaactgatcaatcctgtaaaaacctcccggaaccatcaagatcttcacagagaacttcttatgaatcaaaaaaggggtcttgctcctcagaacaaaccagaattgcagaaggtgatggaaaaaagaaaacgagaccaagtaataaagcagaaggaagaagaagcacagaagaagaaatctgacttggaaatagagctattaaaacggcagcagaagttggagcagcttgaacttgagaagcagaaattgcaagaagagcaagaaaatgcccccgagtttgtgaaggtgaaaggcaatctcaggagaacaggccaagaagtcgcccaagcccaggagtcctaggctgaggctgcaccaagacctcgtgtgtcaccccacagagctgtctgtgggtgccttctcaatctcagggcaaaagcccctggagaatatttcagccagcagagaattttgacttgcagtaggatttggtttgattttcctacgatctgggtggatgccttgcctgtgacagttgcagttcctattcgccaaatgaagggcagtgccccgcacgtaagttggaatgatggacctgtgttcagagacttaacagaaccaacaagcaaaacaagtgagaacaggaaaaaggaagaggacactggaatcaattcttgagagttgcactacttggtttttcttccattccaagtttcgtgggacccagagccttttttcttttaaaagctaaaaaacaagtgtttaattcctctttttgttatctgttagataattgagatcacctagaaatgcgtttaatctgttcactcactgtaaattttgaggacccagaattgtcttgtttaatttatactttcacccctgttgcagttaacaccagagaaggaacgtgaatgtcgagcacagccactacccttgttggcacttaatttagaaatagggtgagaagtttaaaagcccatcttgattttattttcattccttttggttctctgtgtaataatagcaggctacatagtgacattccagttccaagaaggtacatcctgtccattcattaattgctttgattactaggagggtttctgttcagttttgtttttaaatgtcttgctgatctagttctttcagatggaataaccttccagtcccttagagagtggaactagtccatataacccagcttcagtagcaaaagtagaagccgccacatcttttcatttctccaagaggagagtggggaaggttcccatgaccagctgggcagtcaggatttctctaggcattctaatgtgaaataagtgtagactgctgtcaaggaggcttcatcagaagatgtatagcatttgaatgtctaatgataatgcatatcattagaatccaagctttgaaaatttctgattaatgctcatgtatttctttatctttgtttttccttgtgaagaaagactttcaccactgtctgagtgatgatgctgttgataaggatgatgtcgatgactactatattgcatctctcaggaacagctgatgggaagggaggggctgctgagttcccttgttctagctagcagcacgctcctcagagagggggccgagttacagacagcagccgcattctcatgcaaaattagttttaaactgctagtgtgggcatcggtaccttttgcctgggtgataccgaagaattgttgaggatttagtatgctccgtagagacagttcagccagtcatttctgcattggagagacttctcatactttctttgaagactcatagaaagctggatctagagcttttgaatccttaattagcacagtagaaattagctttctatgggaatgctttagtgttagcagttgacaattaggcccatattcaatctgaatgggaacaaaagtaaatgcaatgataatatactgctagttagagaaacatgttagttgattatacctgaaatggattatttatctcatcagcaagtattatttgaataaaatgagaaatgcttaagaaaaattgttgctctacagtaatttggtttcgaagaatggaatggtaactattttttcccatcgttcttttgagagaaggaagtgtgatgactgatgatcttgaaaagcccatttctgattgcacgttgactggaattctttctttgtgtctgtggactagcgatgctgtttgtaaaatgaagattcgggactggctcatatctttttatctaactagatgtcagatcttgaaatctgtattctcgaagcaattctgccacttgatcgtattcacaggggccctggtaggctcctttagaaggaccatttctgttcctagagcttaactagaattcattcttcactgaaaaaaaaaaaagttacttaagaaagcatttctttcctaatctcactcaaatctgcagaattatttgtaattagtaatacaaaatctggccaaaaggagacttgtaaatagcgtaaagtggtgtcttatgctaaacggtggaatgtataggcagagaagctctttgaagttgtcagatgagctgggctcacaagcctgattcaaacaggctgtcggtctcctctcaccccttaatactgtgcagcccaaactcctaggactcttgaacatctgagcagttttgtgctttgagccactttttgacaaaaatggctccatttttccacagcgtggttttcttaaaatagtttaatgttttatagtctcatagtagtagtgttgctttctaagctataacagtcgactttattcttctactctgaaaaatcttgacttgtttgagtgtatataatatatataaagggagccttaatggattggttttcataatttaatattttttgtatttgctcttgtataattgtttttaacggaaagtattaaagaattgagggtggaattcttagaaccaaagttattcttaataaaaatcaccacatgcttggaccatgcaaaaaaaaaaaaaaaaaaaaaaaaaaaaa

SEQ ID NO: 3818 - protein, 131 aa, Homo sapien
MAEPDYIEDDNPELIRPQKLINPVKTSRNHQDLHRELLMNQKRGLAPQNKPELQKVMEKRKRDQVIKQKEEEAQKKKSDLEIELLKRQQKLEQLELEKQKLQEEQENAPEFVKVKGNLRRTGQEVAQAQES

SEQ ID NO: 3819 - DNA, 2091 bp, Homo sapien
ggcacgagggccaggaacgccagccgttcacgcgttcggtcctccttggctgactcaccgccctcgccgccgcaccatggacgcccccaggcaggtggtcaactttgggcctggtcccgccaagctgccgcactcagtgttgttagagatacaaaaggaattattagactacaaaggagttggcattagtgttcttgaaatgagtcacaggtcatcagattttgccaagattattaacaatacagagaatcttgtgcgggaattgctagctgttccagacaactataaggtgatttttctgcaaggaggtgggtgcggccagttcagtgctgtccccttaaacctcattggcttgaaagcaggaaggtgtgcggactatgtggtgacaggagcttggtcagctaaggccgcagaagaagccaagaagtttgggactataaatatcgttcaccctaaacttgggagttatacaaaaattccagatccaagcacctggaacctcaacccagatgcctcctacgtgtattattgcgcaaatgagacggtgcatggtgtggagtttgactttatacccgatgtcaagggagcagtactggtttgtgacatgtcctcaaacttcctgtccaagccagtggatgtttccaagtttggtgtgatttttgctggtgcccagaagaatgttggctctgctggggtcaccgtggtgattgtccgtgatgacctgctggggtttgccctccgagagtgcccctcggtcctggaatacaaggtgcaggctggaaacagctccttgtacaacacgcctccatgtttcagcatctacgtcatgggcttggttctggagtggattaaaaacaatggaggtgccgcggccatggagaagcttagctccatcaaatctcaaacaatttatgagattattgataattctcaaggattctacgtgtctgtgggaggcatccgggcctctctgtataatgctgtcacaattgaagacgttcagaagctggccgccttcatgaaaaaatttttggagatgcatcagctatgaacacatcctaaccaggatatactctgttcttgaacaacatacaaagtttaaagtaacttggggatggctacaaaaagttaacacagtatttttctcaaatgaacatgtttattgcagattcttcttttttgaaagaacaacagcaaaacatccacaactctgtaaagctggtgggacctaatgtcaccttaattctgacttgaactggaagcattttaagaaatcttgttgcttttctaacaaattcccgcgtattttgcctttgctgctactttttctagttagatttcaaacttgcctgtggacttaataatgcaagttgcgattaattatttctggagtcatgggaacacacagcacagagggtaggggggccctctaggtgctgaatctacacatctgtggggtctcctgggttcagcggctgttgattcaaggtcaacattgaccattggaggagtggtttaagagtgccaggcgaagggcaaactgtagatcgatctttatgctgttattacaggagaagtgacatactttatatatgtttatattagcaaggtctgtttttaataccatatactttatatttctatacatttatatttctaataatacagttatcactgatatatgtagacacttttagaatttattaaatccttgaccttgtgcattatagcattccattagcaagagttgtaccccctccccagtcttcgccttcctctttttaagctgttttatgaaaaagacctagaagttcttgattcatttttaccattctttccataggtagaagagaaagttgattggttggttgtttttcaattatgccattaaactaaacatttctgttaaattaccctatcctttgttctctactgttttctttgtaatgtatgactacgagagtgatactttgctgaaaagtctttcccctattgtttatctattgtcagtattttatgttgaatatgtaaagaacattaaagtcctaaaacatctaaaaaaaaaaaaaaaaaaaaaaaaaaaaaaaaaaa

SEQ ID NO: 3820 - protein, 324 aa, Homo sapien
MDAPRQVVNFGPGPAKLPHSVLLEIQKELLDYKGVGISVLEMSHRSSDFAKIINNTENLVRELLAVPDNYKVIFLQGGGCGQFSAVPLNLIGLKAGRCADYVVTGAWSAKAAEEAKKFGTINIVHPKLGSYTKIPDPSTWNLNPDASYVYYCANETVHGVEFDFIPDVKGAVLVCDMSSNFLSKPVDVSKFGVIFAGAQKNVGSAGVTVVIVRDDLLGFALRECPSVLEYKVQAGNSSLYNTPPCFSIYVMGLVLEWIKNNGGAAAMEKLSSIKSQTIYEIIDNSQGFYVSVGGIRASLYNAVTIEDVQKLAAFMKKFLEMHQL

SEQ ID NO: 3821 - DNA, 1591 bp, Homo sapien
agcctggggcggccggccaggaaccacccgttaaggtgtcttctctttagggatggtgaggttggaaaaaggctcctgtaaccctcctccaggatgaaccacctgccagaagacatggagaacgctctcaccgggagccagagctcccatgcttctctgcgcaatatccattccatcaaccccacacaactcatggccaggattgagtcctatgaaggaagggaaaagaaaggcatatctgatgtcaggaggactttctgtttgtttgtcacctttgacctcttattcgtaacattactgtggataatagagttaaatgtgaatggaggcattgagaacacattagagaaggaggtgatgcagtatgactactattcttcatattttgatatatttcttctggcagtttttcgatttaaagtgttaatacttgcatatgctgtgtgcagactgcgccattggtgggcaatagcgttgacaacggcagtgaccagtgcctttttactagcaaaagtgatcctttcgaagcttttctctcaaggggcttttggctatgtgctgcccatcatttcattcatccttgcctggattgagacgtggttcctggatttcaaagtgttacctcaagaagcagaagaagaaaacagactcctgatagttcaggatgcttcagagagggcagcacttatacctggtggtctttctgatggtcagttttattcccctcctgaatccgaagcaggatctgaagaagctgaagaaaaacaggacagtgagaaaccacttttagaactatgagtactacttttgttaaatgtgaaaaaccctcacagaaagtcatcgaggcaaaaagaggcaggcagtggagtctccctgtcgacagtaaagttgaaatggtgacgtccactgctggctttattgaacagctaataaagatttatttattgtaatacctcacagacgttgcaccatatccatgcacatttagttgcctgcctgtggctggtaaggtaatgtcatgattcatcctctcttcagtgagactgagcctgatgtgttaacaaataggtgaagaaagtcttgtgctgtattcctaatcaaaagacttaatatattgaagtaacacttttttagtaagcaagatacctttttatttcaattcacagaatggaatttttttgtttcatgtctcagatttattttgtatttcttttttaacactctacatttcccttgttttttaactcatgcacatgtgctctttgtacagttttaaaaagtgtaataaaatctgacatgtcaatgtggctagttttatttttcttgttttgcattatgtgtatggcctgaagtgttggacttgcaaaaggggaagaaaggaattgcgaatacatgtaaaatgtcaccagacatttgtattatttttatcatgaaatcatgtttttctctgattgttctgaaatgttctaaatactcttattttgaatgcacaaaatgacttaaaccattcatatcatgtttcctttgcgttcagccaatttcaattaaaatgaactaaattaaaaaaaaaaaaaaaaaaaaaaaaaaaaaa

SEQ ID NO: 3822 - protein, 234 aa, Homo sapien
MNHLPEDMENALTGSQSSHASLRNIHSINPTQLMARIESYEGREKKGISDVRRTFCLFVTFDLLFVTLLWIIELNVNGGIENTLEKEVMQYDYYSSYFDIFLLAVFRFKVLILAYAVCRLRHWWAIALTTAVTSAFLLAKVILSKLFSQGAFGYVLPIISFILAWIETWFLDFKVLPQEAEEENRLLIVQDASERAALIPGGLSDGQFYSPPESEAGSEEAEEKQDSEKPLLEL

SEQ ID NO: 3823 - DNA, 5539 bp, Homo sapien
ggagggaggccgggcaggcggctgagcggcgcggctctcaacgtgacggggaagtggttcgggcggccgcggcttactaccccagggcgaacggacggacgacggaggcgggagccggtagccgagccgggcgacctagagaacgagcgggtcaggctcagcgtcggccactctgtcggtccgctgaatgaagtgcccgcccctctaagcccggagcccggcgctttccccgcaagatggacggtttcgccggcagtctcgatgatagtatttctgctgcaagtacttctgatgttcaagatcgcctgtcagctcttgagtcacgagttcagcaacaagaagatgaaatcactgtgctaaaggcggctttggctgatgttttgaggcgtcttgcaatctctgaagatcatgtggcctcagtgaaaaaatcagtctcaagtaaaggccaaccaagccctcgagcagttattcccatgtcctgtataaccaatggaagtggtgcaaacagaaaaccaagtcataccagtgctgtctcaattgcaggaaaagaaactctttcatctgctgctaaaagtggtacagaaaaaaagaaagaaaaaccacaaggacagagagaaaaaaaagaggaatctcattctaatgatcaaagtccacaaattcgagcatcaccttctccccagccctcttcacaacctctccaaatacacagacaaactccagaaagcaagaatgctactcccaccaaaagcataaaacgaccatcaccagctgaaaagtcacataattcttgggaaaattcagatgatagccgtaataaattgtcgaaaataccttcaacacccaaattaataccaaaagttaccaaaactgcagacaagcataaagatgtcatcatcaaccaagaaggagaatatattaaaatgtttatgcgcggtcggccaattaccatgttcattccttccgatgttgacaactatgatgacatcagaacggaactgcctcctgagaagctcaaactggagtgggcatatggttatcgaggaaaggactgtagagctaatgtttaccttcttccgaccggggaaatagtttatttcattgcatcagtagtagtactatttaattatgaggagagaactcagcgacactacctgggccatacagactgtgtgaaatgccttgctatacatcctgacaaaattaggattgcaactggacagatagctggcgtggataaagatggaaggcctctacaaccccacgtcagagtgtgggattctgttactctatccacactgcagattattggacttggcacttttgagcgtggagtaggatgcctggatttttcaaaagcagattcaggtgttcatttatgtgttattgatgactccaatgagcatatgcttactgtatgggactggcagaagaaagcaaaaggagcagaaataaagacaacaaatgaagttgttttggctgtggagtttcacccaacagatgcaaataccataattacatgcggtaaatctcatattttcttctggacctggagcggcaattcactaacaagaaaacagggaatttttgggaaatatgaaaagccaaaatttgtgcagtgtttagcattcttggggaatggagatgttcttactggagactcaggtggagtcatgcttatatggagcaaaactactgtagagcccacacctgggaaaggacctaaaggtgtatatcaaatcagcaaacaaatcaaagctcatgatggcagtgtgttcacactttgtcagatgagaaatgggatgttattaactggaggagggaaagacagaaaaataattctgtgggatcatgatctgaatcctgaaagagaaatagaggttcctgatcagtatggcacaatcagagctgtagcagaaggaaaggcagatcaatttttagtaggcacatcacgaaactttattttacgaggaacatttaatgatggcttccaaatagaagtacagggtcatacagatgagctttggggtcttgccacacatcccttcaaagatttgctcttgacatgtgctcaggacaggcaggtgtgcctgtggaactcaatggaacacaggctggaatggaccaggctggtagatgaaccaggacactgtgcagattttcatccaagtggcacagtggtggccataggaacgcactcaggcaggtggtttgttctggatgcagaaaccagagatctagtttctatccacacagacgggaatgaacagctctctgtgatgcgctactcaatagatggtaccttcctggctgtaggatctcatgacaactttatttacctctatgtagtctctgaaaatggaagaaaatatagcagatatggaaggtgcactggacattccagctacatcacacaccttgactggtccccagacaacaagtatataatgtctaactcgggagactatgaaatattgtactgggacattccaaatggctgcaaactaatcaggaatcgatcggattgtaaggacattgattggacgacatatacctgtgtgctaggatttcaagtatttggtgtctggccagaaggatctgatgggacagatatcaatgcactggtgcgatcccacaatagaaaggtgatagctgttgccgatgacttttgtaaagtccatctgtttcagtatccctgctccaaagcaaaggctcccagtcacaagtacagtgcccacagcagccatgtcaccaatgtcagttttactcacaatgacagtcacctgatatcaactggtggaaaagacatgagcatcattcagtggaaacttgtggaaaagttatctttgcctcagaatgagactgtagcggatactactctaaccaaagcccccgtctcttccactgaaagtgtcatccaatctaatactcccacaccgcctccttctcagcccttaaatgagacagctgaagaggaaagtagaataagcagttctcccacacttctggagaacagcctggaacaaactgtggagccaagtgaagaccacagcgaggaggagagtgaagagggcagcggagaccttggtgagcctctttatgaagagccatgcaacgagataagcaaggagcaggccaaagccacccttctggaggaccagcaagacccttcgccctcgtcctaacaccctggcttcagtgcaactcttttccttcagctgcatgtgattttgtgataaagttcaggtaacaggatgggcagtgatggagaatcactgttgattgagattttggtttccatgtgatttgttttcttcaatagtcttattttcagtctctcaaatacagccaacttaaagttttagtttggtgtttattgaaaattaaccaaacttaatactaggagaagactgaatcattaatgatgtctcacaaattactgtgtacctaagtggtgtgatgtaaatactggaaacaaaaacagcagttgcattgattttgaaaacaaacccccttgttatctgaacatgttttcttcaggaacaaccagaggtatcacaaacactgttactcatctactggctcagactgtactacttttttttttttttttcctgaaaaagaaaccagaaaaaaatgtactcttactgagataccctctcaccccaaatgtgtaatggaaaatttttaattaagaaaaacttcagttttgccaagtgcaatggtgttgccttctttaaaaaatgccgttttcttacactaccagtggatgtccagacatgctcttagtctactagagaggtgctgccttttctaagtcataatgaggaacagtcccttaatttcttgtgtgcaactctgttttatcctagaactaagagagcattggtttgttaaagagctttcaatgtatattaaaaccttcaatactcagaaatgatggattcctccaaggagtcctttactagcctaaacattctcaaatgtttgagattcaagtgaatggaaggaaaaccacatgcctttaaaactaaactgtaataattacctggctaatttcagctaagccttcatcataatttgttccctcagtaataggagaaatataaatacagtaagtttagattattgaattggtgcttgaaatttattggttttgttgtaattttatacagattatatgagggataagatactcatcaaattgcaaattcttttttttacagaagtgtgggtaacagtcacagcagttttttttaccaacagcatacttaacagacttgctgtgtagcagtttttttctggtggagttgctgtaagtcttgtaagtctaatgtggctatcctactcttttgggcaatgcatgtattatgcattggaaaggtattttttttaagttctgttggctagctatggttttcagtacatttcctactttaagagtaattactgacaaatatgtatttcctatatgtttatactttgattataaaaaagtattttgttttgattttttaacttgctgcattgttttgatactttctatttttttggtcaaatcatgtttagaaactttggatgagttaagaagtcttaagtatgcaggcgtttacgtgattgtgccattccaaagtgcatcagaactgtcattcccttctaatatcttctcaggagtaatacaaatcaggtatttcatcatcatttggtaatatgaaaactccagtgaactcccaaggacatttacaacatttatattcacacgctgtatggaagggtgtgggtgtgtgtgaaggggcgagtggagacactgtgtgtatctctagataagaagatatgcaccacgttgaaaatactcagtgtagatctctatgtgtataggtatctgtatatctttccttttgtttacaactgttaaaaaacctcaaaatagttctcttcaaaagaagagagattccaagcaacccatctttcttcagtatgtatgttctgtacatacttatcggagcgcgccagtaagtatcaggcatatatatctgtctgttagcaatgattattacatcatcagatcagcatgtgctatactccctgcaagaaatatactgacatgaacaggcagttcttggagaagaaagagcatttctttaagtacctggggaatacagctctcagtgatcagcagggagtttatttgaggacatcagtcacctttggggttgccatgtacaatgagatttataatcatgatactcttcggtggtagtttcaaaagacactactaatacgcaggaagcgttccagctatttaatgctggcaactactgtttaatggtcagttaaatctgtgataatggttggaagtgggtggggttatgaaattgtagatgtttttagaaaaacttgtgaatgaaaatgaatccaagtgtttcatgtgaagatgttgagccattgctatcatgcattcctgtctcatggcagaaaattttgaagattaaaaaataaaataatcaaaatgtttcctctttctaaaaaaaaaaaaaaaaaa

SEQ ID NO: 3824 - protein, 981 aa, Homo sapien
MDGFAGSLDDSISAASTSDVQDRLSALESRVQQQEDEITVLKAALADVLRRLAISEDHVASVKKSVSSKGQPSPRAVIPMSCITNGSGANRKPSHTSAVSIAGKETLSSAAKSGTEKKKEKPQGQREKKEESHSNDQSPQIRASPSPQPSSQPLQIHRQTPESKNATPTKSIKRPSPAEKSHNSWENSDDSRNKLSKIPSTPKLIPKVTKTADKHKDVIINQEGEYIKMFMRGRPITMFIPSDVDNYDDIRTELPPEKLKLEWAYGYRGKDCRANVYLLPTGEIVYFIASVVVLFNYEERTQRHYLGHTDCVKCLAIHPDKIRIATGQIAGVDKDGRPLQPHVRVWDSVTLSTLQIIGLGTFERGVGCLDFSKADSGVHLCVIDDSNEHMLTVWDWQKKAKGAEIKTTNEVVLAVEFHPTDANTIITCGKSHIFFWTWSGNSLTRKQGIFGKYEKPKFVQCLAFLGNGDVLTGDSGGVMLIWSKTTVEPTPGKGPKGVYQISKQIKAHDGSVFTLCQMRNGMLLTGGGKDRKIILWDHDLNPEREIEVPDQYGTIRAVAEGKADQFLVGTSRNFILRGTFNDGFQIEVQGHTDELWGLATHPFKDLLLTCAQDRQVCLWNSMEHRLEWTRLVDEPGHCADFHPSGTVVAIGTHSGRWFVLDAETRDLVSIHTDGNEQLSVMRYSIDGTFLAVGSHDNFIYLYVVSENGRKYSRYGRCTGHSSYITHLDWSPDNKYIMSNSGDYEILYWDIPNGCKLIRNRSDCKDIDWTTYTCVLGFQVFGVWPEGSDGTDINALVRSHNRKVIAVADDFCKVHLFQYPCSKAKAPSHKYSAHSSHVTNVSFTHNDSHLISTGGKDMSIIQWKLVEKLSLPQNETVADTTLTKAPVSSTESVIQSNTPTPPPSQPLNETAEEESRISSSPTLLENSLEQTVEPSEDHSEEESEEGSGDLGEPLYEEPCNEISKEQAKATLLEDQQDPSPSS

SEQ ID NO: 3825 - DNA, 5539 bp, Homo sapien; identical to SEQ ID NO: 3823

SEQ ID NO: 3826 - protein, 981 aa, Homo sapien; identical to SEQ ID NO: 3824

SEQ ID NO: 3827 - DNA, 1183 bp, Homo sapien
gttctgcccggatggaagctccggccgcggagtgatggtggcctcagcgaagatgggccgggcagggaccatggcggtggcagcagaggtggcaggggcggggcggctggcggtagaggaggctgtggtcctcagggggctgtaggtggaggtatggctcgggccagcagcgggaacggcagcgaggaggcctggggggcacttcgggcgccgcaacagcagcttcgagagctgtgcccaggagtgaacaaccagccctacctctgtgagagtggtcactgctgcggggagactggctgctgcacctactactatgagctctggtggttctggctgctctggactgtcctcatcctctttagctgctgttgcgccttccgccaccgacgagctaaactcaggctgcaacaacagcagcggcagcgtgaaatcaacttgttggcctatcatggggcatgccatggggctggtcctttccctaccggttcactgcttgaccttcgcttcctcagcaccttcaagcccccagcctacgaggatgtggttcaccgcccaggcacaccaccccccccttatactgtggccccaggccgccccttgactgcttccagtgaacaaacctgctgttcctcctcatccagctgccctgcccactttgaaggaacaaatgtggaaggtgtttcctcccaccagagtgccccccctcatcaggagggtgagcccggggcaggggtgacccctgcctccacacccccctcctgccgctatcgccgtttaactggcgactccggtattgagctctgcccttgtcctgcctccggtgagggtgagccagtcaaggaggtgagggttagtgccaccctgccagatctggaggactactccccgtgtgcactacccccagagtctgtaccgcagatctttcccatggggctgtcttccagtgaaggggacatcccataagtagttttgagagggtggatgggttacttgcccaccagaaacagccctagtcccaactccttgcgttcctttggcccctccctgcctacctagaatctgcctgaaagggctggagaggggcagtattgggggactgtgctagctttacccccgcaggacatacacaggagcctttgatctcattaaagagatgtgaaccagcaaaaaaaaaaaaaaaaaa

SEQ ID NO: 3828 - protein, 269 aa, Homo sapien
MARASSGNGSEEAWGALRAPQQQLRELCPGVNNQPYLCESGHCCGETGCCTYYYELWWFWLLWTVLILFSCCCAFRHRRAKLRLQQQQRQREINLLAYHGACHGAGPFPTGSLLDLRFLSTFKPPAYEDVVHRPGTPPPPYTVAPGRPLTASSEQTCCSSSSSCPAHFEGTNVEGVSSHQSAPPHQEGEPGAGVTPASTPPSCRYRRLTGDSGIELCPCPASGEGEPVKEVRVSATLPDLEDYSPCALPPESVPQIFPMGLSSSEGDIP

SEQ ID NO: 3829 - DNA, 2427 bp, Homo sapien
gggatttgttattgcgaatgatgtggacaacaagcgctgctacctgctcgtccatcaagccaagaggctgagcagcccctgcatcatggtggtcaaccatgatgcctccagcatacccaggctccagatagatgtggacggcaggaaagagatcctcttctatgatcgaattttatgtgatgtcccttgcagtggagacggcactatgagaaaaaacattgatgtttggaaaaagtggaccaccttaaatagcttgcagctacatggcttacagctgcggattgcaacacgcggggctgaacagctggctgaaggtggaagggtggtgtattccacgtgttcactaaaccctattgaggatgaagcagtcatagcatctttactggaaaaaagtgaaggtgctttggagcttgctgatgtgtctaatgaactgccagggctgaagtggatgcctggaatcacacagtggaaggtaatgacgaaagatgggcagtggtttacagactgggacgctgttcctcacagcagacacacccagatccgacctaccatgttccctccgaaggacccagaaaagctgcaggccatgcacctggagcgatgccttaggatattaccccatcatcagaatactggagggttttttgtggcagtattggtgaaaaaatcttcaatgccgtggaataaacgtcagccaaagcttcagggtaaatctgcagagaccagagaaagcacacagctgagccctgcagatctcacagaagggaaacccacagatccctctaagctggaaagtccgtcattcacaggaactggtgacacagaaatagctcatgcaactgaggatttagagaataatggcagtaagaaagatggcgtgtgtggtcctcctccatcaaagaaaatgaagttatttggatttaaagaagatccatttgtatttattcctgaagatgacccattatttccacctattgagaaattttatgctttggatccttcattcccaaggatgaatttgttaactcggactacagaagggaagaaaaggcagctctacatggtttctaaggagttgcggaatgtgctgctgaataacagtgagaagatgaaggttattaacacggggatcaaagtctggtgtagaaataacagcggtgaagagtttgactgtgctttccggctggcacaggagggaatatatacattgtatccatttattaactcaagaattattactgtatcaatggaagatgttaagatactgttgacccaggaaaatcccttttttagaaaactcagcagtgagacctacagtcaagcaaaggacctggcaaagggaagcatcgtgctgaagtatgaaccagattctgcgaatccagacgctctacagtgtcccatcgtcttatgcggatggcggggaaaggcctccattcgaacttttgtgcccaagaatgaacggcttcactatctcaggatgatggggctggaggtattgggagaaaagaagaaggaaggggttatcctcacaaatgagagtgcagccagcaccggacagccagacaatgacgtgactgagggacagagagcaggagagcccaacagcccagatgcagaagaggccaacagtccagacgtgacagcaggctgtgacccggcgggggtccatccaccccggtgagcaggcccaaggcagcgggggcccacacccctcacacgcaaaactggcttcttctggtcactggtgtctgaaaccaaatccagagcagcctgtggcctgtaaagcatatatttctagtgactgcagactggtgggatcataggagccttctgaatgaccaggactgctttctttggagctgatgaaaatgtactcttttagcgtgttagaaatcacttgttttattttgttttctttggccaagctgggtctagtgtttcttttgctgggaatagactttcaaaagttgtacttctatcaagaaacaaaactgcccttgcagaaatttcaggtcttttgttaagcctgtattggtcttaaggtgcagtattttttaaattattatttatagaaagaatctataaattcttggggaagtgtgttataagctttaataattacattgagctgcacctcagtggtgtgtcattaacatgcagtggggttaatatctgaggcctcagatgactttgtgccttttggaataaagggtaaaataaactctcccagagtaagagctgtatcgtgaattgtcatactaattattgagggggacttatgtgcttttattgaatggagtgctttacaatttttatttttaaatggggttgggatccttggaatatttcaataaaattgataaaatataaaaaaaaaaaaaaaaaaaaaaaaaaaaaaaaaaaaaaaaaaaaaaaaaaaaaaaaaaa

SEQ ID NO: 3830 - protein, 531 aa, Homo sapien
MVVNHDASSIPRLQIDVDGRKEILFYDRILCDVPCSGDGTMRKNIDVWKKWTTLNSLQLHGLQLRIATRGAEQLAEGGRVVYSTCSLNPIEDEAVIASLLEKSEGALELADVSNELPGLKWMPGITQWKVMTKDGQWFTDWDAVPHSRHTQIRPTMFPPKDPEKLQAMHLERCLRILPHHQNTGGFFVAVLVKKSSMPWNKRQPKLQGKSAETRESTQLSPADLTEGKPTDPSKLESPSFTGTGDTEIAHATEDLENNGSKKDGVCGPPPSKKMKLFGFKEDPFVFIPEDDPLFPPIEKFYALDPSFPRMNLLTRTTEGKKRQLYMVSKELRNVLLNNSEKMKVINTGIKVWCRNNSGEEFDCAFRLAQEGIYTLYPFINSRIITVSMEDVKILLTQENPFFRKLSSETYSQAKDLAKGSIVLKYEPDSANPDALQCPIVLCGWRGKASIRTFVPKNERLHYLRMMGLEVLGEKKKEGVILTNESAASTGQPDNDVTEGQRAGEPNSPDAEEANSPDVTAGCDPAGVHPPR

SEQ ID NO: 3831 - DNA, 4438 bp, Homo sapien
  Unsure 312, 3415, 3451, 3671, 3880: Unknown base
gcggccgctgaattctagggcggagcgaagagaaccggtcgcggcaatcctagcgcgcagcagcagcagcagcagcagcacccgcatccgctgcgggagtccgagccggaaccacacccaagtagctgccctttcctcttctgtcatctcaccgccccaccacagaccgcgttccccgaggaaaccggccgcccacgcccggagcatcctcccctgttgagcgggcgctgacggacccggcggcatgatgcggctgcgaggctcggggatgctgcgggacctgctcctgcggtcgcccgccggcgtgagcgngactctgcggcgggcacagcccttggtcaccctgtgccggcgtccccgaggcgggggacggccggccgcgggcccggctgccgccgcgcgactccacccgtggtggggcgggggcggctggccggcggagcccctcgcgcggggcctgtccagctctccttcggagatcttgcaggagctgggcaaggggagcacgcatccccagcccggggtgtcgccacccgctgccccggcggcgcccggccccaaggacggccccggggagacggacgcgtttggcaacagcgagggcaaagagctggtggcctcaggtgaaaacaaaataaaacagggtctgttacctagcttggaagatttgctgttctatacaattgctgaaggacaagagaaaatacctgttcataaatttattacagcactcaaatctacaggattgcgaacgtctgatcccaggttgaaagagtgtatggatatgttaagattaactcttcaaacaacatcagatggtgtcatgctagacaaagatctttttaaaaaatgtgttcagagcaacattgttttgttgacacaagcatttagaagaaagtttgtgattcctgactttatgtcttttacctcacacattgatgagttatatgaaagtgctaaaaagcagtctggaggaaaggttgcagattatattcctcaactggccaaattcagtcccgatttgtggggtgtgtctgtttgtacagcagatggacagaggcattctactggagataccaaagttcccttctgtcttcagtcctgtgtaaaacctttgaaatatgccattgctgttaatgatcttggaactgaatatgtgcatcgatatgttggaaaagagccgagtggactaagattcaacaaactatttttgaatgaagatgataaaccacataatcctatggtaaatgctggagcaattgttgtgacttcactaataaagcaaggagtaaataatgctgaaaaatttgactatgtcatgcagtttttgaataagatggctggtaatgaatatgttggattcagtaatgcaacgtttcagtctgaaagagaaagtggagatcgaaattttgcaataggatattacttaaaagaaaagaagtgttttccagaaggcacagacatggttggtatattagacttctacttccagctgtgctccattgaagtgacttgtgaatcagccagtgtgatggctgcgacactggctaatggtggtttctgcccaattactggtgaaagagtactgagccctgaagcagttcgaaatacattgagtttgatgcattcctgtggcatgtatgacttctcagggcagtttgctttccatgttggtcttcctgcaaaatctggagttgctgggggcattcttttagttgtccccaatgttatgggtatgatgtgctggtctcctcctctggataagatgggcaacagtgttaagggaattcacttttgtcacgatcttgtttctctgtgtaatttccataactatgataatttgagacactttgcaaaaaaacttgatcctcgaagagaaggtggtgatcaaaggcattcctttggaccattggactatgaaagtctccaacaagaacttgctttaaaagagacagtatggaaaaaagtgtcacctgagtcaaatgaggacatctctacaactgtagtatatagaatggaaagtctgggagagaaaagctaaagaaatgggttctagtttcagaatgtttcttcatttaatctttcaaacatctttagcttttttttgcaagttataaatatttatttgaggtattttttgttctcaatcttgggtgctggagccataaagcttttttttccttttaatctttgtataaaggcagtagattaagaagtgcatttgttggtctttaaaaagtatttacaagtacataaatttgctttatttttaaaaatacaaaaaggaaaaatttaaattttttttgatgtaattaaaatgttaactatgtggtcagataatcccattttacaatagtaacagaaaattgtaattcttagttctaaaattcacaaattaaactcataagctttgttgcattttgttttttcttttccatttttaaaactaatgtgatgtctttagtggcaatagaaggtacttctatgctaaatacaaaactaaaaaggcaaaataatgaaccccaaattattttatttaaaatagcagtggattataaaattagcttgtgtttacatttatgccatttttggtgatagattggctttacattttaaaaaatttatttaaaaatttatcaaatgctttaaaatatgactcctactttttttattttgcaactcctctgttctgtcagagttgttatatacaggagtgtcttatgttactaaaacattccagccaaagaatttcagatgtgagataatgatgtttcatcaataaaaagctataatggttagttactcagaaggagaaacagtgagtgtcttcaagtgaattgttcacctaaacaattttattttcatattatccacataactttttctatgttatatttaaatatgaatggcaaattttggtttttagcttttacattttattatcttaattttataaatgctaatatttcttttgtgataagttatagcatctcataaagtttgttctatttgaagttttttagagtacttgagaaatgaatttagtctgcaggtagtaagtatgctactaaaatacgttagatctaaatccttttatttggtataaaaatgcaatattgagaatcaaaacttgtttttaagagaactatagattctacacaacctgatttcaagtaattattcatagtatttatagttgtcttggcaaagtgattgtaaaattctgtaggacctattcacacttcttccttcttccatatacttctctggttttccccatagttcccctataatttcaagtttgttgaaacctgttaattttagtgggggattagaagaaaaacttggtggtttcttagcatgatggtgtatgtatgtggtaatggaaagtctgtaaaagtaaatatagtgtagnaaaaaagatttcactgagtattttagatactagtgnaaataaagatagaaaatcttgatcataatgtcttaagtttgggaactgtgatattaagaaaagaaattcccttctagaggtgctggccaaaaagccttttgggctaacttaagtattaaatttatatatttaaataattatattttaagttgtagaggattttcccaaggattttatgcttacttgaatgttctttgaatgttcagatgcatatcctaanctggatgcttctcaaggccttactgcatatttgtgttgcatatttatgttagttgcaccagggccatttgtagtttgggcaaccgaatgccttaattggaaaaaaggcattgtggtttcccctattatctaaattgttacattttaccatttcattccgaagttggttttactttattaaatgaagatttagttttcatatcgtatacntagctgtatagatttcaaaattaggttgttaatttgtgtcacttactatttttgtgttggtaatgctttaaatgcatacttaaaaatgaagtactgttatctaagctactgtgtttagaaaatgttaagaatgagcagaaatttttatagaaaagataaacggaagaagagataagatactgcgaataggccctcaaacttaaaaaagaaaaaactttgccagttttaaggacatattttgattctttcagtatcttaacacctttttaaacaaagttcttgatagtaccactattattgggtttgttttatgccattattgattcttgatattcaagcatttacaatgtagcatatttgattttcttttttctttctttttttggcatgtttttagcataaatgttgcattttatcttagtgtttggatgaaaacatttgtgttgtttagctttcatttgctttgtatatttaataatgtacctttattttccagtatgcctacattttgtattgcacaataaatttattttaagctgaaaaaaaaaaaaaaaaaaa

SEQ ID NO: 3832 - protein, 598 aa, Homo sapien
  unsure 23: unknown amino acid
  Unsure 312, 3415, 3451, 3671, 3880: Unknown amino acid
MMRLRGSGMLRDLLLRSPAGVSXTLRRAQPLVTLCRRPRGGGRPAAGPAAAARLHPWWGGGGWPAEPLARGLSSSPSEILQELGKGSTHPQPGVSPPAAPAAPGPKDGPGETDAFGNSEGKELVASGENKIKQGLLPSLEDLLFYTIAEGQEKIPVHKFITALKSTGLRTSDPRLKECMDMLRLTLQTTSDGVMLDKDLFKKCVQSNIVLLTQAFRRKFVIPDFMSFTSHIDELYESAKKQSGGKVADYIPQLAKFSPDLWGVSVCTADGQRHSTGDTKVPFCLQSCVKPLKYAIAVNDLGTEYVHRYVGKEPSGLRFNKLFLNEDDKPHNPMVNAGAIVVTSLIKQGVNNAEKFDYVMQFLNKMAGNEYVGFSNATFQSERESGDRNFAIGYYLKEKKCFPEGTDMVGILDFYFQLCSIEVTCESASVMAATLANGGFCPITGERVLSPEAVRNTLSLMHSCGMYDFSGQFAFHVGLPAKSGVAGGILLVVPNVMGMMCWSPPLDKMGNSVKGIHFCHDLVSLCNFHNYDNLRHFAKKLDPRREGGDQRHSFGPLDYESLQQELALKETVWKKVSPESNEDISTTVVYRMESLGEKS

SEQ ID NO: 3833 - DNA, 1129 bp, Homo sapien
tggcaccggcatcggctgacactgctgcctccagctagttatttcgtcctcttccgttcttcacccctacaccttggaggtgaacttctcacctgagggctgtaaagactcgtttgaaaatggagagccaagaaccaacggaatcttctcagaatggcaaacagtatatcatttcagaggagttaatttcagaaggaaaatgggtcaagcttgaaaaaacaacgtacatggatcctactggtaaaactagaacttgggaatcagtgaacgtaccaaccaggaaagagcagactgcggatggtgtcgcggtcatccccgtgctgcagagaacacttcactatgagtgtatcgttctggtgaaacagttccgaccaccaatggggggctactgcatagagttccctgcaggtctcatagatgatggtgaaaccccagaagcagctgctctccgggagcttgaagaagaaactggctacaaaggggacattgccgaatgttctccagcggtctgtatggacccaggcttgtcaaactgtactatacacatcgtgacagtcaccattaacggagatgatgccgaaaacgcaaggccgaagccaaagccaggggatggagagtttgtggaagtcatttctttacccaagaatgacctgctgcagagacttgatgctctggtagctgaagaacatctcacagtggacgccagggtctattcctacgctctagcgctgaaacatgcaaatgcaaagccatttgaagtgcccttcttgaaattttaagcccaaatatgacactggccatttttgtaaacgagaccaccaggccttcttcactaagactttgtattcaacttagtttaatgtagatttgccattagctttttcgtaaaataaaagcacagaacagatgtggtggtggtatggaattgtaattacaggtaggttgtgaccttcctttaaatttgttataactccagctaaaattaacaaagaatataaatgcaagtatgtttactccaatttttttaaagctcaacagagttaactacagctcagttacttttctagtccagtctggaacacaggggtatttggtattgagaaatagacctgagttctcaattaggtca

SEQ ID NO: 3834 - protein, 219 aa, Homo sapien
MESQEPTESSQNGKQYIISEELISEGKWVKLEKTTYMDPTGKTRTWESVNVPTRKEQTADGVAVIPVLQRTLHYECIVLVKQFRPPMGGYCIEFPAGLIDDGETPEAAALRELEEETGYKGDIAECSPAVCMDPGLSNCTIHIVTVTINGDDAENARPKPKPGDGEFVEVISLPKNDLLQRLDALVAEEHLTVDARVYSYALALKHANAKPFEVPFLKF

SEQ ID NO: 3835 - DNA, 10215 bp, Homo sapien
  Unsure 4908, 5098, 9196: Unknown base
gcggccgctgcttctttcacactttagttgggagctgcgcgccgcgctcagttactggagagctggccgcgcgccgccgcctcccgcacgcttgcacgcgggcccggcttcggggttttgggttcttactccaagcggcggggaggagggggagccccggacacactgtggggaggaggaggaagaagaggaggagggaggaagaaaaaagacgaggaggacaggggcggggggcgggaggcttgccaccttcagcccccccgcgaacgcccaaggtgcacacatcttgaccaactcagcagcaaggtggattttctttgtgtttaaagaaaaaaaatgtccctgtgtctgtagagatgatttgcagttcagcccggctgaagctgaccgaatgagactatgggctgtgcctccgccaagcatgttgccactgttcaaaatgaagaggaagcccagaaagggaaaaactaccagaacggagatgtgtttggcgatgagtataggatcaaaccagtggaagaggtcaaatacatgaaaaatggggcagaagaagagcagaaaatagcagccaggaaccaagaaaacttggaaaaaagtgccagctcaaatgtaagacttaaaactaataaagaggttccgggattagttcatcaacccagagcaaacatgcacatctctgaaagccaacaagaattcttcagaatgctggatgaaaaaattgaaaagggtcgggattactgttcggaagaagaggatatcacatagcaccaattttaccactcaaaccaggagctactactgtgtaaataggttacaccccagttgaaatctttgcaaaggtcggttctattcagcgaacagcactatagcaaaagaagatcgttccatattgtacgccccattaaattacagtgtttcttaatgaacttgcaaaggaatattgctaaaaacaaacaaaaaaaactgttatcgaactttctttgttgctgctagttaaaacttgttgcaacttttcacttctcttgtgtccaggtatgcagcaaaattctgcaatttcaccttaaagatactgttggttttacagatgctctccaacctattttctataagatgaggtagtggtgaactcagataacaaacttcccttctaaactggttctgcttctaagacaagcatctcctgccctctctccttcctccccatctctcgcacgcagtctagagatggactgagccttgcttctcactggcagtgttgagctttggagatgggatggttgctatgccaagccttgtttctctgctcagaagaagtagagaagctattatcaattaaaagcatgctgtgatgtgactcctggaagtgacgtaggagtgagtggcaggttgtttgatttaataggtatcttaatcaagaattaagcttgcaacattggctttgctcagatgcagatggaagtgtgatcacaatcattttgaatccctcttcctcacttttttttctaagaaaataaacattttactgtttttatggatccttgtcttctcccattcatccagctcagtgttttaagatgatcctgggtgcagaagttgagccctcctttgcattgacactgataattagcctatagggctccctacccttccattaagaatctaccaagcattagcaaggctgaaagtggtctaagaggtgaggggacatcctatgactttttaggaaggcctgaaaccaccttgttacctttcattttgttagcaaataaaccatcctattttgtaactctcccccttcaaaatgctacatgagccttgccacttcctttttctcttacttccagcacactagacatagcaaaagtgtttgcctactcaaaaacataatacttttatgctgatgatggtatttggagatgtgaaagccaaaagcccctggcagtggtggggaatgttgactgagtgttcagcagagtttatttttccatactatatgaagagaatgatctcttctcaaagacagaagtgatatttttaacaaatattgtcacaagtaaatagcaatcaaaaggagaaaataacttttgtatttttttaatgtgtttgatagctttgacgagggttctctttgttactttcaggggagggcatcctattaaatgccacgccagcagtccgggtctgggtttgtcccacaaaatcacaggagcactgtatgttcctctcttttggagttgtgactttgaagggcctcaatattagccacactgccgcctgcagaaggtggagagttaagatgttctatgtcaatttgctcttgccgaaaagatgagcctcgattttaaaatctatccacatccaactgatggcaccattgatgtgcaaataatgagattccctatctccttttagacctgggacggcaaaagggaagggaaggaaacttagcagagtgctattgactatagattcacatattagcaacaaaatcccgtaattcttttggccaacagcagctattttggggagcagctgtggctgttacataaatagagatgcagccaaaattttaggccttttatcctgcttctagcagaaaaatgcagggagagtcaagtagtctagggtttcaggttgcctcccctcatatggtttttggccaagtgactaaaacagttttccacaactgtaaacaaactggtaagccccacctcaaacttgttcactggggactttgcttaccgttctgtgggtgaccttttccgggatttcttgttcttatcaagcaagaattaagcacatgctaaacgtcttccatttgacttctctactcggtgtctcagacagtgtcttcccagaaaaccaccaccctctacccaaagatgaaacatgctcatgtcatttttctcatggtcacatttaacagttttgacatgttatacttgcgcatagatccaagcgtttcttgggaacctgacttttgagtgtttaataaagccggaagtggtgttgccctgaaccagcagattttcacctgggttctggctccggtgtttaacactggatacatctttgatgtgcgaaagtgagttcatcttcagacacatttggtacatccagaaatagatccaagaaatggggtggttgagtgggtccgcacgaaatgcttgattatgtcagcaacacccaacactgtctgttttccatttgttggttttaatcataaaattgtcaagtgattcgtgttgtactttatttttgtgccttctgaacggatctaaaacaaawgtattttgccttttttaccccacgtgtatctgaacattaagcagattggctcagacaccatgaaaaggatactccaatgtacgtgctggtgcactctgctagttgttatctctgtagggctcaagaagctggaaggaggaagggagggtaagtggcctggtgagtggaggtagaaaaatgatgagaaatgaactgagagcattaagcagagagggttgataggctggccgtgtccggggtgaaattggaaatccagctgcctagtggccagtgggtggggcaagactgtcaacgagatttacagctggcttacacatgccttatgtcctctgagttgtagagttgtaaaagttcagcagtgtgtgcacagctttcttttggttggcagagattcaggatcatggagtactgctctcataattgaagacgtgtttgttattggcagagaaccttaaaaaaggcctttacctcagcgatgcttcctagccccaggcttgcagagaacacagagtggtgttgtggtctatttagggacaaagaaggtataaagtccagagatgagaaaactgggtcagccctcagaaactgcagcagccacgcacacagaagcctgctggaagacaggtctctctccgtccacagtgcccatcatctgagcctgggctgggatgactcaacttagcaaagacggacccaggaggagtgctggttcttcagtctttgtactggccccatcctctcctcactgtaatgtgaggaagcacctctgtgtcagggctcacctgggcatccaaagcggccacgcccacaatccgacagcccccaggagcaggtccagggatgatgcagcccccttcttggtcccatgtgatgtcatcctgctttgttatcttcttataactttatcctgctataactttatcctcttcccagcctcatccctgtttttctgttagggcaagactcttccataagcctgctaaaaaacagagatgatacctcttacaaactttacctcatagcctgtgaagcaggttggcatgtggattacaagtcctgctttgacactgggcaagaatttaagattgttctatctctactagtcatagaaaagaaacattgttaaacatgttgagttttaaaggaagaaatattttcaaattcttaatccaagaaaatactgagttggaatcttagacttcgggactctgacacgttctttatgaaaggcaaaataattggtatctaaagttctctccttcctgcctcccctaaagaaaaaggatattagattgcacactataattttacataagatctgccttccacacttccctgctggaaggcattctcagagctttatgtcttcgtacctctcagagattggactttttcttgtttaaaaccccaaccaaaaaaaataataaggcatgattggtggggagggaatgtgtatttaggggcataataaaaaggtggctcgaagcaggaactttggcctcatggtgtcatgggtggatgcctggactccagtgtgcctgtgaggggctgggttaggcagtcggctgtcacactcacatgtgcctgcaataaaccttttggaatttcatgaacgaggtnctatgaattgccttttgccaatgaatggatgtatttttccaaggggggaatagtatccttgactttggcagtcacctttttgtatgtctctagaraggggtcaaaaaaactatggtaaagatgaggcttatgagtgaatacctctgggacaaaccttaggactcacaagctatgccatgtttttcagganactctgtacctatctggaatccaatcctgggagaagaggaaaaaggagctaatatttgtcctttatactcactctgtgccagatactgtgscaggcatttataattgtttgtgtcaccccatgatatccgttaaattaatctattacccccgtgttctaaataatagatcttaagtgtggaatgcatctatccaacataaatgcccatgttgaaagaaggaaagatgtcattcaagtatttttcaaattctttttattatgactatgcccttcgcaacactgtgaaaacaacccctgggggcatctgccttccagaatctctctctggcttctcaccagcttggtttcctcatggggagtgttttatttggcctcccctatctgakctgcacacacaccagggggaggccactggctaacagtaggacttcagtgccctgaggaaaaggctttgggaatttaggcacacgtttctctccttggaatccttctagcatctggaaaaggaacctggtatttctgcagttagataccagatgcaccagaacaggcttcgagtgctgtgattcttcctggttcccaagtcttgttgttcatcacaaactgtatctttttaaggttaaaagtcttgaccttcatggggtctgggacaatccgatctccaagcatggaggaaaggcaatgcctggaccactgacttgcattgaaatcctttcttgtgggctagggtttgatgtctctttttcatctttggactggggatctgcatcttccaggtccatttaagcactgaaactagatgcaaatctctttcgagaccttacatgttttagatagtcatgtaatgacttggatagacatttaaataacttgttccaaggtcggaagacccaagaactcctcagagttcctcttcttgcttcttgaatcacatcctctaaagatgactcatgtctccatagcaattgttaaaggtgctgcctagacgggacccgctcccacctttacttactttgctcgaaggaaccaaaacaatgtccttgtgtaaaggggctgtcatatccagttttcctttgaaatctggcccccaagatcctgcttctttctaacctggcagctgtcatgtcccttcaagatgatgtgggaaatggcccttacaacttgggaaccacagaaattgctgtatttcgggaagattcacctctaaactgaaggcttcattctgatagtgtctgccctctctaccctgatttcgcccttctttgcttccatttttagcccaaggctttgaatttgattgagtaagacttagaggcagtataaagaacaccataaacttaggcagaggtcccttagggtctctagagttgaaaataattctacagccttagggggacctcttggcattgactctaaagggagagaatagcccctgtgtcctggcatttcagtctagaccttcaaggactgttctctcttgacaggcaagcaagcaaagaaagttttgcaatagatttcaagccagtttttccattcaaaccaagatgcaaattcataaaattactcttttcctggaatagatccaggcagctgccttattagaactttagattcggatctattttcttaacacacatacacatacacgcgcatacatacatatacagagagatacgtggagaaaggaaatttactctatcattgcaatacttcaagaaagagctgtattttgcctttctgtaatctccaagatagtgtctaggaaagtaatagtataactatagggataccgaaacaggaaaaaccagccatcactcttgagaaagtttgagttcgactcacatgggagaatcgaggtctgctactcgtcttgctttgtgccccatctgtgcctggatgccctactacayctgcttgactcgtctgggctgctagccggggtgttgtggctgacatcctttcctggccttacacacataatagacacatccctaacggcgtgtgcctggtccagccacatacagccaccacatgtgtcacacactgtccccctcatccatgtggacttgactggcatttcagcagctccactgggatgctctaaccccagtgtgtggagttggggtcccttcatctaggttgacccaggtatagcatttttagcattgcctttccagtcttgatgattcattcattgaactcatttatttctggagcccctggtacactccaggcactgcgctaattgccagcaaagcacaactgaactaaatccaccttcaaggaacctagccataacgagggaggcagcatggaagtaccctacaggggaaagtcctgagtgctgtgggagcatctcaccgtggcagccagcccagttttggcaatcaggggcttcctgaaagaggtgacatcaaagcccggatgtgtcagaggactgagggagagtgttactaaaggactttcaggctgagaggatagcacaggactcagcccaaaggagggccagtgtggactgtccagggccagcctgcagtacagaggctggagcttggacttgtagagggagagagaagagcaagggacgtggacggggcagtgagccaggctagccacagagggttcccggggctttgctggggattcagggagcataaataagagctttaggtggtgctgtgtcctctgcagcccactgctgaggtcctccagacagrtaaggtgtggtcacaatcagggccggggtttccctgctcactgcggcagtgcaggggtgcttgctgagatgaytcatcccagggtgtcctctgtcccttacccagccccaactcctcttcctctgccaaaagctatttgaattcaaggactttaacctgggccggatctggtttggagacaaaggggacagctctgggtcagcatgaccttctttagagccactaaggcgaaaaataccgtttgggaccaggctggcctagacccagggatgagaatgcaccctaaaataaatatacgggaagcagcagagggcttccctgtctagtgtgtgatcctaactaaaggcagctctcttgggcagccttcccctggattaggtcacatacacctggtggccaagcctctgctgggtcccaaatacacacccgagtcctgccaaagaaaggagatttttaaaaagcacagacaaattgtatgcaagtggaaaatacccataggcctagacagctgtggagggaagacctcgtgggtacctggaggctgccagagctgggagctctgcaggtatgagtcagggaaggctcagagacaagcagaatctctctatggagacaacttgcagtgccttttaggttttccaaataacctcggagttcagagcattgggtttttttctcccctccccacccccagaaaaataattagaaaaatgtttaggagaaaggaaaagaattagatgcatcagaataccagctataagccaacactgtttccagaaactcaagaaaaagctcaaacagaagacagttcccctgagaggctggaggcgttggtgctgaaggcaattttcctagctaaggggcactgggccttgctgcaccttggggctgaccttttttgcaaaacacccacccctgccctcctggcatactcaacagcaacgccagctttctggacccttggaaagatgttagctcaaacacccactttttccagatcttcctcttgctcttcactgaggaatttgtaattctgaggctagcgatgccgactcggatattccgcagcccaggtgtttagattagaatttgtccagcggtaatcctgatgctggaaaccaacaaacatttggcctcatattcacccatttaaaaactagagcccctggcaggtccccttagggccatgtgttcatggaatataagccaagtttgccytagcgctkgttcatggaatataagccaagtttacctctccccattttctgccctggcccacttcccactcacctccacctcattgccaggaagggatcaaaatgcctccatgccagttgttaaatggctacatatttgcccttcccaagggtatttgcatttntatttaggaacatggccttatattcaaggaaaatctagcatcaagattacgaggcatcacctctcaatcaggtctgggaggtatcttggggcattgctcttctgaacacctgcagaggcttcctcaggtgagtgtgggagcccggaagtggcctccctaaccactctgcctgcacatgaattctccaaagcagtgggcccccatctgtttcaattacacatgcctgtcagcaaaaacttcgtgagatgcactctctctgtgtgtttattaatttatttaaagcatatatccctttacttttgtactactatattaggcacattataaaaagtatacagcatagaaactttaaatgaataagacacaaaatattataaacagaggttctggcattttctctctgaactcctgagggggaccttgggcacctcctggtatgtgcacaccccactttgaacacccttgctttagtgcaaatcagcacgcctaaatrgcatcccaaacccactgtgcgacatttggcctgcagaataggaaagtcctaggscagaatccccaggaacttcaaatctgggagatgaggaaagaaaactcactcacaaacaacataaatgtaaataattcaaaaccctaaaggagagctgtccctagacagtagtggctacaggtgctaagcaaaagtcaggtacactggacagagccatgcgattgattgttcatcttccctctctgggtctccagaaaaggacactggcaatatccccagctctctcctgattggaattctttgaaccctcgaagtgctccagcagtactaccccccacgtagcagtgggcccatgtcgcttgaatattatttttgatttgaccaccaagatgtaatgatgattctattccattttgaaaagggtctgagaaagtgtacaggtctaattatatatacatatttatacatgtgtatttttgtttattgttacattttgacattggactttctattaaataatttttaagagttg

SEQ ID NO: 3836 - protein, 121 aa, Homo sapien
  Unsure 4908, 5098, 9196: Unknown amino acid
MGCASAKHVATVQNEEEAQKGKNYQNGDVFGDEYRIKPVEEVKYMKNGAEEEQKIAARNQENLEKSASSNVRLKTNKEVPGLVHQPRANMHISESQQEFFRMLDEKIEKGRDYCSEEEDIT

SEQ ID NO: 3837 - DNA, 2645 bp, Homo sapien
gcggccgccatggcggagaattggaagaactgcttcgaggaggagctcatctgccctatctgcctgcacgttttcgtggagccagtgcagctgccgtgcaaacacaacttctgccggggctgcatcggcgaggcgtgggccaaggacagcggcctcgtacgctgcccagagtgcaaccaggcctacaaccagaagccgggcctggagaagaacctgaagctcaccaacatcgtggagaagttcaatgccctgcacgtggagaagccgccggcggcgctgcactgcgtgttctgccgccgcggccccccgctgcccgcgcagaaggtctgcctgcgctgcgaggcgccctgctgccagtcccacgtgcagacgcacctgcagcagccctccaccgcccgcgggcacctcctggtggaggcggacgacgtgcgggcctggagctgcccgcagcacaacgcctaccgcctctaccactgcgaggccgagcaggtggccgtgtgccagtactgctgctactacagcggcgcgcgtcagggacactcggtgtgcgacgtggagatccgaaggaatgaaatccggaagatgctcatgaagcagcaggaccggctggaggagcgagagcaggacattgaggaccagctgtacaaactcgagtcagacaagcgcctggtggaggagaaagtgaaccaactgaaggaggaagttcggctgcagtacgagaagctgcaccagctgctggacgaggacctgcggcagacagtggaggtcctagacaaggcccaggccaagttctgcagcgagaacgcagcgcaggcgctgcacctcggggagcgcatgcaggaggccaagaagctgctgggctccctgcagctgctctttgataagacggaggatgtcagcttcatgaagaacaccaagtctgtgaaaatcctgatggacaggacccagacctgcacgagcagcagcctttcccccactaagatcggccacctgaactccaagctcttcctgaacgaagtggccaagaaggagaagcagctgcggaaaatgctagaaggccccttcagcacgccggtgcccttcctgcagagtgtccccctgtacccttgcggcgtgagcagctctggggcggaaaagcgcaagcactcaacggccttcccagaggccagtttcctagagacgtcgtcgggccctgtgggcggccagtacggggcggcgggcacagccagcggtgagggccagtctgggcagcccctggggccctgcagctccacgcagcacttggtggccctgccgggcggcgcccaaccagtgcactcaagccccgtgttccccccatcgcagtatcccaatggctccgccgcccagcagcccatgctcccccagtatggcggccgcaagattctcgtctgttctgtggacaactgttactgttcttccgtggccaaccatggcggccaccagccctacccccgctccggccactttccctggacagtgccctcgcaggagtactcacacccgctcccgcccacaccctccgtcccccagtcccttcccagcctggcggtcagagactggcttgacgcctcccagcagcccggccaccaggatttctacagggtgtatgggcagccgtccaccaaacactacgtgacgagctaacgccacgcaggcggcggggcgctggggaatcttcctccccagcccccgggctcgggagttatgcatccagagacctgcccttctaccttcctcgcctcccctcttcctcattccattgccccaggtcttttccttttggattttgttttggttttggctttgtttttgatttttttttattatgaatctcctggacgcagaggtgacagtgggagctggcctgggccaggacggcaggtggccctggagatgggaaagtgtctgtgtcgaggcgctgagctctctctctgtttctccttttttcctctactccttccccttcacacccccgtggctggaaggaacctcggcttccctgaaagcttgggggtcccacccttcttaccccacccgggaggaacgcccagggccccgggcttgtttctcctcttgttttccttttgggcagtttgatcactgatcgagtaaggaatgacctttagattgtgcgacttttgtttttgtttttttaaatttttttaaaccaagaatgatttctcctgcttccttctcctcaccatcttcccagacggagttcaaaggccacttctcaagcagcttttggcaccttcagcctcagagtggaatcttttaaagacaggacccctatgtccaggaaaggggaaaaggaactttgccaatgatagtgaccacagcaaaagcaaataataataatattaataataataaagagaaataaaataataaaataaaaaacaatagcacagcccttgttgaggtcagcagggaggaggggctgcccggagttgggtccttgcctggattttgacacagcaacttcctgtagtgagcactttgtatgaatcgtggacttcctgttctcaaggcgcaggtatttattctgtatctgtctagcgcacacaccaaaatccaaccttctaataaacatgatggcgcagtcccaaaaaaaaaaaaaaaaa

SEQ ID NO: 3838 - protein, 551 aa, Homo sapien
MAENWKNCFEEELICPICLHVFVEPVQLPCKHNFCRGCIGEAWAKDSGLVRCPECNQAYNQKPGLEKNLKLTNIVEKFNALHVEKPPAALHCVFCRRGPPLPAQKVCLRCEAPCCQSHVQTHLQQPSTARGHLLVEADDVRAWSCPQHNAYRLYHCEAEQVAVCQYCCYYSGARQGHSVCDVEIRRNEIRKMLMKQQDRLEEREQDIEDQLYKLESDKRLVEEKVNQLKEEVRLQYEKLHQLLDEDLRQTVEVLDKAQAKFCSENAAQALHLGERMQEAKKLLGSLQLLFDKTEDVSFMKNTKSVKILMDRTQTCTSSSLSPTKIGHLNSKLFLNEVAKKEKQLRKMLEGPFSTPVPFLQSVPLYPCGVSSSGAEKRKHSTAFPEASFLETSSGPVGGQYGAAGTASGEGQSGQPLGPCSSTQHLVALPGGAQPVHSSPVFPPSQYPNGSAAQQPMLPQYGGRKILVCSVDNCYCSSVANHGGHQPYPRSGHFPWTVPSQEYSHPLPPTPSVPQSLPSLAVRDWLDASQQPGHQDFYRVYGQPSTKHYVTS

SEQ ID NO: 3839 - DNA, 1286 bp, Homo sapien
ggcacgaggctgccgcgctgtccgcgttatctcctcccggtgagaacgaaccgcagtgtccaccggcgaggagccagccctgtcccggtcagagaaagacgacgaggatacctgggagcgggcggcggccgggctgggccgcgccggtgcgggctggcgactctgctcctccgcttgctgctgtctctgggaactgggtgccagcgctgaggggcttccagcggacagggacccccttccccggctcccctgcccaccctgccggggagggcggaagatgccggtgaagaagaagagaaaatcccctggggtggcagcagcagtagcggaagacggaggcctcaaaaagtgtaaaatctccagctattgcagatcccaaccccctgctagactaataagtggagaggaacatttttcaagcaagaagtgcctggcttggttttatgaatatgcaggtcctgatgaagttgtagggccagaaggaatggaaaaattttgtgaagacattggtgttgaacctgaaaatattattatgttagttttagcgtggaaattggaggctgaaagcatgggattttttaccaaggaagaatggttaaagggaatgacttcattacagtgtgactgcacagaaaagttacaaaacaaatttgactttttgcgctcacagttgaatgatatttcgtcatttaagaatatctacagatatgcctttgattttgcaagggataaagatcagagaagccttgatattgatactgctaaatctatgttagctcttctgcttgggaggacatggccactgttttcagtattttaccagtacctggagcaatcaaagtatcgtgttatgaacaaagatcaatggtacaatgtattagaattcagcagaacagtccatgctgatcttagtaactatgatgaagatggtgcttggcctgttcttcttgatgaatttgttgagtggcaaaaagtccgtcagacatcatagcaagaactatgtgaagaaaatgcaaacctttcaattcccacgtgtatacaagctaatgtgatgagggggaaaaaaatccaacgggtgcattttcattcatatgaaagacttctcatagtacttttttttcctttttttaaaggaggtttttcttgttacatgtgatgggcattgagccacacctcttcttagactgaatattgaagtttttgttttgagttatgtttataacatttatttcagaacaataaagattcagatttgtgaaaaaaaaaaaaaaaaaaaaaaaaaaaaa

SEQ ID NO: 3840 - protein, 237 aa, Homo sapien
MPVKKKRKSPGVAAAVAEDGGLKKCKISSYCRSQPPARLISGEEHFSSKKCLAWFYEYAGPDEVVGPEGMEKFCEDIGVEPENIIMLVLAWKLEAESMGFFTKEEWLKGMTSLQCDCTEKLQNKFDFLRSQLNDISSFKNIYRYAFDFARDKDQRSLDIDTAKSMLALLLGRTWPLFSVFYQYLEQSKYRVMNKDQWYNVLEFSRTVHADLSNYDEDGAWPVLLDEFVEWQKVRQTS

SEQ ID NO: 3841 - DNA, 903 bp, Homo sapien
tagtcacgctcggtaccaggcgcagatcatggcaggcagccggctggaaaccgtagggagcatcttctctcggactcgggacctggttcgggccggggtgctgaaggagaagcccctgtggtttgacgtatatgacgcctttcccccgctgagggagcccgtcttccaaaggcctcgagtgcgatatggcaaagccaaagctcccatccaagacatctggtaccacgaggatcggattagagcgaagttttattcagtgtatgggtctggtcaaagagcttttgatctattcaatccaaacttcaagtctacctgtcaacggtttgtggagaagtacactgagctacagaaacttggagaaacagatgaagagaagttatttgtggaaacagggaaggctttattggcagaaggtgtcattttaagacgagtaggcgaagcaaggactcaacacggaggtagtcacgtttcccggaaatccgaacacttgagtgtcagaccacagactgcgttggaagaaaacgagactcagaaagaagttccacaggaccagcatttggaggcacctgcagaccagtcgaaaggtctcttgcctccctgaaggacctgtatactgtgtatgctggcattcacactctactcactggctgaatgttgagctatttttaaacagttgaactgtgtaaatgtttcttgatctctaaggtattatgtttgccttctcttagttatttctgggttgtcacaaagctcagtatcatggtttgacagaagcagttatgtgaacttttatgttaggacattactaaataaagaattccctagctgcttataaagtaaatttactttgaattgtaaataacatgaagaaacctttataaagattgttcaaatgggactcaa

SEQ ID NO: 3842 - protein, 190 aa, Homo sapien
MAGSRLETVGSIFSRTRDLVRAGVLKEKPLWFDVYDAFPPLREPVFQRPRVRYGKAKAPIQDIWYHEDRIRAKFYSVYGSGQRAFDLFNPNFKSTCQRFVEKYTELQKLGETDEEKLFVETGKALLAEGVILRRVGEARTQHGGSHVSRKSEHLSVRPQTALEENETQKEVPQDQHLEAPADQSKGLLPP

SEQ ID NO: 3843 - DNA, 6496 bp, Homo sapien
gtgggcgtggtgtgctatagagtgtactgctgctgctgcttggccaacgtttcactgcctggcatcgggggcaccattcctgagtccaaacctttcttctacgtgaacgtggctgacatcgagagcctggaggtagaggtgtcctatgtggcctgcaccacagagaagatattcgaggagaagcgggagctgtatgacgtctacgtggataaccagaatgtgaagacacaccacgaccacctgcagccgctgctgaagatcaacagtgctgacagggagaagtaccgccggctcaacgagcagaggcagatgctgttgtactcccaggaagtagaagaagactacaacccttgtgaagaggacctcttcgtgctgtttttcctagaacaaaacaaccggatatttcagactttgttggaggtgtctgccagtcaagacaaaactctgacagcagagcatgcccggggcatgggcctagacccccaaggagaccggagctttctcctggacctgctggaggcctatggcattgatgtcatgctggttatcgacaacccctgttgcccgtaggaggagccaacaggactgggagccgcttcacgtgggatgtcagcagcccggagttcaccccagggccccagagggcctcattttttattaagttgacacaaaggaatattgtttatactttccaacaaacataatttttgcaatttcctttctgcccttttccctagagataaggtgagatcaccttggttttgtgtcctgccatgttaggatattggaatctgccactttctcccagagctgctggtcctctgggcttggtcatgggagttgtatcactaggagtaggctgagctctggaaacattgggatggactgttcagaaagtctgtgtggtctttgtcccttgatgtatttgagaataagacaaccacctgtcccctgtggccttagatgttcatctgcctaaaggcagaaactagaccagatgatcttttaaggtttttagtagttctaggagtctatagtcttgggatcaaatcccttttcttgttcattagggcaactttatgtcttctctgtttacttgagtagggaccacaaagagggaaaaaaggatgtttctgacaccaaatatgagcttatcttatggtcagaatgaaagaggttgcttatcagtgagctgaaaactaaaattatagaatgaagcctggaaaccttcctcaaagtaacttgatggtggccatgcaatgtaatgttcctctttgtctgaaccttcctcttcttgggatgaattggtgaattgctaagggccaatgctggccttggagcttgcaagcaaattaattttccagtttagtctcttaagggttcaataatgctcttggagtaagttgggtatttttaaaggctgaagtttggactaccggaggatagagcaattgaagttcgagcaggatggagaagccactctaagtctcttcatctggacacgaattctctggaggcattagcagcagcacctctgggtcaacacagatttactggattccaaaatctagcaaggatctgagctggttaactcagagggtggagcatgatgctaacaagacggtttatcattttggacccctcacaaacacacttctctttagcagaggtgacattccttaggctaaataattggatccagggacataacagatttgttgagagaaaatgtggcagtgccttcacccgggacagtggtcaggaagccctgagcatccctgatggatttatccatcctcttctgaagtgctctgctctaggctgggtcctgttgccacctgcctgttctctggttggcttttgcaggagggcagcttacgtgtttgtcaaccagttagaaagccagttcctgtgggtcgagtttaggcctttttggccatagttgagaattttgacttgggatactgggttgttggtgacaaataatgtcttccttttcccccttcccgcctggctcggttatgggaatagccgtcagtgcatccatgtctgtgaccaacacccagccagactaatgtacacagcagggagaaataacattcaaatggtggttcacacatctcatctcaagataagattcttagggttcactgctttattcaaaagtgttttcactgtagctccttcatatggaatatcaaaactgaagaaattcacatgtggaaatgcaaatagacattgattaatcaaggtagcatctttatgtaaatatataaataagtttgggcattgaaatgtaaactgtacagctaatagacttttctcctctgcaatgtgggttgctgtcatttcagtaatgtgtatgtttacaaaagaaaaaaaaatctgtgtttcgaggttgaagcctcaccttttattctcctttacatgcaaccctctcttcttgcctctcaagggttgaggggtcctttctgtcaagtaatggttatttttcgtggtatcctgaggttcagggtgttttaagctgggggtaggtggttagaggcaggagtagaagtgaaaggaaaggtctgattctcctagaggacacaagaagacctcctttttctggaattagggaatctgccggaaggagctgtttgaggcatttctgctctgagccttctatatgcaaacactgcagttttaactgcaagctcagaagtgctggtgtaaacatagcagggtgagaatgaagttcctgttttttcctttgaatggtgagtcagggcttctgggttcccttaactttgtgcttgtctcggtagctttctgtctcacatctccacgtgtccaccctcctgctcatgcagagggccagggtatgggtggccccagaggagaacgtgccagtgaggcagtgccatgtttcaggtcataggggccttgggctcagctgaccccaatgcagaacttctccctttaagagagattccaataaattggtccttccctaccttgccagcttcttcataggaccagaaatcttgtgcagagcctctgcttggctgaacagcgtgtgctttatctcttcagttacctttgccactgttgagcatcctcagagtatgtcttgcctgggctatgaagtggagcctgtggcttcggaaatcacctttcgaagccttgctctatgccagattctgctccccaacatgacagattaacaggcacaacctaggatcctttgctaccagttctctactagggaattccacagtggcagcagaagctaggagccatgtggacctgcttttctgccagtcttgaaatattttctgagaaaccatctgcttttgttcagaagaaagtgctgaacatcgttcacagacttctaggtctgtaagctctttaggggcgggcattatgatgaccaccggcctcctggaggagggttggatacctgtggtgtgacaccttctgccaccatctcctgccgggcctcagccctcgcctgcctgagcaggcctagttctcctgtgaagctgtcagcctgatctcatgccacactgtgaaatgaactatgtgccagtttggaaatgattgctgacctgagatgctggctgggctgccctgttgttcctgaataagtcagaagaagttccaggtgggagtggaattcaggtttggggctcgttggtatccatgcaaaatatgacaaaggcctgttcaagagggcattttcaattctgtaggctcagcagatgatactgcccagcctttgggaaaatgtccagttggcccctggcttaggactctccacaaggagtttgaaatggtagggcttatcccctaccagactaaaagtatggcccaaattatgtgtttagaatttgcttggcctttaaacacgaaccattccctatgcctggtagagaccattccagtatcagtgtcccacctgggacctgtacagtcctcagtaaattatgattgcaatgaattagaaggcttttgccttccatatccatcatccattatagcatctgtgcttccacctggttagggggagggaagctgaaatcattgatgtatcaatagaagtaatttagcttaggaacttgcatctataacttaccttgttttgttccactttaaagtcaagacaagaaagttaagatagcacacaggtgcacatgcttccagatgccacatgtgaacatttgttgatcatgtgactaccgatgacactttagctagaagataaattaaatcttagctaaatcattgtttttccttctggtggctatgaggatgaatttgctctcagtcttgatgcactgaaagcccttcaaacacagtaaaagatgaaatcactcatctttaaactgaggccttcagggaagcttttgtaaaggacagtaatgaattaggctttcagttttaggacatcaaccctccgagaaaaggcagaaacccgagggaccatttatttcccttcgaaactgtatagcccagggaatggattgagatgctttctccagaccctgtataggtcaaccttgcagaggtaaaggaggaggggcaggtggatgaataaaataggataatgctcagcttggcagtggacttgccttagtgtgatgacaggtctaacatgggcaagacaattagaatggggaccaatatgccaggcatgggcttttatctccctagtagatcccaagctagtaggcttggattctgccaaatggccagccctcctgtcttctccccgtaccttgtagttagaccgaggtgagaatcctgctgaccccagtcccatcccctctcatttcaggaaaacccttttgtgattcaggtagggggagaggaggagttaagggctccgtttactcccaagtcatggatttttaatattccatttttatcactaatatacctctcttcctagaagctactggagtattgagtgttgtgggaaaaggctaactgtgaattaagttaatgtttttcttataagaaatggaagtttatttttttattgatattactatgtgatgaactgagtatgcatatactgaaatggaaggaaattttaaaactattattctagaagaaatgggcagttttgtaatttggtggtggctgagaccccatagaagttttactatgtaaataatttggagagtgaataaggagattgtgctatgaaatcctgacagcgctctttaggaggcagacttgacagtcctaggaaggttgacataaaaataccaaccttcagtaaagctctagtacaaaaaagggtaaatgtcatcattcttatttttaggcctctttcttgagagaggtgggagtgggaggtagtgttataactggcactttaatttgtttttggaactagaatttaggggcagttggatgaaattgcaaatttagaaggggaataagaattttctagtgctatataaagaaatgatgatggagacaaaagccttgctttcctctttttagaatttattttcgatttttagcatactgtggggcttttagagctaatatgatctaaattcagaaaatttaattttcatagtaggccaggtgtgaattacttatgtttgctatagaatgcttatttagactaacaataaatttactttgctttctaaggccagtcagcgaatgtggggatgaggcaggatgttttaaatgagccagagatgatccacaaagtgaacagtcgacacagaggtctttgagttggatggttgcaaatatattgacattagagtgaaaactccttcctttgggtaaactaaagaaagataaagtatactaaaaaattttaagatggtgttatacaaaaaaaagtttgggtctaacgtgtccacaaagactgtcaagtgaagaatggtggagattcttggtgtttgagcagccaacctggatgagtgacttcagggacagagcagaggaaagcaaaatgaatttcctttatttacccaaaacttgttgactgaatttttgtataggtccgggaaaataagcctaaacaaatagttgtagccttagaaaaactgttttcccatttctttctgagttagaatcagcatagcctccctgtcgccttaaatgtaaaaatcctattttgattaataccccagcctaagagttatagcaatacgagagactgaatctatttttgtttcgggtctttacctcatagtatgaaattagtaagacactgcatagattttgccctgaatactggtgtgcccaggtatgccgtgctctctctctgtttccagtggtggtaattttaaggcctaaagaaagctggggttaatcctgaagctaaaagtaaatgtttcttgaattgattttgttctgtggtacaaataacatctatgaatatcatatctgtatatatctgaaccaagttgtgtgcagagaggttgatataactatatttacagaaaatgatttttacaattaaagttcacattttaacatg

SEQ ID NO: 3844 - protein, 189 aa, Homo sapien
VGVVCYRVYCCCCLANVSLPGIGGTIPESKPFFYVNVADIESLEVEVSYVACTTEKIFEEKRELYDVYVDNQNVKTHHDHLQPLLKINSADREKYRRLNEQRQMLLYSQEVEEDYNPCEEDLFVLFFLEQNNRIFQTLLEVSASQDKTLTAEHARGMGLDPQGDRSFLLDLLEAYGIDVMLVIDNPCCP

SEQ ID NO: 3845 - DNA, 1837 bp, Homo sapien
ggcacgaggcccgggtcgagcatgtagcggctgctggcggcggggctcccggggcgggccgggcgggccgcgggagccgcacgcggcgatatggaagaggagggcaagaagggcaagaagcctggaattgtctcgccatttaaacgagtattcctaaaaggtgaaaagagtagagataagaaagcccatgagaaggtgacagagaggcgccctctgcacactgtggtgttgtcattgcctgagcgcgtcgagccagacagactgctgagcgactatattgagaaggaggtaaagtatttaggtcagttaacgtccataccaggatacctgaatccctccagtaggactgaaatcctgcatttcatagacaatgcaaagagagcccaccagcttccgggacacttgactcaggagcacgatgctgtgctcagcctgtctgcgtacaacgtcaagctggcctggagggacggggaggatatcatcctcagggtgcccatccatgacatcgccgccgtctcctatgttcgggatgacgctgcacacctggtggtcctgaagacagcccaggacccagggatctcccccagccagagtctgtgtgcggaaagttccagaggcctcagtgcaggctccctgtcggagagtgcagttgggcccgtggaggcatgctgcctggtcatcctggctgcagagagcaaggtcgctgcggaggagctttgctgtctgctaggccaggtcttccaggttgtttacacggagtccaccatcgactttctggacagagcgatatttgatggggcctctaccccgacccaccacctgtccctgcacagcgatgactcttctacaaaagtggacattaaggagacctacgaggtggaagccagcactttctgcttccctgaatctgtggatgtgggtggtgcatcaccccacagcaagaccatcagtgagagcgagctgagcgccagcgccactgagctgctgcaggactacatgctgacgctgcgcaccaagctgtcatcacaggagatccagcagtttgcagcactgctgcacgagtaccgcaatggggcctctatccacgagttctgcatcaacctgcggcagctctacggggacagccgcaagttcctgctgcttggtctgaggcccttcatccctgagaaggacagccagcacttcgagaacttcctggagaccattggcgtgaaggatggccgcggcatcatcactgacagctttggcaggcaccggcgggccctgagcaccacatccagttccaccaccaatgggaacagggccacgggcagctctgatgaccggtcggcaccctcagagggggatgagtgggaccgcatgatctcggacatcagcagcgacattgaggcgctgggctgcagcatggaccaggactcagcatgatggacagtggatgggggggcacccacaccttccgcgcagtcgtcataggccttcccagaaggagctgcccagacctgcgtgtcagcccttggtggtggccagggagaggcgcccggtgcagatggccccgggcggcccaggtcctctactgtgaaggagcagggagctgccgagggacacgagcctcagtgcggggtggaaggctctttgccttgtccaccagggctcagccaagccctgcagtgtgtccccgctcggggagggcccggccgagcgggcagggagagccagtcctgtcggctgggcccttggacggctgtcagttttgcacatgatgttcctattgtaactctcagagaccttaaaaagaagtttactgcaatgtgaataatttaaaaaaaaaaaaaaaaaa

SEQ ID NO: 3846 - protein, 444 aa, Homo sapien
MEEEGKKGKKPGIVSPFKRVFLKGEKSRDKKAHEKVTERRPLHTVVLSLPERVEPDRLLSDYIEKEVKYLGQLTSIPGYLNPSSRTEILHFIDNAKRAHQLPGHLTQEHDAVLSLSAYNVKLAWRDGEDIILRVPIHDIAAVSYVRDDAAHLVVLKTAQDPGISPSQSLCAESSRGLSAGSLSESAVGPVEACCLVILAAESKVAAEELCCLLGQVFQVVYTESTIDFLDRAIFDGASTPTHHLSLHSDDSSTKVDIKETYEVEASTFCFPESVDVGGASPHSKTISESELSASATELLQDYMLTLRTKLSSQEIQQFAALLHEYRNGASIHEFCINLRQLYGDSRKFLLLGLRPFIPEKDSQHFENFLETIGVKDGRGIITDSFGRHRRALSTTSSSTTNGNRATGSSDDRSAPSEGDEWDRMISDISSDIEALGCSMDQDSA

SEQ ID NO: 3847 - DNA, 4346 bp, Homo sapien
gcgtgggcgccagaaagcggaacctcccgggccagtcgcgcggtggtcaccctcttgggagctggggaggaggctgcggaggctggcccggctccttcgggcgtcgcttcccggaccgggtgcgcggggtcccccggaacgtgtgttccaggtcctcccgcgccagtgttcgcagtccccgcctggtcgcggcggcgcctcgggcgcgggtgcaggcgcgcggcgcgcaggcggggggcgctgtggtcttggcgcggggaccgagccgctcggccagacccgcctcttttccctccccgccagcccgcccgcctgcccgccccccacgcgtcgtgtcgccgggaagccgggcggagacagagcgcttgggatccacggcgctcggaccgctgtcctccaacagcgcagggcagagcggctggcgccgccggagcgcggagccacgaccctccctggccgcctttgtctactggccgtgcggcccggaaccgccactctccagggccggggacgcgcccgcagctgtcggtgacagctcctccctaccgcaaccctccggggcggaggggcggtcgggccgggccctgctagcccgcgaccgcaagcccgcgctcgcggatcgatgcccccgcagcagggggaccccgcgttccccgaccgctgcgaggcgcctccggtgccgccgcgtcgggagcgcggtggacgcgggggacgcgggcctggggagccggggggccgggggcgtgcggggggtgccgaggggcgcggcgtcaagtgcgtgctggtcggcgacggcgcggtgggcaagacgagcctggtggtgagctacaccaccaacggctaccccaccgagtacatccctactgccttcgacaacttctccgcggtggtgtctgtggatgggcggcccgtgagactccaactctgtgacactgccggacaggatgaatttgacaagctgaggcctctctgctacaccaacacagacatcttcctgctctgcttcagtgtcgtgagcccctcatccttccagaacgtcagtgagaaatgggtgccggagattcgatgccactgtcccaaagcccccatcatcctagttggaacgcagtcggatctcagagaagatgtcaaagtcctcattgagttggacaaatgcaaagaaaagccagtgcctgaagaggcggctaagctgtgcgccgaggaaatcaaagccgcctcctacatcgagtgttcagccttgactcaaaaaaacctcaaagaggtctttgatgcagccatcgtcgctggcattcaatactcggacactcagcaacagccaaagaagtctaaaagcaggactccagataaaatgaaaaacctctccaagtcctggtggaagaagtactgctgtttcgtatgatgctggcaagacacccagaaaggctattttcagatgaaatcgatattagaagctatattagctgaaacaactccttttactgcgtagaacctatatcgagagtgtgtgtatatgtattataggaggagctctcaattttatgtattctttctgcctttaattttcttgtttgtttgagcttagggatgagatacttatgcaagatatttttgaagtaaattaaacatttttcacatctctggaaatttagagttctagacctctggttaatttatatctaatatgaagaagacacctctaatctggatgttaagaatgaagttctgctacattataatgtacagaagagcaaaagggaggaacactatggttaaccctctcttgattaagggctacttaatgcacagtgcattatgtacacaggtcaaccatggtaacaatagttcttagctttgaaactccatgcaaaccatgccttttttttaaggagcaaaaatctgagaaaaaaagtgagagacctctgcctacaaaacctcaaaccagtcacttttgtcaattgctaatacccagttacttatgatttaaaaacaaccaacagaaaacatcccactgactgtatggcactctgtagtcaaaaaaggaaacttccttattgggacttttctttcttagtccagttgtgttgacacatatgaacacagacaaagtgctatgcggaggaaagcaagtgttggtcagtagtttcatgttttagggagtggttcctgtggagatcagaaagtgacatttgctttcggtactgtaatacgtgcaccaaactgcctcaatcctaggtaacgagggcaacagggagcacctgtctggattgtttttaaacctccatactcaagctgtctcttcggcagggaggtgaatactcttgaaaggccaacagcaagtgtttgtgggacacaacacagataattttttcttaagtcggccaagatgtacttctctgtgtgcacacccatgcacactcatgcacacagatacataggtctgtatggctgtatttgctgttgattcagactttcacaccattaatggggaaaagcgtggccacaaaaacagatgctaggaagcttggcttcctcttcttgttgacccttttttgaaccaacatcttttttattatattcagagtatgtttttaagtgtatcttaatatatacattttttaggacatcttaaatctaaacaaaaaataaaatgaacatctcttgaaacctgttaaaacaaccagttaaagccacagatggctttcagggcagtagcagcagaggccagtggactctgaggactcctgaggggcggggcgtgtagccagccaggtgcatgccgggaccatggcccccatacttggctgcttcctgtgacagtgaaatacatccttcaaggtggcagctgttagggctgaatcttctggagaaaaaggtgccatctcaggagaatagcttttactctggtaggaatgcttccgagacaccacaaggcagcctgaacactcagttgcagggtcgggcttgcggtgggtgacccagagccaccaaagtcacatccacaactaatgagggaaatctgtaaagccagttagatagaagaattttatttttctgtgggttttgtgttgtcttttttatgttaaaaagaaatccagtttgtgtttttctatagaaaaagtaaaagatcaggttatactttaggttaggggttctatttattcctgttagtaaataaaattaacaaatttctttgtttaacaaaagattaatctttaaaccactaaaatacatagactgattgattattcaacacattggaattgatgtcggtcatagtttcctgaagcatttagttacaacctgaaggaataaaatgatttgtggaaatgcttaaaatagacctaactgaatacagtctcatcttgccgcgcctggcttacctatctgtggaaagctaggcttcccaggctgggctctgcctgtctggtgcctggaggtgtgggagggaagatgagttatttaactggtaagcgatttgaaacactatttttatattaaagtaaatggcatggagtatagtgcaaattcatttttaagatagaacacaaaacttgaaagaagttttatgcgtgtgacagtgtatggggctgcagttggtctccctggaggggacttccacacctcctgcctttaggcatgggtggaaagtgctcagtgaagtacacctgtgtggcccagttctgaaagctttatacagttgaattttaagtggggttgataacaccttggactgttagtgttaaaaatctagtgggttgacctttaaatgcaacagtttttaaaatatattgctgcattttatagaatagtaaaggtacgattatacttgagattttcctccatttttatttcttcgtgaacatagagtttggggccgaaaatgtttttaaagtatgtgtttgagttaaatataaagttggttcacttcaaagctaaaaaattgttaaacttgcagcttggtattgcagagaagattttataagaattttgctttagagaatgccactttggctgaactacaagtgtaggccaccattataatttataaatacagcatacttcaaaactgtttgttatctcttgttaccatgtatgtataaatggaccttttataaccttgttctctgcttgacagactcaagagaaactacccaggtattacacaagccaaaatgggagcaaggccttctctccagactatcgtaacctggtgccttaccaagttgtgcttttctgttttcaagtgtaaatgatgttgagcagaatgttgtacttgaaaatgctataagtgagatggtatgaaataaattctgacttatgaataaaaaaaaaaaaaaaaaaaaaaa

SEQ ID NO: 3848 - protein, 258 aa, Homo sapien
MPPQQGDPAFPDRCEAPPVPPRRERGGRGGRGPGEPGGRGRAGGAEGRGVKCVLVGDGAVGKTSLVVSYTTNGYPTEYIPTAFDNFSAVVSVDGRPVRLQLCDTAGQDEFDKLRPLCYTNTDIFLLCFSVVSPSSFQNVSEKWVPEIRCHCPKAPIILVGTQSDLREDVKVLIELDKCKEKPVPEEAAKLCAEEIKAASYIECSALTQKNLKEVFDAAIVAGIQYSDTQQQPKKSKSRTPDKMKNLSKSWWKKYCCFV

SEQ ID NO: 3849 - DNA, 4113 bp, Homo sapien
ggcacgaggctgcggcttctggctgcgcggcctgcgcgcgcctcccgggcggattccagccccgagcgggacagcgcggcggggagcgacgagatttctctctgatcaaacggacagttcaggactcagaatctaaggatgaatgttcaccgtggcagtgacagtgacaggttattgcggcaggaggccagctgcttagtggatgatactttagctgtagcccaagaaaaagaagcaaacagcctggcttcatctggtcctcataatcttacttatcctctaggtcccaggaatgaaggtgctttactccatgaactgtctaatgacggtgctcataagcagtttgatcactacctcgaagagctcatcttgcccatcatggtgggctgtgccaagaaaggagaacgagagtgccacattgttgtgctgacggatgaggattctgtggactgggatgaagaccaccctccaccaatgggggaggaatattcccaaattctttatagctccaagctctacagattcttcaaatatattgagaatagggatgttgcaaaaacagtgttaaaggaacggggcctaaaaaacattcgcattggaattgaaggttaccctacctgtaaagaaaaaattaagagaaggcctggcggccggtctgaagtcatctataattatgtacaacgccccttcatccagatgtcatgggaaaaggaagaagggaagagtcgccatgtggatttccagtgtgttcgaagcaaatccctcacgaatctggtagctgctggagatgatgtcttggaggaccaggagatattaatgcatcacccaccccaagtggatgaacttgaccggctaaatgccccactttctcagatggcttctaacgactttcaggattagggccagctgtgggtctactccttgttggagcccatctcacctgggatgcctgcagccagccctccctcgtgatttgtctcaccttgagtaggagacatgcttctcccctaaccttttcctttctgccataattaacatatgtccttttcagtaagtccatgcctctggcaggggatgaagaagtactcactggtaattagctaccatctttgcagcagccctggtaacttgaaaaatttgggtctggtgctgttcattgagtctttgtgtaactgcaaaagcaggaaaggaagtcaagactcctgttgcctcgtgcttagcaaagcagtccttatcctttatactctgttcttgggttttgtttttgtcttgttttataccaggcaaattgcttagtagcaaagggaccaaactgaaaaggtgacaatctctaacttctaaaagcagacaccaatcggatgctcattagaggttaatgaagatgccattcttggtggcctctgcacccaaattgcatctggaaagaactagggtctcattcagaatgtccaaaaggaaattcttaagagcttaaattcagatttgtgtctcattaatgcagtgaacaattcaaaaccacacagattccttggcaggaaggataatggaataacagtgttgatgagacctttttagcttcaaggtttcggagtctaaacaaatggatgattcatttggaatgaaactcacaatgcaagtagaaggacctctccaaatcaggccagttgggttatcctggcttggaatctggtgtgaaaccataggtcttaacactctggagcagcacattgctgtggatatgtccaggagaccttagatatggcttaaaggctttcaagatgaggacagaaattgcttacaattgctcagtttctcaacagaaagactcataagagtgccagcatggggtacatggagtgaagctgggtgggaagcatcatctgcacagtccctgtcctagtgcaggacttttctctgtatgttttcataccatgggatttttggatatcagtgtattttggttcttgaaatagcctaatagctgctcacacattgggtaggaatattataccaatgtcatccccaaaggaagggtgagctgaatggaaattaagcccagtcattttatttgatctattagctctgttatcagtgcatgatcacccagatcaccctcctcagcccacacagtgctgaaccatcttccctcctgttctccatggctattaatagtatagctaaatttagagtgcagagccagatataagtattttggaattatctcccagtttgtggtagaagctgactggaatacaggttgagtatctcttatccaaaatgctagggaccagaaaggtttcagattttttcagattttggaatacttaacagttgagcaccccaaatctgaaaggcttctgaacgtcatgtcagcactcaaaaaagtggattttggagcacttcaaatttcggatttttggatttgggatgctcatcctgtgtaggagaggctactcgattccatttaatgactgtcctagtcataatcatccaaagataaaagccaggtagatgttgaaagctctttccagggctgaaaaagtgttcttacgttctctgcatgtgactagcatcactgtggaaattaatgctctgttcttcactagaatgtagtaagtggttaaactgagctatcccccacctgatgactattggcatccatttgcaaggccaatggcctggattaagggttaggattatttgtagctagaaggtaattttatttctgtgaaactaattggctcatatttgaggttaggtgtggccttgaccttaccagtacatttatacccactaccagttgactagcccagataattgttaaatggtgcttcttttctgcttctcagtagacttccatgccattacaaaggaaatttgaattacctagtgtttgtatattccatgataactatgtataacttctgttacacagcttatgtattgttaacatttaagtgtaaaccatgccacagctaacacttaaaaatgaaaactaattagttcttgcttagggaaaatgccaggtatgaagtatggcatatacttgacactgtcctgtgtaaccctttactttgctcaggctttcaagattgagtcttttttcccccaaattaggttaacatgcatttgaccccaacctgtggggtttgagtaagctggaaatctgtgacggtaggctttctagtgtcacgaggtggtggtgactgaaggaaaagctgggatcacaggttccttctgatggagaggaaggtttatttctatgcccctcccaccaccctccacctagagctcacccaagcctgctccagtcccaggggcaggccattctgcaaaagcaggacctcacagaaacaagggctgggttgaggtcacccccttcagagttggttcctggccagatgggtaagaggcatttgtaattttaaaaatgtgaaacttgggtttggtgttttcttctaagtgcctaaataagcaagccaggctgttgatattttagccagagaaatcggcaagccaagattaacccgaatctgaagtttagaatcttgagtttgcatctgcatcatatcatgctgttttgatgaggaaacatttgccactgaggagttggagggagggcaagacgacagtgttaagtcagatcatttaatggtttcccctaagccctggaaaaatatttgaaagaatggcagcaaaaaggttaagaaagcaagccagatttactgcacaatatgcagtacccagtactactttaaatcccaagagaacagtgtgatgtctaatatatacaggtctatgaaaatactgtggaataagcccaggaaggttagatgtgtttgcaaataagttgcccaaagggtccccctctaagtaaaacaaatattcagaccacaggctttaatgtaaactgtcaaaaagtgggatgtggaggatttttgttaagtgtcaatcgaagttaaaaagcaagggtttttggccaggcgtggtggctcacgcctgtaatcccagcactttgggaggccgaggccggcaaatcacctaaggtcaggagttcgagaccagcctggccaacatggtgaaaccccgtctctactaaaaaaaaaaaaaaaa

SEQ ID NO: 3850 - protein, 253 aa, Homo sapien
MNVHRGSDSDRLLRQEASCLVDDTLAVAQEKEANSLASSGPHNLTYPLGPRNEGALLHELSNDGAHKQFDHYLEELILPIMVGCAKKGERECHIVVLTDEDSVDWDEDHPPPMGEEYSQILYSSKLYRFFKYIENRDVAKTVLKERGLKNIRIGIEGYPTCKEKIKRRPGGRSEVIYNYVQRPFIQMSWEKEEGKSRHVDFQCVRSKSLTNLVAAGDDVLEDQEILMHHPPQVDELDRLNAPLSQMASNDFQD

SEQ ID NO: 3851 - DNA, 936 bp, Homo sapien
ctcggtgtaaacaagtccaggcgcctgcgaacccgggcccgggggggacggcgcccgccaggagcgccccccactcccaggccagcccaccccggcggaccgggccccgcgcgcccaggcgaggcactgggctccctctgctccccgtgggccgctccccgcgtggggccactgcccccggcccccgccatggtgcggatttcaaagcccaagacgtttcaggcctacttggatgattgtcaccggaggtatagctgtgcccactgccgcgctcacctggccaaccacgacgacctcatctccaagtccttccagggcagtcaggggcgtgcctacctcttcaactcagtggtgaacgtgggctgcgggccagccgaggagcgggtgctgctgaccggcctccatgctgtcgccgacatccactgcgagaactgcaagaccactttgggctggaaatatgaacaggcctttgagagcagccagaagtacaaagaggggaagtacatcattgaactcaaccacatgatcaaagacaacggctgggactgacccccgctcccccgacgcatgtggctccagcccggcctggccgccagggagcgccactggcttcccgccacccgaagggagctttggaccctcagagcccctgcagaggacggatctagctcctgtatatatattttattgcatgcactgtgaccttggggggagaacagaagggggaagacgcccccgcacctcctgcgatctggctggcttggatttcgtttttaacccgttcctgccccacctgccctatagttatggcctgtgttttgctctcctggtcccagtgcaccgtttgctttgtgaactcctcccaccaggccctttttaccccacgggtgtctgtccccctcgttttgtagcgtttgtacataataaaacaatgga

SEQ ID NO: 3852 - protein, 119 aa, Homo sapien
MVRISKPKTFQAYLDDCHRRYSCAHCRAHLANHDDLISKSFQGSQGRAYLFNSVVNVGCGPAEERVLLTGLHAVADIHCENCKTTLGWKYEQAFESSQKYKEGKYIIELNHMIKDNGWD

SEQ ID NO: 3853 - DNA, 1343 bp, Homo sapien
agaagggaaggtagacatcaggttctccctggagacttttcgttttcatttacgctgcggaaactgacgtttttgcctaacaccccatgtaatgtaaacgtataggcttgagtacgtgtccggccgcatgtgtagtgaaccctaaagctttcctaattgtagttagcatcgtccctaagcggaacgattttccgtgaacatgatttgtacttttctacgagccgtacagtatacggagaagctgcacaggtcctcggcaaagcgattgcttttgccatacatcgtgcttaacaaagcgtacttgaagactgagcccagtttgagatgtgggcttcaatatcaaaagaaaacgctgcgacctagatgtattcttggagtcacccagaaaaccatctggacgcagggaccgagcccccgaaaagcaaaggaggatggcagcaaacaagtgtctgtgcacaggagtcagagagggggaaccgccgtcccaacatcacaaaaagtgaaagaagccggaagagattttacctatttaatagtggtgctttttggaatcagcattacaggtggcttgttttacacgattttcaaagaacttttttcttcatccagtcctagcaagatatatgggagagccttagaaaaatgcagatcacatcctgaggtgatcggtgtctttggtgagtctgttaaaggctatggggaggtgacaaggcggggtcgccggcagcatgtcaggttcactgaatatgtaaaagatgggctgaaacacacgtgtgtgaaattctacattgagggctctgagccagggaagcaaggaacggtgtatgcgcaagtgaaagagaacccaggaagtggtgaatatgattttcgatatatatttgtagaaattgaatcttatcctagaagaactattatcattgaagataatcgatcccaagatgattaataatcaagcaagcaggtttctgatggatgttgaatggcgtggactcgctactccgttcttcacagctgccttccagaatgtgttcaaaagaaagacaagaaggagtgtatggcttataaagtgaatctaatacagtatttgttgcatttaaacaaactagacattttcttacggaaaaattatgaaatacagcatattttatgttctcccattgactcaatcatgacaatatttctgctttaacaccatctttcgtgattagaaatgtttgttattggaaatgttacaccatgtaaataaaggaaatagattttagtattgtattcattttatattatagaactgcataatgtctgcagaataaaattaaaactaacaaataaaaaaaaaaaaaaaa

SEQ ID NO: 3854 - protein, 248 aa, Homo sapien
MICTFLRAVQYTEKLHRSSAKRLLLPYIVLNKAYLKTEPSLRCGLQYQKKTLRPRCILGVTQKTIWTQGPSPRKAKEDGSKQVSVHRSQRGGTAVPTSQKVKEAGRDFTYLIVVLFGISITGGLFYTIFKELFSSSSPSKIYGRALEKCRSHPEVIGVFGESVKGYGEVTRRGRRQHVRFTEYVKDGLKHTCVKFYIEGSEPGKQGTVYAQVKENPGSGEYDFRYIFVEIESYPRRTIIIEDNRSQDD

SEQ ID NO: 3855 - DNA, 2000 bp, Homo sapien
ctgcacggagtgtccactgttcacggaccaggccacggtagagcgctttgggaaggagcacgcagtcatcatcctcaaccacaacttcgagatcgacttcctctgtgggtggaccatgtgtgagcgcttcggagtgctggggagctccaaggtcctcgctaagaaggagctgctctacgtgcccctcatcggctggacgtggtactttctggagattgtgttctgcaagcggaagtgggaggaggaccgggacaccgtggtcgaagggctgaggcgcctgtcggactaccccgagtacatgtggtttctcctgtactgcgaggggacgcgcttcacggagaccaagcaccgcgttagcatggaggtggcggctgctaaggggcttcctgtcctcaagtaccacctgctgccgcggaccaagggcttcaccaccgcagtcaagtgcctccgggggacagtcgcagctgtctatgatgtaaccctgaacttcagaggaaacaagaacccgtccctgctggggatcctctacgggaagaagtacgaggcggacatgtgcgtgaggagatttcctctggaagacatcccgctggatgaaaaggaagcagctcagtggcttcataaactgtaccaggagaagggacgcgctccaggagatatataatcagaagggcatgtttccaggggagcagtttaagcctgcccggaggccgtggaccctcctgaacttcctgtcctgggccaccattctcctgtctcccctcttcagtttcgtcttgggcgtctttgccagcggatcacctctcctgatcctgactttcttggggtttgtgggagcagcttcctttggagttcgcagactgataggagtaactgagatagaaaaaggctccagctacggaaaccaagagtttaagaaaaaggaataattaatggctgtgactgaacacacgcggccctgacggtggtatccagttaactcaaaaccaacacacagagtgcaggaaaagacaattagaaactatttttcttattaactggtgactaatattaacaaaacttgagccaagagtaaagaattcagaaggcctgtcaggtgaagtcttcagcctcccacagcgcagggtcccagcatctccacgcgcgcccgtgggaggtgggtccggccggagaggcctcccgcggacgccgtctctccagaactccgcttccaagagggagcctttggctgctttctctccttaaacttagatcaaattttttggtttttaatcagttatcttgggaacttaacctggcccctcacctcttctgcaccccccgcccccgaaactgtctcgtaatgaatttctgctgtcctcctgggagtggacggccgggtcccgtcccccgggagcatcgctcggctcagcaccttggctcccagtgggggccccgtggagggcgcccgtagtgataagcacaccggcacgaacgtcaggtccattcctcgaagtcggagccctcactctgcctgtcctggggctggctgagggcgaacgccccacctcactttctagagccctgtctgtcctagctcctatctgaccttgtgtgtaaatacgtacatctgtttttaaagtggatgggcccctgagaactcagtgaaatgcagagttctccatgcacctaaagcttctttgtcgctctcatggctgtcagatcctggtccctccacactgggtgctggggagggaggaccctcggggctaccgcgcgcccccccatcccacagatcaggagccaaggagggagaacagggcagcctgtgggactctaggatgcttcagaagaagcgacggcaccgtcaacccctctgttttttaaaggtggttggagactgttaacactgagctcattgacttctagagattttatttttactggttgatctcttggtggttttcaacttcctgctggaaactagaggtggggcaccccccaccccccagcctcgcactgtg

SEQ ID NO: 3856 - protein, 111 aa, Homo sapien
MKRKQLSGFINCTRRRDALQEIYNQKGMFPGEQFKPARRPWTLLNFLSWATILLSPLFSFVLGVFASGSPLLILTFLGFVGAASFGVRRLIGVTEIEKGSSYGNQEFKKKE

SEQ ID NO: 3857 - DNA, 729 bp, Homo sapien
ctccaacgctgggtgacattgagctcaccagcgccaccgtccccggcgaagttctgcgctggtcggcggagtagcaagtggccatggggagcctcagcggtctgcgcctggcagcaggaagctgttttaggttatgtgaaagagatgtttcctcatctctaaggcttaccagaagctctgatttgaagagaataaatggattttgcacaaaaccacaggaaagtcccggagctccatcccgcacttacaacagagtgcctttacacaaacctacggattggcagaaaaagatcctcatatggtcaggtcgcttcaaaaaggaagatgaaatcccagagactgtctcgttggagatgcttgatgctgcaaagaacaagatgcgagtgaagatcagctatctaatgattgccctgacggtggtaggatgcatcttcatggttattgagggcaagaaggctgcccaaagacacgagactttaacaagcttgaacttagaaaagaaagctcgtctgaaagaggaagcagctatgaaggccaaaacagagtagcagaggtatccgtgttggctggattttgaaaatccaggaattatgttataacgtgcctgtattaaaaaggatgtggtatgaggatccatttcataaagtatgatttgcccaaacctgtaccatttccgtatttctgctgtagaagtagaaataaattttcttaaataaaaaaaaaaaaaaa

SEQ ID NO: 3858 - protein, 154 aa, Homo sapien
MGSLSGLRLAAGSCFRLCERDVSSSLRLTRSSDLKRINGFCTKPQESPGAPSRTYNRVPLHKPTDWQKKILIWSGRFKKEDEIPETVSLEMLDAAKNKMRVKISYLMIALTVVGCIFMVIEGKKAAQRHETLTSLNLEKKARLKEEAAMKAKTE

SEQ ID NO: 3859 - DNA, 3327 bp, Homo sapien
tccagcaccaaagcggccgttctcggattccggagcgttctggagccccgagagacgccccggggttctagaagctccccggcggcgcccagtcccggcttcattcgggcgtccctccgaaacccactcgggtgcacgggtcgtcggcgagccgcgaccgggtcctggcgcgcaccatgatcgtggcggactccgagtgccgcgcagagctcaaggactacctgcggttcgccccgggcggcgtcggcgactcgggccccggagaggagcagagggagagccgggctcggcgaggccctcgagggcccagcgccttcatccccgtggaggaggtccttcgggagggggctgagagcctcgagcagcacctggggctggaggcactgatgtcctctgggcgagtagacaacctggcagtggtgatgggcctgcaccctgactactttaccagcttctggcgcctgcactacctgctgctgcacacggatggtcccttggccagctcctggcgccactacattgccatcatggctgccgcccgccatcagtgttcttacctggtaggctcccacatggccgagtttctgcagactggtggtgaccctgagtggctgctgggcctccaccgggcccccgagaagctgcgcaaactcagcgagatcaacaagttgctggcgcatcggccatggctcatcaccaaggaacacatccaggccttgctgaagaccggcgagcacacttggtccctggccgagctcattcaggctctggtcctgctcacccactgccactcgctctcctccttcgtgtttggctgtggcatcctccctgagggggatgcagatggcagccctgccccccaggcacctacaccccctagtgaacagagcagccccccaagcagggacccgttgaacaactctgggggctttgagtctgcccgcgacgtggaggcgctgatggagcgcatgcagcagctgcaggagagcctgctgcgggatgaggggacgtcccaggaggagatggagagccgctttgagctggagaagtcagagagcctgctggtgaccccctcagctgacatcctggagccctctccacacccagacatgctgtgctttgtggaagaccctactttcggatatgaggacttcactcggagaggggctcaggcaccccctaccttccgggcccaggattatacctgggaagaccatggctactcgctgatccagcggctttaccctgagggtgggcagctgctggatgagaagttccaggcagcctatagcctcacctacaataccatcgccatgcacagtggtgtggacacctccgtgctccgcagggccatctggaactatatccactgcgtctttggcatcagatatgatgactatgattatggggaggtgaaccagctcctggagcggaacctcaaggtctatatcaagacagtggcctgctacccagagaagaccacccgaagaatgtacaacctcttctggaggcacttccgccactcagagaaggtccacgtgaacttgctgctcctggaggcgcgcatgcaagccgctctgctgtacgccctccgtgccatcacccgctacatgacctgactcctgagcaggacctgggcccggttcagctccccacaaggacttctctgtctggagacagccccagacccttttgtgtcccatgcccaccctccccacgctgcagtgggcttgtgtgtgatgtgcagtcccgaagccacaccctcccttttcctcactggaatggacagttcattgcactgactctgggatctcagccctgctcctgggagctggaagagcacttggagatcctaagggaccacacccttcctccttcccctgcccacagaggcagagggcacaggaaagaagccgggccaagctcggaattaatgtgccacaagtgttgtggccttcctgaactgggaagtccctggctggcccccgggggagaggggcaaatgcctccgggactgacactccaggcagctttgccttctctcccctgtcatttccagatttcattacctcctacttgccattcacccatcaatgtgaaagtcagggtcacagctggtctgtgtgtccagttccctaaaagcctgttctgttgggcagcctgaggctgttgcccgaatcctagttcagttttttgacttcctttgccctttttcccttttctccatgcttaatggtgtgaggcgtcaggagagaggccaagtacataaaaaaaaaaaaaagcagattatctctagagagtttgagcctttgctggtcacattgccttctgaagaggagggagtattagattataaatcctctttattttggtcctttatgcttgaggttccaacctggagccacagtgtgtgagaggaggaggagagggagaattctgttctcccagagctgcacctgcctcgcagaggccagcaccccactctcctgcctccagtggccctgccgcagatgtctcccaaaaagttgagcctttctagatggcttaggtggcaccatggctcagcaggaggggcgggaggcaccagggttcttgtttggaccctgcccctgggccatggccaggtgaccatggctacattgccaaacctctgactgccacagctgcagactgagagggtgggtctgagtccccacaatgtctgaagctgcccctgggattctcaggccaacctgccaacagcaagcggattttcttgcaagatcagggaccccatttctgcagccagtgtctcctgggtgccttctgaggactcccacccccatcccagtatctcatctgtcccctctcctggggcttaagtgggttgcttccaggcagaagcagccaaggaccgattccaggcactttctgtagcaaatgactgtgaattacgacttctcttgcccttcttctagcagtctgtgcctcctctctgaccagtttggagggcactgaagaaaggcaagggccgtgctgctgctgggcggggcaggagaggagcctggccagtgtgccacattaaatacccgtgcaggcgcggagaagcaaccggcacccccttccggcctgaaagccctccctgcaagaaggtgtgcaggagagaagaggccccggcatggggatctgggttctagagggcatgtgatgactgtaaatgttcactgggtgggtagggagtggtatccagtgttcaagtgcagaaatctttggctttgctaccagttccatatgatgagaaataaacgttcgctgaggttttgtttcataaaaaaaaaaaaaaaaaaa

SEQ ID NO: 3860 - protein, 480 aa, Homo sapien
MIVADSECRAELKDYLRFAPGGVGDSGPGEEQRESRARRGPRGPSAFIPVEEVLREGAESLEQHLGLEALMSSGRVDNLAVVMGLHPDYFTSFWRLHYLLLHTDGPLASSWRHYIAIMAAARHQCSYLVGSHMAEFLQTGGDPEWLLGLHRAPEKLRKLSEINKLLAHRPWLITKEHIQALLKTGEHTWSLAELIQALVLLTHCHSLSSFVFGCGILPEGDADGSPAPQAPTPPSEQSSPPSRDPLNNSGGFESARDVEALMERMQQLQESLLRDEGTSQEEMESRFELEKSESLLVTPSADILEPSPHPDMLCFVEDPTFGYEDFTRRGAQAPPTFRAQDYTWEDHGYSLIQRLYPEGGQLLDEKFQAAYSLTYNTIAMHSGVDTSVLRRAIWNYIHCVFGIRYDDYDYGEVNQLLERNLKVYIKTVACYPEKTTRRMYNLFWRHFRHSEKVHVNLLLLEARMQAALLYALRAITRYMT

SEQ ID NO: 3861 - DNA, 3290 bp, Homo sapien
cgtccagcggtcgtgttgccatgggccggaggagagccccggccggtgggtcgctgggacgggcccttatgcgccatcagactcagcggagccgaagccatcgtcacactgactcctggttgcacacaagtgaactcaatgatggctatgattggggtcgtcttaatcttcagtcagtgactgaacagagctcccttgatgacttccttgctactgcagaacttgcaggaacagagtttgtagctgaaaaacttaatattaagtttgtgcctgctgaggctagaactggactactgtctttcgaggagagccagagaattaagaagctccatgaagaaaacaaacagttcttgtgtataccgaggagaccaaactggaaccaaaatactaccccagaagaactcaaacaagcagagaaagataactttctagaatggagacgtcagcttgtccggctagaagaggaacagaagctgatattgactccatttgaacgaaatttggacttttggcgccagctctggagagtcattgagagaagtgatattgtggtccagatagtagatgctcgaaacccactcctgtttagatgtgaggatttggaatgttatgtgaaagaaatggatgccaataaggagaacgtcattctgatcaacaaggcagacttgctgactgctgagcagcggagtgcctgggccatgtacttcgaaaaagaagatgtgaaggttattttctggtcagctttggccggagccattcccctgaatggtgactctgaggaagaggcaaacagagatgatagacaaagcaacacaactgagtttggacattccagtttcgaccaggctgaaatttcccacagtgaatccgaacatctcccagctagggattctccttcacttagtgaaaatcccacaacggatgaagatgacagtgagtatgaggactgtccagaggaggaggaagacgactggcagacgtgctcagaagaagacggtcccaaggaagaggactgcagccaggactggaaggaaagctctactgcagattctgaggctcggagcaggaaaaccccacagaagaggcagatacacaattttagccatctggtatccaagcaggagttactggagctctttaaggagctacacactgggagaaaggtgaaagatgggcaacttacggtcggactggtgggctaccctaatgttggtaagagttcaacaatcaacaccatcatgggcaacaagaaagtatctgtgtctgccacacctggtcacacaaagcactttcagactctctatgtggagcctggcctctgcctgtgtgactgtcctggcttggtgatgccatcttttgtgtctaccaaggcagaaatgacttgcagcggaatcctcccaattgatcagatgagagatcatgttcctcctgtatcactagtttgccagaatattccaagacatgttttagaagctacctatggcattaacatcataacgcctagagaggatgaagatccccaccgacctccaacatcggaagaactgttgacagcttatggatacatgcgaggattcatgacagcgcatggacagccagaccagcctcgatctgcgcgctacatcctgaaggactatgtcagtggtaagctgctgtactgccatcctcctcctggaagagatcctgtaacttttcagcatcaacaccagcgactcctagagaacaaaatgaacagtgatgaaataaaaatgcagctaggcagaaataaaaaagcaaagcagattgaaaatatcgttgacaaaacttttttccatcaagagaatgtgagggctttgaccaaaggagtccaggctgtgatgggttacaagcccgggagtggtgtagtgactgcatccactgcgagctctgagaacggggcggggaagccctggaaaaaacatggcaacagaaataaaaaagaaaaaagtcgtagactctacaagcacctggatatgtgaggttgggctgcaacagaaatgtcatctgcattgtgcagatggaaaagagcagaagctgcctgttgcctgtggaactgtcccaagacactagcactgtagaacgggccctgctcttgcagagcacggctgcacccaacagtctccatgtcaagaccaagggcctcctggaaacaccagctctgacaaaaaggagtcatctgggagcccgagaatcctactcctggccgggcacagtggctcacgcaccaacatggagaaaccccgtctctactaaaaatacaaaaaaattagccaggcgtggtggcgcgcacctgtaatcccagctactcgggaggctgaggcaggagaatcacttgaaccagggaggcagagtttgcagtgaatggagattgcgccgctgcactccagcctgggcgacagagtgagactgcatcacaagaaaaaaaatttgcaagggatggttcacgagacacatttgggacgaaggtgaaagagaaattccccattctgagtgtcctagttgggttcctccgactctaaacaagggacttgggttcagttagtgtacagcgggggctcacgtccactaaggaacatgtagaatgtaaccaccgggtgacagggaagctgcggtatttactacctagcccccatcttcactggttattccacttatttaaaatgtccagaataagcaaatctccatatagaggaagtagattagtggttgcttcgggatgggaggaatgggaagattgaggtctttcttttgcagtgataaaaatgtcctaaaattgactgtagcgatggtcacacaactctgaatatgcttaagaccattgaattacacactttacgttggtgaattgtatggtatgtaaattatagttcaataacatagttacaaaagataatcaaaagcatgaaagcactattgatgtggtttggatctgtgtcctcaccgagtctcatgttgaaatgtaagccccctggtgggaggcgatgggattatggggcagagtcctcacaaacggtttagcaccacccgctcagtgctgttctcctgatattgagtcctcatcacatctggttgcttcaaagtgtgtggtgcctcccctctgtctccctcctgctctggccatataagatgtgcctgcttctccttcgccttctaacatgattgtaagtttcctgaggcctccctagaagcaaaagctgctgtgcttcctgtaccatctactggaccgtgagccaattaaacctcttttctttataaaaaaaaaaaaaaaaagg

SEQ ID NO: 3862 - protein, 658 aa, Homo sapien
MGRRRAPAGGSLGRALMRHQTQRSRSHRHTDSWLHTSELNDGYDWGRLNLQSVTEQSSLDDFLATAELAGTEFVAEKLNIKFVPAEARTGLLSFEESQRIKKLHEENKQFLCIPRRPNWNQNTTPEELKQAEKDNFLEWRRQLVRLEEEQKLILTPFERNLDFWRQLWRVIERSDIVVQIVDARNPLLFRCEDLECYVKEMDANKENVILINKADLLTAEQRSAWAMYFEKEDVKVIFWSALAGAIPLNGDSEEEANRDDRQSNTTEFGHSSFDQAEISHSESEHLPARDSPSLSENPTTDEDDSEYEDCPEEEEDDWQTCSEEDGPKEEDCSQDWKESSTADSEARSRKTPQKRQIHNFSHLVSKQELLELFKELHTGRKVKDGQLTVGLVGYPNVGKSSTINTIMGNKKVSVSATPGHTKHFQTLYVEPGLCLCDCPGLVMPSFVSTKAEMTCSGILPIDQMRDHVPPVSLVCQNIPRHVLEATYGINIITPREDEDPHRPPTSEELLTAYGYMRGFMTAHGQPDQPRSARYILKDYVSGKLLYCHPPPGRDPVTFQHQHQRLLENKMNSDEIKMQLGRNKKAKQIENIVDKTFFHQENVRALTKGVQAVMGYKPGSGVVTASTASSENGAGKPWKKHGNRNKKEKSRRLYKHLDM

SEQ ID NO: 3863 - DNA, 3869 bp, Homo sapien
gagccggtggcgcaggtgtcggggtcctcgagcgcccagcctgggagcatgattgtggacaagctgctggacgacagccgcggcggagaggggctgcgggacgcggcgggcggctgcggcctcatgaccagcccgctcaacctgagctacttctacggcgcgtcgccgcccgccgccgccccgggcgcctgcgacgccagctgctcggtcttgggcccctcggcgcccggctcgcccggctccgactcctccgacttctcctctgcctcgtcggtgtcctcctgcggcgccgtggagtcccggtcgagaggcggcgcccgcgccgagcgccagccagttgagccccatatgggggttggcaggcagcagagaggcccctttcaaggtgttcgggtaaagaactcagtgaaggaactcctgttgcacatccgaagtcataaacagaaggcttctggccaagctgtggatgattttaagacacaaggtgtgaacatagaacagttcagagaattgaagaacacagtatcatacagtgggaaaaggaaagggcccgattcgttgtctgatggacctgcttgcaaaaggccagctctgttgcattcccaatttttgacaccacctcaaacaccaacgcccggggagagcatggaagatgttcatctcaatgaacccaaacaggagagcagtgctgatctgcttcagaacattatcaacattaagaatgaatgcagccccgtttccctgaacacagttcaagttagctggctgaaccccgtggtggtccctcagagctcccccgcagagcagtgtcaggacttccatggagggcaggtcttttctccacctcagaaatgccaaccattccaagtcaggggctcccaacaaatgatagaccaggcttccctgtaccagtattctccacagaaccagcatgtagagcagcagccacactacacccacaaaccaactctggaatacagtccttttcccatacctccccagtcccccgcttatgaaccaaacctctttgatggtccagaatcacagttttgcccaaaccaaagcttagtttcccttcttggtgatcaaagggaatctgagaatattgctaatcccatgcagacttcctccagtgttcagcagcaaaatgatgctcacttgcacagcttcagcatgatgcccagcagcgcctgtgaggccatggtggggcacgagatggcctctgactcttcaaacacttcactgccattctcaaacatgggaaatccaatgaacaccacacagttagggaaatcactttttcagtggcaggtggagcaggaagaaagcaaattggcaaatatttcccaagaccagtttctttcaaaggatgcagatggtgacacgttccttcatattgctgttgcccaagggagaagggcactttcctatgttcttgcaagaaagatgaatgcacttcacatgctggatattaaagagcacaatggacagagtgcctttcaggtggcagtggctgccaatcagcatctcattgtgcaggatctggtgaacatcggggcacaggtgaacaccacagactgctggggaagaacacctctgcatgtgtgtgctgagaagggccactcccaggtgcttcaggcgattcagaagggagcagtgggaagtaatcagtttgtggatcttgaggcaactaactatgatggcctgactccccttcactgtgcagtcatagcccacaatgctgtggtccatgaactccagagaaatcaacagcctcattcacctgaagttcaggagcttttactgaagaataagagtctggttgataccattaagtgcctaattcaaatgggagcagcggtggaagcgaaggatcgcaaaagtggccgcacagccctgcatttggcagctgaagaagcaaatctggaactcattcgcctctttttggagctgcccagttgcctgtcttttgtgaatgcaaaggcttacaatggcaacactgccctccatgttgctgccagcttgcagtatcggttgacacaattagatgctgtccgcctgttgatgaggaagggagcagacccaagtactcggaacttggagaacgaacagccagtgcatttggttcccgatggccctgtgggagaacagatccgacgtatcctgaagggaaagtccattcagcagagagctccaccgtattagctccattagcttggagcctggctagcaacactcactgtcagttaggcagtcctgatgtatctgtacatagaccatttgccttatattggcaaatgtaagttgtttctatgaaacaaacatatttagttcactattatatagtgggttatattaaaagaaaagaagaaaaatatctaatttctcttggcagatttgcatatttcatacccaggtatctgggatctagacatctgaatttgatctcaatggtaacattgccttcaattaacagtagcttttgagtaggaaaggactttgatttgtggcacaaaacattattaatatagctattgacagtttcaaagcaggtaaattgtaaatgtttctttaagaaaaagcatgtgaaaggaaaaaggtaaatacagcattgaggcttcatttggccttagtccctgggagttactggcgttggacaggcttcagtcattggactagatgaaaggtgtccatggttagaatttgatctttgcaaactgtatataattgttatttttgtccttaaaaatattgtacatacttggttgttaacatggtcatatttgaaatgtataagtccataaaatagaaaagaacaagtgaattgttgctatttaaaaaaattttacaattcttactaaggagtttttattgtgtaatcactaagtctttgtagataaagcagatggggagttacggagttgttcctttactggctgaaagatatattcgaattgtaaagatgctttttctcatgcattgaaattatacattatttgtagggaattgcatgcttttttttttttttctcccgagacagggtcttgctctggcgcccaggctggagtacagtggcatgatcttggctcacttcagccttgacttgggctcaagtgatcctcctacctgagccttctgagtaactgggactacaggtgtgcactcctcgcctggctaattttttattttttgtacaggcaggatcttgccaccttgcccaggctggtcttgaactcctgagctcatgccatctgcctgccttagtctcccaaaatgctgggattacaggagtgagccaccatgcccggctggcagttgcatggaagagaacacctctttatggcttaccctctagaatttctaatttatgtgttctgttgaaatttttgtttttttacctttattgaaacaacaaaaagtcagtattgaaacatatcttcctgttttctgttgtcaaatgatgataatgtgccatgatgttttatatatatcattcagaaaaagttttattttttaataacattctattaacattattttgcttgccgctggcatgcctgaggaatgtatttggctttgattacacactaagtttttgtaataaatttgactcattaaaaaccttttttttttaaaaaaaaaaaaaagaaaatctcattagtgaacttatctttgcagctgagtacttaaattctttttaaaaagataccctttggattgatcacattgtttgacccagtatgtcttgtagacacgttagttataatcaccttgtatctctaaatatggtgtgatatgaaccagtccattcacattggaaaaactgatggttttaaataaactaattcactaataaaaaaaaaaaaaaa

SEQ ID NO: 3864 - protein, 718 aa, Homo sapien
MIVDKLLDDSRGGEGLRDAAGGCGLMTSPLNLSYFYGASPPAAAPGACDASCSVLGPSAPGSPGSDSSDFSSASSVSSCGAVESRSRGGARAERQPVEPHMGVGRQQRGPFQGVRVKNSVKELLLHIRSHKQKASGQAVDDFKTQGVNIEQFRELKNTVSYSGKRKGPDSLSDGPACKRPALLHSQFLTPPQTPTPGESMEDVHLNEPKQESSADLLQNIINIKNECSPVSLNTVQVSWLNPVVVPQSSPAEQCQDFHGGQVFSPPQKCQPFQVRGSQQMIDQASLYQYSPQNQHVEQQPHYTHKPTLEYSPFPIPPQSPAYEPNLFDGPESQFCPNQSLVSLLGDQRESENIANPMQTSSSVQQQNDAHLHSFSMMPSSACEAMVGHEMASDSSNTSLPFSNMGNPMNTTQLGKSLFQWQVEQEESKLANISQDQFLSKDADGDTFLHIAVAQGRRALSYVLARKMNALHMLDIKEHNGQSAFQVAVAANQHLIVQDLVNIGAQVNTTDCWGRTPLHVCAEKGHSQVLQAIQKGAVGSNQFVDLEATNYDGLTPLHCAVIAHNAVVHELQRNQQPHSPEVQELLLKNKSLVDTIKCLIQMGAAVEAKDRKSGRTALHLAAEEANLELIRLFLELPSCLSFVNAKAYNGNTALHVAASLQYRLTQLDAVRLLMRKGADPSTRNLENEQPVHLVPDGPVGEQIRRILKGKSIQQRAPPY

SEQ ID NO: 3865 - DNA, 3869 bp, Homo sapien; identical to SEQ ID NO: 3863

SEQ ID NO: 3866 - protein, 718 aa, Homo sapien; identical to SEQ ID NO: 3864

SEQ ID NO: 3867 - DNA, 3243 bp, Homo sapien
gggcttcgtgttcctgggtgctgaccgtgcactccccgccgcccgaggacttagagctctggaagtagctctccagcttccttcgtactcgggggccggacttgtacacccgcacgaggagcggggacggcgggcgcagaagtgggccaccatatctggaaactacagtctatgctttgaagcgcaaaagggaataaacatttaaagactcccccggggacctggaggatggacttttccatggtggccggagcagcagcttacaatgaaaaatcaggtaggattacctcgctctcactcttgtttcagaaagtctttgctcagatctttcctcagtggagaaaggggaatacagaagaatgtctcccctacaagtgctcagagactggtgctcttggagaaaactatagttggcaaattcccattaaccacaatgacttcaaaattttaaaaaataatgagcgtcagctgtgtgaagtcctccagaataagtttggctgtatctctaccctggtctctccagttcaggaaggcaacagcaaatctctgcaagtgttcagaaaaatgctgactcctaggatagagttatcagtctggaaagatgacctcaccacacatgctgttgatgctgtggtgaatgcagccaatgaagatcttctgcatgggggaggcctggccctggccctggtaaaagctggtggatttgaaatccaagaagagagcaaacagtttgttgccagatatggtaaagtgtcagctggtgagatagctgtcacgggagcagggaggcttccctgcaaacagatcatccatgctgttgggcctcggtggatggaatgggataaacagggatgtactggaaagctgcagagggccattgtaagtattctgaattatgtcatctataaaaatactcacattaagacagtagcaattccagccttgagctctgggatttttcagttccctctgaatttgtgtacaaagactattgtagagactatccgggttagtttgcaagggaagccaatgatgagtaatttgaaagaaattcacctggtgagcaatgaggaccctactgttgctgcctttaaagctgcttcagaattcatcctagggaagagtgagctgggacaagaaaccaccccttctttcaatgcaatggtcgtgaacaacctgaccctccagattgtccagggccacattgaatggcagacggcagatgtaattgttaattctgtaaacccacatgatattacagttggacctgtggcaaagtcaattctacaacaagcaggagttgaaatgaaatcggaatttcttgccacaaaggctaaacagtttcaacggtcccagttggtactggtcacaaaaggatttaacttgttctgtaaatatatataccatgtactgtggcattcagaatttcctaaacctcagatattaaaacatgcaatgaaggagtgtttggaaaaatgcattgagcaaaatataacttccatttcctttcctgcccttgggactggaaacatggaaataaagaaggaaacagcagcagagattttgtttgatgaagttttaacatttgccaaagaccatgtaaaacaccagttaactgtaaaatttgtgatctttccaacagatttggagatatataaggctttcagttctgaaatggcaaagaggtccaagatgctgagtttgaacaattacagtgtcccccagtcaaccagagaggagaaaagagaaaatgggcttgaagctagatctcctgccatcaatctgatgggattcaacgtggaagagatgtgtgaggcccacgcatggatccaaagaatcctgagtctccagaaccaccacatcattgagaataatcatattctgtaccttgggagaaaggaacatgacattttgtctcagcttcagaaaacttcaagtgtctccatcacagaaattatcagcccaggaaggacagagttagagattgaaggagcccgggctgacctcattgaggtggttatgaacattgaagatatgctttgtaaagtacaggaggaaatggcaaggaaaaaggagcgaggcctttggcgctcgttaggacagtggactattcagcaacaaaaaacccaagacgaaatgaaagaaaatatcatatttctgaaatgtcctgtgcctccaactcaagagcttctagatcaaaagaaacagtttgaaaaatgtggtttgcaggttctaaaggtggagaagatagacaatgaggtccttatggctgcctttcaaagaaagaagaaaatgatggaagaaaaactgcacaggcaacctgtgagccataggctgtttcagcaagtcccataccagttctgcaatgtggtatgcagagttggctttcaaagaatgtactcgacaccttgcgatccaaaatacggagctggcatatacttcaccaagaacctcaaaaacctggcagagaaggccaagaaaatctctgctgcagataagctgatctatgtgtttgaggctgaagtactcacaggcttcttctgccagggacatccgttaaatattgttcccccaccactgagtcctggagctatagatggtcatgacagtgtggttgacaatgtctccagccctgaaacctttgttatttttagtggcatgcaggctatacctcagtatttgtggacatgcacccaggaatatgtacagtcacaagattactcatcaggaccaatgagaccctttgcacagcatccttggaggggattcgcaagtggcagccctgttgattaatctctacatcattttaacagctggtatggccttaccttgggtgaactaaccaaataatgaccatcgatggctcaaagagtggcttgaatatatcccatgggttatctgtatggactgactgggttattgaaaggactagccacatactagcatcttagtgcctttatctgtctttatgtcttggggttggggtaggtagataccaaatgaaacactttcaggaccttccttcctcttgcagttgttctttaatctcctttactagaggagataaatattttgcatataatgaagaaatttttctagtatataacgcaggccttttattttctaaaatgatgatagtataaaaatgttaggataacagaatgattttagattttccagagaatattataaagtgctttaggtatgaaaataaatcatctttgtctgattaaaaaaaaaaaa

SEQ ID NO: 3868 - protein, 854 aa, Homo sapien
MDFSMVAGAAAYNEKSGRITSLSLLFQKVFAQIFPQWRKGNTEECLPYKCSETGALGENYSWQIPINHNDFKILKNNERQLCEVLQNKFGCISTLVSPVQEGNSKSLQVFRKMLTPRIELSVWKDDLTTHAVDAVVNAANEDLLHGGGLALALVKAGGFEIQEESKQFVARYGKVSAGEIAVTGAGRLPCKQIIHAVGPRWMEWDKQGCTGKLQRAIVSILNYVIYKNTHIKTVAIPALSSGIFQFPLNLCTKTIVETIRVSLQGKPMMSNLKEIHLVSNEDPTVAAFKAASEFILGKSELGQETTPSFNAMVVNNLTLQIVQGHIEWQTADVIVNSVNPHDITVGPVAKSILQQAGVEMKSEFLATKAKQFQRSQLVLVTKGFNLFCKYIYHVLWHSEFPKPQILKHAMKECLEKCIEQNITSISFPALGTGNMEIKKETAAEILFDEVLTFAKDHVKHQLTVKFVIFPTDLEIYKAFSSEMAKRSKMLSLNNYSVPQSTREEKRENGLEARSPAINLMGFNVEEMCEAHAWIQRILSLQNHHIIENNHILYLGRKEHDILSQLQKTSSVSITEIISPGRTELEIEGARADLIEVVMNIEDMLCKVQEEMARKKERGLWRSLGQWTIQQQKTQDEMKENIIFLKCPVPPTQELLDQKKQFEKCGLQVLKVEKIDNEVLMAAFQRKKKMMEEKLHRQPVSHRLFQQVPYQFCNVVCRVGFQRMYSTPCDPKYGAGIYFTKNLKNLAEKAKKISAADKLIYVFEAEVLTGFFCQGHPLNIVPPPLSPGAIDGHDSVVDNVSSPETFVIFSGMQAIPQYLWTCTQEYVQSQDYSSGPMRPFAQHPWRGFASGSPVD

SEQ ID NO: 3869 - DNA, 1580 bp, Homo sapien
ccgggccgcacccgccgagccgtgaaaaaaagtacatctcctggaagggatgctttttagctgagctctggtggatgagaggagctagccttgaaaaacttgatactgatggacattgtgtgggccagaggcagggatggttggctatgaccccaaaccagatggcaggaataacaccaagttccaggtggcagtggctgggtctgtgtctggacttgttactcgggcgctgatcagtcccttcgacgtcatcaagatccgtttccagcttcagcatgagcgcctgtctcgcagtgaccccagcgcaaagtaccatggcatcctccaggcctctaggcagattctgcaggaggagggtccgacagctttctggaaaggacacgtcccagctcagattctctccataggctatggagctgtccaattcttgtcatttgaaatgctgacggagctggtccacagaggcagcgtgtacgacgcccgggaattctcagtgcactttgtatgtggtggcctggctgcctgtatggccaccctcactgtgcaccccgtggatgttctgcgcacccgctttgcagctcagggtgagcccaaggtctataatacgctgcgccacgccgtggggaccatgtataggagcgaaggcccccaggttttctacaaaggcttggctcccaccttgatcgccatcttcccctacgccgggctgcagttctcttgctacagctccttgaagcacctgtacaagtgggccataccagccgaaggaaagaaaaatgagaacctccaaaacctgctttgtggcagtggagctggtgtcatcagcaagaccctgacatatccgctggacctcttcaagaagcggctacaggttggagggtttgagcatgccagagctgcctttggccaggtacggagatacaagggcctcatggactgtgccaagcaggtgctacaaaaggaaggcgccctgggcttcttcaagggcctgtcccccagcttgctgaaggctgccctctccacaggcttcatgttcttctcgtatgaattcttctgtaatgtcttccactgcatgaacaggacagccagccagcgctgagcgcaggaaggaccccaggtcttccctggaggcagcctcctgaaggaaggaagattcagtctccactgagaggtgccgtctggcccttccctgcaggccagctgccccaagcggggtagcagccttgaacccacccagctgggacaccaccagaaggtccagggctctccccatgagagaatcagagggaatgcaggacgtggtctatggtgagccaacgacacagtgagaaggagcaggaagttgctgtttctcctctgaccagcccacactgcaaaggaaacagacgccatcctacacctatcagccctgcctgccaggagaacagaacacactcctggtctggatggggctgctgcttgagtgcagagggctgcggtaggccctttgcaggagtcaggtccctacacttggcctgtttttccaacctatttaatagacattaaagctaaacacacaaaaaaaaaaaaaaaaaaaaaaa

SEQ ID NO: 3870 - protein, 320 aa, Homo sapien
MVGYDPKPDGRNNTKFQVAVAGSVSGLVTRALISPFDVIKIRFQLQHERLSRSDPSAKYHGILQASRQILQEEGPTAFWKGHVPAQILSIGYGAVQFLSFEMLTELVHRGSVYDAREFSVHFVCGGLAACMATLTVHPVDVLRTRFAAQGEPKVYNTLRHAVGTMYRSEGPQVFYKGLAPTLIAIFPYAGLQFSCYSSLKHLYKWAIPAEGKKNENLQNLLCGSGAGVISKTLTYPLDLFKKRLQVGGFEHARAAFGQVRRYKGLMDCAKQVLQKEGALGFFKGLSPSLLKAALSTGFMFFSYEFFCNVFHCMNRTASQR

SEQ ID NO: 3871 - DNA, 2978 bp, Homo sapien
tgtcaagtttgcagggtgcagcttggatgtggtgctagaaggggaagcctctgggctgagcatgtaggctcgtcagtagagttcaacccgcaggagtaaattactgcagtgggaaacaaccgcacccgcggcccagcaggggttccactgcgcagccgcaaaaggcgccgaggctccaccgcgcagccacagaaggcgccgaggctccaccgcgcagccgcaaaaagagcggacgggtctgcgccgccgcaggaggagcaggcggtacctggacgggttcgtcccgggctgtttcgcgtccggcctgaggcggctggggccgcgcaggtagtgtccctgcacttcttgcccgggcgcgtgaggccagctccgctgcgcttgtctccagcttccagccctcctcccctaagccgccgccatcatgctgctgcctgtgttcaccctgaaactgcgccacaaaatcagcccccgaatggtggccatagggcgctacgacgggactcacccgtgcctggcggccgccacccaaacgggcaaggtttttattcataatcctcatacacggaaccagcatgtcagtgcatccagggtcttccagagccccctggaatctgatgtttctcttctcagcattaaccaggcagtcagctgtctgactgcaggcgtattgaaccctgagcttggctatgatgcccttttagtggggacacagactaatcttttggcttatgatgtctacaataattcggatttgttctacagagaggtagcagatggggcaaatgcaattgtgctggggacattgggagacatttcttcccctcttgcgattattggtggcaattgtgctctgcaaggtttcaatcatgaaggaagtgatctcttttggacggttactggagacaatgttaattccttggccttgtgtgactttgatggtgatggaaagaaagagcttcttgttggatctgaggattttgatatccgagtttttaaggaagatgagattgtggcagaaatgacagaaacagagatagtcacctctctttgtcccatgtatggcagtcgatttggttatgccctttccaatggcacagttggagtttatgacaaaacatcccgatactggagaattaaatcgaaaaatcatgccatgagcattcatgcttttgaccttaattctgatggagtgaatgaactgataactggttggtccaatgggaaggttgatgctcgaagtgaccgaactggggaggtcatctttaaggacaatttttcttctgcaattgccggtgtggtagagggagattaccggatggatggccacatacagttaatctgctgctcagtggatggggaaatccggggctacctgcctggcacggctgagatgaggggcaacctcatggacaccagtgcagagcaggacctgatccgagagctgagtcagaagaagcagaatctgttgctggaactccgtaactatgaggaaaatgccaaggctgaattggccagtccactgaacgaggctgatgggcatcggggcataatcccagccaataccaggctccacaccacgctctcagtcagcctggggaatgagacccaaactgctcatacagaattacgcatttccacttctaatgacaccatcatccgagcagtattgatttttgcagaaggaatttttacaggtgaaagccacgtggtacatcccagcattcacaacctctccagttccatctgcatccctattgtgcctcccaaagatgtccctgtggatctgcacttgaaggcattcgtgggttacagaagcagcacccagtttcatgtatttgaatcgacaagacagctccctcgattctccatgtatgcgctgaccagcctggaccctgccagtgagccaatcagttatgttaactttaccattgcagaacgggcacagagggttgttgtatggctcggtcagaactttctgttaccagaagacactcacattcagaatgctccatttcaagtgtgtttcacatctttacggaatggcggccacctgcatataaaaataaaacttagtggagagatcactataaatactgatgatattgatttggctggtgatatcatccagtcaatggcatcattttttgctattgaagaccttcaagtagaagcggattttcctgtctattttgaggaattacgaaaggtgctagttaaggtggatgaatatcattcagtgcatcagaagctcagtgctgatatggctgatcattctaatttgatccgaagtttgctggtcggagctgaggatgctcgtctgatgagggacatgaaaacaatgaagagtcgttatatggaactctatgaccttaatagagacttgctaaatggatataaaattcgctgtaacaatcacacagagctgttgggaaacctcaaagcagtaaatcaagcaattcaaagagcaggtcgtctgcgggttggaaaaccaaagaaccaggtgatcactgcttgtcgggatgcaattcgaagcaataacatcaacacactgttcaaaatcatgcgagtggggacagcttcttcctaggtgaggaaaatacaggtcatgaagttcctggcaaagattttctgttaaaaacctatgctggtttgctttggatcacaccctggtgaaccccgggtgctaagaatgaaaataaccttggtgagttgtacaaattaaagacaaagaactacatgtgaagatagacttgctttctatttttaaatcagtagtagtactgttgctgaataatactaggtttttatggaataggatgaatgcttttgaagtattagggcttcagagtccaattttgcttatttatggtatataaatacatatttttttcttgaaattgcaattgagtttgtacttttcaaatagattatctactttttcattaaaatgtaaagatgttaaaaaaaaaaaaaaaaaa

SEQ ID NO: 3872 - protein, 721 aa, Homo sapien
MLLPVFTLKLRHKISPRMVAIGRYDGTHPCLAAATQTGKVFIHNPHTRNQHVSASRVFQSPLESDVSLLSINQAVSCLTAGVLNPELGYDALLVGTQTNLLAYDVYNNSDLFYREVADGANAIVLGTLGDISSPLAIIGGNCALQGFNHEGSDLFWTVTGDNVNSLALCDFDGDGKKELLVGSEDFDIRVFKEDEIVAEMTETEIVTSLCPMYGSRFGYALSNGTVGVYDKTSRYWRIKSKNHAMSIHAFDLNSDGVNELITGWSNGKVDARSDRTGEVIFKDNFSSAIAGVVEGDYRMDGHIQLICCSVDGEIRGYLPGTAEMRGNLMDTSAEQDLIRELSQKKQNLLLELRNYEENAKAELASPLNEADGHRGIIPANTRLHTTLSVSLGNETQTAHTELRISTSNDTIIRAVLIFAEGIFTGESHVVHPSIHNLSSSICIPIVPPKDVPVDLHLKAFVGYRSSTQFHVFESTRQLPRFSMYALTSLDPASEPISYVNFTIAERAQRVVVWLGQNFLLPEDTHIQNAPFQVCFTSLRNGGHLHIKIKLSGEITINTDDIDLAGDIIQSMASFFAIEDLQVEADFPVYFEELRKVLVKVDEYHSVHQKLSADMADHSNLIRSLLVGAEDARLMRDMKTMKSRYMELYDLNRDLLNGYKIRCNNHTELLGNLKAVNQAIQRAGRLRVGKPKNQVITACRDAIRSNNINTLFKIMRVGTASS

SEQ ID NO: 3873 - DNA, 2601 bp, Homo sapien
tcccccctcttaaaacacgatgcctcccaggatgctagtggcaccactgccactgcatttcctgttggcagcagtgagcagtgaaaaccgaagcggcagaaggcagtggcagcaggcagtggcagcaggcagtggcccaggcagaaatagctcccgcgcgattcactggagccttccccgggccctggtcccggctaccgggactcgcgcgtccggatctcaaaagcggcagaggccaccgaagggacaggaagcactttggtccagaccacactcccggcacagtgcggaaagagccggcgggagccactctgatcccggacgcctcagcgcccccttgggcttgggcttgccctcgggccggggaaggctgaccgcgatgccaggacgcgctcccctccgcaccgtcccgggcgccctgggtgcctggctgctgggcggcctctgggcctggaccctgtgcggcctgtgcagcctgggggcggtgggagccccgcgcccgtgccaggcgccgcagcagtgggaggggcgccaggttatgtaccagcaaagtagcgggcgcaacagccgcgccctgctctcctacgacgggctcaaccagcgcgtgcgggtgctggacgagaggaaggcgctgatcccctgcaagagattatttgaatatattttgctgtataaggatggagtgatgtttcagattgaccaagccaccaagcagtgctcaaagatgaccctgacacagccctgggatcctcttgacattcctcaaaactccacctttgaagaccagtactccattggggggcctcaggagcagatcaccgtccaggagtggtcggacagaaagtcagctagatcctatgaaacctggattggcatctatacagtcaaggattgctatcctgtccaggaaacctttaccataaactacagtgtgatattgtctacgcggttttttgacatccagctgggtattaaagacccctcggtgtttacccctccaagcacgtgccagatggcccaactggagaagatgagcgaagactgctcctggtgagcctgtgcatagggaagcggcagcatcggatgtcagccccctgcggccccagctggagatggatatgagactagtcaagatgtgaatgctaattggagagaaatataattttaggaagatgcacattgatgtggggttttgatgtgtctgattttgactactcaagctctgtttacagaagaaaattgaatggcgagggtgtggccatatgaactgactagatggctaatatggacactttgggtatttctaatgcctgttcagggctggttttctgcatgcacgggtatacacataatgcagtgccatgcacatagggaagggtcagtaagagaagtttgccttggcagcaagtatttattgttgacattattcagaattagtgataataaaaagcagagtgattttggtcaattttattattaattcttaaattccctgcagagaatgccccctttattgctgcaccagggtgggcattgctcccactgagccctactccaccctgtccctgcactcccttggttgccaaaaaaatgataacttaaatcccttccagacttaagaattttatggcatggcccaattgatataaacatttagaaggaaatgaaaagctaaaataggaagtaattattcctctaaagaaacattttgagcaaggcagtttagagaatcctaatgtctacactggcatagcacgagccatgtaagcttcttttttttctatgcaagagtattgatgtatgtgctgaatcttcacagacttgtcaatacacaggcagtattctaaaatagcactgaacagggagacaggagactattgtctcctaaacccaggactagagttccctcgtactgtcactcctttggtcattaaatgcactgggcttgcccgcactttggccttcctagaacgctgcttcataacctctctgtctgacttctgcatctccttccaggtcagctcattcacaagagttgctcccaagcctggatgagttgcaccttgcatcttgagcatgcatttctcacaataattattaagctgtgtgataatttctgctttcaggacactcatccattatcttggctgtgagctccttgggtacgggtaccttgtatgtttaattttatatccctagcacaaagcaagtgcctggcacatagtcagtgccctaagtattcgtagagtgaagaatgccagcctctcttgtccctggtttccttatgtgttgaatgtggttgagtttgtccattgctagggagagacttccagtaataaaatttactattctagatgcttctactgttatgttttatctgcccatttatctttcttagttaccaggagaaatgtgtgacacctatattataatgaaaacaatcttattacttatagtttatctatattaaacaaatttaattgcattttaaagcattctttgatattgttgcttttgcaataaatatggataatcttggttataagggagttaaaacaatgctgtaataaataaagtgtttcatgtgatcaaaaaaaaaaa

SEQ ID NO: 3874 - protein, 344 aa, Homo sapien
MPPRMLVAPLPLHFLLAAVSSENRSGRRQWQQAVAAGSGPGRNSSRAIHWSLPRALVPATGTRASGSQKRQRPPKGQEALWSRPHSRHSAERAGGSHSDPGRLSAPLGLGLPSGRGRLTAMPGRAPLRTVPGALGAWLLGGLWAWTLCGLCSLGAVGAPRPCQAPQQWEGRQVMYQQSSGRNSRALLSYDGLNQRVRVLDERKALIPCKRLFEYILLYKDGVMFQIDQATKQCSKMTLTQPWDPLDIPQNSTFEDQYSIGGPQEQITVQEWSDRKSARSYETWIGIYTVKDCYPVQETFTINYSVILSTRFFDIQLGIKDPSVFTPPSTCQMAQLEKMSEDCSW

SEQ ID NO: 3875 - DNA, 1176 bp, Homo sapien
agcggatttccgcctccgggtggcgcttcccggtgtcgtgttctggaagcttagcggtcaccatggagctgctgggagagtacgtcgggcaggaagggaagccgcagaagctgcgggtgtcctgtgaggcgccgggtgacggcgaccctttccagggcctgttgtctggcgtggcccagatgaaggacatggtaacggaattattcgaccctctggtacagggggaagtgcagcaccgggtggcggcggctccagacgaggacttggacggtgatgatgaagatgatgcagaagatgaaaataacattgataacagaactaacttcgatggaccatctgcaaaacggccaaaaacaccgtcttaacaatagccttcatgacatttaaaagatggctgttgtatccttattgtcacactaggacatttaaggaagacttatgctctaatttggaaaaagcatttgtgttgttctcctgggacaattttgtcaaagagaaaactggtttttctgtttctagcaaagatagtaaaggcttagaaataaaatctgttttcttgagaaataaatttcagaccctggaaggaaaatagaacacttcataatgtataaaatcctctaagttggcaactgaatttttatcattgttttctatttttaaaataatcattgatttgtgtgatgtctacatcttttaacttctggttctgttataaagagtacatgtcacggttcataggcagtaacatttcagagaactgacatgaacaagtagtgaaaattgggcattaaatataaaaataacagttcttcataaacagaaggaaaataaggaaatagaaataccaacgagaaaggagagtccttgaaagagacccaaggaaaccctgaattcatacccacgtcaaatatgcacatatcctgagatgatgccactttgatgaatgtgcattagtctgatttatcatgtaccttaagagagccagatggggtatgtttttgtgctgtgatatggtatttatacaggtacaaatataaggccttaagtaaacaatctgcattgattacaatttggatatttcctctcctcctgtagccatactttgattttgctttaaaaagattattgaatccttttaaaaatatatattcctaaaatatgaaaaaaaaaaaaaaa

SEQ ID NO: 3876 - protein, 71 aa, Homo sapien
MTFKRWLLYPYCHTRTFKEDLCSNLEKAFVLFSWDNFVKEKTGFSVSSKDSKGLEIKSVFLRNKFQTLEGK

SEQ ID NO: 3877 - DNA, 1474 bp, Homo sapien
ccggggcacgttccaggagctgcctagggctgaggttccaggcctgggggtcgcttccagctgccagatcccgtgcagtcctggggaccctgagaagcaccgagccatccctgacccaggaactttccgcagactcgccgccatctgggagtgaagcaacatggatgcagtcagccaagtccccatggaagtcgtgcttcccaagcacatcctggatatctgggttattgtcctcatcatcctggccaccattgtcatcatgacctcgttgttgctgtgcccagccactgcagtaatcatctatcgcatgcggactcatccgatccttagtggggctgtttgagagcctcccaagagggccgggtgagggatgaggacaggcatcctatccccagcctcttcctgtcttcagaaaagcagcaggagggactttggggcatggacctgagttctggttttgattctgccacgagccagctgtgtgaatttggtcaagggacctaactctctgagttccaggttccttatctttcaaatggggatggtgatccctgccctttctacctcatagggatgtgagaaccacctgacttagtggatgtgaaagctgtttgtgatcagtaaagctaccacagatataagggtgttatgctgaatcctgagaagctttcaagaaccagagaacctgattgctgatgatggccttaaaggtggtgagggagatactgggggcagagcagactttgccagtgcccctcaggtcaaaccaagccaagagcaccctgtccccattccaaggggccagcagcactttggcccaaagtattttctttaaggtgccattccttcatgttttctcagtttggagggtgatgggtagagctttccagaaccttctccattccagaatctctgcccctgtgtaatctgaaggaaggctgtgccatctttgggcactgccaagggagttggggtgatgggcttctttctgcactggagtctcacatctgttagctttgacactcaagcaatgttggaaaatgcagggtgactgagttccctgcccagctttcgggatctctggcccccatccccttgtgtgtgtccctctgcccagctcctgctgtaattagctccacgtgtacccccttcactccctcccaccagctctgcagccagcctatggcaattatattttaagaggtgttcccaggacttttgggacctactaaaacaatgatggttattttagatgtgatgatttatatttatgtagagatatttctggaccactcaagctcttcgataccaaaatcaggagcatcttgggatttattaaattatgtaagaagatagcacagatatcgggatattattgtgtgaaaatgctgcttttactttgatgtgatctcattgatgtacacaaccaagttccaataaagtgctagaatgtgaaaaaaaaaaaaaaaaaaaa

SEQ ID NO: 3878 - protein, 60 aa, Homo sapien
MDAVSQVPMEVVLPKHILDIWVIVLIILATIVIMTSLLLCPATAVIIYRMRTHPILSGAV

SEQ ID NO: 3879 - DNA, 4954 bp, Homo sapien
atcacagcttggtgctggggctcagcatggccaggtggctaaccagggcttggtgtcaactacatttgggatgatgacacttggaggacacagagccactgtgcagcaggagtcgccactgctaacagccagagtgtcccagaagcttttgttgacaattccagtttccgaacaaaacatttcggcaatggtgagggcttcgatcccttctctgatttgctgtcagccatgaacggatggatgtgatgcctgctagccaaaaggcttccctctgtgtgttgcagtcctgtggcattatgcatgccccctcccagtgaccccaggctttttatggctgtgagacacgttaaaatttcaggggtaagacgtgaccttttgaggtgactataactgaagattgctttacagaagccaaaaaaggtttttgagtcatgatgcaagaatctgggactgagacaaaaagtaacggttcagccatccagaatgggtcgggcggcagcaaccacttactagagtgcggcggtcttcgggaggggcggtccaacggagagacgccggccgtggacatcggggcagctgacctcgcccacgcccagcagcagcagcaacaggcacttcaggtggcaagacagctccttcttcagcagcaacagcagcagcaagttagtggattaaaatctcccaagaggaatgacaaacaaccagctcttcaggttcccgtgtcagtggctatgatgacacctcaagttatcactccccagcaaatgcagcagatcctccagcaacaagtgctgagccctcagcagctccaggttctcctccagcagcagcaggccctcatgcttcaacagcagcagcttcaagagttttataaaaaacaacaggaacagttgcagcttcaacttttacaacaacaacatgctggaaaacagcctaaagagcaacagcaggtggctacccagcagttggcttttcagcagcagcttttacagatgcagcagttacagcagcagcacctcctgtctttgcagcgccaaggccttctgacaattcagcccgggcagcctgcccttccccttcaacctcttgctcaaggcatgattccaacagaactgcagcagctctggaaagaagtgacaagtgctcatactgcagaagaaaccacaggcaacaatcacagcagtttggatctgaccacgacatgtgtctcctcctctgcaccttccaagacctccttaataatgaacccacatgcctctaccaatggacagctctcagtccacactcccaaaagggaaagtttgtcccatgaggagcacccccatagccatcctctctatggacatggtgtatgcaagtggccaggctgtgaagcagtgtgcgaagatttccaatcatttctaaaacatctcaacagtgagcatgcgctggacgatagaagtacagcccaatgtagagtacaaatgcaggttgtacagcagttagagctacagcttgcaaaagacaaagaacgcctgcaagccatgatgacccacctgcatgtgaagtctacagaacccaaagccgcccctcagcccttgaatctagtatcaagtgtcactctctccaagtccgcatcggaggcttctccacagagcttacctcatactccaacgaccccaaccgcccccctgactcccgtcacccaaggcccctctgtcatcacaaccaccagcatgcacacggtgggacccatccgcaggcggtactcagacaaatacaacgtgcccatttcgtcagcagatattgcgcagaaccaagaattttataagaacgcagaagttagaccaccatttacatatgcatctttaattaggcaggccattctcgaatctccagaaaagcagctaacactaaatgagatctataactggttcacacgaatgtttgcttacttccgacgcaacgcggccacgtggaagaatgcagtgcgtcataatcttagtcttcacaagtgttttgtgcgagtagaaaacgttaaaggggcagtatggacagtggatgaagtagaattccaaaaacgaaggccacaaaagatcagtggtaacccttcccttattaaaaacatgcagagcagccacgcctactgcacacctctcaatgcagctttacaggcttcaatggctgagaatagtatacctctatacactaccgcttccatgggaaatcccactctgggcaacttagccagcgcaatacgggaagagctgaacggggcaatggagcataccaacagcaacgagagtgacagcagtccaggcagatctcctatgcaagccgtgcatcctgtacacgtcaaagaagagcccctcgatccagaggaagctgaagggcccctgtccttagtgacaacagccaaccacagtccagattttgaccatgacagagattacgaagatgaaccagtaaacgaggacatggagtgactatcggggcgggccaaccccgagaatgaagattggaaaaaggaaaaaaaaaaaacacgtcaaaagttagcagtgaaattgttctccatttgttgtacagtctggaggattttcactacgttttgacaactctgaaatgtgttaactcttagtgccatcaagaaccccatttgggagtatttttgatttttctactttttgttgaaaaaaggaatttgtactctgtgcattggatggacttgtttggtacttgggattttcctctcttaaccgtcaacatcagtgttgtaaatttgctaaactgattcacttttagcagcagactttgaactgcagtcctgccaacgttggacactgaggacgcccgacagagcttgtgcacctaagctgcagaccaagcctttgcccagaatttaaggattccaatggacgacctatttgcacagtactgcatgttgattatcactgcctttactccttttttttttttttttttttttttgcttccagttgggatggggaaggcctttgtgtgtgtattggggggaggggttaaaaaataattatcccaaactttttaatgtattgctttttttttttttttccttctactataccattttaagttctgacctcaggcctccatttgggccgatggcctcttggaggcttaaagttttctgtaccttgtgatgaatgttaataggtgtttttattatacaaagctgaatgtcatttctcgtttgtagctttctgtcactcattccatcttccttcagacatcaccacgtttctctaaagtcagaaaacattccgttttggtctttttcaaaaaggtcccaaatgctgcactctacacatgaaggccctctcacacagacgtgacgtcctgccagaaagagaatgaatgacagaaaaaaaaaagagagacaaactctaggaacaatgccgattcattccacgcagcagtattgggggtggttcgggggaggggtgtttcggattttctttttttcttttcttttatttttttttttttgcagcaaccattaataaatgccaccacattctaccagcacaaggaaacataggcagcactgaaaaaaaaaaaaaagctcatattaattagactgacaatatggccttggaaggctctcccttgtggaaccaagttgccatgggccttgggtgctctgcgataacgggtgtgggttggttttgtttgcaaaatggccaaaaaaaaaaccggcttccccgagcagctgccctgaaagtaggggtggcggcggcggcgctgagtttatacattagttcagacctacttggtggcattaaactgtttgaatgcaaattcgatttcagattgaacttgttaagggagttaacgagggctgagttcagcaaatgctaaagtgttaatttcaaatatgcaaatttggtactgcagtttgttatgcaatattatatcaccaacccagtatcacaaaaactcatagaagatatcatgtaggccctgggctttgggggggtcccaaacatggtatgcagaaatgtgatggttacaggtcagtacaacctcagtccttagaacccctccacacttcagctctgcacccactttcctgtcatttatttatataggactgtagttttttttagttcgagagcctttcgaagcttaatttatattctttctttgtaccttttttctaaaattaccaaagatattacacaaaggtaaattatgttctctgttttatgctttatctgatgaagccaaatatcctcttattgttgatcaaaggaggcaaaagaatttagaggcaaatgacaagcgataggctattgcaacctgagaaagagaactgctccttcatcgtaaatttagaagaccaagtagataatggaaccaaagttgtacttttttctagtagttatttttcctttttctttttgtgtacctctacagagaccaaaactcattctcttaaagagattttatggggctactgcagataaaaataggacacaatattaaaggagctacagaaggaagggagtcccatctcaaaaaaaaaatgaatgtatgccactgcaattagagtatccaataaaggagacagtttagagtcaggacagaaaagcttccataattgaactagattacataatagtatttctagaaaaagagatatttttagattgtatgccacttttgtttaagaactgtgctgtgatcactgtattaattttggtttatcttggcatatatccttcagtttgtttttatttttaatttttcctttttttccgattaggctttggtcagcatttttcatttaaagaaaagtaacactcccatccactcataagcttggtacaaaaacttctctggcagttacttttgaagcttcactctgctttctgtataaagggcagtctgtggtcacgcaagacttaaaaaaaaaaaaaaaaaaaaaaaaaaaaaa

SEQ ID NO: 3880 - protein, 677 aa, Homo sapien
MMQESGTETKSNGSAIQNGSGGSNHLLECGGLREGRSNGETPAVDIGAADLAHAQQQQQQALQVARQLLLQQQQQQQVSGLKSPKRNDKQPALQVPVSVAMMTPQVITPQQMQQILQQQVLSPQQLQVLLQQQQALMLQQQQLQEFYKKQQEQLQLQLLQQQHAGKQPKEQQQVATQQLAFQQQLLQMQQLQQQHLLSLQRQGLLTIQPGQPALPLQPLAQGMIPTELQQLWKEVTSAHTAEETTGNNHSSLDLTTTCVSSSAPSKTSLIMNPHASTNGQLSVHTPKRESLSHEEHPHSHPLYGHGVCKWPGCEAVCEDFQSFLKHLNSEHALDDRSTAQCRVQMQVVQQLELQLAKDKERLQAMMTHLHVKSTEPKAAPQPLNLVSSVTLSKSASEASPQSLPHTPTTPTAPLTPVTQGPSVITTTSMHTVGPIRRRYSDKYNVPISSADIAQNQEFYKNAEVRPPFTYASLIRQAILESPEKQLTLNEIYNWFTRMFAYFRRNAATWKNAVRHNLSLHKCFVRVENVKGAVWTVDEVEFQKRRPQKISGNPSLIKNMQSSHAYCTPLNAALQASMAENSIPLYTTASMGNPTLGNLASAIREELNGAMEHTNSNESDSSPGRSPMQAVHPVHVKEEPLDPEEAEGPLSLVTTANHSPDFDHDRDYEDEPVNEDME

SEQ ID NO: 3881 - DNA, 2053 bp, Homo sapien
ggcacgagggccgtgcccgcggagagagcgcggcgcgggaggccggcggccggccggctgcatggcgcgctgcgagaggctgcgcggagcggccctgcgcgacgtgctgggccgggcgcagggggtcctgttcgactgtgacggggtgctgtggaacggcgagcgcgccgtgccgggcgccccggagctgctggagcggctggcgcgggccggcaaggcggctctgtttgtgagcaacaacagccggcgcgcgcggcccgagctggccctgcgcttcgcgcgcctcggcttcggggggctgcgcgccgagcagctcttcagctccgcgctgtgcgccgcgcgcctgctgcgccagcgcctgcccgggcctccggacgcgccgggcgccgtgttcgtgctgggcggcgaggggctgcgcgccgagctgcgcgccgcggggctgcgcctggccggggacccgagcgcgggggacggcgcggccccgcgcgtgcgcgccgtgcttgtgggctacgacgagcacttctccttcgccaagctgagggaggcgtgcgcgcacctgcgcgaccccgagtgcctactcgtggccaccgaccgtgacccatggcacccgctgagcgacggcagccggacccctggcaccgggagcctggccgctgcagtggagacagcctcgggacgccaggccctggtggtgggcaagcccagcccctacatgttcgagtgcatcacggagaacttcagcatcgaccccgcacgcacgcttatggtgggtgaccgcctggagaccgacatcctctttggccaccgctgcggcatgaccactgtgctcacgctcacaggagtctcccgcctagaagaggcccaggcctacctagcggccggccagcacgacctcgtgccccattactatgtggagagcatcgcagacttgacagaggggttggaggactgagcccactgcacctgcagccacaggcccacccctccccactccctgatcccgtaggtggaggcgatgggtcacgagccatgttaagcacaaccggctccttggtccagttctgcaccggggtggggctgggacccggggaaggtttgagggcccttgcaaccccctcccagcagtggctgggcactctttgctgccccagaagctggtcccctatggattcatcttggcctgacccagccaggtggccttatttcttccctgtcacctcccctccttgaaatctgggccctggtgcctgctgaagattccctctatccctgagtacttagtcttctcccccttccctggggcttctagagctctctctgcccctcaggtcctggcccttgggtccttgtcaaccagaggtctagggaaccacaacccttattgtcctgggtggaccaatccaaaggctaagtgatagtgactcatcaatgttgggtcctgtggggtaccagtttaggttcctaagtaatagtgaccctttcacgtcctggagcccgagtggaccaatcggaagcctaagtgacgatgaccctcgcatgtcctaggtccctgggtggacccatcaggaccccaagtgatagtgacccagtggtcttttagatcctcagtagaacagtccagaagcctgagagacagtggccccttgataatctgggtctcacgggaccagctaggggtccaggtttcagtcagtaaataagagtggtccacgtcctaaagacacctctcctttacaaagacttgtgatgctctggggcttctgtggccaagccccaccctttcctggtcatggtacccgtacagcgttgatggccacagctcgaaggggggctttcgtgtccccctgtgcggtcagtgttttcagtaccacctctctcccgtgcccacttggctatttacttatttatttattgtgtgccagtgatggtgggtgggggctgggccttccccgccacctccacccctgttgtgacctgtccttccgtacttaataaagtgcgcgtgggagtgttaaaaaaaaaaaaaaaaaaaaaaaaaaaaaaaaaaaaaaaa

SEQ ID NO: 3882 - protein, 296 aa, Homo sapien
MARCERLRGAALRDVLGRAQGVLFDCDGVLWNGERAVPGAPELLERLARAGKAALFVSNNSRRARPELALRFARLGFGGLRAEQLFSSALCAARLLRQRLPGPPDAPGAVFVLGGEGLRAELRAAGLRLAGDPSAGDGAAPRVRAVLVGYDEHFSFAKLREACAHLRDPECLLVATDRDPWHPLSDGSRTPGTGSLAAAVETASGRQALVVGKPSPYMFECITENFSIDPARTLMVGDRLETDILFGHRCGMTTVLTLTGVSRLEEAQAYLAAGQHDLVPHYYVESIADLTEGLED

SEQ ID NO: 3883 - DNA, 1214 bp, Homo sapien
gtcaatcacctcagatctctcaagcagtccagcctacgcaacagtactccacctctgcgcctgtgcggggagggtaaggcggggccagcaacttcctcagctggagggagagcgcacggtggagccgccagttgagaaggactctgatccggctcagctttccaatcagctgcggaaggagccacgctttcgggggttgcaagatggcggccaccagtggaactgatgagccggtttccggggagttggtgtctgtggcacatgcgctttctctcccagcagagtcgtatggcaacgatcctgacattgagatggcttgggccatgagagcaatgcagcatgctgaagtctattacaagctgatttcatcagttgacccacagttcctgaaactcaccaaagtagatgaccaaatttactctgagttccggaaaaattttgagacccttaggatagatgtgttggacccagaagaactcaagtcagaatcagccaaagagaagtggaggccattctgcttgaagtttaatgggattgttgaagacttcaactatggtactttgctgcgactagattgttctcagggctacactgaggaaaacaccatctttgcccccaggatacaattctttgccattgaaattgctcggaaccgggaaggctataacaaagctgtttatatcagtgttcaggacaaagaaggagagaaaggagtcaacaatggaggagaaaaaagagctgacagtggagaagaagagaacaccaagaatggaggagagaaaggagctgatagtggagaagaaaaagaggaaggaatcaacagagaagacaaaactgacaaaggaggagaaaaagggaaagaagctgacaaagaaatcaacaaaagtggtgaaaaagctatgtaaggtatacagggaacagcactctagaagctatgactcaattgagactacaagtaccacggtgctacttgcacagacccctttggttaaatgtaaattcttgtacaattgaaggatacgcagaaggacatctttctagtctaacagtcaggagctgctctggtcattcccttgtatgaactggtctaaagactgttagtggggtgttagttgatttttcctggtatactgtttcttggctgacactactggtcaagtaagaaatttgtaaataaatttcttttggttcttataaaaaaaaaaaaaaaaaaa

SEQ ID NO: 3884 - protein, 233 aa, Homo sapien
MAATSGTDEPVSGELVSVAHALSLPAESYGNDPDIEMAWAMRAMQHAEVYYKLISSVDPQFLKLTKVDDQIYSEFRKNFETLRIDVLDPEELKSESAKEKWRPFCLKFNGIVEDFNYGTLLRLDCSQGYTEENTIFAPRIQFFAIEIARNREGYNKAVYISVQDKEGEKGVNNGGEKRADSGEEENTKNGGEKGADSGEEKEEGINREDKTDKGGEKGKEADKEINKSGEKAM

SEQ ID NO: 3885 - DNA, 1482 bp, Homo sapien
gaggcgccggcggccacgccgcggaaggcgcgggccgagcagagccgggcgttggagcccgcgcgcgcatggaggcgttgccggcagccccctgagggcagcggggagacaagacccggcgacctcgcgcatccctcgagccgccacgcgctctcgccaccgggcggcgacgggccgcggagccggcgcggccatggcgacgggcggccagcagaaggagaacacgctgcttcacctcttcgccggcgggtgtggaggcacagttggtgctattttcacttgtccactagaagtcattaagacacggttgcagtcttcaagattagctctccggacagtctactatcctcaggttcatctggggaccattagtggagctggaatggtgagaccaacatccgtgacacctggactctttcaggttctgaagtcgatcttggagaaagagggaccaaagtcactttttagaggcttgggtccaaatttggttggagttgcaccatcaagggctgtatactttgcatgttactccaaagccaaagagcaatttaatggcattttcgtgcctaacagcaatattgtgcatattttctcagctggctctgcagcttttatcacaaattccttaatgaatcctatatggatggttaaaacccgaatgcagctagaacagaaagtgaggggctctaagcagatgaatacactccagtgtgctcgttacgtttaccagaccgaaggcattcgtggcttctatagaggattaactgcctcgtatgctggaatttccgaaactataatctgctttgctatttatgaaagtttaaagaagtatctgaaagaagctccattagcctcttctgcaaatgggactgagaaaaattccacaagtttttttggacttatggcagctgctgctctttctaagggctgtgcctcctgcattgcttatccacacgaagtcataaggacgaggctccgggaagagggcaccaagtacaagtcttttgtccagacggcgcgcctggtgttccgggaagaaggctaccttgccttttatagaggactgtttgcccagcttatccggcagatcccaaatactgccattgtgttgtctacttatgagttaattgtgtacctgttagaagaccgtactcagtaacaggccggaaaattgtgctctagaagaataaaactgaaaaactctagagaattttttttccccattgatgtttagaaagtttgagactgaaacaggaaaggccataaaatatctggttcatatcacctgttggacatttccttttggattcatgctttctggaaggtttaaattcattaacgttaatagttaattataacttttttttaacttaagaggattcagggttaagcaccaactaaattaaatcatgctatttaatttaagtataaaaaaaaaaaaaaaaaaaaaaaaaaaaaaaaaaaaaaaaaaaaaaaaaaacc

SEQ ID NO: 3886 - protein, 321 aa, Homo sapien
MATGGQQKENTLLHLFAGGCGGTVGAIFTCPLEVIKTRLQSSRLALRTVYYPQVHLGTISGAGMVRPTSVTPGLFQVLKSILEKEGPKSLFRGLGPNLVGVAPSRAVYFACYSKAKEQFNGIFVPNSNIVHIFSAGSAAFITNSLMNPIWMVKTRMQLEQKVRGSKQMNTLQCARYVYQTEGIRGFYRGLTASYAGISETIICFAIYESLKKYLKEAPLASSANGTEKNSTSFFGLMAAAALSKGCASCIAYPHEVIRTRLREEGTKYKSFVQTARLVFREEGYLAFYRGLFAQLIRQIPNTAIVLSTYELIVYLLEDRTQ

SEQ ID NO: 3887 - DNA, 794 bp, Homo sapien
ggcagccgtctgtgccacccagagccggcgggccgctaggtccccggagaccctgctatggtgcgtgcgggcgccgtgggggctcatctccccgcgtccggcttggatatcttcggggacctgaagaagatgaacaagcgccagctctattaccaggttttaaacttcgccatgatcgtgtcttctgcactcatgatatggaaaggcttgatcgtgctcacaggcagtgagagccccatcgtggtggtgctgagtggcagtatggagccggcctttcacagaggagacctcctgttcctcacaaatttccgggaagacccaatcagagctggtgaaatagttgtttttaaagttgaaggacgagacattccaatagttcacagagtaatcaaagttcatgaaaaagataatggagacatcaaatttctgactaaaggagataataatgaagttgatgatagaggcttgtacaaagaaggccagaactggctggaaaagaaggacgtggtgggaagagcaagagggtttttaccatatgttggtatggtcaccataataatgaatgactatccaaaattcaagtatgctcttttggctgtaatgggtgcatatgtgttactaaaacgtgaatcctaaaatgagaagcagttcctgggaccagattgaaatgaattctgttgaaaaagagaaaaactaatatatttgagatgttccattttctgtataaaagggaacagtgtggagatgtttttgtcttgtccaaataaaagattcaccagtaaaaaaaaaaaaaa

SEQ ID NO: 3888 - protein, 192 aa, Homo sapien
MVRAGAVGAHLPASGLDIFGDLKKMNKRQLYYQVLNFAMIVSSALMIWKGLIVLTGSESPIVVVLSGSMEPAFHRGDLLFLTNFREDPIRAGEIVVFKVEGRDIPIVHRVIKVHEKDNGDIKFLTKGDNNEVDDRGLYKEGQNWLEKKDVVGRARGFLPYVGMVTIIMNDYPKFKYALLAVMGAYVLLKRES

SEQ ID NO: 3889 - DNA, 2973 bp, Homo sapien
gcggagccggggctggagagcggcgaccactgcggatctcggaaggaagaaatgatgtaaatcactcatccaaactttaaggtcaaaggtgagaaggaaggtcaggaagaacatggcctggccaaatgtttttcaaagagggtctctgctgtcccagttcagccatcatcatgttgtagtgttcctgctcactttcttcagttattcgttgctccatgcttcacgaaaaacatttagcaatgtcaaagtcagtatctctgagcagtggaccccaagtgcttttaacacgtcagttgagctgcctgtggagatctggagcagcaaccatttgttccccagtgcagagaaagcgactcttttcctcggcacactggataccattttcctcttctcctatgctgtgggcctattcatcagtggcatcgttggggatcggttgaatttgcgatgggttctgtcttttggcatgtgctcttctgcattagtggtgtttgtctttggtgcgctcacagaatggctgcgtttctacaacaaatggctgtactgctgcctgtggattgtgaacggcctgctgcagtccactggttggccctgtgtggttgctgttatgggcaactggtttgggaaagccggacgaggagttgtttttggtctctggagtgcctgtgcttcggtgggcaacattttgggagcgtgcctagcttcttctgttcttcagtatggttatgagtatgcctttctggtgacggcgtctgtgcagtttgctggtgggatcgttatcttctttggactcctggtgtcaccagaagaaattggtctctcgggtattgaggcagaagaaaactttgaagaagactcacacaggccattaattaatggtggtgaaaatgaagacgaatatgagccgaattattcaatccaagatgatagttctgttgcccaagtcaaggcgataagcttctaccaggcatgttgccttcctggagtcataccgtactcactggcctacgcctgcttgaagttagtgaattactccttcttcttctggctccccttttatctgagtaacaacttcggctggaaggaggcggaagccgacaagctgtccatttggtacgacgttggagggatcatagtatttagtgtctctgatccgggacaagctaggatggatgtgggttttctactttttcattctcatgacaagttgtacaattgtgtttatctcgccattaatagtgagggaaatattctctctcgtgctaaggagacaggctcacatattgagggagtgaccggtgcccgcgagacagaaagaacaatgtcagccacatcaggaccgctggggcttcgagtctgccctaatttgggtttgtctaggagctccagcctgatcttggattgtcaggcgtctctcaacactgccagccacctgagatgctgaccagcagtgaaggctgcactagttttctacactacaggaattactgttgatgatttttgctgttgtttcatgaatgtgccgagtgacttctgactctgccagcatctttgacctctgactctgcccgcgtctttgtttggcctattgaggtttagcgttttaaccttaactgttgttttggacttgaactttctctagccttgaaaatggagtgaacaggaggcaaagccacgcgtggtttgtgttggtggtatgttccacaaatggaagagatcattgcattttgctttggtaatgagtttacagagagtgggtcatctttgaagcatcaaatcctgatcaaatgctcaagctggaccgagctgcaagcctgccttggacaaagaatccctctgttcactgtggtgggaaagatcacactacatgcctgttgattggctcagtcactctgtgtctgatctaaacgtcattcagccctagaagcatgaattgcttcaaattattgtcaacttgttctcttccattttcattcaaattaactttgactcctggaagtattgagtcttcctttcaaggaccataaggtacatcagttatcttgaacattctgacgtgtaaaggaccataaggtacatcatttatcttgaacattccgacgtgtaactcacagccgaagcactccatcccagatttgttgtctgggaactttaggatcctctaggaagctaatctgcttagtctatttttagaggattgatctctggcacaaccagcttcctggagttacctcagcagaagactagaattagagaaaagggaaagaccttttcttctagtaagtgtcaagtacagatgctctttgacttatgatggggttatgtcccagtaaacccattggaagtcaaatgcatttaatacccctgactggacaccacagcttagcctcgtccaccctaaatgtactcagaacacttagaattgcccacagttgggcagaatcatctaacacaaactctattttataatcgagtgttgaatatatcatgtaatttattgaatattgtacattatgttgaaattgcaaccatttcacaccattgtaaagtccaaaaatcagaagctgaggactgtctgtacatgacattgaatcacatgaatggattactagggcctgaggggtgtccgttctttagaaaaatgtagagtatatatatcttcagggctgtgaattccatactagttatcaatattttaagatcattctgtatatacatattttaaattatgcaagcaaactaggaggagaatgtgcaattttgagggatacctaatttgcattcggttaggggatatttttcaacctcttgctttatactctgatatggggtgtgtttatgaacttgttaatgttatttaatcatgcagatttccaatcagtgtattgctcatttactgacaaaaagggaaaatacgaaacacagaaagggaaaataaactgacttttataatgaaaaaaaaaaaaaaaaaaa

SEQ ID NO: 3890 - protein, 443 aa, Homo sapien
MAWPNVFQRGSLLSQFSHHHVVVFLLTFFSYSLLHASRKTFSNVKVSISEQWTPSAFNTSVELPVEIWSSNHLFPSAEKATLFLGTLDTIFLFSYAVGLFISGIVGDRLNLRWVLSFGMCSSALVVFVFGALTEWLRFYNKWLYCCLWIVNGLLQSTGWPCVVAVMGNWFGKAGRGVVFGLWSACASVGNILGACLASSVLQYGYEYAFLVTASVQFAGGIVIFFGLLVSPEEIGLSGIEAEENFEEDSHRPLINGGENEDEYEPNYSIQDDSSVAQVKAISFYQACCLPGVIPYSLAYACLKLVNYSFFFWLPFYLSNNFGWKEAEADKLSIWYDVGGIIVFSVSDPGQARMDVGFLLFHSHDKLYNCVYLAINSEGNILSRAKETGSHIEGVTGARETERTMSATSGPLGLRVCPNLGLSRSSSLILDCQASLNTASHLRC

SEQ ID NO: 3891 - DNA, 1148 bp, Homo sapien
ggcacgaggccacgagctgttgtgcatccagaggtggaattggggcccggcattccctcctcgtcccgggctggcccttgcccccaccctgcaactcctggttgagatgggctcagccaagagcgtcccagtcacaccagcgcggcctccgccgcacaacaagcatctggctcgagtggcggacccccgttcacctagtgctggcatcctgcgcactcccatccaggtggagagctctccacagccaggcctaccagcaggggagcaactggagggtcttaaacatgcccaggactcagatccccgctctcctactcttggtattgcacggacacctatgaagaccagcagtggagaccccccaagcccactggtgaaacagctgagtgaagtatttgaaactgaagactctaaatcaaatcttcccccagagcctgttctgcccccagaggcacctttatcttctgaattggacttgcctctgggtacccagttatctgttgaggaacagatgccaccttggaaccagactgagttcccctccaaacaggtgttttccaaggaggaagcaagacagcccacagaaacccctgtggccagccagagctccgacaagccctcaagggaccctgagactcccagatcttcaggttctatgcgcaatagatggaaaccaaacagcagcaaggtactagggagatcccccctcaccatcctgcaggatgacaactcccctggcaccctgacactacgacagggtaagcggccttcacccctaagtgaaaatgttagtgaactaaaggaaggagccattcttggaactggacgacttctgaaaactggaggacgagcatgggagcaaggccaggaccatgacaaggaaaatcagcactttcccttggtggagagctaggccctgcatggccccagcaatgcagtcacccagggcctggtgatatctgtgtcctctcaccccttctttcccagggatactgaggaatggcttgttttcttagactcctcctcagctaccaaactgggactcacagctttattgggctttctttgtgtcttgtgtgtttcttttatattaaaggaagtaattttaaatgttactttaaaaaggtaaaaaaaaaaaaaaaaaaaaa

SEQ ID NO: 3892 - protein, 268 aa, Homo sapien
MGSAKSVPVTPARPPPHNKHLARVADPRSPSAGILRTPIQVESSPQPGLPAGEQLEGLKHAQDSDPRSPTLGIARTPMKTSSGDPPSPLVKQLSEVFETEDSKSNLPPEPVLPPEAPLSSELDLPLGTQLSVEEQMPPWNQTEFPSKQVFSKEEARQPTETPVASQSSDKPSRDPETPRSSGSMRNRWKPNSSKVLGRSPLTILQDDNSPGTLTLRQGKRPSPLSENVSELKEGAILGTGRLLKTGGRAWEQGQDHDKENQHFPLVES

SEQ ID NO: 3893 - DNA, 3204 bp, Homo sapien; identical to SEQ ID NO: 3563

SEQ ID NO: 3894 - protein, 769 aa, Homo sapien; identical to SEQ ID NO: 3564

SEQ ID NO: 3895 - DNA, 782 bp, Homo sapien
ggcacgaggcccaggtaatttgagcaaaggccacagtgaactccggcgtggctgaggaaggaggaggcacccacaggctgctgggaggagagcataaggctcaaaatggaaaatcataaatccaataataaggaaaacataacaattgttgatatatccagaaaaattaaccagcttccagaagcagaaaggaatctacttgaaaatggatcggtttatgttggattaaatgctgctctttgtggcctcatagcaaacagtctttttcgacgcatcttgaatgtgacaaaggctcgcatagctgctggcttaccaatggcagggataccttttcttacaacagacttaacttacagatgttttgtaagttttcctttgaatacaggtgatttggattgtgaaacctgtaccataacacggagtggactgactggtcttgttattggtggtctataccctgttttcttggctatacctgtaaatggtggtctagcagccaggtatcaatcagctctgttaccacacaaagggaacatcttaagttactggattagaacttctaagcctgtctttagaaagatgttatttcctattttgctccagactatgttttcagcataccttgggtctgaacaatataaactacttataaaggcccttcagttatctgaacctggcaaagaaattcactgattttaaacaaatatgtaaacaaaaataaaatggtaaaaacagaaaaaaaaaaaaaaaaaaaaaaaaaaaaaaaaaaaaaaaaaaaaaaa

SEQ ID NO: 3896 - protein, 195 aa, Homo sapien
MENHKSNNKENITIVDISRKINQLPEAERNLLENGSVYVGLNAALCGLIANSLFRRILNVTKARIAAGLPMAGIPFLTTDLTYRCFVSFPLNTGDLDCETCTITRSGLTGLVIGGLYPVFLAIPVNGGLAARYQSALLPHKGNILSYWIRTSKPVFRKMLFPILLQTMFSAYLGSEQYKLLIKALQLSEPGKEIH

SEQ ID NO: 3897 - DNA, 3979 bp, Homo sapien
ggcggccgcggcagggcgggcgccgcgcggaggcagggcgggcgtattcaatggaagtgtgttaccagctgccggtactgcccctggacaggccggtcccccagcacgtcctcagccgccgaggagccatcagcttcagctccagctccgctctcttcggctgccccaatccccggcagctctctcagaggcgtggagctatttcctatgacagttctgatcagactgcattatacattcgtatgctaggagatgtacgtgtaaggagccgagcaggatttgaatcagaaagaagaggttctcacccatatattgattttcgtattttccactctcaatctgaaattgaagtgtctgtctctgcaaggaatatcagaaggctactaagtttccagcgatatcttagatcttcacgcttttttcgtggtactgcggtttcaaattccctaaacattttagatgatgattataatggacaagccaagtgtatgctggaaaaagttggaaattggaattttgatatctttctatttgatagactaacaaatggaaatagtctagtaagcttaacctttcatttatttagtcttcatggattaattgagtacttccatttagatatgatgaaacttcgtagatttttagttatgattcaagaagattaccacagtcaaaatccttaccataacgcagtccacgctgcggatgttactcaggccatgcactgttacttaaaggaacctaagcttgccaattctgtaactccttgggatatcttgctgagcttaattgcagctgccactcatgatctggatcatccaggtgttaatcaacctttccttattaaaactaaccattacttggcaactttatacaagaatacctcagtactggaaaatcaccactggagatctgcagtgggcttattgagagaatcaggcttattctcacatctgccattagaaagcaggcaacaaatggagacacagataggtgctctgatactagccacagacatcagtcgccagaatgagtatctgtctttgtttaggtcccatttggatagaggtgatttatgcctagaagacaccagacacagacatttggttttacagatggctttgaaatgtgctgatatttgtaacccatgtcggacgtgggaattaagcaagcagtggagtgaaaaagtaacggaggaattcttccatcaaggagatatagaaaaaaaatatcatttgggtgtgagtccactttgcgatcgtcacactgaatctattgccaacatccagattggttttatgacttacctagtggagcctttatttacagaatgggccaggttttccaatacaaggctatcccagacaatgcttggacacgtggggctgaataaagccagctggaagggactgcagagagaacagtcgagcagtgaggacactgatgctgcatttgagttgaactcacagttattacctcaggaaaatcggttatcataacccccagaaccagtgggacaaactgcctcctggaggtttttagaaatgtgaaatggggtcttgaggtgagagaacttaactcttgactgccaaggtttccaagtgagtgatgccagccagcattatttatttccaagatttcctctgttggatcatttgaacccacttgttaattgcaagacccgaacatacagcaatatgaatttggctttcatgtgaaaccttgaatataaagcccagcaggagagaatccgaaaggagtaacaaaggaagttttgatatgtgccacgactttttcaaagcatctaatcttcaaaacgtcaaacttgaattgttcagcaacaatctcttggaatttaaccagtctgatgcaacaatgtgtatcttgtaccttccactaagttctctctgagaaaatggaaatgtgaagtgcccagcctctgctgcctctggcaagacaatgtttacaaatcaactctgaaaatattggttctaaattgccttggagcatgattgtgaaggaaccactcaaacaaatttaaagatcaaactttagactgcagctctttccccctggtttgcctttttcttctttggatgccaccaaagcctcccatttgctatagttttatttcatgcactggaaactgagcatttatcgtagagtaccgccaagctttcactccagtgccgtttggcaatgcaattttttttagcaattagtttttaatttggggtgggaggggaagaacaccaatgtcctagctgtattatgattctgcactcaagacattgcatgttgttttcactactgtacacttgacctgcacatgcgagaaaaaggtggaatgtttaaaacaccataatcagctcaggtatttgccaatctgaaataaaagtgggatgggagagcgtgtccttcagatcaagggtactaaagtccctttcgctgcagtgagtgagaggtatgttgtgtgtgaatgtacggatgtgtgtttggtgatgtttgtgcatgtgtgacgtgcatgttatgtttctccatgtgggcaaagatttgaaagtaagcttttatttattattttagaatgtgacataatgagcagccacactcgggggaggggaaggttggtaggtaagctgtaacagattgctccagttgccttaaactatgcacatagctaagtgaccaaacttcttgttttgatttgaaaaaagtgcattgttttcttgtccctccctttgatgaaacgttaccctttgacgggccttttgatgtgaacagatgttttctaggacaaactataaggactaattttaaacttcaaacattccacttttgtaatttgttttaaattgttttatgtatagtaagcacaactgtaatctagttttaagagaaaccggtgctttcttttagttcatttgtatttcccttgttactgtaaaagactgtttattaattgtttacagtttgttgcaacagccattttcttgggagaaagcttgagtgtaaagccatttgtaaaaggctttgccatactcattttaatatgtgcctgttgctgttaacttttgatgaataaaaacctatcttttcatgaaacttctctctatacaaattgaaatacataatgctttctggttcttcttcaaaccaaaacttgtcaaattcatagacaagataacagtaaaactgatgaaagtgttccattgttggtataccaggaacaaggttatagagatgaaacttcaaagcttcactcttcagtaagctataagccatctctgtaagattgattccaactattgcataagaataccctaattttggatgatttgaacgggaaagaatctgatgagcttcactagtgtaattttcactgaaatacacaagattgattaacccaagtatgcccatgcctctgaagtctgtcttgggatcatcaccctgaaaaccaatttcagcccactgcttggagattctagcgtttaacttcttcgtgggcattagaagattccaaagcttcatgagtagctcttcatgctgtaggttatcagaatcatatggccttttcctcacactttctacatccaaatacagctgtttataaccagttatctgcagtaagcacatcttcatgcatattttaaaactggcatccttctcagggttaatattcttttccttcataatatcatctacatatttgtccacttcactctgaacaacatgtgtcgccttctgtaaaaccttattcttggagtatgtcaaggaattttctatcctgtgtgtcctttgtgcacctacataggtatcaaatattcgctgcaattcacacttcccagtcatctgtcgtaatagccatttcatccaaaatcgaaaaaagtgcccatagaagaactcccacaaagaaataaacatttttttttcctcacaggagcggaagaactagggggagcaggagctgcaatgcggccgc

SEQ ID NO: 3898 - protein, 482 aa, Homo sapien
MEVCYQLPVLPLDRPVPQHVLSRRGAISFSSSSALFGCPNPRQLSQRRGAISYDSSDQTALYIRMLGDVRVRSRAGFESERRGSHPYIDFRIFHSQSEIEVSVSARNIRRLLSFQRYLRSSRFFRGTAVSNSLNILDDDYNGQAKCMLEKVGNWNFDIFLFDRLTNGNSLVSLTFHLFSLHGLIEYFHLDMMKLRRFLVMIQEDYHSQNPYHNAVHAADVTQAMHCYLKEPKLANSVTPWDILLSLIAAATHDLDHPGVNQPFLIKTNHYLATLYKNTSVLENHHWRSAVGLLRESGLFSHLPLESRQQMETQIGALILATDISRQNEYLSLFRSHLDRGDLCLEDTRHRHLVLQMALKCADICNPCRTWELSKQWSEKVTEEFFHQGDIEKKYHLGVSPLCDRHTESIANIQIGFMTYLVEPLFTEWARFSNTRLSQTMLGHVGLNKASWKGLQREQSSSEDTDAAFELNSQLLPQENRLS

SEQ ID NO: 3899 - DNA, 2035 bp, Homo sapien; identical to SEQ ID NO: 3587

SEQ ID NO: 3900 - protein, 258 aa, Homo sapien; identical to SEQ ID NO: 3588

SEQ ID NO: 3901 - DNA, 4098 bp, Homo sapien
gccccgggaagatggagcagtcgccgtccacgccaccgccgccgcccggggctcccccgtccctgcggggccagcagcagctccagccaccagtgcccggtctcccggcgcgagaggcccgggagccgccggccaggacgcccccgagggtgtagaccgcgcccctggagagagtgataatcttcaaaatgaagactttggaaaattttaggttctctataggaactacaaaaatggaaggaaagaacattttcaaaaggaaattattttgaaagtatgtttacaacaaactgatactattgacagtttttttttttaaataataaaacactttaagaagattgtatttatggtaaaaggaaactggactaacaatgaggccaaagacttttcctgccacgacttattctggaaatagccggcagcgactgcaagagattcgtgaggggttaaaacagccatccaagtcttcggttcaggggctacccgcaggaccaaacagtgacacttccctggatgccaaagtcctggggagcaaagatgccaccaggcagcagcagcagatgagagccaccccaaagttcggaccttatcagaaagccttgagggaaatcagatattccttgttgccttttgctaatgaatcgggcacctctgcagctgcagaagtgaaccggcaaatgctgcaggaactggtgaacgcaggatgcgaccaggagatggctggccgagctctcaagcagactggcagcaggagcatcgaggccgccctggagtacatcagcaagatgggctacctggacccgaggaatgagcagattgtgcgggtcattaagcagacctccccaggaaaggggctcatgccaaccccagtgacgcggaggcccagcttcgaaggaaccggcgattcgtttgcgtcctaccaccagctgagcggtaccccctacgagggcccaagcttcggcgctgacggccccacggcgctggaggagatgccgcggccgtacgtggactaccttttccccggagtcggcccccacgggcccggccaccagcaccagcacccacccaagggctacggtgccagcgtagaggcagcaggggcacacttcccgctgcagggcgcgcactacgggcggccgcacctgctggtgcctggggaacccctgggctacggagtgcagcgcagcccctccttccagagcaagacgccgccggagaccgggggttacgccagcctgcccacgaagggccagggaggaccgccaggcgccggcctcgctttcccaccccctgccgccgggctctacgtgccgcacccacaccacaagcaggccggtcccgcggcccaccagctgcatgtgctgggctcccgcagccaggtgttcgccagcgacagccccccgcagagcctgctcactccctcgcggaacagcctcaacgtggacctgtatgaattgagcagcacctccgtccagcagtggccggctgccaccctggcccgccgggactccctgcagaagccgggcctggaggcgccgccgcgcgcgcacgtggccttccggcctgactgcccagtgcccagcaggaccaactccttcaacagccaccagccgcggcccggtccgcctggcaaggccgagccctccctgcccgcccccaacaccgtgacggctgtcacggccgcgcacatcttgcacccggtgaagagcgtgcgtgtgctgaggccggagccgcagacggctgtggggccctcgcaccccgcctgggtgcccgcgcctgccccggcccccgcccccgcccccgccccggctgcggagggcttggacgccaaggaggagcatgccctggcgctgggcggcgcaggcgccttcccgctggacgtggagtacggaggcccagaccggaggtgcccgcctccgccctacccgaagcacctgctgctgcgcagcaagtcggagcagtacgacctggacagcctgtgcgcaggcatggagcagagcctccgtgcgggccccaacgagcccgagggcggcgacaagagccgcaaaagcgccaagggggacaaaggcggaaaggataaaaagcagattcagacctctcccgttcccgtccgcaaaaacagcagagacgaagagaagagagagtcacgcatcaagagctactcgccatacgcctttaagttcttcatggagcagcacgtggagaatgtcatcaaaacctaccagcagaaggttaaccggaggctgcagctggagcaagaaatggccaaagctggactctgtgaagctgagcaggagcagatgcggaagatcctctaccagaaagagtctaattacaacaggttaaagagggccaagatggacaagtctatgtttgtcaagatcaaaaccctggggatcggtgcctttggagaagtgtgccttgcttgtaaggtggacactcacgccctgtacgccatgaagaccctaaggaaaaaggatgtcctgaaccggaatcaggtggtccacgtcaaggccgagagggacatcctggccgaggcagacaatgagtgggtggtcaaactctactactccttccaagacaaagacagcctgtactttgtgatggactacatccctggtggggacatgatgagcctgctgatccggatggaggtcttccctgagcacctggcccggttctacatcgcagagctgactttggccattgagagtgtccacaagatgggcttcatccaccgagacatcaagcctgataacattttgatagatctggatggtcacattaaactcacagatttcggcctctgcactgggttcaggtggactcacaattccaaatattaccagaaagggagccatgtcagacaggacagcatggagcccagcgacctctgggatgatgtgtctaactgtcggtgtggggacaggctgaagaccctagagcagagggcgcggaagcagcaccagaggtgcctggcacattcactggtggggactccaaactacatcgcacccgaggtgctcctccgcaaagggtacactcaactctgtgactggtggagtgttggagtgattctcttcgagatgctggtggggcagccgccctttttggcacctactcccacagaaacccagctgaaggtgatcaactgggagaacacgctccacattccagcccaggtgaagctgagccctgaggccagggacctcatcaccaagctgtgctgctccgcagaccaccgcctggggcggaatggggccgatgacctgaaggcccaccccttcttcagcgccattgacttctccagtgacatccggaagcagccagccccctacgttcccaccatcagccaccccatggacacctcgaatttcgaccccgtagatgaagaaagcccttggaacgatgccagcgaaggtagcaccaaggcctgggacacactcacctcgcccaataacaagcatcctgagcacgcattttacgaattcaccttccgaaggttctttgatgacaatggctacccctttcgatgcccaaagccttcaggagcagaagcttcacaggctgagagctcagatttagaaagctctgatctggtggatcagactgaaggctgccagcctgtgtacgtgtagatgggggccaggcacccccaccactcgctgcctcccaggtcagggtcccggagccggtgccctcacaggccaatagggaagccgagggctgttttgttttaaattagtccgtcgattacttcacttgaaattctgctcttcaccaagaaaacccaaacaggacacttttgaaaacaggactcagcatcgctttcaataggcttttcaggaccttcactgcattaaaacaatatttttaaaaatttagtacagtttagaaagagcacttattttgtttatatccattttttcttactaaattatagggattaactttgacaaatcatgctgctgttattttctacatttgtattttatccatagcacttattcacatttaggaaaagacataaaaactgaagaacattgatgagaaatctctgtgcaataacgaaaaaaaaaaaaaaaaaaaaaaaaa

SEQ ID NO: 3902 - protein, 1088 aa, Homo sapien
MRPKTFPATTYSGNSRQRLQEIREGLKQPSKSSVQGLPAGPNSDTSLDAKVLGSKDATRQQQQMRATPKFGPYQKALREIRYSLLPFANESGTSAAAEVNRQMLQELVNAGCDQEMAGRALKQTGSRSIEAALEYISKMGYLDPRNEQIVRVIKQTSPGKGLMPTPVTRRPSFEGTGDSFASYHQLSGTPYEGPSFGADGPTALEEMPRPYVDYLFPGVGPHGPGHQHQHPPKGYGASVEAAGAHFPLQGAHYGRPHLLVPGEPLGYGVQRSPSFQSKTPPETGGYASLPTKGQGGPPGAGLAFPPPAAGLYVPHPHHKQAGPAAHQLHVLGSRSQVFASDSPPQSLLTPSRNSLNVDLYELSSTSVQQWPAATLARRDSLQKPGLEAPPRAHVAFRPDCPVPSRTNSFNSHQPRPGPPGKAEPSLPAPNTVTAVTAAHILHPVKSVRVLRPEPQTAVGPSHPAWVPAPAPAPAPAPAPAAEGLDAKEEHALALGGAGAFPLDVEYGGPDRRCPPPPYPKHLLLRSKSEQYDLDSLCAGMEQSLRAGPNEPEGGDKSRKSAKGDKGGKDKKQIQTSPVPVRKNSRDEEKRESRIKSYSPYAFKFFMEQHVENVIKTYQQKVNRRLQLEQEMAKAGLCEAEQEQMRKILYQKESNYNRLKRAKMDKSMFVKIKTLGIGAFGEVCLACKVDTHALYAMKTLRKKDVLNRNQVVHVKAERDILAEADNEWVVKLYYSFQDKDSLYFVMDYIPGGDMMSLLIRMEVFPEHLARFYIAELTLAIESVHKMGFIHRDIKPDNILIDLDGHIKLTDFGLCTGFRWTHNSKYYQKGSHVRQDSMEPSDLWDDVSNCRCGDRLKTLEQRARKQHQRCLAHSLVGTPNYIAPEVLLRKGYTQLCDWWSVGVILFEMLVGQPPFLAPTPTETQLKVINWENTLHIPAQVKLSPEARDLITKLCCSADHRLGRNGADDLKAHPFFSAIDFSSDIRKQPAPYVPTISHPMDTSNFDPVDEESPWNDASEGSTKAWDTLTSPNNKHPEHAFYEFTFRRFFDDNGYPFRCPKPSGAEASQAESSDLESSDLVDQTEGCQPVYV

SEQ ID NO: 3903 - DNA, 2003 bp, Homo sapien
ggaatggggcgggacttccagtaggaggcggcaagtttgaaaagtgatgacggttgacgtttgctgatttttgactttgcttgtagctgctccccgaactcgccgtcttcctgtcggcggccggcactgtaggtgagcgcgagaggacggaggaaggaagcctgcagacagacgccttctccatcccaaggcgcgggcaggtgccgggacgctgggcctggcggtgttttcgtcgtgctcagcggtgggaggaggcggaagaaaccagagcctgggagattaacaggaaacttccaagatggaaactttgtctttccccagatataatgtagctgagattgtgattcatattcgcaataagatcttaacaggagctgatggtaaaaacctcaccaagaatgatctttatccaaatccaaagcctgaagtcttgcacatgatctacatgagagccttacaaatagtctatggaattcgactggaacatttttacatgatgccagtgaactctgaagtcatgtatccacatttaatggaaggcttcttaccattcagcaatttagttactcatctggactcatttttgcctatctgccgggtgaatgactttgagactgctgatattctatgtccaaaagcaaaacggacaagtcggtttttaagtggcattatcaactttattcacttcagagaagcatgccgtgaaacgtatatggaatttctttggcaatataaatcctctgcggacaaaatgcaacagttaaacgccgcacaccaggaggcattaatgaaactggagagacttgattctgttccagttgaagagcaagaagagttcaagcagctttcagatggaattcaggagctacaacaatcactaaatcaggattttcatcaaaaaacgatagtgctgcaagagggaaattcccaaaagaagtcaaatatttcagagaaaaccaagcgtttgaatgaactaaaattgttggtggtttctttgaaagaaatacaagagagtttgaaaacaaaaattgtggattctccagagaagttaaagaattataaagaaaaaatgaaagatacggtccagaagcttaaaaatgccagacaagaagtggtggagaaatatgaaatctatggagactcagttgactgcctgccttcatgtcagttggaagtgcagttatatcaaaagaaaatacaggacctttcagataatagggaaaaattagccagtatcttaaaggagagcctgaacttggaggaccaaattgagagtgatgagtcagaactgaagaaattgaagactgaagaaaattcgttcaaaagactgatgattgtgaagaaggaaaaacttgccacagcacaattcaaaataaataagaagcatgaagatgttaagcaatacaaacgcacagtaattgaggattgcaataaagttcaagaaaaaagaggtgctgtctatgaacgagtaaccacaattaatcaagaaatccaaaaaattaaacttggaattcaacaactaaaagatgctgctgaaagggagaaactgaagtcccaggaaatatttctaaacttgaaaactgctttggagaaataccacgacggtattgaaaaggcagcagaggactcctatgctaagatagatgagaagacagctgaactgaagaggaagatgttcaaaatgtcaacctgattaacaaaattacatgtctttttgtaaatggcttgccatcttttaattttctatttagaaagaaaagttgaagcgaatggaagtatcagaagtaccaaataatgttggcttcatcagtttttatacactctcataagtagttaataagatgaatttaatgtaggcttttattaatttataattaaaataacttgtgcagctattcatgtctctactctgccccttgttgtaaatagtttgagtaaaacaaaactagttacctttgaaatatatatatttttttctgttaaaaaaaaaaaaaaaaaaaaaa

SEQ ID NO: 3904 - protein, 464 aa, Homo sapien
METLSFPRYNVAEIVIHIRNKILTGADGKNLTKNDLYPNPKPEVLHMIYMRALQIVYGIRLEHFYMMPVNSEVMYPHLMEGFLPFSNLVTHLDSFLPICRVNDFETADILCPKAKRTSRFLSGIINFIHFREACRETYMEFLWQYKSSADKMQQLNAAHQEALMKLERLDSVPVEEQEEFKQLSDGIQELQQSLNQDFHQKTIVLQEGNSQKKSNISEKTKRLNELKLLVVSLKEIQESLKTKIVDSPEKLKNYKEKMKDTVQKLKNARQEVVEKYEIYGDSVDCLPSCQLEVQLYQKKIQDLSDNREKLASILKESLNLEDQIESDESELKKLKTEENSFKRLMIVKKEKLATAQFKINKKHEDVKQYKRTVIEDCNKVQEKRGAVYERVTTINQEIQKIKLGIQQLKDAAEREKLKSQEIFLNLKTALEKYHDGIEKAAEDSYAKIDEKTAELKRKMFKMST

SEQ ID NO: 3905 - DNA, 4633 bp, Homo sapien
gccctccattgtctccacggcggcgaggagcgccggcgagcgcagcccgggaccgagcggggcggcgcggctggcggggccggcggcggctgaagcgagagcgcgacgcgacgcgaccgcggcttcccgagctgcgcctggccgcccagcgccgcggcccgcccgaggcctggaggggtccgggccgccgtccatggtcgcggcgtcctgaggcgggggacgcgcccggcgcccccggccctcctccgcctcctcccgcggggcgggcggcctcctccggcgcctccccgcgcccgcccgccgctcgccgccgcctccctccctccttccctgcggctcccccggctttcggagcccgggggcggcctgtggcgcgcggagcccgcgccggactgcgcctctttggaccttgaggggaaacatgcgtttgccttggatcgtttgaaattctgagtttgggatccccgcccgcccgcctgcctcttccgccccgcgggttttttccttttttccttttgctttttttccttttctccctccgggtctcctttttgactccctccccctttatgctcgcccagccctccccctgctgctgagaagtgggggagggtctcggcctccaggttcccgccccaccggggcccgggcgagcatggggggcaagcagagcacggcggcccgctcccggggccccttcccgggggtctccaccgatgacagcgccgtgccgccgccgggaggggcgccccatttcgggcactaccggacgggcggcggggccatggggctgcgcagccgctcggtcagctcggtggcaggcatgggcatggaccccagcacggccgggggggtgccctttggcctctacacccccgcctcccggggcaccggcgactccgagagggcgcccggcggcggagggtctgcgtccgactccacctatgcccatggcaatggttaccaggagacgggcggcggtcaccatagagacgggatgctgtacctgggctcccgagcctcgctggcggatgctctacctctgcacatcgcacccaggtggttcagctcgcatagtggtttcaagtgccccatttgctccaagtctgtggcttctgacgagatggaaatgcactttataatgtgtttgagcaaacctcgcctctcctacaacgatgatgtgctgactaaagacgcgggtgagtgtgtgatctgcctggaggagctgctgcagggggacacgatagccaggctgccctgcctgtgcatctatcacaaaagctgcatagactcgtggtttgaagtgaacagatcttgtccggaacaccctgcggactgacctgcgggcttgcttgctgactcctctcaaagggacagagcgcccctgctccagggaggaggctcaccggaccctggggcagagctgagcttgggacaccagcgggaacagggcaccccttctgcactgacttccagatcatggttctcccttcctccctgaggacaccaaattggatgagagcaagtttgagagaagaatgaatcaactgctatccttcccctcacccctcagcccaggagggaaagggcattttctttttcatctttgaaaggcattgtgggtctgtctttaaagtgtttacaaaaaaaaattatataaaaaaaaagtctagtgtcgactggtgttttccctcgtgatgtttacagcttgctgtttgctgcccagccataacccactcagtgacagacgaacacagctaaggcctcgctgccagccttctgacggcgggcgagcacacggtctcttcccctgccccaactggccctctccaccaccaacttctctactttgggtttgtttggttttttccctctatttttctggctggttttttgctcttttctccccttgagaccctaatatcttgacttcattgccaaaaaacaacccattgagaactttcttcctactgatcccatctcttttcccttctttcctcctggttccggtcagttcagaggatttaacaatcacaagtgtcctgcaaaaatgcctgaacattattcttaggccctcgtggattttttttttcagaaaacttaaacaaaaaaagacttactaagaaatatgtacagctacccctgttttcaggcactatgtttgagaacattttagccattgatgttcacacgtggcatcagcccatgcaagataggtttctgtatttatatattaaaatacaaaaaaaaacttataaaatgtttaaaaaaatgttcaaagcttgggagaaaagctttcttcattagtcaaggtgttttgatatggtattaaaatgtctaataaaagatggcactgcgtgattttattttaatgaagtgttatacaatcaagaaatgggggcaagggcctgccccccactccctcacctacctccttagcattccttcaggctgctactcggggctccaggtgtgtgaattggtcctcagatagtcaggcctgggtggagggagtggcaagtcaggcgtgcctcctacaagcttcctaacctcttaagcatcatggaaccagtcagccctctgtggagtcattgtgccggacctctgaaaagatctgcaggggccaagatgttgcagccaccggaggctgcaaggatgtgggttcttccaggtgtgggcccagcccccctccttccagcctttgctccccatcccacgttccactcgccctgcctgttgttcagtttgcgtctcagtgctgactcacgggcatgcttcattgaggcccaggaagaggccctggtttggggctgtgccagctcagagcccttgaaccagaaccaactgctcaggctcacaaaagttggcaaaatgcgggctgggcaggcagctcggggcagggagcagcagtgcaggcctggcctgtgtccccgtgcccagcgggctcccggagcagcattccagagcctcctgcagagccagcgaaggaaagctctagagggagacgactccaccgcctctctgctctgacccttctcaggcccgcctgatgtgctggaccatccccctgctgccacggcccctggctccgcagtcaccctccatcagatgcttccagaagcacctactctgtgcaagggcattcacaacaggccagtgggcaaacgtgagccagggccagcggagaaacactaaagaagactcggtggttcagagcctgggtctcagcgcgggacccgtctggggtgaagaccttggggctgttgtgagtcggtggcaggaacgtgggctctagactgtgcattcaggctctcctacttggcagaatgatcttggggaaacgacttcatctgaacttcagatatttcacatgtgaagcggggacaaaaccatgcagctcagaggtccctgtgggggctgggggagctgccctgcaggtcttggcacatgcacagcaggctccccatagctttgtcaccacaaagggcactgttctattcacagcacctcctgcttctgcctggcaactgtgtctccctgtgctatatttaattccaccagcaaagctggcgaggcagggcccagccctgaaggagatctccttgcctgacccctggacctggaaatggaggcttcatgtgcccgccttggcggcttaagcctgctgctttggcagtgccatgggtgagccgagcagctgtgaggtgggtggggcagggctgtagcccacgccgggtgctattccaggctctaggggctggtgctcatccccacccccagcgacttccgtcctacctggcatgctgcagccctctgccggctgtggtgtcctctgaatttggacccaggttgcctgctcttgttgtgggggtgggattggggctgtctgtgtttcccaggtggagctcatgtttgtgatcctctatctggacagctctccagaatcctgtgttgcccctgttctgcctttctgggatgggagagaaggtgagggagccggcgagcaggttctaccctctctgctaagggcctagcacactttgatgaggttcctggacgtgagaccctcacaaagaccaaccattcctctaatagccatttaacggtactgcagttcatgggaaaatgtcctcattcttaggagatagatgctggattatataggtgaatgccttcaagaaatgtgtaatttaattccaaatagttccccccaaaatacacaaagcaaataaggccaaaatgttcattgttgaatctgcagtggctggtatttcagtgaacagtgtacttgttctttcaacttttctgtatgtttggaatttttcttaataaaagattgtgggaaatggtcatttgctgagcgcctcctagttgccaggcactggagggcgcatcaaagaagagtcctacccaggagggagagcgcagctgctgcaggattctcgcctggaagagtgggtggctggctggctggctggaaggggaggggcgagagggctgtctcggtgatgagcacacgcgtgctggggtggtttggggagagggctgagatttgtcaccagtgagcccttggcacggtctctgctccccaccagggcagcacgggacagaaacgtcacggaggagtagcctc

SEQ ID NO: 3906 - protein, 227 aa, Homo sapien
MGGKQSTAARSRGPFPGVSTDDSAVPPPGGAPHFGHYRTGGGAMGLRSRSVSSVAGMGMDPSTAGGVPFGLYTPASRGTGDSERAPGGGGSASDSTYAHGNGYQETGGGHHRDGMLYLGSRASLADALPLHIAPRWFSSHSGFKCPICSKSVASDEMEMHFIMCLSKPRLSYNDDVLTKDAGECVICLEELLQGDTIARLPCLCIYHKSCIDSWFEVNRSCPEHPAD

SEQ ID NO: 3907 - DNA, 4633 bp, Homo sapien; identical to SEQ ID NO: 3905

SEQ ID NO: 3908 - protein, 227 aa, Homo sapien; identical to SEQ ID NO: 3906

SEQ ID NO: 3909 - DNA, 2291 bp, Homo sapien
aaaaaggggcgggcgagcacggcccgcgggcggcgttcgctggagctggtggaccgggcggctgaccgaggggcggacgcgcggcggggcagaccgctggggactgcgggcggcgctgtgtccgtcgccatgacagatcagacctattgtgaccgcctggtgcaggacacgcctttcctgacaggccatgggcgcttgagtgagcagcaggtggacaggatcatcctccagctgaaccgttactacccacagatccttaccaacaaggaggcggaaaagttccggaaccccaaggcatccttgcgtgtgcggctctgtgacctcctgagccacctgcagcggagcggtgagcgggactgccaggagttctaccgagccctgtatatccatgcccagcccctgcacagccgcctgcccagccgccacgctctgcgtaagttccacatcaccaaccatgcatgcttggtgctggcccggggagggcaccccagcctgccgttgatggcatggatgtcctccatgaccacccaagtctgctgcagcccaggcctggcatcccctctcgcctcagcccctccccagaggccaccctctggccccgaggggagagtgtggcaggcacaggcagtgcagatgttggtctctgtctcccactttctcccccttcctccgtctctctctcatggcagttttcacacagcatggggcatcttatacgtccactcttgcccttccttttctaacctcattccacggggatcccttcatgtctgtgtggacagcaaccttgttcccacagctgcatggcgctcctaggcggtcccagctggaattacccaaccccatgacggaccctttcattgcagcgatctgcacacgtgtgggtgtttccataggacattgtcaggcacggatggctggtccgaagcacgtgcatttcagttttgaggctcctgtcctcaggcagtgtggactcaggccctgggagtcatgtggatgccagtagcctgggcccacagagctgctgggatgtggggggcatatcaagttgaagatggcaactctgatctgacgcctctgtgctcagggcccctggaggaggggctactgtcccttggcccttagacaacaggacagagaccagagggactgggcggcttgtcccaggctgctgggctgtggtctctgaccccctggaggcctccccacgcctcacagaacacagtgcagacggtgggcggggagagctcgaggggaggcccagccctgcaggtgggactggctctccctccccagccacgagtatgccacagggggctttcaaaaccaggcagggccaagccttggccccactggaggtagagcaccttctgtggctcccgggtgcctttaggcccgtccaggagttggagcagaggagaagacccagactgtgcatagttccctgaggagggctagcctcaggtgccacagcctggttcggcctggcggccccaggacgcagcagcaaccttgggcttcctgcggggtgactaccttgccctccggccctgcccgttgactaactatgctctgtggttttgtttccagagaactcagattgcacagagctagactcgggcagccagagcggcgagctgagtaacaggggtaacacctccctgctgcccctccctctctctccctctctctccctctctctttaccctccccagggctccatctccgcctcaggggcttctccaccccaagtctggctccattcctggccttctgttggtgacagacccccccctaaggtgctcgtttgggggctcttcaggcagcacctcagcctggcacccccactcccctgcacagcccccaggcctcaggaccccacccctctgaggcccaggggagccctgttcacgctggtttctccccaggacccatgagcttcctggctggcctgggccttgctgtgggactggccctgctcctgtactgctatccgccagaccccaagggcctgccagggacccggcgcgtcctcggtttctcgcctgtcatcatcgacagacatgtcagccgctacctgctggccttcctggcagatgacctaggggggctctgacagaccctggacccagggcctcacctgccactcaaccaaagagtcctcgagccggcccgccaaggggactgctgcttctttttctaaatgcatatttttcattatttataatttgtgtaaaaaacacaccttcaccttacaaggtgctgaccatattaaatgttcaagttctctc

SEQ ID NO: 3910 - protein, 228 aa, Homo sapien
MTDQTYCDRLVQDTPFLTGHGRLSEQQVDRIILQLNRYYPQILTNKEAEKFRNPKASLRVRLCDLLSHLQRSGERDCQEFYRALYIHAQPLHSRLPSRHALRKFHITNHACLVLARGGHPSLPLMAWMSSMTTQVCCSPGLASPLASAPPQRPPSGPEGRVWQAQAVQMLVSVSHFLPLPPSLSHGSFHTAWGILYVHSCPSFSNLIPRGSLHVCVDSNLVPTAAWRS

SEQ ID NO: 3911 - DNA, 3131 bp, Homo sapien
atgatattgaagagatgggagaagaagatagtgaggtcattgaacctccttctctacctcagcttcagacccccctggccagtgagctggacctcatgccctacacacccccacagtctaccccaaagtctgccaaaggcagtgcaaagaaggaaggctccaaacggaaaatcaacatgagtggctacatcctgttcagcagtgagatgagggctgtgattaaggcccaacacccagactactctttcggggagctcagccgcctggtggggacagaatggagaaatcttgagacagccaagaaagcagaatatgaaggcatgatgggtggctatccgccaggccttccacctttgcagggcccagttgatggccttgttagcatgggcagcatgcagccacttcaccctggggggcctccaccccaccatcttccgccaggtgtgcctggcctcccgggcatcccaccaccgggtgtgatgaaccaaggagtggcccctatggtagggactccagcaccaggtggaagtccatatggacaacaggtgggagttttggggcctccagggcagcaggcaccacctccatatcccggcccacatccagctggaccccctgtcatacagcagccaacaacacccatgtttgtagctcccccaccaaagacccagcggcttcttcactcagaggcctacctgaaatacattgaaggactcagtgcggagtccaacagcattagcaagtgggatcagacactggcagctcgaagacgcgacgtccatttgtcgaaagaacaggagagccgcctaccctctcactggctgaaaagcaaaggggcccacaccaccatggcagatgccctctggcgccttcgagatttgatgctccgggacaccctcaacattcgccaagcatacaacctagaaaatgtttaatcacaccattacgtttcttttatatagaagcataaagagttgtggatcagtagccattttagttactgggggtggggggaaggaacaaaggaggataatttttattgcattttactgtacatcacaaggccatttttatatacggacacttttaataagctatttcaatttgtttgttatattaagttgactttatcaaatacacaaagatttttttgcatatgtttccttcgtttaaaaccagtttcataattggttgtatatgtagacttggagttttatctttttacttgttgccatggaactgaaaccattagaggtttttgtcttggcttggggtttttgttttcttggttttgggtttttttatatatatatataaaagaacaaaatgaaaaaaaacacacacacacaagagtttacagattagtttaaattgataatgaaatgtgaagtttgtcctagtttacatcttagagaggggagtatacttgtgtttgtttcatgtgcctgaatatcttaagccactttctgcaaaagctgtttcttacagatgaagtgctttctttgaaaggtggttatttaggttttagatgtttaatagacacagcacatttgctctattaactcagaggctcactacagaaatatgtaatcagtgctgtgcatctgtctgcagctaatgtacctcctggacaccaggaggggaaaaagcactttttcaattgtgctgagttagacatctgtgagttagactatggtgtcagtgatttttgcagaacacgtgcacaaccctgaggtatgtttaatctaggcaggtacgtttaaggatattttgatctatttataatgaattcacaatttatgcctataaatttcagatgatttaaaattttaaacctgttacattgaaaaacattgaagttcgtcttgaagaaagcattaaggtatgcatggaggtgatttatttttaaacataacacctaacctaacatgggtaagagagtatggaactagatatgagctgtataagaagcataattgtgaacaagtagattgattgccttcatatacaagtatgttttagtattccttatttccttattatcagatgtattttttcttttaagtttcaatgttgttataattctcaaccagaaatttaatactttctaaaatattttttaaatttagcttgtgcttttgaattacaggagaagggaatcataatttaataaaacgcttactagaaagaccattacagatcccaaacacttgggtttggtgaccctgtctttcttatatgaccctacaataaacatttgaaggcagcataggatggcagacagtaggaacattgtttcacttggcggcatgtttttgaaacctgctttatagtaactgggtgattgccattgtggtagagcttccactgctgtttataatctgagagagttaatctcagaggatgcttttttccttttaatctgctatgaatcagtacccagatgtttaattactgtacttattaaatcatgagggcaaaagagtgtagaatggaaaaaagtctcttgtatctagatactttaaatatgggaggccctttaacttaattgcctttagtcaaccactggatttgaatttgcatcaagtattttaaataatattgaatttaaaaaaatgtattgcagtagtgtgtcagtaccttattgttaaagtgagtcagataaatcttcaattcctggctatttgggcaattgaatcatcatggactgtataatgcaatcagattattttgtttctagacatccttgaattacaccaaagaacatgaaatttagttgtggttaaattatttatttatttcatgcattcattttatttcccttaaggtctggatgagacttctttggggagcctctaaaaaaatttttcactgggggccacgtgggtcattagaagccagagctctcctccaggctccttcccagtgcctagaggtgctataggaaacatagatccagccaggggcttccctaaagcagtgcagcaccggcccagggcatcactagacaggccctaattaagttttttttaaaaagcctgtgtatttattttagaatcatgtttttctgtatattaacttgggggatatcgttaatatttaggatataagatttgaggtcagccatcttc

SEQ ID NO: 3912 - protein, 306 aa, Homo sapien
MGEEDSEVIEPPSLPQLQTPLASELDLMPYTPPQSTPKSAKGSAKKEGSKRKINMSGYILFSSEMRAVIKAQHPDYSFGELSRLVGTEWRNLETAKKAEYEGMMGGYPPGLPPLQGPVDGLVSMGSMQPLHPGGPPPHHLPPGVPGLPGIPPPGVMNQGVAPMVGTPAPGGSPYGQQVGVLGPPGQQAPPPYPGPHPAGPPVIQQPTTPMFVAPPPKTQRLLHSEAYLKYIEGLSAESNSISKWDQTLAARRRDVHLSKEQESRLPSHWLKSKGAHTTMADALWRLRDLMLRDTLNIRQAYNLENV

SEQ ID NO: 3913 - DNA, 2883 bp, Homo sapien
aacagatcttcatgaatgtcgctatctttgaggatgaagtttttgctggagttaccacacaccaggaactctttccacacagcctgctgagtgtgattgccaacttcatccctttctctgatctcaaccagagtccacggaacatgtaccaatgccagatgggtaagcaaactatgggctttccacttctcacttatcaagaccgatcggataacaaactgtatcgtcttcagactcctcagagtcccttggtgagaccctccatgtatgattattatgacatggataactatccaattgggaccaatgccatcgttgctgtgatttcttacactggctatgatatggaagatgccatgattgtgaataaggcctcttgggaacgaggctttgcccatggaagtgtctacaagtctgagttcatagacctctctgaaaaaattaaacaaggagatagtagcctggtgtttggcatcaaacctggtgacccacgcgttctgcagaagttagatgacgatggattgccgtttataggagcaaaactgcagtacggagatccgtattacagctacctcaacctcaacaccggggaaagttttgtgatgtactataagagtaaagaaaattgtgttgtggataacatcaaagtgtgcagtaatgacactgggagtggaaaattcaagtgtgtttgcatcactatgagagtgcctcggaacccaactatcggagataaatttgccagtcgccatgggcagaagggcattttaagcagattgtggccggctgaggacatgccttttactgagagtgggatggtcccagacattctgttcaatccccatggttttccatcccgcatgaccattgggatgttaattgagagtatggccgggaagtctgcagctttgcatggtctctgccatgatgctacacccttcatcttctcagaggagaactcggccttagaatactttggtgagatgttaaaggctgctggctacaatttctatggcaccgagaggttatatagtggcatcagtgggctagaactggaagcagacatcttcataggagtggtttattatcagcgcttacgccatatggtctcagacaaatttcaagtaaggacaactggagcccgagacagagtcaccaaccagcctattgggggaagaaatgtccagggtggaatccgttttggggagatggaacgggatgcgcttttagctcatggtacatcttttctccttcatgaccgcctcttcaactgctcagatcggtcggtagcccatgtgtgtgaagtgtggcagtttactctctccactgttggagaagccacccccttcttggtctgccatgcgcaacagaaaatacaactgtactctgtgtagtcgcagtgacactatcgatactgtttctgtgccttatgtttttcggtattttgtagctgaactggcagctatgaacatcaaagtgaaactggatgttgtttaacttgatgttgaccttttggattaaggggactatcagattaaagcaaaatgtaattttaattcaatgaagatatcattaccaggttactcttgagatttttcaacggtgttagaactctcaaccaagacctgaaaaccaagtatgcaaggtttctgaatctctctggtagattaactattgacaatgattttctgttatctttgttcaaaaagttcatgtcttctcaaaatatgaaatattgataaatggaagagcatacggtgacaagtctcctttccaaccccaggttccctacaccctgctctcagcaggcagtgagtgtcacacacctgttaatccatcttgagcaggacagtactatacaaatagaatgcaagctgtaatgtaattttatattttcttatagccacgttgaagtaaaaacaaacaggtacagtgttttttaccagctttatagaagtacagttgttacatatttaatgaatacaatttgatgggtctgactatatgcacacacctttgataccatcaccacaatcagggtaataaacatacctgtcatctccacaagtttcctcctgcccctttgttttttgctttttggttgctgttgagtttttgttttgtcttctgtggtaagaacacttaactcaagacctaccctcttaacaaatctttaagtgcacgatatagtattgttaattccaggcaccatgttgtacaacagatctttagaccttacttgtcttgcataactgaagctttatacctgttgaacaactctccatttccctggcccctagcaaccacccttctaccctgtttctatgagtttgactattacagatatctcatatagtgggatcatgcaatatttgtcctgtgactggcttatttcacttagcatagtgaaataagattcatccattttggaagccaggcatggtgctgtgcatctatagtccctgctatttgagaggctgaggtgggaggatcatttgagtgcaggagttcaaggacagcctgggtaatataggaagaccctgtcttgaagaccctgacctcaagtgatccacccacctcggcctccgaaagtgctaggattacaggtgtgagccactgtgcctggcctccggtgagtattttatatttagtctacacttccatacttggcttttttctgcttttatgttgatctgctttcatagcagtgtgtagagtgccacttatgttttctttcttgtgtacagtattttattgtatggatttaccatcccctgtgtatttaagttgttccattctttggccattataacttttttctgcaaatattctggtgacttatctttggccattataaactgttgataataaaaaaaaaaaaaaaaa

SEQ ID NO: 3914 - protein, 459 aa, Homo sapien
MNVAIFEDEVFAGVTTHQELFPHSLLSVIANFIPFSDLNQSPRNMYQCQMGKQTMGFPLLTYQDRSDNKLYRLQTPQSPLVRPSMYDYYDMDNYPIGTNAIVAVISYTGYDMEDAMIVNKASWERGFAHGSVYKSEFIDLSEKIKQGDSSLVFGIKPGDPRVLQKLDDDGLPFIGAKLQYGDPYYSYLNLNTGESFVMYYKSKENCVVDNIKVCSNDTGSGKFKCVCITMRVPRNPTIGDKFASRHGQKGILSRLWPAEDMPFTESGMVPDILFNPHGFPSRMTIGMLIESMAGKSAALHGLCHDATPFIFSEENSALEYFGEMLKAAGYNFYGTERLYSGISGLELEADIFIGVVYYQRLRHMVSDKFQVRTTGARDRVTNQPIGGRNVQGGIRFGEMERDALLAHGTSFLLHDRLFNCSDRSVAHVCEVWQFTLSTVGEATPFLVCHAQQKIQLYSV

SEQ ID NO: 3915 - DNA, 3014 bp, Homo sapien
agcggagttctcccgggcgcctagcgggatcgccagcgcggcagtgggggcttccgcggctgcaagccagcgggtcctgtgagggcgagcggaggcggagaaagggcgcgggagtgagagagggtgagtcagccactgtctatgcaataaagggaggcctcaccgcgggatagggctgaattcagaagtgcggcccgtgccgcagtctgttccaggacgcggcttgtcttagcgtcagcgagggaaggttgaggaggagccagagcctggtcctgcagcctttctcgccgtcagcgcccgtcgccatctccaccatgcagtcccgggaagacgtcccgcgctctcgccgcctcgccagtccccgtggtgggaggcggcccaagaggatttccaagccctcggtttcggcctttttcacgggtccagaggagttaaaggacacggcccattctgcagccctgctggcacagctcaagtccttctacgacgcgcggctgctgtgtgatgtgaccatcgaggtggtgacgcctggcagcgggcctggcacgggtcgcctcttttcctgcaatcgcaacgtgctagcagctgcgtgtccctacttcaagagcatgttcacaggtggcatgtacgagagccagcaggccagcgtgaccatgcacgatgtggacgccgagtccttcgaggtgttggtcgactactgctacacgggtcgtgtgtctctcagtgaggccaatgtgcagcgcctgtacgcggcctccgacatgctacagctggaatatgtgcgggaagcctgtgcctccttcttagcccgacgtcttgacctgaccaactgcaccgccatcctcaagtttgcagacgccttcgaccatcacaagcttcgatctcaggcccagtcctacatagctcacaacttcaagcagctcagccgaatgggttcaattcgggaggagactctagcagatctaaccctggcccagctgctggctgtcctacgcctggatagtctggacatagagagtgagcggactgtatgccatgtagctgtgcagtggctggaggctgctgccaaagagcggggtcccagtgctgcagaagtcttcaagtgcgtgcgctggatgcacttcactgaagaagatcaggactacttagaagggctgctgaccaagcccatcgtgaagaagtactgcctggacgttattgaaggggccctgcagatgcgctatggtgacctgttgtacaagtctctggtgccagtgccaaacagcagcagcagcagtagcagcagcaactctcttgtatctgcagcagaaaatccaccccagagactgggtatgtgtgccaaggagatggtgatcttctttggacatcctagagatccctttctctgctatgacccttactcgggggacatttacacaatgccatcccctttgaccagctttgctcacactaagactgtcacctcctcagctgtctgtgtgtccccagaccatgacatctatctagctgctcagcccaggaaagacctctgggtgtataaaccagctcagaatagttggcagcaacttgcagatcgcttgctgtgtcgtgagggcatggatgtggcatatctcaatggctacatctacattttggggggacgagaccctattactggagttaagttgaaggaagtggaatgctacagtgttcagagaaaccagtgggcattggtggctcctgtccctcattccttctattcctttgaactcatagtggttcagaactatctttatgctgtcaacagtaagcgcatgctttgctatgatcctagccacaatatgtggctgaactgtgcttctcttaaacgtagtgactttcaggaagcatgtgtcttcaatgatgaaatctattgtatctgtgacatcccagtcatgaaggtctacaacccagctaggggagaatggaggcggattagtaatattcctttggattcagagacccacaactaccagattgtcaatcatgaccaaaagttgcttctcatcacttctacaaccccacaatggaaaaagaaccgagtgacagtgtatgagtatgatactagggaagatcagtggattaatataggtaccatgttaggccttttgcagtttgactctggctttatttgcctttgtgctcgtgtttatccttcctgccttgaacctggtcagagttttattactgaggaagatgatgcacggagtgagtctagtactgaatgggacttagatggattcagtgagctggactctgagtcaggaagttcaagttctttttcagatgatgaagtctgggtgcaagtagcacctcagcgaaatgcacaggatcagcagggttctttgtaaatagtattttgagacactaagatgtttctactgctacggaatgtattttaaacacatatcgtttctttttcttggaaaaaaagttgattaggaccacagatttggtttagaaagggtaatattttgaaatactacaaggtttagacagtccatgaaatcgacctgtttaataatttaccatcctgaaagtccagaattaaaatatggaagcaagaactatataattgattaggatgcttggtaggtttttttcattgttcaaatattcattgcacagtggattgttttgattagttagtatgctttttttttaattaattcagtcttctgttaatttttaagttttggttagtgccacaaggaatttaactttttgatttgtataatagaaaactgaactaggaattgttagcggggttttgaaggatgtgtactttccttcaaaataaagtggtagattttcaaaattttacactagtcagttctttatattctaagttaaatgtagtttgtaaaattattttggttttcttctacaaaggaaaaaattggatttatatatataaggttactgcataatgatttcattttgataatgtgcagaatggcctcataagctcacagaaagcaaaaaaaaaaaaaaaa

SEQ ID NO: 3916 - protein, 684 aa, Homo sapien
MQSREDVPRSRRLASPRGGRRPKRISKPSVSAFFTGPEELKDTAHSAALLAQLKSFYDARLLCDVTIEVVTPGSGPGTGRLFSCNRNVLAAACPYFKSMFTGGMYESQQASVTMHDVDAESFEVLVDYCYTGRVSLSEANVQRLYAASDMLQLEYVREACASFLARRLDLTNCTAILKFADAFDHHKLRSQAQSYIAHNFKQLSRMGSIREETLADLTLAQLLAVLRLDSLDIESERTVCHVAVQWLEAAAKERGPSAAEVFKCVRWMHFTEEDQDYLEGLLTKPIVKKYCLDVIEGALQMRYGDLLYKSLVPVPNSSSSSSSSNSLVSAAENPPQRLGMCAKEMVIFFGHPRDPFLCYDPYSGDIYTMPSPLTSFAHTKTVTSSAVCVSPDHDIYLAAQPRKDLWVYKPAQNSWQQLADRLLCREGMDVAYLNGYIYILGGRDPITGVKLKEVECYSVQRNQWALVAPVPHSFYSFELIVVQNYLYAVNSKRMLCYDPSHNMWLNCASLKRSDFQEACVFNDEIYCICDIPVMKVYNPARGEWRRISNIPLDSETHNYQIVNHDQKLLLITSTTPQWKKNRVTVYEYDTREDQWINIGTMLGLLQFDSGFICLCARVYPSCLEPGQSFITEEDDARSESSTEWDLDGFSELDSESGSSSSFSDDEVWVQVAPQRNAQDQQGSL

SEQ ID NO: 3917 - DNA, 1598 bp, Homo sapien
agctgcggcgctgggctggcggcggcgagtccacgtgctccccgcggccggttgaaaccgttggcgggcgctggctgagaggcaatgtttgctgtcttccattggagtgactgaatttctacatgacggctttttgacaagacttaaaacctgtcttggatagagaatatttagccatttacctaaaaatggtattttttacatgcaatgcatgtggtgaatcagtgaagaaaatacaagtggaaaagcatgtgtctgtttgcagaaactgtgaatgcctttcttgcattgactgcggtaaagatttctggggcgatgactataaaaaccacgtgaaatgcataagtgaagatcagaagtatggtggcaaaggctatgaaggtaaaacccacaaaggcgacatcaaacagcaggcgtggattcagaaaattagtgaattaataaagagacccaatgtcagccccaaagtgagagaacttttagagcaaattagtgcttttgacaacgttcccaggaaaaaggcaaaatttcagaattggatgaagaacagtttaaaagttcataatgaatccattctggaccaggtgtggaatatcttttctgaagcttccaacagcgaaccagtcaataaggaacaggatcaacggccactccacccagtggcaaatccacatgcagaaatctccaccaaggttccagcctccaaagtgaaagacgccgtggaacagcaaggggaggtgaagaagaataaaagagaaagaaaggaagaacggcagaagaaaaggaaaagagaaaagaaagaactaaagttagaaaaccaccaggaaaactcaaggaatcagaagcctaagaagcgcaaaaagggacaggaggctgaccttgaggctggtggggaggaagtccctgaggccaatggctctgcagggaagaggagcaagaagaagaagcagcgcaaggacagcgccagtgaggaagaggcacgcgtgggcgcagggaagaggaagcggaggcactcggaagttgaaacagattctaagaagaaaaagatgaagctcccagagcatcctgagggcggagaaccagaagacgatgaggctcctgcaaaaggtaaattcaactggaagggaactattaaagcaattctgaaacaggccccagacaatgaaataaccatcaaaaagctaaggaaaaaggttttagctcagtactacacagtgacagatgagcatcacagatccgaagaggaactcctggtcatctttaacaagaaaatcagcaagaaccctacctttaagttattaaaggacaaagtcaagcttgtgaaatgaacatttgtgtatttaaaaattgaatccattctgctgacttcttcctttcactgctgtttataaaatgtgtaatgaattctaacaactcaaattttgctttttgaagctgtatttttaagttaagaaaatatatttttggtataacttttatgagaaaaataaaatatattctggtccaaaaaaaaaaaaaaaaaaaaaaaaaaaaaaaaaaaaaaaaaaaaaaaaaaaaaaaaaaaaaaaaaaaaaaaaaaaaaaaaaaaaaaaaaaaaa

SEQ ID NO: 3918 - protein, 379 aa, Homo sapien
MVFFTCNACGESVKKIQVEKHVSVCRNCECLSCIDCGKDFWGDDYKNHVKCISEDQKYGGKGYEGKTHKGDIKQQAWIQKISELIKRPNVSPKVRELLEQISAFDNVPRKKAKFQNWMKNSLKVHNESILDQVWNIFSEASNSEPVNKEQDQRPLHPVANPHAEISTKVPASKVKDAVEQQGEVKKNKRERKEERQKKRKREKKELKLENHQENSRNQKPKKRKKGQEADLEAGGEEVPEANGSAGKRSKKKKQRKDSASEEEARVGAGKRKRRHSEVETDSKKKKMKLPEHPEGGEPEDDEAPAKGKFNWKGTIKAILKQAPDNEITIKKLRKKVLAQYYTVTDEHHRSEEELLVIFNKKISKNPTFKLLKDKVKLVK

SEQ ID NO: 3919 - DNA, 1598 bp, Homo sapien; identical to SEQ ID NO: 3917

SEQ ID NO: 3920 - protein, 379 aa, Homo sapien; identical to SEQ ID NO: 3918

SEQ ID NO: 3921 - DNA, 2952 bp, Homo sapien
cagtttcattaggctctgaagccattacaaaggttgcttaacttctaattatttgatcactgaggaaaatccagaaagctacacaacactgaaggggtgaaataaaagtccagcgatccagcgaaagaaaagagaagtgacagaaacaactttacctggactgaagataaaagcacagacaagagaacaatgccctggacatggctccagagatccacatgacaggcccaatgtgcctcattgagaacactaatggggaactggtggcgaatccagaagctctgaaaatcctgtctgccattacacagcctgtggtggtggtggcaattgtgggcctctaccgcacaggaaaatcctacctgatgaacaagctagctgggaagaataagggcttctctctgggctccacagtgaaatctcacaccaaaggaatctggatgtggtgtgtgcctcaccccaaaaagccagaacacaccttagtcctgcttgacactgagggcctgggagatgtaaagaagggtgacaaccagaatgactcctggatcttcaccctggccgtcctcctgagcagcactctcgtgtacaatagcatgggaaccatcaaccagcaggctatggaccaactgtactatgtgacagagctgacacatcgaatccgatcaaaatcctcacctgatgagaatgagaatgaggattcagctgactttgtgagcttcttcccagattttgtgtggacactgagagatttctccctggacttggaagcagatggacaacccctcacaccagatgagtacctggagtattccctgaagctaacgcaaggtaacaggaagcttgcccagcttgagaaactacaagatgaagagctggaccctgaatttgtgcaacaagtagcagacttctgttcctacatctttagcaattccaaaactaaaactctttcaggaggcatcaaggtcaatgggccttgtctagagagcctagtgctgacctatatcaatgctatcagcagaggggatctgccctgcatggagaacgcagtcctggccttggcccagatagagaactcagccgcagtgcaaaaggctattgcccactatgaccagcagatgggccagaaggtgcagctgcccgcagaaaccctccaggagctgctggacctgcacagggttagtgagagggaggccactgaagtctatatgaagaactctttcaaggatgtggaccatctgtttcaaaagaaattagcggcccagctagacaaaaagcgggatgacttttgtaaacagaatcaagaagcatcatcagatcgttgctcagctttacttcaggtcattttcagtcctctagaagaagaagtgaaggcgggaatttattcgaaaccagggggctattgtctctttattcagaagctacaagacctggagaaaaagtactatgaggaaccaaggaaggggatacaggctgaagagattctgcagacatacttgaaatccaaggagtctgtgaccgatgcaattctacagacagaccagattctcacagaaaaggaaaaggagattgaagtggaatgtgtaaaagctgaatctgcacaggcttcagcaaaaatggtggaggaaatgcaaataaagtatcagcagatgatggaagagaaagagaagagttatcaagaacatgtgaaacaattgactgagaagatggagagggagagggcccagttgctggaagagcaagagaagaccctcactagtaaacttcaggaacaggcccgagtactaaaggagagatgccaaggtgaaagtacccaacttcaaaatgagatacaaaagctacagaagaccctgaaaaaaaaaaccaagagatatatgtcgcataagctaaagatctaaacaacagagcttttctgtcatcctaacccaaggcataactgaaacaattttagaatttggaacaagtgtcactatatttgataataattagatcttgcatcataacactaaaagtttacaagaacatgcagttcaatgatcaaaatcatgttttttccttaaaaagattgtaaattgtgcaacaaagatgcatttacctctgtaccaacagaggagggatcatgagttgccaccactcagaagtttattcttccagacgaccagtggatactgaggaaagtcttaggtaaaaatcttgggacatatttgggcactggtttggccaagtgtacaataggtcccaatatcagaaacaaccatcctagcttcctagggaagacagtgtacagttctccattatatcaaggctacaaggtctatgagcaataatgtgatttctggacattgcccatggataattctcactgatggatctcaagctaaagcaaaccatcttatacagagatctagaatcttatattttccataggaaggtaaagaaatcattagcaagagtaggaattgaatcataaacaaattggctaatgaagaaatcttttctttcttgttcaattcatctagattataaccttaatgtgacacctgagacctttagacagttgaccctgaattaaatagtcacatggtaacaattatgcactgtgtaattttagtaatgtataacatgcaatgatgcactttaactgaagatagagactatgttagaaaattgaactaatttaattatttgattgttttaatcctaaagcataagttagtcttttcctgattcttaaaggtcatacttgaaatcctgccaattttccccaaagggaatatggaattttttttgactttcttttgagcaataaaataattgtcttgccattacttagtatatgtagacttcatcccaattgtcaaacatcctaggtaagtggttgacatttcttacagcaattacagattatttttgaactagaaataaactaaactagaaacaaaaaaaaaaaaaaaaaaa

SEQ ID NO: 3922 - protein, 563 aa, Homo sapien
MAPEIHMTGPMCLIENTNGELVANPEALKILSAITQPVVVVAIVGLYRTGKSYLMNKLAGKNKGFSLGSTVKSHTKGIWMWCVPHPKKPEHTLVLLDTEGLGDVKKGDNQNDSWIFTLAVLLSSTLVYNSMGTINQQAMDQLYYVTELTHRIRSKSSPDENENEDSADFVSFFPDFVWTLRDFSLDLEADGQPLTPDEYLEYSLKLTQGNRKLAQLEKLQDEELDPEFVQQVADFCSYIFSNSKTKTLSGGIKVNGPCLESLVLTYINAISRGDLPCMENAVLALAQIENSAAVQKAIAHYDQQMGQKVQLPAETLQELLDLHRVSEREATEVYMKNSFKDVDHLFQKKLAAQLDKKRDDFCKQNQEASSDRCSALLQVIFSPLEEEVKAGIYSKPGGYCLFIQKLQDLEKKYYEEPRKGIQAEEILQTYLKSKESVTDAILQTDQILTEKEKEIEVECVKAESAQASAKMVEEMQIKYQQMMEEKEKSYQEHVKQLTEKMERERAQLLEEQEKTLTSKLQEQARVLKERCQGESTQLQNEIQKLQKTLKKKTKRYMSHKLKI

SEQ ID NO: 3923 - DNA, 689 bp, Homo sapien
gcaagagagcgggaagccgagctgggcgagaagtaggggagggcggtgctccgccgcggtggcggttgctatcgcttcgcagaacctactcaggcagccagctgagaagagttgagggaaagtgctgctgctgggtctgcagacgcgatggataacgtgcagccgaaaataaaacatcgccccttctgcttcagtgtgaaaggccacgtgaagatgctgcggctggcactaactgtgacatctatgaccttttttatcatcgcacaagcccctgaaccatatattgttatcactggatttgaagtcaccgttatcttatttttcatacttttatatgtactcagacttgatcgattaatgaagtggttattttggcctttgcttgatattatcaactcactggtaacaacagtattcatgctcatcgtatctgtgttggcactgataccagaaaccacaacattgacagttggtggaggggtgtttgcacttgtgacagcagtatgctgtcttgccgacggggcccttatttaccggaagcttctgttcaatcccagcggtccttaccagaaaaagcctgtgcatgaaaaaaaagaagttttgtaattttatattactttttagtttgatactaagtattaaacatatttctgtattcttccaaaaaaaaaaaaaaaaaaaaaaaaaaa

SEQ ID NO: 3924 - protein, 152 aa, Homo sapien
MDNVQPKIKHRPFCFSVKGHVKMLRLALTVTSMTFFIIAQAPEPYIVITGFEVTVILFFILLYVLRLDRLMKWLFWPLLDIINSLVTTVFMLIVSVLALIPETTTLTVGGGVFALVTAVCCLADGALIYRKLLFNPSGPYQKKPVHEKKEVL

SEQ ID NO: 3925 - DNA, 2435 bp, Homo sapien
tagaaagaatgatcgacttgctgtttccaagatgttgaataagtttactaaatctggtctcaagtcacagtttgcttactgcatgctgatccgaattgccagtcgcttactaaaagaaactgaggatggccatgaaagtccactgtttgatttcattgagagctgcttgcgaaataaacatgaaatggttatttatgaagctgcttcagctatcatccatcttcctaactgcactgcaagagagttggcacctgctgtttcagttcttcaacttttctgtagttctcctaagccagccttgagatatgcagctgtgaggaccttgaacaaggtggcaatgaagcacccctctgctgttactgcctgcaatctggacttagaaaacttaatcacagactcaaacagaagcattgctaccttagccattactacactcctcaaaacaggaagtgagagcagtgtggaccggctcatgaagcagatatcttcttttgtgtctgaaatctcagatgagttcaaggtggtggttgtacaggcaattagtgctctctgtcagaaataccctcgaaagcacagtgtcatgatgactttcctctccaacatgctccgagatgatggaggctttgagtacaagcgggccattgtggactgtataatcagcattgtggaagagaaccctgagagtaaagaagcaggcctagcccacctttgtgaattcattgaggactgtgaacacactgttctggctactaagattctacacttgttgggcaaagagggccctagaacgcctgtcccctccaaatatatccgttttatttttaatagggttgtcctggagaatgaggctgtcagagctgctgctgtgagtgctttggctaaatttggggctcagaatgagagtcttctcccaagcatccttgtactcttacagaggtgtatgatggatactgatgacgaggtacgagacagagctaccttctatctgaatgtgctgcagcagaggcagatggcactaaatgccacatatatctttaatggtttgacagtctctgtaccagggatggaaaaagccttacaccagtacacgttggagccttcagaaaaaccgtttgacatgaaatcaattcctcttgctatggctcctgtctttgaacagaaagcagaaatcacacttgtggctactaagccagagaagttggctccttccaggcaagacattttccaagaacaattggctgccattcctgggtttctgaatataggacccttgttcaagtcttctgagcctgttcaacttacagaagcagagacagaatattttgttcgatgtatcaagcacatgtttaccaatcacatcgtgttccagtttgactgcaccaacactctcaatgaccagctgctggaaaaagtgacagtgcagatggagccatcagattcctatgaagtgctgtcttgtatcccagcccccagccttccttaaaaccaaccaggaatatgttacactcttgttcgtttgcctgatgatgaccctacagcagttgcaggctcctttagctgcaccatgaagtttacagtccgggactgtgaccctaacactggagttccagatgaggatgggtatgatgatgagtatgtgctggaagatctcgaagtgactgtgtctgaccatattcagaaagtactgaagcctaactttgctgctgcttgggaagaggtgggagatacctttgagaaagaggaaacctttgccctcagttctaccaaaacccttgaagaggctgtcaacaatatcatcacatttctgggcatgcagccatgtgagaggtccgataaagtacctgagaacaagaattcccattcgctctatctggcaggtatattcagaggtggctatgatttattggtgaggtccaggctggccttagccgatggagtgaccatgcaggtgactgtcagaagtaaagagagaacacctgtagatgttatcttagcttctgttggataaatgcttactggacaagaggaaactgatgcacactacatggtcagtgggcttttaggctagtggcatcagtttcccagaatcagacttttgaagatgaatgactttggagaagcaaattaaacatttggccctgagccagcagatcaagcaaatgtctatctttgcgcatgggttgttttttttttttttctttttattctacttggtcagctttgggacgatagtgcagctttgggtgatcttgaaaatcaaatactatcctatactccagctgcttaacttcattttattctttaatgtgtacctgaaagctcctggcaatgctggaaaatttttatcccagaggggtaggggggaggggaagccagagtccacttttgtcacaattcatttttattaatagaaaataaacacttattccagtttc

SEQ ID NO: 3926 - protein, 483 aa, Homo sapien [sequence omitted]

SEQ ID NO: 3927 - DNA, 2865 bp, Homo sapien
attgctggcctaggtgaaactgacggtctccattagaaacatggctgcgaccagtctagtgggtatttgtagaagagcctcagcgttcctgaaggcagcttgttccctagtaaatcccaaggacgctgctcactcgggttgcaggtcttctcttagtttgttgcctaagagtacaccaaatgtgacatcctttcaccaatatagattacttcataccacattgtcaaggaaaggactagaagaattttttgatgacccaaaaaactgggggcaagaaaaagtaaaatctggagcagcatggacctgtcagcaactaaggaacaaaagtaatgaagatttacacaaactttggtatgtcttactgaaagaaagaaacatgcttctaaccctagagcaggaggccaagcggcagagattgccaatgccaagtccagagcggttagataaggtagtagattccatggatgcattagataaagttgtccaggaaagagaagatgccctaaggcttcttcagactggtcaagaaagagctagacctggtgcttggagaagagacatctttggaagaatcatctggcacaagttcaagcagtgggttataccttggcacctaaataaaagatacaataggaaacgattctttgccttgccttatgtggaccattttctcagactggaacgtgagaaacgagcccgcatcaaagcacggaaggaaaatttagagagaaagaaagcaaaaattcttttaaaaaagtttccacatcttgctgaagcccaaaagtcaagtcttgtctaagatgtctgaactattaaatttaccattttgtttttcttgaatagtctgtgtacaggagtaaatatgttaagtggtttataaagaaattctgtttttagtcaagtgactttactaatcagttgttctaagtgtgaatatggcatgctaattagctaatttggtagaagctaatttgcttctaaaaatcaggtataaagttcagatgagattcccactttataaattctgacatttaagcaggctttaaatgtcacctgctaccttagagtgtgaaggtgatggtaactgccacagcaaaggcaataccgtagtttttgaatttgaataatagttttacctctgttgttaataggctatgaagaggatgtgggtattgctgttaataaacggaggactttgattcaaaataatgagaaatacatttagtccttaaagtagtaatcacagtgcacaacagtccaaaatatatttctggaatggctaatttttatttaattctgtaagcctaaggtaaaaagcataggcagtaacttttactagtcaataaaaagcagttctaccaatccactggtaattaatacactaaacagagttggaaagcattttactgaaagcaaaatatttagagaaaatagacatttatacaaaattataaaatgcttgtaataagaataagtgcatttcaaggaaagcacaaacttaatttatagagccagttaaagctttaaaaaatttaagtggaaattgaaatatgcaaaaatgtataaacattctacaaaagatggtcattcttttcctgagtatactaaagctatgaaacgtaaggtgacaaaaggaaggtagaagcttgggaactctttctcaagggcattttctttctacacactgcttccctccttcttcatattcttgcttggaaatccacatcccaacacttgtggtgacaacatgactgactcctaacattgtgtttcctgataaccccttcacattggaagggtcaaataatccttctggaatctttagccgctctgcaccaaaatcacaattgtagccattggggaattcataatgaacagttggcatctgtgcagccacttgttcatcataagttgaatctgacacttgaagtaccgaagcttgaaaatcctggataacacaattacacatataattgtgccaagacctcgtaacctgaggcaacttctcttttcttttccagtttgctggagatccttcacgaacagcttcttttgatgcaatcatatatggaggaaccaattcaatattcatttcttggaagagttctctgcactgcatagtaataaagtctccagcaagaggggatttcacaatgccttgttgaaggacatagccatcgtggactggaattgcagtggtatgagtggctccactgtccaaaatcagcccagtagaacgaccattagcaaatgctgtcaaaactgcagttttgcaaaggaagaaggcagggatgttgtagtgttcaaacattaactctgtcagtttctctctctttgctctagtattccacggtgcctctgacatgagaacaggatggagactggcttctgatttgacatgcattttgtaggtatgatccaaaatagcttggaaactatcccagtcttcaaccatcccattttttagaggtgaaatggcctccatattctccctcggaacacgcagagcattagtatctatgtagtaggtgggaccgccttgtttgcctttatcgccatctatttccattaatgtgcttccgtcatctctttctaccaccataccaatagctgtaggaaaatccaccttggggcagtcctcaccagcataaccagctctcacagtataggatccaatgtcaaaaacaagggctccaacttcatctcccccgtaccacgccgccgctcatggctgctgccggcgcgactcctaccctaagggctaactggcgaagtgactgcagtggccgcgactgcgagtctcgaggagcgatagcccctgactcccttaacttccaccgccacccacctcaggcaacaaagcgg

SEQ ID NO: 3928 - DNA, 886 bp, Homo sapien
gtcggttccgggcgttaccatcgtccgtgcgcaccgcccggcgtccaggtgagtctcccatctgcagagacgcggacgcgccggcccgcagttggcctgcggagcgcggtggacggtttggcgcccaccaggcgatcaatactttggatttttaatttctagatttggcaattcttcgctgaagtcatcatgagctttttccaactcctgatgaaaaggaaggaactcattcccttggtggtgttcatgactgtggcggcgggtggagcctcatctttcgctgtgtattctctttggaaaaccgatgtgatccttgatcgaaaaaaaaatccagaaccttgggaaactgtggaccctactgtacctcaaaagcttataacaatcaaccaacaatggaaacccattgaagagttgcaaaatgtccaaagggtgaccaaatgacgagccctcgcctctttcttctgaagagtactctataaatctagtggaaacatttctgcacaaactagattctggacaccagtgtgcggaaatgcttctgctacatttttagggtttgtctacattttttgggctctggataaggaattaaaggagtgcagcaataactgcactgtctaaaagtttgtgcttattttcttgtaaatttgaatattgcatattgaaatttttgtttatgatctatgaatgtttttcttaaaatttacaaagctttgtaaattagattttctttaataaaatgccatttgtgcaagatttctcaaagattaggtatatatttaaatggaagagaaaatatttttatgggagaaaaatacatttgaaccatgaaatttcatcttttaaataacatccagtacagatatctgtgtaaaaaaaaaaaaaa

SEQ ID NO: 3929 - protein, 83 aa, Homo sapien
MSFFQLLMKRKELIPLVVFMTVAAGGASSFAVYSLWKTDVILDRKKNPEPWETVDPTVPQKLITINQQWKPIEELQNVQRVTK

SEQ ID NO: 3930 - DNA, 1027 bp, Homo sapien
gaatctctcgcgggcagcagggcgcgcgctgcacgcacagtactaggtcaggtggtgctcccgggtgaggagctgctcctgccggaacaggaggacgcggaaggccctgggggtgcagtggagcgaccgttgagcctgaatgctagagcgtgctcgcgggtgcgcgtttgtatgcggtccgggccttcgacgctgtggggaccgcctgctggtcaccaagtgcggccgcctccgtcacaaggagcccggcagtggaggcggcggcggtgtttactgggtggactctcagcagaagcggtatgttccagtaaaaggagaccatgtgattggcatagtgacagctaaatctggagatatattcaaagttgatgttggagggagtgagccagcttctttgtcttacttgtcatttgaaggtgcaactaaaagaaacagaccaaatgtgcaggttggagatctcatctatggccagtttgtggttgctaataaagacatggaaccagagatggtctgtattgacagctgtggacgagccaatggaatgggtgtcattggacaggatggtctgctttttaaagtgactctgggcttaattagaaagctattagctccagattgtgaaatcatacaggaagtgggaaaactctatccactggagatagtatttggaatgaatggaagaatatgggttaaggcaaaaaccatccagcagactttaattttggcaaacattttagaagcttgtgaacacatgacgtcagatcaaagaaaacagatcttctccagattggcagaaagttgatataggtggacttttttacaggtcagttgaggcaaaaaactatgggttttttcaggtgaacctcccccatttaaatactcagaagataaggtgtgaatgtatgtattattagagtccgaaagtatttttataagttactggttttcacccacgcttttgtgggagagaaaatcattgcaaaatcattttttttgttcggtacaataaagtttactaaaaaacaaa

SEQ ID NO: 3931 - protein, 220 aa, Homo sapien
MLERARGCAFVCGPGLRRCGDRLLVTKCGRLRHKEPGSGGGGGVYWVDSQQKRYVPVKGDHVIGIVTAKSGDIFKVDVGGSEPASLSYLSFEGATKRNRPNVQVGDLIYGQFVVANKDMEPEMVCIDSCGRANGMGVIGQDGLLFKVTLGLIRKLLAPDCEIIQEVGKLYPLEIVFGMNGRIWVKAKTIQQTLILANILEACEHMTSDQRKQIFSRLAES

SEQ ID NO: 3932 - DNA, 1204 bp, Homo sapien
gaaattcttacaaaaactgaaagtgaaatgaggaagacagattgagcaatccaatcggagggtaaatgccagcaaacctactgtacagtaggggtagagatgcagaaaggcagaaaggagaaaattcaggataactctcctgaggggtgagccaagccctgccatgtagtgcacgcaggacatcaacaaacacagataacaggaaatgatccattccctgtggtcacttattctaaaggccccaaccttcaaagttcaagtagtgatatggatgactccacagaaagggagcagtcacgccttacttcttgccttaagaaaagagaagaaatgaaactgaaggagtgtgtttccatcctcccacggaaggaaagcccctctgtccgatcctccaaagacggaaagctgctggctgcaaccttgctgctggcactgctgtcttgctgcctcacggtggtgtctttctaccaggtggccgccctgcaaggggacctggccagcctccgggcagagctgcagggccaccacgcggagaagctgccagcaggagcaggagcccccaaggccggcctggaggaagctccagctgtcaccgcgggactgaaaatctttgaaccaccagctccaggagaaggcaactccagtcagaacagcagaaataagcgtgccgttcagggtccagaagaaacagtcactcaagactgcttgcaactgattgcagacagtgaaacaccaactatacaaaaaggatcttacacatttgttccatggcttctcagctttaaaaggggaagtgccctagaagaaaaagagaataaaatattggtcaaagaaactggttacttttttatatatggtcaggttttatatactgataagacctacgccatgggacatctaattcagaggaagaaggtccatgtctttggggatgaattgagtctggtgactttgtttcgatgtattcaaaatatgcctgaaacactacccaataattcctgctattcagctggcattgcaaaactggaagaaggagatgaactccaacttgcaataccaagagaaaatgcacaaatatcactggatggagatgtcacattttttggtgcattgaaactgctgtgacctacttacaccatgtctgtagctattttcctccctttctctgtacctctaagaagaaagaatctaactgaaaatacca

SEQ ID NO: 3933 - protein, 285 aa, Homo sapien
MDDSTEREQSRLTSCLKKREEMKLKECVSILPRKESPSVRSSKDGKLLAATLLLALLSCCLTVVSFYQVAALQGDLASLRAELQGHHAEKLPAGAGAPKAGLEEAPAVTAGLKIFEPPAPGEGNSSQNSRNKRAVQGPEETVTQDCLQLIADSETPTIQKGSYTFVPWLLSFKRGSALEEKENKILVKETGYFFIYGQVLYTDKTYAMGHLIQRKKVHVFGDELSLVTLFRCIQNMPETLPNNSCYSAGIAKLEEGDELQLAIPRENAQISLDGDVTFFGALKLL

SEQ ID NO: 3934 - DNA, 924 bp, Homo sapien
tgaggagtttccacataggcaaagggtgccaatatttaactgacatctggtttctttttggaagttttctttcacatggtttgtcattacaagacaaggtctgcccagccaggtggatctaccttgcccccatcacctgccgcccccatcaaacatgttgggacaatgcccataggaatggacctccttccccgtctccagctgggactggcgttttttagtctctggagtatgatggttctcatgggtaggatgagatctttcggcagaaaggtcttcggtggtgctctgagcctgcgctgcataggactgagcagacccacctcctccagcttgggtggccctgccactcctggttccaagtctctcctttcctggcaggtcttaagggaagattgtaccccctcaccctttacatacccagaatcatcagtatgtcacttcctaatttctatcagtgtatctcattatttcatactgttttactaatcctaagtctaaacagatttgctcaaaaggagaccattctattttttaaagtacttagtgatacacgtataagctttgcatggacgaattaaataagcacattgaccttttcttgtacattcagaacctgaacatccatgtgaaaactgggtccatttttgagagatgtgaaactacagtttatttgtaataaataaatataatctatccggtatatgcatatatctatatgctgtgttaagtggtaatgggtacattacagtctgtgagagatggatcgctccctctgtaaggaacaagacgttctcagctgatgtcacggtaggtttagattctgtagagtgttccccaacccgcaccgttctgtacctctcacaccactgcttgcccgggcagtagtggctgaccaataaagacctttacctgttttgtatg

SEQ ID NO: 3935 - protein, 137 aa, Homo sapien
MVCHYKTRSAQPGGSTLPPSPAAPIKHVGTMPIGMDLLPRLQLGLAFFSLWSMMVLMGRMRSFGRKVFGGALSLRCIGLSRPTSSSLGGPATPGSKSLLSWQVLREDCTPSPFTYPESSVCHFLISISVSHYFILFY

SEQ ID NO: 3936 - DNA, 2575 bp, Homo sapien
acaagccatgagcagcgacccgcgggcgacgcgctgtccctggcagccgctgagcccgaccccgcaggcagctcgccgctccctagcaccttctccagtcgacactctcgcgcccggagaaacatgattcccgtgacagaattccggcagttctctgagcagcagcctgccttccgagtgctgaagccatggtgggatgtgtttaccgattacctctcagtagccatgctcatgattggcgtgtttggatgtactttacaggtcatgcaagacaagataatctgccttccgaaaagagtgcagcctgctcagaaccactcttccctttcgaatgtctctcaagcagttgccagtaccactccactgcctccacctaaaccatctcctgctaaccccatcactgtggaaatgaaaggcctgaagacagatttggaccttcagcagtacagctttataaatcagatgtgttatgagcgagccctccactggtatgccaagtatttcccttaccttgtcctcatccataccctggtctttatgctctgcagtaacttttggttcaaattccctggttccagctccaaaatagaacatttcatctccattctggggaagtgttttgactctccttggaccacacgggctttatctgaagtgtctggggaggactcagaagaaaaggacaacaggaagaacaacatgaacaggtccaacaccatccaatctggtccagaaggcagcctggtcaactctcagtctttaaagtccattcctgagaagtttgtagttgataaatccactgcaggggctctggataaaaaggaaggtgagcaggctaaggccttatttgagaaggtgaagaagttcaggctgcatgtggaagaaggtgatattctatatgccatgtatgttcgccagactgtacttaaagttatcaaattcctaatcatcattgcatataatagtgctctggtttccaaggtccagtttacagtggactgtaatgtggacattcaggacatgactggatataaaaacttttcttgcaatcataccatggcacacttgttctcaaaactgtccttttgctatctgtgctttgttagtatctatggattgacgtgcctttataccttatactggctgttctaccgttctctacgggaatattcctttgagtatgtccgtcaggagactggaattgatgatattccagatgtgaaaaatgactttgcttttatgcttcatatgatagatcagtatgaccctctctattccaagagatttgcagtgttcctgtctgaagtcagtgaaaacaaattaaagcagctgaacttaaataacgaatggactcctgataaactgaggcagaagctacagacaaatgcccataatcgactggaattgcctcttatcatgctctctggccttccagacactgtttttgaaatcacagagttgcaatctctaaaacttgaaatcattaagaacgtaatgataccagccaccattgcacagctagacaatcttcaagagctctctctgcaccagtgttctgtcaaaatccacagtgcggcgctctctttcctgaaggaaaacctcaaggtcttgagcgtcaagtttgatgacatgagggaactccccccctggatgtatgggctccgaaatctggaagagctgtacctagttggctctctaagtcatgatatttccagaaatgtcacccttgagtctctgcgggatctcaaaagccttaaaattctctctatcaaaagcaacgtttccaaaatccctcaggcagtggttgatgtttccagccatctccagaagatgtgcatacataatgatggcaccaagctggtgatgctcaacaacttaaagaagatgaccaatctgacagagctggagctggtccactgtgacctggagcgtattcctcatgctgtgttcagcctactcagcctccaggaattggacctgaaggaaaacaatctgaaatctatagaagaaatcgttagctttcagcacttaagaaagttgacagtgctaaaactgtggcataacagcatcacctacatcccagagcatataaagaaactcaccagcctggaacgcctgtcctttagtcacaataaaatagaggtgctgccttcccacctcttcctatgcaacaagatccgatacttggacttatcgtacaatgacattcgatttatcccccctgaaattggagttctacaaagtttacagtatttttccatcacatgtaacaaagtggaaagccttccagatgaactctacttctgcaagaaacttaaaactctgaagattggaaaaaacagcctatctgtactttcaccgaaaattggaaatttgctatttctttcctacttagatgtaaaaggtaatcactttgaaatcctccctcctgaactgggtgactgtcgggctctgaagcgagctggtttagttgtagaagatgctctgtttgaaactctgccttctgacgtccgggagcaaatgaaaacagaataacttatttttcgttaaagtttgactgaaacacgcttctacc

SEQ ID NO: 3937 - protein, 803 aa, Homo sapien
MIPVTEFRQFSEQQPAFRVLKPWWDVFTDYLSVAMLMIGVFGCTLQVMQDKIICLPKRVQPAQNHSSLSNVSQAVASTTPLPPPKPSPANPITVEMKGLKTDLDLQQYSFINQMCYERALHWYAKYFPYLVLIHTLVFMLCSNFWFKFPGSSSKIEHFISILGKCFDSPWTTRALSEVSGEDSEEKDNRKNNMNRSNTIQSGPEGSLVNSQSLKSIPEKFVVDKSTAGALDKKEGEQAKALFEKVKKFRLHVEEGDILYAMYVRQTVLKVIKFLIIIAYNSALVSKVQFTVDCNVDIQDMTGYKNFSCNHTMAHLFSKLSFCYLCFVSIYGLTCLYTLYWLFYRSLREYSFEYVRQETGIDDIPDVKNDFAFMLHMIDQYDPLYSKRFAVFLSEVSENKLKQLNLNNEWTPDKLRQKLQTNAHNRLELPLIMLSGLPDTVFEITELQSLKLEIIKNVMIPATIAQLDNLQELSLHQCSVKIHSAALSFLKENLKVLSVKFDDMRELPPWMYGLRNLEELYLVGSLSHDISRNVTLESLRDLKSLKILSIKSNVSKIPQAVVDVSSHLQKMCIHNDGTKLVMLNNLKKMTNLTELELVHCDLERIPHAVFSLLSLQELDLKENNLKSIEEIVSFQHLRKLTVLKLWHNSITYIPEHIKKLTSLERLSFSHNKIEVLPSHLFLCNKIRYLDLSYNDIRFIPPEIGVLQSLQYFSITCNKVESLPDELYFCKKLKTLKIGKNSLSVLSPKIGNLLFLSYLDVKGNHFEILPPELGDCRALKRAGLVVEDALFETLPSDVREQMKTE

SEQ ID NO: 3938 - DNA, 1645 bp, Homo sapien
ggattttccttggtcttaagatgggtagaaatgtgatgcgacacatgtctgatgacttaggaagttatgtttctctttcgtgtgatgacttttcttcacaggaattagagattttcatttgctccttttcctcctcctggcttcaaatgtttgttgcagaggcagtctttaaaaagttgtgtctacagagctctggcagtgtttcttctgagccactctctcttcagaaaatggtatattcctatttaccagccttggggaaaactggtgtgcttgggtctggaaagattcaggtgtcaaagaaaataggacagcggccttgttttgactctcagagaaccttactaatgctgaatggtactaaacaaaaacaagtcgaagggctgccagagttactagacctgaaccttgctaaatgttcctcatcattaaaaaaattgaaaaagaagtcagaaggagaattgtcatgttccaaggagaattgcccctctgtagttaaaaagatgaattttcacaagactaatctaaaaggagaaacagccctgcatagagcttgcataaataaccaagtggagaaattgattcttcttctctctttgccaggaatagacatcaatgttaaagacaatgctggctggacgcctttgcatgaagcctgtaactatggcaacacagtgtgtgtccaggaaattttgcaacgttgtccagaggtagatctgctcactcaagtggacggggtgactcctttgcatgatgcactgtcaaacggacatgtagaaattggcaagctgctactacagcatgggggcccagtgcttttacaacagaggaatgctaagggagaattgcccttggattatgtggtttcacctcaaatcaaagaagaactgtttgctattacaaaaatagaagatacagtggagaactttcatgcacaagcagagaaacattttcattaccagcaacttgaatttggctcctttttacttagtaggatgttgctaaatttttgttcaatttttgatttatcttcagagttcattttagcttccaaagggttaactcatctaaatgaactgcttatggcttgtaaaagtcataaagaaaccaccagtgttcatactgactggttactggatctttatgctggaaatataaagacattgcagaaactcccacacattcttaaggaactgcctgagaatttgaaagtgtgtcctggggtacacactgaggccttgatgataacattggaaatgatgtgtcggtcagtcatggagttttcatgatgatgctagaaagtatggattgactttctaaatctgttcagtttgcattggtacttactgtggacttcatagcttactgacagatagtaatttgatttatttattgacagactttgcagccttgctaaattttaaaagcatttttaaaaaaacttctacaaaactctagtatgggcttctgactttttccagggtgtagaatttgactcaaaagtaaaaataattttgttttagtatattctactttcattaatgtttttttgttctgaaagtgatattatattgtacatgtaaaattaatttaaatattttttcaaataaaaatgtaatgtcctgtaaaaaaaaaaaaaaaaaaa

SEQ ID NO: 3939 - protein, 422 aa, Homo sapien
MGRNVMRHMSDDLGSYVSLSCDDFSSQELEIFICSFSSSWLQMFVAEAVFKKLCLQSSGSVSSEPLSLQKMVYSYLPALGKTGVLGSGKIQVSKKIGQRPCFDSQRTLLMLNGTKQKQVEGLPELLDLNLAKCSSSLKKLKKKSEGELSCSKENCPSVVKKMNFHKTNLKGETALHRACINNQVEKLILLLSLPGIDINVKDNAGWTPLHEACNYGNTVCVQEILQRCPEVDLLTQVDGVTPLHDALSNGHVEIGKLLLQHGGPVLLQQRNAKGELPLDYVVSPQIKEELFAITKIEDTVENFHAQAEKHFHYQQLEFGSFLLSRMLLNFCSIFDLSSEFILASKGLTHLNELLMACKSHKETTSVHTDWLLDLYAGNIKTLQKLPHILKELPENLKVCPGVHTEALMITLEMMCRSVMEFS

SEQ ID NO: 3940 - DNA, 4334 bp, Homo sapien
gagtgtcactctgtcccccagtctggcgtgcaatggtttgatctcggctcactgcaacctccacctcccgggttcaacctcctgcctcagccttccgagcagctgggactacaggagcctgccaccacatctggcgaatttttgtatttttagtagagaagggggttcagcatgttgtccaggttggtcttgaactcctgacctcaggtgatccagccactttggcctcacaaagtgctgggattataggcaagagcgatggcgcccggcccactcagcaggattcctagaatgggcacgagctctgccctcatcacagtccaaaagtgagcacctgcctggagctgcccagaaacagccttgtggggtggggttggtgtctgacctccctccccgggggccttcgcaggcttctctgctggtgcttctgtgcctgtgggtctggattcctccagggcctgatcctgggtgcagatgcagctggaagccctgaacctgctgcacacactagtctgggcacggagtctctgccgtgccggagctgtgcagacacaggagcggctgtcaggcagtgccagccctgagcaagtgccagctggtgagtgctgtgctctgcaggagtatgaggccgccgtggagcagctcaagagcgagcagatccgggcgcaggctgaggagaggaggaagaccctgagcgaggagacccggcagcaccaggccagggcccagtatcaagacaagctggcccggcagcgctacgaggaccaactgaagcagcagcaacttctcaatgaggagaatttacggaagcaggaggagtccgtgcagaagcaggaagccatgcggcgagccaccgtggagcgggagatggagctgcggcacaagaatgagatgctgcgagtggagaccgaggcccgggcgcgcgccaaggccgagcgggagaatgcagacatcatccgcgagcagatccgcctgaaggcgtccgagcaccgtcagaccgtcttggagtccatcaggacggctggcaccttgtttggggaaggattccgtgcctttgtgacagaccgggacaaagtgacagccacggtggctgggctgacgctgctggctgtcggggtctactcagccaagaatgcgacagccgtcactggccgcttcatcgaggctcggctggggaagccgtccctagtgagggagacgtcccgcatcacggtgctggaggcgctgcggcaccccatccaggtcagccggcggctcctcagtcgaccccaggacgtgctggagggtgttgtgcttagtcccagcctggaagcacgggtgcgcgacatcgccatagcaaccaggaacaccaagaagaaccggggcctgtacaggcacatcctgctgtatgggccaccaggcaccgggaagacgctgtttgccaagaaactcgccctgcactcaggcatggactacgccatcatgacaggcggggacgtggcccccatggggcgggaaggcgtgaccgccatgcacaagctctttgactgggccaataccagccggcgcggcctcctgctcttcatggatgaagcagacgccttccttcggaagcgagccactgaggagataagcaaggacctcagagccacactgaacgccttcctgtaccacatgggccaacacagcaacaaattcatgctggtcctggccagcaatctgcctgagcagttcgactgtgccatcaacagccgcattgacgtgatggtccacttcgacctgccgcagcaggaggagcgggagcgcctggtgagactgcattttgacaactgtgttcttaagccggccacagaaggaaaacggcgcctgaagctggcccagtttgactacgggaggaagtgctcggaggtcgctcggctgacggagggcatgtcgggccgggagatcgctcagctggccgtgtcctggcaggccacggcatatgcctccaaggacggggtcctcactgaggccatgatggacgcctgtgtgcaagatgctgtccagcagtaccgacagaagatgcgctggctgaaggcggaggggcctgggcgcggggtcgagcaccccctatccggagtccaaggcgagaccctcacctcatggagcctggccacggacccctcctacccctgccttgccggcccctgcacatttaggatatgctcctggatggggactgggctgtgcccagggcctctgtcccccaggatgtcttgtggtggcggtcggccgttctgccccccagggcaccccctgttgtaggcactggctagggaggggcaggcctccttcctgcccctcgagacactcttgggagatgcattttccgtctggctcacagggggagggtgaggctttgtaccccagcccctgcccaggccactgtgagggtgggtgctggctgagcccctggggcagaaggagtggggcaggcggggtctttgttctcggctcccacagcagagccaggtgagggggggcctgccaggactagacagaagtggggcggcctgaaccctgcttccagccatggccaggggccacggaacccggcaggggtgtctgaggccgccctgtcagctggccggtccaagcctgtggctggagctggtgtgtgtttatctaataaagtcccacaggtgcctcaccgccgtgtctctctattgactgacactgctcggggtttcaggggcgccctagcgtcctcctggggtcaaaggtgacataagaggcagaggctggagctttctagaatttactgatcacagagcggtgtgcttcacatcagcctcgcgccacatccgagttggggtctgaatgctgcccgggactgccgcctgcgccccaccagcccctccctcctgaaggaggggcaccccgagaagaatgaggctgcagagtgatgtgggggccagcggtgacttcatgaccacactgcgcccaggtgtaagagggcacgcttctgcccaggcatcgtccatggaagacacgcagtcggccactgcagcctcggtcctgggtgccctggggctgggtcactgggggccacaggccacactgggagaccacagtcctggcatgccatgcagctccctgtccccagaggtctgctcagatgcagagagctcaggaaccacactcgctgcctgaattctgggagcagagcgtggtacccactgcctggctggggcctactctgggactgcagcccctgtccccgctggcccaggcttccggaggcagctgcgtccctgtcttggctcaaggtcaggccggaggccaggctgtccacctgcatctggaacctgcacagtcactcctccaggtcctcgctgctggaggactctcagacaggaaacctttgctttgggggcagggtggggtgcaggggtggttgggggaatcacagcaacgagacagcacagtgccatggcgcagagcctcatattggtcgatgaaacaatgctttctgaactttgtgtccttaggaagggtgtaggctgttggttgaagtaggaaacagaagaggagcctgggcacgcaacggtcccatcggagagcagacccctcggagctgcagtgcttggaggggggcggtctacctctgctcgctctctccatttctctctctacctctgctcgctctctccatttctctctttttccttttagagatgggttcttactctgagcccaggctggagtgcagtggtgtgattatagctcactgcagcctcgacctcccaggctcaagtgatcctcctgcctcagcctgtccagtagccataccctactaggccctaattagccccagaggcgtgcaccaccacgcccgctaatgctaaaaatttgttgtagagaccgagtcttgctataatgcccaggctggtctccaactcttggcctcaggagatcctcccgcctctacaggatgagccaccaagcctggcctcaattcctctttaaaggaattgcctaaatcttaaaccagcaatcaatactttgtatttaaaattaagccaggttagactgggctaggtggctcacgcctgtaatcccagcactttgggaggccaaggcgggtgaatcatgaggtcaggagtttgagaccatcctggctaacgtggcaaaaccccgtctctactaaaaatacaaaaaaattagccggcatggtggtaggtgactgtaatcccagctactcgggaggctgaggcaggagactcgcttggacctgggagggggaggttgcagtgagccgagatcacgccactgcactccagcctgggcagcatggcaagaacctgtcgctcttt

SEQ ID NO: 3941 - protein, 606 aa, Homo sapien
SWVQMQLEALNLLHTLVWARSLCRAGAVQTQERLSGSASPEQVPAGECCALQEYEAAVEQLKSEQIRAQAEERRKTLSEETRQHQARAQYQDKLARQRYEDQLKQQQLLNEENLRKQEESVQKQEAMRRATVEREMELRHKNEMLRVETEARARAKAERENADIIREQIRLKASEHRQTVLESIRTAGTLFGEGFRAFVTDRDKVTATVAGLTLLAVGVYSAKNATAVTGRFIEARLGKPSLVRETSRITVLEALRHPIQVSRRLLSRPQDVLEGVVLSPSLEARVRDIAIATRNTKKNRGLYRHILLYGPPGTGKTLFAKKLALHSGMDYAIMTGGDVAPMGREGVTAMHKLFDWANTSRRGLLLFMDEADAFLRKRATEEISKDLRATLNAFLYHMGQHSNKFMLVLASNLPEQFDCAINSRIDVMVHFDLPQQEERERLVRLHFDNCVLKPATEGKRRLKLAQFDYGRKCSEVARLTEGMSGREIAQLAVSWQATAYASKDGVLTEAMMDACVQDAVQQYRQKMRWLKAEGPGRGVEHPLSGVQGETLTSWSLATDPSYPCLAGPCTFRICSWMGTGLCPGPLSPRMSCGGGRPFCPPGHPLL

SEQ ID NO: 3942 - DNA, 1845 bp, Homo sapien
agctgacacaaccaagacgagtctcagtgtctagggaagcttggggttctgctccttttacttcaggcgaacctgaactttaatgcaattttgaagcatgccctgaatagattcagtcattatcaagtcaaactaaaaacggtgaaaggttgcgactattaccaaatagaagacaatgagaagtcataccataacaatgacgacaacttcagtcagcagctggccttactcctcccacagaatgcgctttataaccaatcatagcgaccaaccgccacaaaacttctcagcaacaccaaatgttactacctgtcccatggatgaaaaattgctatctactgtgttaaccacatcctactctgttattttcatcgtgggactggttgggaacataatcgccctctatgtatttctgggtattcaccgtaaaagaaattccattcaaatttatctacttaacgtagccattgcagacctcctactcatcttctgcctccctttccgaataatgtatcatattaaccaaaacaagtggacactaggtgtgattctgtgcaaggttgtgggaacactgttttatatgaacatgtacattagcattattttgcttggattcatcagtttggatcgctatataaaaattaatcggtctatacagcaacggaaggcaataacaaccaaacaaagtatttatgtctgttgtatagtatggatgcttgctcttggtggattcctaactatgattattttaacacttaagaaaggagggcataattccacaatgtgtttccattacagagataagcataacgcaaaaggagaagccatttttaacttcattcttgtggtaatgttctggctaattttcttactaataatcctttcatatattaagattgggaagaatctattgaggatttctaaaaggaggtcaaaatttcctaattctggtaaatatgccactacagctcgtaactcctttattgtacttatcatttttactatatgttttgttccctatcatgcctttcgattcatctacatttcttcacagctaaatgtatcatcttgctactggaaagaaattgttcacaaaaccaatgagatcatgctggttctctcatctttcaatagttgcttagatccagtcatgtatttcctgatgtccagtaacattcgcaaaataatgtgccaacttctttttagacgatttcaaggtgaaccaagtaggagtgaaagcacttcagaatttaaaccaggatactccctgcatgatacatctgtggcagtgaaaatacagtctagttctaaaagtacttgaggtaaacatactaaaatgaattatataatgcagcctcttaattctttgaagaactaaaaaattaggaaacaagttctagcatttacaaaactcagatctcaaagctctgcttgtatttgtgatatttcatttgcttaactgtaaaccatttcaaggtactatcttttaaatctgtatgtaaaatcttttcaaaatacatttttaagctaatactcttaacatagattatgaagttaagtgaaatttatggctctaacagcaaaataattaaagtgccatagtttctcaagtgactaaagtagttattaaaatcaagcacttgatactaatttgaagtgtgtttaaaagtaaatgatttgggaactgacaatgtgtcagaaaatatatgttcatttatcattttaaaatcttgtataatttgccactgtattcatttatgcctaaatctctataacagatgaaaagataattaataaaatcctaattaaaaaataaaaaaaaaaaaaaaaaaaaaaaaaaaaaaa

SEQ ID NO: 3943 - protein, 381 aa, Homo sapien
MRSHTITMTTTSVSSWPYSSHRMRFITNHSDQPPQNFSATPNVTTCPMDEKLLSTVLTTSYSVIFIVGLVGNIIALYVFLGIHRKRNSIQIYLLNVAIADLLLIFCLPFRIMYHINQNKWTLGVILCKVVGTLFYMNMYISIILLGFISLDRYIKINRSIQQRKAITTKQSIYVCCIVWMLALGGFLTMIILTLKKGGHNSTMCFHYRDKHNAKGEAIFNFILVVMFWLIFLLIILSYIKIGKNLLRISKRRSKFPNSGKYATTARNSFIVLIIFTICFVPYHAFRFIYISSQLNVSSCYWKEIVHKTNEIMLVLSSFNSCLDPVMYFLMSSNIRKIMCQLLFRRFQGEPSRSESTSEFKPGYSLHDTSVAVKIQSSSKST

SEQ ID NO: 3944 - DNA, 1106 bp, Homo sapien
ctgggagagtgtccgttgcttcccgtccgtgtcgcggccctgcggttggcggcctcctcgtggagcggagcaagggtaggccccacgtggcgtctttgcccggctccaagatggacggcagcggggactgggaggctgctctgggggagcacgtggcgccctgctcgcctgctcccggggcagctgggatggtggcggagtccggaggcctcctgccgccgtcgggcagggaggccggcggaggcggggctgtggccgcccccgagaggcgcccaggcggcggcggcggcggcccagcttcttctttcctcgcacagccaggcggcccctgctcgagtcccgcgtcgccatggccgcggttcccgagttgctgcagcagcaggaggaggaccgcagcaaggtgaggtcctcccagcctcagactcctgggcgggcggccctgcgagctccggggtcgctgcattctttcccttgcgcgtccataggccgtggctgctcgccgccatccccagcgcgggaagcacccgtgagacccgggcggcccctctccctggtcttcactgaaggctgccccggggaatccctgtggatgtcccggattctattaggacagaaccagagacgcgggaccttagccccagctcaggcgccggtgccgagcggacttggagagatgatctctggagaccccggaatgttctttttaaaactttcctcggcttcgtggtgaccagtaggtgaacgtgaaattgacttaacatgcgacagaccagtttggtttgttgcccccaaaataccctccttccccccaccttttactgagaagacttttttggggggggggcccaaacaacttgggaaattgcatcaagcgtccgaacatgctgcttacaactttagaaacgcaaaatgcgttgttgtgggagttgtgtaatttttagtaggtgctcaaatacttgctgaacttggtgtctatttttaagtcttgcccattgatgtaaactgtccctaggtcacgtgtatcttgaggtctaaaagattatttatgcaataaattgaaattcccatagccaattaaagattcaaaaaaaaaaaaaaaaaaaaaa

SEQ ID NO: 3945 - protein, 126 aa, Homo sapien
MAAVPELLQQQEEDRSKVRSSQPQTPGRAALRAPGSLHSFPCASIGRGCSPPSPAREAPVRPGRPLSLVFTEGCPGESLWMSRILLGQNQRRGTLAPAQAPVPSGLGEMISGDPGMFFLKLSSASW

SEQ ID NO: 3946 - DNA, 2464 bp, Homo sapien
atggccgacccgcaggctggctccgcggccggggactgggagatcgatgtcgagagcctggagctggaagaggacgtctgcggggcgccgcggtccacgccccccgggcccagcccgccgccggcggacggggactgcgaggacgacgaagatgacgacggggtggacgaagacgcggaagaagagggcgacggcgaggaggcaggcgcgtcccccgggatgcccggccagccggagcagcgggggggaccgcagccgaggccgccgctcgcgcctcaggcctcacccgccggcaccggtccccgagagcgctgcactcccgcgggcggcggcgcggagccgcgcaagctgagccgcacgcccaagtgcgcgcgctgccgcaaccacggcgtggtgtcctgcctgaagggccacaagcgcttctgtcgctggcgcgactgccagtgcgccaactgcctgctggtggtggagcggcagcgcgtcatggccgcccaggtggcgctccggaggcagcaggccaccgaggacaagaaggggctttccgggaaacagaataatttcgagcgcaaagctgtgtaccagaggcaagtcagagcccccagtttgctggccaaaagcattttagaagttctccttggattattctacagctattatgtgtacataatgaaccatctttagaaaataaaagtgacatcagctctaggtatagatatattttttaataatgaaaaaagatgacatggataataataaaacattgattgatacaagataaatagtcttgtctcttaatgcgtagggggcctgggaagaatattaaaattttaatcaataaagtatgtctgttgaagcaagcaagcaaacaaatccataacaaccacaacaagcaacaagaacaagaacaacaacaagaagaagttgcagtatggatatctttcaccctcccaggaaactctttcaaacctaatctggacttttgcatctgtataaaaatatcagtgagatggaactgtaaataattgttctgctgatctgtagtggttgctgttaccttctgggtttccacatttttattccgtagatgttaatctctttcatgtgcaatctttgcttcttgtaggctatcgccccattccagcggagacttatgtaggagggaccttccctctacctcccccagttagtgacaggatgaggaaaagaagagcctttgctgataaagagttggagaacattatgctggagagagaatataaagaaagggagatgttggaaacttctcaagctgctgctctgtttctgcccaaccgcatggtgcctggacctgactacaattcctacaaaagtgcctacagccccagcccagtggaaccaccaagcaaggacttctgtaattttttgcccacctgccttgatttaaccatgcagtattcagggtctgggaatatggaactaatttcttctaatgtcagcgtgggcacaacttatagacagtatcccttgtcctcaagatttttagtttggcccaagtgtggccccattagcgacaccctcctctaccagcaatgcctgctaaatgccaccacctcagttcaagccctgaagcatggggccagctgggacttgaagggagcacgagtccaggatggactcagtgcagagcaggacatgatgccatcgaaattggaaggttccctggtgctgcctcacactcctgagatccagaccacgagaagtgaccttcagggtcatcaggctgtcccagagaggtccgcgttctccccaccccgacggaatttctctcccattgttgacacggactccctggcagctcaagggcatgtcttaacgaagatcagcaaagaaaacaccaggcaccctctgccacttagacataatccattccactcattattccagcaaacacttactgacaaatcgggtcctgagttgaaaacaccatttgtcaaagaggcctttgaagagacccctaagaaacacagagagtgtttagttaaggacaaccagaagtacacatttacaatagatagatgtgcaaaagacctttttgtagccaaacaagttggaacaaaactctcggtgaatgaaccactgtcattttctgttgagtctattcttaagaggccttcatctgccatcactcgtgtctctcagtgaaaggctgcttaaacagaaagctggattttctgcagtcttagagcattatagccatttgctactttttttaaaagttaagatgtttgtgtaaagaaatttctaatgtaaagatgatgattttgaaaaattttatatattcctaatatgcatgtactttttcttatcacatatatttaaacttacagatggaaattgcccaatgtgcaaattgttaagtaccacactttacacagcatttcaaaaagcaataaaattgacactgtcttctcaaagacccaaaaaa

SEQ ID NO: 3947 - protein, 226 aa, Homo sapien
MADPQAGSAAGDWEIDVESLELEEDVCGAPRSTPPGPSPPPADGDCEDDEDDDGVDEDAEEEGDGEEAGASPGMPGQPEQRGGPQPRPPLAPQASPAGTGPRERCTPAGGGAEPRKLSRTPKCARCRNHGVVSCLKGHKRFCRWRDCQCANCLLVVERQRVMAAQVALRRQQATEDKKGLSGKQNNFERKAVYQRQVRAPSLLAKSILEVLLGLFYSYYVYIMNHL

SEQ ID NO: 3948 - DNA, 703 bp, Homo sapien
cagatttaaagagtttcttcctgttaattcgaagctcactgtgcctcttgtttccgagggaagaaggactgattaagtcatctaaatggatgcaatactgaattacaggtcagaagatactgaagattactacacattactgggatgtgatgaactatcttcggttgaacaaatcctggcagaatttaaagtcagagctctggaatgtcacccagacaagcatcctgaaaaccccaaagctgtggagacttttcagaaactgcagaaggcaaaggagattctgaccaatgaagagagtcgagcccgctatgaccactggcgaaggagccagatgtcgatgccattccagcagtgggaagctttgaatgactcagtgaagacggtgggtttctcgctgggtgcgacgtgaatttgtgaagctcaggatgcccatggattagactcatgtagtagcttaaagagtcattaggcgataggagggagaaaaccaagaagttagcagagtctggatataattcagtgtccgtaaatcccatgaagagaagctcatcagaataaaggcaatgaatttgtgccagaagagcctgtgactacatttctttcaatctctttggctgtttgtttcagtatacacactccctgttattgcttactattttatgagctctaataaatgtacttctcaagttgctcatgaaaaaaa

SEQ ID NO: 3949 - protein, 107 aa, Homo sapien
MDAILNYRSEDTEDYYTLLGCDELSSVEQILAEFKVRALECHPDKHPENPKAVETFQKLQKAKEILTNEESRARYDHWRRSQMSMPFQQWEALNDSVKTVGFSLGAT

SEQ ID NO: 3950 - DNA, 2404 bp, Homo sapien
cccaaagtaggctaggcctacggaagctgggtcttcttgctgtgaggtcgcgttccccagtgttacggagggtccttgaggcaggagtgaaaattgggtctgggggttagtcctggggtggaggtctgggcacgccgggtcggaccccctccatcttcggttttgcacaccccgctttccagcgcggagtcgcggcgggtagggcggcgtcgcgtgcgtgacgtcatccagcggcgcctcgcgaggctccagtggccttgacctcccgcggcgtgggaggctgcgcggcgatgctgcagttcgtccgggccggggcgcgggcctggcttcggcctaccggcagccagggcctgagttccctggcggaagaggcagcgcgtgcgaccgagaacccggagcaggtggcgagcgagggtctcccggagcccgtgctgcgcaaagtcgagctcccggtacccactcatcgacgcccagtgcaggcctgggtcgagtccttgcggggcttcgagcaggagcgcgtgggcctggccgacctgcaccccgatgttttcgccaccgcgcccaggctggacatactgcaccaggttgctatgtggcagaagaacttcaagagaattagctatgccaagaccaagacgagagccgaggtgcggggcggtggccggaagccttggccgcagaaaggcactgggcgggcccggcatggcagcatccgctctccgctctggcgaggaggaggtgttgcccatggcccccggggccccacaagttactactacatgctgcccatgaaggtgcgggcgctgggtctcaaagtggcactgaccgtcaagctggcccaggacgacctgcacatcatggactccctagagctgcccaccggagacccacagtacctgacagagctggcgcactaccgccgctggggggactccgtactcctcgtggacttaacacacgaggagatgccacagagcatcgtggaggccacctctaggcttaagaccttcaacttgatcccggctgttggtgagcaaagagcccaggcccctagagtgcgcatgtgcaggctccgctgttagaatcacagcggttcaaatccggcatctggtcgctgagtggcctcaggcagtgaccacgctcccggacccaaccttcagcttgcccaaagcaataatctttcctaaagaagtgcttggctggggatggtggctcacgcttgtaatcccagtactttgggaggccaaggcagtctgggcaatatagtgaggctcccatctgtactaaaaataaaaaagttaggcgtggcgatgtgcacctgtagtcccagctactcgggggctgagccaggcggatagcttgagctcagggggccaaggctgcagtgagtcatgatcgcaccactgcacccaaacctggggagagagctagactcttgtctcaaaaaaaaaaaaaaaaaaaaaaaaaaagctccaaagtcacctctgtcaaagccacagtctgttccttccacagccacaagatggcgacatgagcctaagtcaagtcctgtccctcaacccacgcccctcgctggcttccccacctctctcaggatgaaagcccaagtcatcagggtggcacgtcaggccctgcacgatgtgccccgtcacctccctgccctcccgtcatttgccctgggtctcccccaccagaatgggagccaggagtcccagccaggcacaggaccgagcctggctctcggtcagcaggtgatgagctgggagcagctccttggccagaggcttacaggcaacaagcggccaggcagggtctggccccgggctgctgggctcacaaagtcacactagaccacagtgacgatctctgtaagcacaaagggactccgatgtgggtggggtgaggagagaggcagccccggcctgaccggccccccgccccgcccccaccccgcccccaggcctaaatgtgcacagcatgctcaagcaccagacgctggtcctgacgctgcccaccgtcgccttcctggaggacaagctgctctggcaggactcacgttacagacccctctaccccttcagcctgccctacagcgacttcccccgacccctaccccacgctacccagggcccagcggccaccccgtaccactgttgatgtgaagcacctcttctgagccaggccgagcccctggccgacttgggagcctcaggcccacgcccacccttcgaggaaggtgtcacctggaccccttcattccacggaggaagctgaggccacagggagcggccatcgccattgggaaggggcgactccacggaaagcccagacgggcttctgcatccattccctctttttgtttttaaaataaattgtatttttgaatcaaggaggataaagataa

SEQ ID NO: 3951 - protein, 263 aa, Homo sapien
MLQFVRAGARAWLRPTGSQGLSSLAEEAARATENPEQVASEGLPEPVLRKVELPVPTHRRPVQAWVESLRGFEQERVGLADLHPDVFATAPRLDILHQVAMWQKNFKRISYAKTKTRAEVRGGGRKPWPQKGTGRARHGSIRSPLWRGGGVAHGPRGPTSYYYMLPMKVRALGLKVALTVKLAQDDLHIMDSLELPTGDPQYLTELAHYRRWGDSVLLVDLTHEEMPQSIVEATSRLKTFNLIPAVGEQRAQAPRVRMCRLRC

SEQ ID NO: 3952 - DNA, 1188 bp, Mus musculus
atggatgaagaacctgaaagaactaagcgatgggaaggaggctatgaaagaacatgggagattcttaaagaagatgaatctggatcacttaaagctacaatagaagacattctattcaaggcaaagagaaaaagagtatttgagcaccatggacaagttcgacttggaatgatgcgccacctttatgtggtagtagatggatcaagaacaatggaagaccaagatttaaagcctaatagactgacgtgtactttaaagttgttggaatactttgtagaggaatattttgatcaaaatcctattagtcagattggaataattgtaactaagagtaaaagagctgaaaaattgactgaactttcaggaaacccaagaaaacatataacgtctttgaagaaagctgtggatatgacctgccatggagagccatctctttataattccctaagcatagctatgcagactctaaaacacatgcctggacatacaagtcgagaagtactaatcatctttagcagccttacaacttgcgatccatctaatatttatgatctaatcaagaccctaaaggcagctaaaattagagtatctgttattggattgtctgcagaagttcgcgtttgcactgtacttgctcgtgaaactggtggcacgtaccatgttattttagatgaaagccattacaaagagttgctcacacatcatgttagtcctcctcctgctagctcaagttctgaatgctcacttattcgtatgggatttcctcagcacaccattgcttctttatctgaccaggatgcaaaaccctctttcagcatggcgcatttggatggcaatactgagccagggcttacattaggaggctatttctgcccacagtgtcgggcaaagtactgtgagctacctgttgaatgtaaaatctgtggtcttactttggtgtctgctccccacttggcacggtcttaccatcatttgtttcctttggatgcttttcaagaaattcccctagaagaatataatggagaaagattttgttatggatgtcagggggaattgaaagaccaacatgtttatgtttgtgctgtgtgccaaaatgttttctgtgtggactgtgatgtttttgttcatgattctctacactgttgccctggctgtattcataagattccagctccttcaggtgtttga

SEQ ID NO: 3953 - protein, 395 aa, Mus musculus
MDEEPERTKRWEGGYERTWEILKEDESGSLKATIEDILFKAKRKRVFEHHGQVRLGMMRHLYVVVDGSRTMEDQDLKPNRLTCTLKLLEYFVEEYFDQNPISQIGIIVTKSKRAEKLTELSGNPRKHITSLKKAVDMTCHGEPSLYNSLSIAMQTLKHMPGHTSREVLIIFSSLTTCDPSNIYDLIKTLKAAKIRVSVIGLSAEVRVCTVLARETGGTYHVILDESHYKELLTHHVSPPPASSSSECSLIRMGFPQHTIASLSDQDAKPSFSMAHLDGNTEPGLTLGGYFCPQCRAKYCELPVECKICGLTLVSAPHLARSYHHLFPLDAFQEIPLEEYNGERFCYGCQGELKDQHVYVCAVCQNVFCVDCDVFVHDSLHCCPGCIHKIPAPSGV

SEQ ID NO: 3954 - DNA, 570 bp, Homo sapien
ggccgtgccttctctcgcttcggactgcgcaacgctgcgctctgggctgacaggcggataaaacggtcccatcaagactgagaaaaagcacaccagctattggcacagcgtgggcagtggggcctacaggatgactgacttagtctacagagatcccggcgtacttaagcagatgaagactcttaagatgacagaaggtgatttttctggtgatcgaggacttccggggtaatgacagtgatgaaatgcaggggacctggttgcccccaagtttcctggcagtgtgtgatactgaggaggtgagcttgtttctggagctgtgctttaagattcatgttacatgtaaagctgtcctcatttgtgactatggacctatggagttgggacaatctctatgggaagcagaaggcaaggaccccggtcattttaggtagaaacaacagcatgctaatgcaaaaaattatgcagtgtgctactgaacttcagaggtgatcaataaaagaagaataaaaagactaataaaaaaaaaaaaaaaaaaaaaaaaaaaaaaaaaaaaaaaaaaaaaaaaaa

SEQ ID NO: 3955 - protein, 62 aa, Homo sapien
MQGTWLPPSFLAVCDTEEVSLFLELCFKIHVTCKAVLICDYGPMELGQSLWEAEGKDPGHFR

SEQ ID NO: 3956 - DNA, 2375 bp, Homo sapien
taatttaaaccagtgtttgtgcggttctgattcatctgctgtggttcccgaagcttgagatctaaggagtacagggtcttttgtgatgacaatatgactaatagtaaaggaagatctattaccgataaaacaagtggtggtccaagtagtggaggaggttttgtagattggactttacgtttaaacacaattcaatccgacaagtttttaaatttactcttgagtatggttccagtgatttaccagaaaaaccaagaagacaggcacaaaaaagcaaacggcatttggcaagatggatatcaactgcagtacagacttttagtaatagatctgagcaacacatggagtatcacagtttctcagagcagtcttttcatgccaataatgggcacgcatcatcaagctgcagccaaaagtatgatgactatgccaattgtaattactgtgatggaagggagacttcagaaaccactgccatgttacaagatgaagatatatctagtgatggtgatgaagatgctattgtagaagtgaccccaaaattaccaaaggaatccagtggcatcatggcattgcaaatacttgtgccctttttgctagctggttttggaacagtttcagctggcatggtactggatatagtacagcactgggaggtgttcagaaaagttacagaagttttcattttagtccctgcacttcttggtctcaaagggaacttggaaatgacattggcatccagattatccactgcagtaaatattgggaagatggattcacccattgaaaagtggaacctaataattggcaacttggctttaaagcaggttcaggcaacagtagtgggttttctagcagctgtggcagcaattatattgggctggattccagaaggaaaatattaccttgatcattccatacttctgtgctctagcagtgtggcaactgccttcattgcatctcttctgcagggaataataatggttggggttatcgttggttcaaagaagactggtataaatcctgataatgttgctacacccattgctgctagttttggcgaccttataactcttgccatattggcttggataagtcagggcttatactcctgtcttgagacctattactacatttctccattagttggtgtatttttcttggctctaacccctatttggattataatagctgccaaacatccagccacaagaacagttctccactcaggctgggagcctgtcataacagctatggttataagtagcattgggggccttattctggacacaactgtatcagacccaaacttggttgggattgttgtttacacgccagttattaatggtattggtggtaatttggtggccattcaggctagcaggatttctacctacctccatttacatagcattccaggagaattgcctgatgaacccaaaggttgttactacccatttagaactttctttggtccaggagtaaataataagtctgctcaagttctactgcttttagtgattcctggacatttaattttcctctacactattcatttgatgaaaagtggtcatacttctttaactataatcttcatagtagtgtatttatttggcgctgtgttacaggtatttaccttgctgtggattgctgactggatggtccatcacttctggaggaaaggaaaggacccggatagtttctccatcccctacctaacagcattgggtgatctgctcgggacagctctgttagccttaagttttcattttctttggcttattggagatcgagatggagatgttggagactaataaattctacaaactgctctcaagttaccaaggaagaaaatacacgacaaccacttatggctctttttcaaaactcttaaatcagtagtttgacttttgccagggtaatcttcagttggccctgattcaattaaatggccttaatttttttttaaggaatttgtgtcaaaaccagaatgaagagtattcgtgctgcttttcatagaataaatgataatttgacatagacatagatataagttccagctctgaaattaattaggaaagaatataggatgtttacagtgaataattttaaaaccacaaacatagcagaaatgtactttattattaaatttgtaatgcaggattagaagaagcagagctctagtttagcctttcttgtctcacagatgtgctgtatcccaggcatactataaaacgaagagtgcccaaccaagctttgaatcgtattaacaatgcccacctctatgctagctgaggataaatttaccagttgctcatatttaaactgacctaaatatgttttgctgagcataagataaactcacttttacctcc

SEQ ID NO: 3957 - protein, 490 aa, Homo sapien
MEYHSFSEQSFHANNGHASSSCSQKYDDYANCNYCDGRETSETTAMLQDEDISSDGDEDAIVEVTPKLPKESSGIMALQILVPFLLAGFGTVSAGMVLDIVQHWEVFRKVTEVFILVPALLGLKGNLEMTLASRLSTAVNIGKMDSPIEKWNLIIGNLALKQVQATVVGFLAAVAAIILGWIPEGKYYLDHSILLCSSSVATAFIASLLQGIIMVGVIVGSKKTGINPDNVATPIAASFGDLITLAILAWISQGLYSCLETYYYISPLVGVFFLALTPIWIIIAAKHPATRTVLHSGWEPVITAMVISSIGGLILDTTVSDPNLVGIVVYTPVINGIGGNLVAIQASRISTYLHLHSIPGELPDEPKGCYYPFRTFFGPGVNNKSAQVLLLLVIPGHLIFLYTIHLMKSGHTSLTIIFIVVYLFGAVLQVFTLLWIADWMVHHFWRKGKDPDSFSIPYLTALGDLLGTALLALSFHFLWLIGDRDGDVGD

SEQ ID NO: 3958 - DNA, 2164 bp, Homo sapien
atttctgcagagacagaaagaaacgcagctcttgacttcttttttgtaaacattactgtaagagttgtgataactttttattctactatgtatatgtatggaatagtattaataaatgaactagggaaggatgtaataaattagacatctcttcattttagagagaagatggaaacaacattgcttttcttttctcaaataaatatgtgtgaatcaaaagaaaaaacttttttcaagttaatacatggttcaggaaaagaagaaacaagcaaagaagccaaaatcagagctaaggaaaaaagaaatagactaagtcttcttgtgcagaaacctgagtttcatgaagacacccgctccagtagatctgggcacttggccaaagaaacaagagtctcccctgaagaggcagtgaaatggggtgaatcatttgacaaactgctttcccatagagatggactagaggcttttaccagatttcttaaaactgaattcagtgaagaaaatattgaattttggatagcctgtgaagatttcaagaaaagcaagggacctcaacaaattcaccttaaagcaaaagcaatatatgagaaatttatacagactgatgccccaaaagaggttaaccttgattttcacacaaaagaagtcattacaaacagcatcactcaacctaccctccacagttttgatgctgcacaaagcagagtgtatcagctcatggaacaagacagttatacacgttttctgaaatctgacatctatttagacttgatggaaggaagacctcagagaccaacaaatcttaggagacgatcacgctcatttacctgcaatgaattccaagatgtacaatcagacgttgccatttggttataaagaaaattgattttgctcatttttatgacaaacttatacatctgcttctaacatatcgcatgtttatgttaagatttggtcccatcctttaaactgaaatatgtcatgtgaaattattttaaaaatgtaaaaacaaaactttctgctaacaaaatacatacagtatctgccagtatattctgtaaaaccttctatttgatgtcattccatttataatcagaaaaaaaacttatttcttaatcaaaaggcagtacaaaaaaagtaataatgttttataagattgtagagttaagtaaaagttaagcttttgcaaagttgtcaaaagttcaaacaaaagtctagttgggattttttaccaaagcagcataatatgtgttatataaacataataatactcagatatccaaatgttcagatagcatttttcataatgaatgttctcttttttttggtaatagtgtagaagtgatctggttcttacaatgggagatgaagaacatttattattgggttactactaaccctgtcccaagaatagtaatatcacctctagttataagccagcaacaggaacttttgtgaagacacattcatctctacggaacttcagattaaatataatctagattaatgactgagaataagatccacatttgaactcattcctaagtgaacatggacgtacccagttatacaaagtacttctgttggtcacagaaacatgaccagattttgcatatctccaggtagggaactaagtagactaccttatcaccggctaagaaaacttgctactaaactattaggccatcaatggcttgaataaaaaccagagaaggtttttcccaggacgtctcatgtttggccctttagaattggggtagaaatcagaaatgagatgaggggaagaagcaaggagtctaaggccctagcgatttgggcatctgccacattggttcatattcagaaagtgttatctcattgattatattcttgttaagcaaatctccttaagtaattattattcaaataagattatactcatacatctatatgtcactgttttaaagagatatttaatttttaatgtgtgttacatggtctgtaaatatttgtatttaaaaatgccatgcattaggctttggaaatttaatgttagttgaaatgtaaaatgtgaaaactttagatcatttgtagtaataaatatttttaacttcattcatacagttaagtttatctgacaataaaagctctgactaaaaaaaaaaaaaaaaaaaaaaaaaaaaaa

SEQ ID NO: 3959 - protein, 235 aa, Homo sapien
METTLLFFSQINMCESKEKTFFKLIHGSGKEETSKEAKIRAKEKRNRLSLLVQKPEFHEDTRSSRSGHLAKETRVSPEEAVKWGESFDKLLSHRDGLEAFTRFLKTEFSEENIEFWIACEDFKKSKGPQQIHLKAKAIYEKFIQTDAPKEVNLDFHTKEVITNSITQPTLHSFDAAQSRVYQLMEQDSYTRFLKSDIYLDLMEGRPQRPTNLRRRSRSFTCNEFQDVQSDVAIWL

SEQ ID NO: 3960 - DNA, 1138 bp, Homo sapien
ccctttaaagggtgactcgtcccacttgtgttctctctcctggtgcagagttgcaagcaagtttatcagagtatcgccatgaagttcgtcccctgcctcctgctggtgaccttgtcctgcctggggactttgggtcaggccccgaggcaaaagcaaggaagcactggggaggaattccatttccagactggagggagagattcctgcactatgcgtcccagcagcttggggcaaggtgctggagaagtctggcttcgcgtcgactgccgcaacacagaccagacctactggtgtgagtacagggggcagcccagcatgtgccaggcttttgctgctgaccccaaaccttactggaatcaagccctgcaggagctgaggcgccttcaccatgcgtgccagggggccccggtgcttaggccatccgtgtgcagggaggctggaccccaggcccatatgcagcaggtgacttccagcctcaagggcagcccagagcccaaccagcagcctgaggctgggacgccatctctgaggcccaaggccacagtgaaactcacagaagcaacacagctgggaaaggactcgatggaagagctgggaaaagccaaacccaccacccgacccacagccaaacctacccagcctggacccaggcccggagggaatgaggaagcaaagaagaaggcctgggaacattgttggaaacccttccaggccctgtgcgcctttctcatcagcttcttccgagggtgacaggtgaaagacccctacagatctgacctctccctgacagacaaccatctctttttatattatgccgctttcaatccaacgttctcacactggaagaagagagtttctaatcagatgcaacggcccaaattcttgatctgcagcttctctgaagtttggaaaagaaaccttcctttctggagtttgcagagttcagcaatatgatagggaacaggtgctgatgggcccaagagtgacaagcatacacaactacttattatctgtagaagttttgctttgttgatctgagccttctatgaaagtttaaatatgtaacgcattcatgaatttccagtgttcagtaaatagcagctatgtgtgtgcaaaataaaagaatgatttcagaaat

SEQ ID NO: 3961 - protein, 223 aa, Homo sapien
MKFVPCLLLVTLSCLGTLGQAPRQKQGSTGEEFHFQTGGRDSCTMRPSSLGQGAGEVWLRVDCRNTDQTYWCEYRGQPSMCQAFAADPKPYWNQALQELRRLHHACQGAPVLRPSVCREAGPQAHMQQVTSSLKGSPEPNQQPEAGTPSLRPKATVKLTEATQLGKDSMEELGKAKPTTRPTAKPTQPGPRPGGNEEAKKKAWEHCWKPFQALCAFLISFFRG

SEQ ID NO: 3962 - DNA, 1003 bp, Homo sapien
gtctacaccccctcctcacacgcacttcacctgggtcgggattctcaggtcatgaacggtcccagccacctccgggcagggcgggtgaggacggggacggggcgtgtccaactggctgtgggctcttgaaacccgagcatggcacagcacggggcgatgggcgcgtttcgggccctgtgcggcctggcgctgctgtgcgcgctcagcctgggtcagcgccccaccgggggtcccgggtgcggccctgggcgcctcctgcttgggacgggaacggacgcgcgctgctgccgggttcacacgacgcgctgctgccgcgattacccgggcgaggagtgctgttccgagtgggactgcatgtgtgtccagcctgaattccactgcggagacccttgctgcacgacctgccggcaccacccttgtcccccaggccagggggtacagtcccaggggaaattcagttttggcttccagtgtatcgactgtgcctcggggaccttctccgggggccacgaaggccactgcaaaccttggacagactgctgctggaggtgccgccgtcgaccgaagacgccagaagctgccagttccccgaggaagagcggggcgagcgatcggcagaggagaaggggcggctgggagacctgtgggtgtgagcctggccgtcctccggggccaccgaccgcagccagcccctccccaggagctccccaggccgcaggggctctgcgttctgctctgggccgggccctgctcccctggcagcagaagtgggtgcaggaaggtggcagtgaccagcgccctggaccatgcagttcggcggccgcggctgggccctgcaggagggagagagagacacagtcatggcccccttcctcccttgctggccctgatggggtggggtcttaggacgggaggctgtgtccgtgggtgtgcagtgcccagcacgggacccggctgcaggggaccttcaataaacacttgtccagtgaaaaaaaaaaaaaaa

SEQ ID NO: 3963 - protein, 255 aa, Homo sapien
MAQHGAMGAFRALCGLALLCALSLGQRPTGGPGCGPGRLLLGTGTDARCCRVHTTRCCRDYPGEECCSEWDCMCVQPEFHCGDPCCTTCRHHPCPPGQGVQSQGKFSFGFQCIDCASGTFSGGHEGHCKPWTDCCWRCRRRPKTPEAASSPRKSGASDRQRRRGGWETCGCEPGRPPGPPTAASPSPGAPQAAGALRSALGRALLPWQQKWVQEGGSDQRPGPCSSAAAAGPCRRERETQSWPPSSLAGPDGVGS

SEQ ID NO: 3964 - DNA, 1419 bp, Homo sapien
gcagtttctatagtagttttaaattattattaaatcacctgaaaaaaattccaaaagagaaccacacactaccatatccaaacaacttttgcatttcccataattgtagttaatgtcagcccagtaggccagaccaacccccagttcaatactttccttccccaaaagctctatactttgaaggaaaacagatacagtatcaaattatgacactttccttgcccaaattaatgcactggtacacccagtggctcatatttaacttcccccagcttcccaattcaaactggggggaaaaaaactaaatcattgggagttacttgccaacttggaagttgatatttctttactttttccattctaagactttaagttctctggcatgagtttatctgcaatcataaactaaacaattacctaaacccaccccaccaatcccaaccgtaacaggccactgccaactaattgccaatatttgcccctcccctttaataaaacttttaagaagtcacattattggaaaacttaacttcaacatttggcctactcaagctcttctgaagttctcctgagatgactgaatatgaaccaaagctgcactgtgctgtacttttcagcttcaactgggaatactcttccaaggataaaagcagctccagtccctgaaggtgttcgtgccaacagcacagcggtacactccttctctaacccagtttgtcaatagtactatagcatctgtggaaaatcttagaaaaaaacattttctcccccaccctctctcttccctgttaagaccatcccaaaatgcttcaagtaaaaaataacaagtttaaggggttaagcacttttaaagtctgattaagggggtggggggaaaaaagagtaactaccagccatttctccaatggacatctcttccacagacctcaacgtgagaactgctctagtttctataaactgtaaacctgtggtggtctgattatcctgatattggattttcttgttttctgttacaccttgagtcatttgcctttaggattctagacagacctaagggaaaaagaactgaaaacatattttgcccccacccccacaaaaaaaaatactgaaaactcccccccgcctcagttacacatccaaactctacatttacaaaacgaattcagggtgaggaagtaaaaacaggtcatctattcacaaaactgaaatacttcattaccccaactaaacatacaaactgcttacagatttgctgaaattgtctcaatttggctatcaaattcatttggttttcctcaaattcgtgtaaaaaaaaaaaacccacaaacttgccatctactatttctccaggacttggcagtctgccctcaaaagcttcagacaagattcatgagtataagcctgaaaaaaaaaaaaaaa

SEQ ID NO: 3965 - DNA, 5227 bp, Homo sapien; identical to SEQ ID NO: 3295

SEQ ID NO: 3966 - protein, 1368 aa, Homo sapien; identical to SEQ ID NO: 3296

SEQ ID NO: 3967 - DNA, 2468 bp, Homo sapien; identical to SEQ ID NO: 3519

SEQ ID NO: 3968 - protein, 454 aa, Homo sapien; identical to SEQ ID NO: 3520

SEQ ID NO: 3969 - DNA, 1359 bp, Homo sapien
accgggcaccggacggctcgggtactttcgttcttaattaggtcatgcccgtgtgagccaggaaagggctgtgtttatgggaagccagtaacactgtggcctactatctcttccgtggtgccatctacatttttgggactcgggaattatgaggtagaggtggaggcggagccggatgtcagaggtcctgaaatagtcaccatgggggaaaatgatccgcctgctgttgaagcccccttctcattccgatcgctttttggccttgatgatttgaaaataagtcctgttgcaccagatgcagatgctgttgctgcacagatcctgtcactgctgccattgaagttttttccaatcatcgtcattgggatcattgcattgatattagcactggccattggtctgggcatccacttcgactgctcagggaagtacagatgtcgctcatcctttaagtgtatcgagctgatagctcgatgtgacggagtctcggattgcaaagacggggaggacgagtaccgctgtgtccgggtgggtggtcagaatgccgtgctccaggtgttcacagctgcttcgtggaagaccatgtgctccgatgactggaagggtcactacgcaaatgttgcctgtgcccaactgggtttcccaagctatgtgagttcagataacctcagagtgagctcgctggaggggcagttccgggaggagtttgtgtccatcgatcacctcttgccagatgacaaggtgactgcattacaccactcagtatatgtgagggagggatgtgcctctggccacgtggttaccttgcagtgcacagcctgtggtcatagaaggggctacagctcacgcatcgtgggtggaaacatgtccttgctctcgcagtggccctggcaggccagccttcagttccagggctaccacctgtgcgggggctctgtcatcacgcccctgtggatcatcactgctgcacactgtgtttatgacttgtacctccccaagtcatggaccatccaggtgggtctagtttccctgttggacaatccagccccatcccacttggtggagaagattgtctaccacagcaagtacaagccaaagaggctgggcaatgacatcgcccttatgaagctggccgggccactcacgttcaatggtacatctgggtctctatgtggttctgcagctcttcctttgtttcaagaggatttgcaattgctcattgaagcattcttatgatggctgctttataatccttgtcagatattaataattccaactcctgattcatgttggtgttggcatcagttgattatcttttctcattaaaattgtgatgctcctaaaaaaaaaaaaaaaaaa

SEQ ID NO: 3970 - protein, 344 aa, Homo sapien
MGENDPPAVEAPFSFRSLFGLDDLKISPVAPDADAVAAQILSLLPLKFFPIIVIGIIALILALAIGLGIHFDCSGKYRCRSSFKCIELIARCDGVSDCKDGEDEYRCVRVGGQNAVLQVFTAASWKTMCSDDWKGHYANVACAQLGFPSYVSSDNLRVSSLEGQFREEFVSIDHLLPDDKVTALHHSVYVREGCASGHVVTLQCTACGHRRGYSSRIVGGNMSLLSQWPWQASLQFQGYHLCGGSVITPLWIITAAHCVYDLYLPKSWTIQVGLVSLLDNPAPSHLVEKIVYHSKYKPKRLGNDIALMKLAGPLTFNGTSGSLCGSAALPLFQEDLQLLIEAFL

SEQ ID NO: 3971 - DNA, 2192 bp, Homo sapien
tccctgtcctgcgcccgcgcgccccgggagcctacccagcacgcgctccgcgcccactggttccctccagccgccgccgtccagccgagtccccactccggagtcgccgctgccgcggggacatggtcctctgcgttcaggggtgagcacccccttgtaagctcagggctactgttgggtgtcagggaacaaagttttagactgctgcgctccaaagcgggcacacacatgtacctagaacacaccagccactgtccccaccatgatgatgacacagccatggacacacccctgcccagacctcgtcctttgctggctgtggagcggactgggcagcggcccctgtgggccccgtccctggaactgcccaagccagtcatgcagcccttgcctgctggggccttcctcgaggaggtggcagagggtaccccagcccagacagagagtgagccaaaggtgctggacccagaggaggatctgctgtgcatagccaagaccttctcctaccttcgggaatctggctggtattggggttccattacggccagcgaggcccgacaacacctgcagaagatgccagaaggcacgttcttagtacgtgacagcacgcaccccagctacctgttcacgctgtcagtgaaaaccactcgtggccccaccaatgtacgcattgagtatgccgactccagcttccgtctggactccaactgcttgtccaggccacgcatcctggcctttccggatgtggtcagccttgtgcagcactatgtggcctcctgcactgctgatacccgaagcgacagccccgatcctgctcccaccccggccctgcctatgcctaaggaggatgcgcctagtgacccagcactgcctgctcctccaccagccactgctgtacacctaaaactggtgcagccctttgtacgcagaagcagtgcccgcagcctgcaacacctgtgccgccttgtcatcaaccgtctggtggccgacgtggactgcctgccactgccccggcgcatggccgactacctccgacagtaccccttccagctctgactgtacggggcaatctgcccaccctcacccagtcgcaccctggaggggacatcagccccagctggacttgggcccccactgtccctcctccaggcatcctggtgcctgcatacctctggcagctggcccaggaagagccagcaagagcaaggcatgggagaggggaggtgtcacacaacttggaggtaaatgcccccaggccgcatgtggcttcattatactgagccatgtgtcagaggatggggagacaggcaggaccttgtctcacctgtgggctgggcccagacctccactcgcttgcctgccctggccacctgaactgtatgggcactctcagccctggtttttcaatccccagggtcgggtaggacccctactggcagccagcctctgtttctgggaggatgacatgcagaggaactgagatcgacagtgactagtgaccccttgttgaggggtaagccaggctaggggactgcacaattatacactatttatttatttattctccttggggttggtgtcaggggcgagccaaccccacctctatgccctgagccctggtagtccagagaccccaactctgccctggcttctctggttcttccctgtggaaagcccatcctgagacatcttgctggaaccaaggcaatcctggatgtcctggtactgacccacccgtctgtgaatgtgtccactctcttctgcccccagccatatttggggaggatggacaactacaataggtaagaaaatgcagccggagcctcagtccccagcagagcctgtgtctcaccccctcacaggacagagctgtatctgcatagagctggtctcactgtggcgcaggccccggggggagtgcctgtgctgtcaggaagagggggtgctggtttgagggccaccactgcagttctgctaggtctgcttcctgcccaggaaggtgcctgcacatgagaggagagaaatacacgtctgataagacttcatgaaataataattatagcaaagaacagtttggtggtcttttctcttccactgatttttctgtaatgacattatacctttattacctctttattttattacctctataataaaatgatacctttttcatgtaaaaaaaaaaaaaaaaa

SEQ ID NO: 3972 - protein, 258 aa, Homo sapien
MDTPLPRPRPLLAVERTGQRPLWAPSLELPKPVMQPLPAGAFLEEVAEGTPAQTESEPKVLDPEEDLLCIAKTFSYLRESGWYWGSITASEARQHLQKMPEGTFLVRDSTHPSYLFTLSVKTTRGPTNVRIEYADSSFRLDSNCLSRPRILAFPDVVSLVQHYVASCTADTRSDSPDPAPTPALPMPKEDAPSDPALPAPPPATAVHLKLVQPFVRRSSARSLQHLCRLVINRLVADVDCLPLPRRMADYLRQYPFQL

SEQ ID NO: 3973 - DNA, 2359 bp, Homo sapien
gttttgcctgctagcatctccctgtaactctcccaatcttgaggagtgatccctgtcccagcccctggaaaggggcaggaacgacaaactcaaagtccaggatgttcaccatgacaagagccatggaagaggctctttttcagcacttcatgcaccagaagctggggatcgcctatgccatacacaagccatttcccttctttgaaggcctcctagacaactccatcatcactaagagaatgtacatggaatctctggaagcctgtagaaatttgatccctgtatccagagtggtgcacaacattctcacccaactggagaggacttttaacctgtctcttctggtgacattgttcagtcaaattaacctgcgtgaatatcccaatctggtgacgatttacagaagcttcaaacgtgttggtgcttcctatgaacggcagagcagagacacaccaatcctacttgaagccccaactggcctagcagaaggaagctccctccataccccactggcgctgcccccaccacaaccccctcaaccaagctgttcaccctgtgcgccaagagtcagtgagcctggaacatcctcccagcaaagcgatgagatcctgagtgagtcgcccagcccatctgaccctgtcctgcctctccctgcactcatccaggaaggaagaagcacttcagtgaccaatgacaagttaacatccaaaatgaatgcggaagaagactcagaagagatgcccagcctcctcactagcactgtgcaagtggccagtgacaacctgatcccccaaataagagataaagaagaccctcaagagatgccccactctcccttgggctctatgccagagataagagataattctccagaaccaaatgacccagaagagccccaggaggtgtccagcacaccttcagacaagaaaggaaagaaaagaaaaagatgtatctggtcaactccaaaaaggagacataagaaaaaaagcctcccaagagggacagcctcatctagacacggaatccaaaagaagctcaaaagggtggatcaggttcctcaaaagaaagatgactcaacttgtaactccacggtagagacaagggcccaaaaggcgagaactgaatgtgcccgaaagtcgagatcagaggagatcattgatggcacttcagaaatgaatgaaggaaagaggtcccagaagacgcctagtacaccacgaagggtcacacaaggggcagcctcacctgggcatggcatccaagagaagctccaagtggtggataaggtgactcaaaggaaagacgactcaacctggaactcagaggtcatgatgagggtccaaaaggcaagaactaaatgtgcccgaaagtccagatcgaaagaaaagaaaaaggagaaagatatctgttcaagctcaaaaaggagatttcagaaaaatattcaccgaagaggaaaacccaaaagtgacactgtggattttcactgttctaagctccccgtgacctgtggtgaggcgaaagggattttatataagaagaaaatgaaacacggatcctcagtgaagtgcattcggaatgaggatggaacttggttaacaccaaatgaatttgaagtcgaaggaaaaggaaggaacgcaaagaactggaaacggaatatacgttgtgaaggaatgaccctaggagagctgctgaagcggaaaaactcggatgaatgcgaggtgtgctgtcaagggggacaacttctctgctgcggtacttgtccacgagtcttccatgaggactgtcacatcccccctgtggaagccaagaggatgctgtggagttgcaccttctgcaggatgaagaggtcttcaggaagccaacagtgccatcatgtatctaagaccctggagaggcagatgcagcctcaggaccagctgattcgagattacggtgagccctttcaggaagcaatgtggttggacctggttaaggaaaggctgattacggaaatgtacacggtggcatggtttgtgcgagacatgcgcctgatgtttcgcaaccataaaacattttacaaggcttctgactttggccaggtaggacttgacttagaggcagaatttgaaaaagatctcaaagacgtgctcggttttcatgaagccaatgacggcggtttctggactcttccttgaccctgttctgtaaagactgaagcatccccacctcaggattcagctgatgggaccctggcttggactgttgattgccagtgagtctgggatgtaattggctgccctcaggacccaaacccagacacttcataggattatcacaccctccatctttattctttctttttacctttaaaagtctatatcta

SEQ ID NO: 3974 - protein, 689 aa, Homo sapien
MFTMTRAMEEALFQHFMHQKLGIAYAIHKPFPFFEGLLDNSIITKRMYMESLEACRNLIPVSRVVHNILTQLERTFNLSLLVTLFSQINLREYPNLVTIYRSFKRVGASYERQSRDTPILLEAPTGLAEGSSLHTPLALPPPQPPQPSCSPCAPRVSEPGTSSQQSDEILSESPSPSDPVLPLPALIQEGRSTSVTNDKLTSKMNAEEDSEEMPSLLTSTVQVASDNLIPQIRDKEDPQEMPHSPLGSMPEIRDNSPEPNDPEEPQEVSSTPSDKKGKKRKRCIWSTPKRRHKKKSLPRGTASSRHGIQKKLKRVDQVPQKKDDSTCNSTVETRAQKARTECARKSRSEEIIDGTSEMNEGKRSQKTPSTPRRVTQGAASPGHGIQEKLQVVDKVTQRKDDSTWNSEVMMRVQKARTKCARKSRSKEKKKEKDICSSSKRRFQKNIHRRGKPKSDTVDFHCSKLPVTCGEAKGILYKKKMKHGSSVKCIRNEDGTWLTPNEFEVEGKGRNAKNWKRNIRCEGMTLGELLKRKNSDECEVCCQGGQLLCCGTCPRVFHEDCHIPPVEAKRMLWSCTFCRMKRSSGSQQCHHVSKTLERQMQPQDQLIRDYGEPFQEAMWLDLVKERLITEMYTVAWFVRDMRLMFRNHKTFYKASDFGQVGLDLEAEFEKDLKDVLGFHEANDGGFWTLP

SEQ ID NO: 3975 - DNA, 885 bp, Homo sapien
gccgctttttttttttttttttttttttgaaggaaaatttgtattatttcaattatttttatgtacagaaaactcaacagtgtacatttaacccagtttagtggcaagttctttagcctttgccttttcgagcttggcgatacgagccacagacttaggacccaggacattgccaccccagtgacggcggatctcatcgtatctgtcattgtaattggtcctgatagcttccaccagcttagccaaagcgcctttgtcttccgagttcacctgtgtgaaggcgacagtggtgcaggtcttcctgtggactagacgtcccagtcttgcctttcagctttcacttctgccggctccgcaactgagtgacacccagcgacaaccgactggggagtggtagaagcaactgaacggatgcgtgcgagctgaggacagggcgggaggagggggcacacatgccccaggggagcgaggagaactcttgaaatctccattttcaatcccttcgaaatcacgtatggtttccacaaagccgagtcgtgtcacgtggcaggtttacgtcaatagtccctctctctgctcctccattcgcaagtgtcttcctgggccagactcccctccacctcatgtacttgctatattgaggatgaagttttctatggtgggacactaaatataaagctatatagagaaaaaaaaaaaaaaaaaaaaaaaaaaaaaaaaaaaaaaaaaaaaaaaaaaaaaaaaaaaaaaaaaaaaaaaaaaaaaaaaaaaaaaaaaaaaaaaaaaaaaaaaaaaaaaaaaaaaaaaaaaaaaaaaaaaaaaaaaaaaaaaaaaaaaaaacaaaaaaaaaaaaaaaaaaaaaaaaaaaaaaaaaaaaaaaaaaaa

SEQ ID NO: 3976 - protein, 83 aa, Homo sapien
MYRKLNSVHLTQFSGKFFSLCLFELGDTSHRLRTQDIATPVTADLIVSVIVIGPDSFHQLSQSAFVFRVHLCEGDSGAGLPVD

SEQ ID NO: 3977 - DNA, 1739 bp, Homo sapien
ggggatcactgttggaaggcagctgcttgaggtccaaggcagtcagtgtcccctctcttttgcctcgggacagctggtatttatcagactcctaagaagttttccttgctccctagtagaagagagagattatgcagcgggcttttgattgatccaatgggaattacattgatctggtgtctggccttggttcttatcaagtggatcacctctaagaggcgtggagctatttcctatgacagttctgatcagactgcattatacattcgtatgctaggagatgtacgtgtaaggagccgagcaggatttgaatcagaaagaagaggttctcacccatatattgattttcgtattttccactctcaatctgaaattgaagtgtctgtctctgcaaggaatatcagaaggctactaagtttccagcgatatcttagatcttcacgcttttttcgtggtactgcggtttcaaattccctaaacattttagatgatgattataatggacaagccaagtgtatgctggaaaaagttggaaattggaattttgatatctttctatttgatagactaacaaatggaaatagtctagtaagcttaacctttcatttatttagtcttcatggattaattgagtacttccatttagatatgatgaaacttcgtagatttttagttatgattcaagaagattaccacagtcaaaatccttaccataacgcagtccacgctgcggatgttactcaggccatgcactgttacttaaaggaacctaagcttgccaattctgtaactccttgggatatcttgctgagcttaattgcagctgccactcatgatctggatcatccaggtgttaatcaacctttccttattaaaactaaccattacttggcaactttatacaagaatacctcagtactggaaaatcaccactggagatctgcagtgggcttattgagagaatcaggcttattctcacatctgccattagaaagcaggcaacaaatggagacacagataggtgctctgatactagccacagacatcagtcgccagaatgagtatctgtctttgtttaggtcccatttggatagaggtgatttatgcctagaagacaccagacacagacatttggttttacagatggctttgaaatgtgctgatatttgtaacccatgtcggacgtgggaattaagcaagcagtggagtgaaaaagtaacggaggaattcttccatcaaggagatatagaaaaaaaatatcatttgggtgtgagtccactttgcgatcgtcacactgaatctattgccaacatccagattggttttatgacttacctagtggagcctttatttacagaatgggccaggttttccaatacaaggctatcccagacaatgcttggacacgtggggctgaataaagccagctggaagggactgcagagagaacagtcgagcagtgaggacactgatgctgcatttgagttgaactcacagttattacctcaggaaaatcggttatcataacccccagaaccagtgggacaaactgcctcctggaggtttttagaaatgtgaaatggggtcttgaggtgagagaacttaactcttgactgccaaggtttccaagtgagtgatgccagccagcattatttatttccaagatttcctctgttggatcatttgaacccacttgttaattgcaagacccgaacatacagcaatatgaatttggcttt

SEQ ID NO: 3978 - protein, 456 aa, Homo sapien
MGITLIWCLALVLIKWITSKRRGAISYDSSDQTALYIRMLGDVRVRSRAGFESERRGSHPYIDFRIFHSQSEIEVSVSARNIRRLLSFQRYLRSSRFFRGTAVSNSLNILDDDYNGQAKCMLEKVGNWNFDIFLFDRLTNGNSLVSLTFHLFSLHGLIEYFHLDMMKLRRFLVMIQEDYHSQNPYHNAVHAADVTQAMHCYLKEPKLANSVTPWDILLSLIAAATHDLDHPGVNQPFLIKTNHYLATLYKNTSVLENHHWRSAVGLLRESGLFSHLPLESRQQMETQIGALILATDISRQNEYLSLFRSHLDRGDLCLEDTRHRHLVLQMALKCADICNPCRTWELSKQWSEKVTEEFFHQGDIEKKYHLGVSPLCDRHTESIANIQIGFMTYLVEPLFTEWARFSNTRLSQTMLGHVGLNKASWKGLQREQSSSEDTDAAFELNSQLLPQENRLS

SEQ ID NO: 3979 - DNA, 3105 bp, Homo sapien
agcgcagcgtgcgggtggcctggatcccgcgcagtggcccggcgatgtcgctcgtgctgctaagcctggccgcgctgtgcaggagcgccgtaccccgagagccgaccgttcaatgtggctctgaaactgggccatctccagagtggatgctacaacatgatctaatccccggagacttgagggacctccgagtagaacctgttacaactagtgttgcaacaggggactattcaattttgatgaatgtaagctgggtactccgggcagatgccagcatccgcttgttgaaggccaccaagatttgtgtgacgggcaaaagcaacttccagtcctacagctgtgtgaggtgcaattacacagaggccttccagactcagaccagaccctctggtggtaaatggacattttcctacatcggcttccctgtagagctgaacacagtctatttcattggggcccataatattcctaatgcaaatatgaatgaagatggcccttccatgtctgtgaatttcacctcaccaggctgcctagaccacataatgaaatataaaaaaaagtgtgtcaaggccggaagcctgtgggatccgaacatcactgcttgtaagaagaatgaggagacagtagaagtgaacttcacaaccactcccctgggaaacagatacatggctcttatccaacacagcactatcatcgggttttctcaggtgtttgagccacaccagaagaaacaaacgcgagcttcagtggtgattccagtgactggggatagtgaaggtgctacggtgcaggtaaagttcagtgagctgctctggggagggaagggacatagaagactgttccatcattcattgcttttaaggatgagttctctcttgtcaaatgcacttctgccagcagacaccagttaagtggcgttcatgggggctctttcgctgcagcctccaccgtgctgaggtcaggaggccgacgtggcagttgtggtcccttttgcttgtattaatggctgctgaccttccaaagcactttttattttcattttctgtcacagacactcagggatagcagtaccattttacttccgcaagcctttaactgcaagatgaagctgcaaagggtttgaaatgggaaggtttgagttccaggcagcgtatgaactctggagaggggctgccagtcctctctgggccgcagcggacccagctggaacacaggaagttggagcagtaggtgctccttcacctctcagtatgtctctttcaactctagtttttgaggtggggacacaggaggtccagtgggacacagccactccccaaagagtaaggagcttccatgcttcattccctggcataaaaagtgctcaaacacaccagagggggcaggcaccagccagggtatgatggctactacccttttctggagaaccatagacttcccttactacagggacttgcatgtcctaaagcactggctgaaggaagccaagaggatcactgctgctccttttttctagaggaaatgtttgtctacgtggtaagatatgacctagcccttttaggtaagcgaactggtatgttagtaacgtgtacaaagtttaggttcagaccccgggagtcttgggcacgtgggtctcgggtcactggttttgactttagggctttgttacagatgtgtgaccaaggggaaaatgtgcatgacaacactagaggtatgggcgaagccagaaagaagggaagttttggctgaagtaggagtcttggtgagattttgctctgatgcatggtgtgaactttctgagcctcttgtttttcctcagctgactccatattttcctacttgtggcagcgactgcatccgacataaaggaacagttgtgctctgcccacaaacaggcgtccctttccctctggataacaacaaaagcaagccgggaggctggctgcctctcctcctgctgtctctgctggtggccacatgggtgctggtggcagggatctatctaatgtggaggcacgaaaggatcaagaagacttccttttctaccaccacactactgccccccattaaggttcttgtggtttacccatctgaaatatgtttccatcacacaatttgttacttcactgaatttcttcaaaaccattgcagaagtgaggtcatccttgaaaagtggcagaaaaagaaaatagcagagatgggtccagtgcagtggcttgccactcaaaagaaggcagcagacaaagtcgtcttccttctttccaatgacgtcaacagtgtgtgcgatggtacctgtggcaagagcgagggcagtcccagtgagaactctcaagacctcttcccccttgcctttaaccttttctgcagtgatctaagaagccagattcatctgcacaaatacgtggtggtctactttagagagattgatacaaaagacgattacaatgctctcagtgtctgccccaagtaccacctcatgaaggatgccactgctttctgtgcagaacttctccatgtcaagcagcaggtgtcagcaggaaaaagatcacaagcctgccacgatggctgctgctccttgtagcccacccatgagaagcaagagaccttaaaggcttcctatcccaccaattacagggaaaaaacgtgtgatgatcctgaagcttactatgcagcctacaaacagccttagtaattaaaacattttataccaataaaattttcaaatattgctaactaatgtagcattaactaacgattggaaactacatttacaacttcaaagctgttttatacatagaaatcaattacagttttaattgaaaactataaccattttgataatgcaacaataaagcatcttcagccaaacatctagtcttccatagaccatgcattgcagtgtacccagaactgtttagctaatattctatgtttaattaatgaatactaactctaagaacccctcactgattcactcaatagcatcttaagtgaaaaaccttctattacatgcaaaaaatcattgtttttaagataacaaaagtagggaataaacaagctgaacccacttttaaaaaaaaaaaaaaaaaaaaaaaaaaaaaaaaa

SEQ ID NO: 3980 - protein, 288 aa, Homo sapien
MSLVLLSLAALCRSAVPREPTVQCGSETGPSPEWMLQHDLIPGDLRDLRVEPVTTSVATGDYSILMNVSWVLRADASIRLLKATKICVTGKSNFQSYSCVRCNYTEAFQTQTRPSGGKWTFSYIGFPVELNTVYFIGAHNIPNANMNEDGPSMSVNFTSPGCLDHIMKYKKKCVKAGSLWDPNITACKKNEETVEVNFTTTPLGNRYMALIQHSTIIGFSQVFEPHQKKQTRASVVIPVTGDSEGATVQVKFSELLWGGKGHRRLFHHSLLLRMSSLLSNALLPADTS

SEQ ID NO: 3981 - DNA, 10011 bp, Homo sapien
ttcctccgcgaaggctcctttgatattaatagtgttggtgtcttgaaactgacgtaatgcgcggagactgaggtcctgacaagcgataacatttctgataaagacccgatcttactgcaatctctagcgtcctcttttttggtgctgctggtttctccagacctcgcgtcctctcgattgctctctcgccttcctatttcttttttttttttttaaacaaaaaacaacaccccctcccctctcccacccggcaccgggcacatccttgctctatttcctttctctttctctctctctctctctcttttttaataagggtgggggagggaaaggggggggaggcaggaaagacctttttctctcccccccgcaataatccaagatcaactctgcaaacaacagaagacggttcatggctttggccgccgcgccaccatctttcgggctgccgagggtgttcttgacgattaatcaacagatgtacagatcagctctcaaaatgtcttctgtgtcttctgagcgtcttctaagacaattgcattagcctcctgctagttgactaatagaattaataattgtaaaaagcactctaaagccacatgccttatgaagtcaatgctgggtatgattttacaaatatggtccggaaaaagaacccccctctgagaaacgttgcaagtgaaggcgagggccagatcctggagcctataggtacagaaagcaaggtatctggaaagaacaaagaattctctgcagatcagatgtcagaaaatacggatcagagtgatgctgcagaactaaatcataaggaggaacatagcttgcatgttcaagatccatcttctagcagtaagaaggacttgaaaagcgcagttctgagtgagaaggctggcttcaattatgaaagccccagtaagggaggaaactttccctcctttccgcatgatgaggtgacagacagaaatatgttggctttctcatttccagctgctgggggagtctgtgagcccttgaagtctccgcaaagagcagaggcagatgaccctcaagatatggcctgcaccccctcaggggactcactggagacaaaggaagatcagaagatgtcaccaaaggctacagaggaaacagggcaagcacagagtggtcaagccaattgtcaaggtttgagcccagtttcagtggcctcaaaaaacccacaagtgccttcagatgggggtgtaagactgaataaatccaaaactgacttactggtgaatgacaacccagacccggcacctctgtctccagagcttcaggactttaaatgcaatatctgtggatatggttactacggcaacgaccccacagatctgattaagcacttccgaaagtatcacttaggactgcataaccgcaccaggcaagatgctgagctggacagcaaaatcttggcccttcataacatggtgcagttcagccattccaaagacttccagaaggtcaaccgttctgtgttttctggtgtgctgcaggacatcaattcttcaaggcctgttttactaaatgggacctatgatgtgcaggtgacttcaggtggaacattcattggcattggacggaaaacaccagattgccaagggaacaccaagtatttccgctgtaaattctgcaatttcacttatatgggcaactcatccaccgaattagaacaacattttcttcagactcacccaaacaaaataaaagcttctctcccctcctctgaggttgcaaaaccttcagagaaaaactctaacaagtccatccctgcacttcaatccagtgattctggagacttgggaaaatggcaggacaagataacagtcaaagcaggagatgacactcctgttgggtactcagtgcccataaagcccctcgattcctctagacaaaatggtacagaggccaccagttactactggtgtaaattttgtagtttcagctgtgagtcatctagctcacttaaactgctagaacattatggcaagcagcacggagcagtgcagtcaggcggccttaatccagagttaaatgataagctttccaggggctctgtcattaatcagaatgatctagccaaaagttcagaaggagagacaatgaccaagacagacaagagctcgagtggggctaaaaagaaggacttctccagcaagggagccgaggataatatggtaacgagctataattgtcagttctgtgacttccgatattccaaaagccatggccctgatgtaattgtagtggggccacttctccgtcattatcaacagctccataacattcacaagtgtaccattaaacactgtccattctgtcccagaggactttgcagcccagaaaagcaccttggagaaattacttatccgtttgcttgtagaaaaagtaattgttcccactgtgcactcttgcttctgcacttgtctcctggggcggctggaagctcgcgagtcaaacatcagtgccatcagtgttcattcaccacccctgacgtagatgtactcctctttcactatgaaagtgtgcatgagtcccaagcatcggatgtcaaacaagaagcaaatcacctgcaaggatcggatgggcagcagtctgtcaaggaaagcaaagaacactcatgtaccaaatgtgattttattacccaagtggaagaagagatttcccgacactacaggagagcacacagctgctacaaatgccgtcagtgcagttttacagctgccgatactcagtcactactggagcacttcaacactgttcactgccaggaacaggacatcactacagccaacggcgaagaggacggtcatgccatatccaccatcaaagaggagcccaaaattgacttcagggtctacaatctgctaactccagactctaaaatgggagagccagtttctgagagtgtggtgaagagagagaagctggaagagaaggacgggctcaaagagaaagtttggaccgagagttccagtgatgaccttcgcaatgtgacttggagaggggcagacatcctgcgggggagtccgtcatacacccaagcaagcctggggctgctgacgcctgtgtctggcacccaagagcagacaaagactctaagggatagtcccaatgtggaggccgcccatctggcgcgacctatttatggcttggctgtggaaaccaagggattcctgcagggggcgccagctggcggagagaagtctggggccctcccccagcagtatcctgcatcgggagaaaacaagtccaaggatgaatcccagtccctgttacggaggcgtagaggctccggtgttttttgtgccaattgcctgaccacaaagacctctctctggcgaaagaatgcaaatggcggatatgtatgcaacgcgtgtggcctctaccagaagcttcactcgactcccaggcctttaaacatcattaaacaaaacaacggtgagcagattattaggaggagaacaagaaagcgccttaacccagaggcacttcaggctgagcagctcaacaaacagcagaggggcagcaatgaggagcaagtcaatggaagcccgttagagaggaggtcagaagatcatctaactgaaagtcaccagagagaaattccactccccagcctaagtaaatacgaagcccagggttcattgactaaaagccattctgctcagcagccagtcctggtcagccaaactctggatattcacaaaaggatgcaacctttgcacattcagataaaaagtcctcaggaaagtactggagatccaggaaatagttcatccgtatctgaagggaaaggaagttctgagagaggcagtcctatagaaaagtacatgagacctgcgaaacacccaaattattcaccaccaggcagccctattgaaaagtaccagtacccactttttggacttccctttgtacataatgacttccagagtgaagctgattggctgcggttctggagtaaatataagctctccgttcctgggaatccgcactacttgagtcacgtgcctggcctaccaaatccttgccaaaactatgtgccttatcccaccttcaatctgcctcctcatttttcagctgttggatcagacaatgacattcctctagatttggcgatcaagcattccagacctgggccaactgcaaacggtgcctccaaggagaaaacgaaggcaccaccaaatgtaaaaaatgaaggtcccttgaatgtagtaaaaacagagaaagttgatagaagtactcaagatgaactttcaacaaaatgtgtgcactgtggcattgtctttctggatgaagtgatgtatgctttgcatatgagttgccatggtgacagtggacctttccagtgcagcatatgccagcatctttgcacggacaaatatgacttcacaacacatatccagaggggcctgcataggaacaatgcacaagtggaaaaaaatggaaaacctaaagagtaaaaccttagcacttagcacaattaaatagaaataggttttcttgatgggaattcaatagcttgtaatgtcttatgaagacctattaaaaaaatacttcatagagcctgccttatccaacatgaaattcccttcttttgttattctttcttttgatgagtaggttaccaagattaaaaagtgagataaatggtcaatgagaaagaatggaagatggtaaacaatcactttttaaaacctgttaagtcaaaaccatcttggctaatatgtactggggaaataatccataagagatatcaccagactagaattaatatatttataaagaaagagaccaaaactgtctagaatttgaaagggtttacatattattatactaaagcagtactggactggccattggaccatttgttccaaaacccataaattgttgcctaaatttataatgatcatgaaaccctaggcagaggaggagaaattgaaggtccagggcaatgaaagaaaaatggcgccctctcaatttagtcttctctcattggccatgtttcagattttgacctagaaatgcgagctgtggttaggcttggttagagtgcagcaagcaacatgacagatggtggcacgctgtttttacccagccctgcctgtacatacacatgcacaccctctctgatatttttgtcctttagatgttcaaatactcagtagtccttttgtttgcggtttagattcattttgtccacacatgtacccattttaaaaaacaatgtcctcgatgcttctgtagtgatttcattttagccaggtatttctttcttgtgtgtgatgaaccagtatggatttgcttttctaagcctcctgttggttactaatctcacttggcacattataactaaaggaatcccctcaattcaaaagcatagatggatacaaatgtcagaccgtgggtttaatttgtttagaacacatggcatttcttcacaaggtaacctgctgtatttatttattttcttttggttaaatataatttccaaactttgtggtcaggcagcgtctaaggttacgttaccacagactgacagttggtatatgtaccagccaatcccttcattaaatgtatacagatttagttaagtagcattaaataggattcttagaagtatgtcctcatagaacttttaatacttaaggctttgtaaaaactatccatgaagggaaagctcctcagcataactgctcagggaaatagggctaaataactgaacattaaataattggttaaaggtgctgttagtcgagcctcaatgcttgctacaaggatgtatgtacaaggactgactttaataatttgcattatattgtcccaaccagtagtttattttttgccacggagatgtagaagatattacaagctactggatgcactgtcagattaacttatttcattaaagaagttgggagaacaaataggaaaaaaaaaacttatttttctagtaaatattaatgtattacatttcaaataatggtgcctgacatattgaataattattttctacagtgtacgtatgcaacaaagatattccatcatgcattagagtcagttctggctctgcctagctgtttacatttgcaaatgtagcaaacaaggtaatgaagcaactatttctattgcagtagatatccttttgtgtgtgtgtgtgtgcattaaagttgtaaacggtaacatgaaacaaatgaaagttcttgctataatggtatggaaaacaagaaggaaatgaaaatatttttatgcctacttaggaaaaaaagggtagcacttattcattccaagtacttttttttttttaatttttaagctcttaactcacattgttatgcttaagatgataaacatatatcctctttttattgctttgtctatgtttcatatgaaacatttcagaaattattttgataagtgttgctggaatctgcaacgctgatttttttttgcattctgtagtcgcatttgcactccatttttacattaattcgcagttgctttgtatcattgttttgtttgggttttgtttctttttcacagtgccgggtcttcgtttcttaaagttggatggcaggtagagttcaaccagttcgtgactgttgtagcgaatgaagttaaaaaaatgtctttctgatgttgtgttgtcattttcatttttgcatttttttgtttgcatattaaaaaaagagaaaagagaaagcaagagacagaaatcaggactaagtcctctgcttcagtttcattgttaacgggccttattctgatctcacctgtcgcgtagctctaatattcacataaactgaaataaagaagtggaatgaggagctttgacattcaaattatgtgatgtaatttatcttccttaggaattttgatggatgcatctcaaaatgtatagccagacttgagaggtgacaattaaagatctaaaaaagagaggagattcccccaaacaacaatatttaattttcttagtaaaaagaataacagaatgcatcgtggcaatccttaagcaacattatctatgtggactgcttaaatcagcaaaacaccagaagtttggttaacttgggcaatatgacaagtattactttttgggcaaaactactcattaagcaatttctctagtgtgtcggacacaaataggttctttatttttggcatgtatgcctttttattttcattcaattttttttttttctcagacagacatagtagtatcaactagcattggaaaatacatatcactattcttggaatatttatggtcagtctactttttagtaaaatatttttggatagcgttgacacgatagatcttattccatacttctttattattgataattttattttcattttttgctttcattattatacatattttggtggagaagaggttgggcttttttgaaagagacaaaaatttattataacactaaacactccttttttgacatattaaagcctttattccatctctcaagatatattataaaatttatttttttaatttaagatttctgaattattttatcttaaattgtgattttaaacgagctattatggtacggaactttttttaatgaggaatttcatgatgatttaggaattttctctcttggaaaaggcttcccctgtgatgaaaatgatgtgccagctaaaattgtgtgccatttaaaaactgaaaatattttaaaattatttgtctatattctaaattgagctttggatcaaactttaggccaggaccagctcatgcgttctcattcttccttttctcactctttctctcatcactcacctctgtattcattctgttgtttgggatagaaaaatcataaagagccaacccatctcagaacgttgtggattgagagagacactacatgactccaagtatatgagaaaaggacagagctctaattgataactctgtagttcaaaaggaaaagagtatgcccaattctctctacatgacatattgagattttttttaatcaacttttaagatagtgatgttctgttctaaactgttctgttttagtgaaggtagatttttataaaacaagcatggggattcttttctaaggtaatattaatgagaagggaaaaaagtatctttaacagctctttgttgaagcctgtggtagcacattatgtttataattgcacatgtgcacataatctattatgatccaatgcaaatacagctccaaaaatattaaatgtatatatattttaaaatgcctgaggaaatacatttttcttaataaactgaagagtctcagtatggctattaaaataattattagcctcctgttgtgtggctgcaaaacatcacaaagtgaccggtcttgagacctgtgaactgctgccctgtttagtaaataaaattaatgcatttctagagggggaatatctgccatccagtggtggaaatgtggagtaaagaagctggtggtctgcttctgtgctgtatgccagccttttgccttaagttgagaggaggtcaactttagctactgtctttggtttgagagccatggcaaaaaaaaaaaaagaaaaaaagatcaagtcgtctttggtgagccagtaaggtgaaagcttgctgactgtccaaggcacaagagaaaattgaggaattgaaatgcaacctgagtatcaaactaaatattctaatcaaaggtaggtactgttaggtggaattctatcagcaggcaactgcaaatgagaagaagatagaaggacgcccgtcgggactttggagggcattgttattttcccaaagaaagacggccaagggcagaggcatggattctttgcagagcacttccttttggtttttcagtactgtttcatagacagtgggctcacatgttcctgatagtgctgcagttgcttagaaagcatcccagttaattgcagtaattagaacttctggaatatgctagggcagaagtatgtcaagtatgtcacatgaagaaaatgtgaaattcaagagtaatccacacgtgagaaactagacaatgtacattcatgtgttctcttgaaaggaaagggagagctgtaagcttcactctgtcctacaccggagaaaagcaggaataactttaccgtggaaataatgtttagcttttatcagagaaaattgtccttctagagcatagagtcccaaaactcaattctggttttcccctgttttttttttttttttttttcccaacatatgaactgcagcatatcactttttctttttgtgcctcaggttcctcacctgtaaaattgaaaaatatatgtattaataatattattaataataataatggtaatgtagtacttgtttgtaaagcactttgagatccttggttgaaaggcaccataggagtgccaagtattattatgtggccaagggggttatttaaactgtcagttcccaaaggccaggaaaggttggggtcatttttcttaaagacgagctgtaaatatcaactaggcagccaatagtgttgactatgaagatgcaaaactattactaggctgataaaatcatagtttcttaatggctaccaataaggcaaatatcacaataataaacgccaaattccttagggcggactatttgacaaccacatggaaaactttgggggaggcatgaggggggaacatctcaaaatgccaatgtaaaatttaacttacagcaatattcaccagcagaaaatgtctttcatatggaatgatttcatgttgctaagaaaaagaattcaatttgtagtcctgatttgaatactagaatgttggctataatagttctgttcttacaacacatgaaattttttcgttttattttattttgttttcatagtgcatgttcatttctactcacaaacatgttcttggtgtatttcttatgcaaacaatcttcaggcagcaaagatgtctgttacatctaaacttgaataataaagttttaccaccagttacaca

SEQ ID NO: 3982 - protein, 1281 aa, Homo sapien
MVRKKNPPLRNVASEGEGQILEPIGTESKVSGKNKEFSADQMSENTDQSDAAELNHKEEHSLHVQDPSSSSKKDLKSAVLSEKAGFNYESPSKGGNFPSFPHDEVTDRNMLAFSFPAAGGVCEPLKSPQRAEADDPQDMACTPSGDSLETKEDQKMSPKATEETGQAQSGQANCQGLSPVSVASKNPQVPSDGGVRLNKSKTDLLVNDNPDPAPLSPELQDFKCNICGYGYYGNDPTDLIKHFRKYHLGLHNRTRQDAELDSKILALHNMVQFSHSKDFQKVNRSVFSGVLQDINSSRPVLLNGTYDVQVTSGGTFIGIGRKTPDCQGNTKYFRCKFCNFTYMGNSSTELEQHFLQTHPNKIKASLPSSEVAKPSEKNSNKSIPALQSSDSGDLGKWQDKITVKAGDDTPVGYSVPIKPLDSSRQNGTEATSYYWCKFCSFSCESSSSLKLLEHYGKQHGAVQSGGLNPELNDKLSRGSVINQNDLAKSSEGETMTKTDKSSSGAKKKDFSSKGAEDNMVTSYNCQFCDFRYSKSHGPDVIVVGPLLRHYQQLHNIHKCTIKHCPFCPRGLCSPEKHLGEITYPFACRKSNCSHCALLLLHLSPGAAGSSRVKHQCHQCSFTTPDVDVLLFHYESVHESQASDVKQEANHLQGSDGQQSVKESKEHSCTKCDFITQVEEEISRHYRRAHSCYKCRQCSFTAADTQSLLEHFNTVHCQEQDITTANGEEDGHAISTIKEEPKIDFRVYNLLTPDSKMGEPVSESVVKREKLEEKDGLKEKVWTESSSDDLRNVTWRGADILRGSPSYTQASLGLLTPVSGTQEQTKTLRDSPNVEAAHLARPIYGLAVETKGFLQGAPAGGEKSGALPQQYPASGENKSKDESQSLLRRRRGSGVFCANCLTTKTSLWRKNANGGYVCNACGLYQKLHSTPRPLNIIKQNNGEQIIRRRTRKRLNPEALQAEQLNKQQRGSNEEQVNGSPLERRSEDHLTESHQREIPLPSLSKYEAQGSLTKSHSAQQPVLVSQTLDIHKRMQPLHIQIKSPQESTGDPGNSSSVSEGKGSSERGSPIEKYMRPAKHPNYSPPGSPIEKYQYPLFGLPFVHNDFQSEADWLRFWSKYKLSVPGNPHYLSHVPGLPNPCQNYVPYPTFNLPPHFSAVGSDNDIPLDLAIKHSRPGPTANGASKEKTKAPPNVKNEGPLNVVKTEKVDRSTQDELSTKCVHCGIVFLDEVMYALHMSCHGDSGPFQCSICQHLCTDKYDFTTHIQRGLHRNNAQVEKNGKPKE

SEQ ID NO: 3983 - DNA, 1217 bp, Homo sapien; identical to SEQ ID NO: 3811

SEQ ID NO: 3984 - protein, 219 aa, Homo sapien; identical to SEQ ID NO: 3812

SEQ ID NO: 3985 - DNA, 2112 bp, Homo sapien; identical to SEQ ID NO: 3740

SEQ ID NO: 3986 - protein, 201 aa, Homo sapien; identical to SEQ ID NO: 3741

SEQ ID NO: 3987 - DNA, 1258 bp, Homo sapien
caccattaggcaaagatagtttctctagagagaatcatgcctgctaattacacgtgtaccaggccagatggagacaatacagattttcgatactttatttatgcagtgacatacactgtcattcttgtgccaggtctcatagggaatatattagccctgtgggtattctatggttatatgaaagaaacaaaacgagctgtgatatttatgataaacttagccattgctgacttactacaagttctttccttgccactgaggatcttctactacttgaatcatgactggccatttgggcctggtctctgcatgttctgtttctacctgaagtatgtcaacatgtatgcaagcatctacttcttggtctgcatcagtgtgcgacgattttggtttctcatgtacccctttcgcttccatgactgcaaacagaaatatgacctgtacatcagcattgctggctggctgatcatctgccttgcctgtgtactctttccactcctcagaaccagtgatgatacctctggcaataggaccaaatgctttgtggatcttcctaccaggaatgtcaacctggcccagtccgttgttatgatgaccattggcgagttgattgggtttgtaactccgcttctgattgtcctatattgtacctggaagacggttttatcactgcaagataaatatcccatggcccaagatcttggagagaaacagaaagccttgaagatgattctaacctgtgcaggggtattcctaatttgctttgcaccttatcatttcagttttcctttagatttcctggtgaagtccaatgaaattaaaagctgcctagccagaagggtgattctaatatttcattctgtggcattgtgtcttgctagtctgaattcatgtcttgacccagtcatatactacttttccactaatgagttccgaagacggctttcaagacaagatttgcatgacagcatccaactccatgcaaaatcctttgtgagtaaccatacagcttccaccatgacacctgaattatgctaaaacaaaaaaccaaactgaatgtgacctgaaatgcaagtacatcagaacatatctgcaatacccaagccacagggaagaacttgcaaaacaacacagcttttcagttctgctctatcttactgctatggggaattcacttcttcaaagcaggacctatttggagcattacgatccacgattattgatgttgacatgtccatgtagtaatttttcttcaagt

SEQ ID NO: 3988 - protein, 333 aa, Homo sapien
MPANYTCTRPDGDNTDFRYFIYAVTYTVILVPGLIGNILALWVFYGYMKETKRAVIFMINLAIADLLQVLSLPLRIFYYLNHDWPFGPGLCMFCFYLKYVNMYASIYFLVCISVRRFWFLMYPFRFHDCKQKYDLYISIAGWLIICLACVLFPLLRTSDDTSGNRTKCFVDLPTRNVNLAQSVVMMTIGELIGFVTPLLIVLYCTWKTVLSLQDKYPMAQDLGEKQKALKMILTCAGVFLICFAPYHFSFPLDFLVKSNEIKSCLARRVILIFHSVALCLASLNSCLDPVIYYFSTNEFRRRLSRQDLHDSIQLHAKSFVSNHTASTMTPELC

SEQ ID NO: 3989 - DNA, 728 bp, Homo sapien
ttttcgagaccggaagtgagtgatcgaaagcatggcgtcggtggtgttggcgctgaggacccggacagccgttacatccttgctaagccccactccggctacagctcttgctgtcagatacgcatccaagaagtcgggtggtagctccaaaaacctcggtggaaagtcatcaggcagacgccaaggcattaagaaaatggaaggtcactatgttcatgctgggaacatcattgcaacacagcgccatttccgctggcacccaggtgcccatgtgggtgttgggaagaataaatgtctgtatgccctggaagaggggatagtccgctacactaaggaggtctacgtgcctcatcccagaaacacggaggctgtggatctgatcaccaggctgcccaagggtgctgtgctctacaagacttttgtccacgtggttcctgccaagcctgagggcaccttcaaactggtagctatgctttgatgtcctgttgaggccatcggacagagactggagcccaggtgacaggagatggtgataccagaagtcaagggttggggtggcgacacggcctcccgaggaagaggtctgcttgatggtgactctgcaggagactctgaagtgactgctgggaaaccctttgggagacctgacctggggccaaaaataaagtgagccagcgtcatgaacgcatgctatttagggacaaaaaaaaaaaaaaaaaaaaaaaaaa

SEQ ID NO: 3990 - protein, 148 aa, Homo sapien
MASVVLALRTRTAVTSLLSPTPATALAVRYASKKSGGSSKNLGGKSSGRRQGIKKMEGHYVHAGNIIATQRHFRWHPGAHVGVGKNKCLYALEEGIVRYTKEVYVPHPRNTEAVDLITRLPKGAVLYKTFVHVVPAKPEGTFKLVAML

SEQ ID NO: 3991 - DNA, 604 bp, Homo sapien
gcagacgcaggggtcggcgccgggtgagagcgtgcggccggattcaccacaacatggcaaatctttttataaggaaaatggtgaaccctctgctctatctcagtcgtcacacggtgaagcctcgagccctctccacatttctatttggatccattcgaggtgcagcccccgtggctgtggaacccggggcagcagtgcgctcacttctctcacccggcctcctgccccatctgctgcctgcgctggggttcaaaaacaagactgtccttaagaagcgctgcaaggactgttacctggtgaagaggcggggtcggtggtacgtctactgtaaaacccatccgaggcacaagcagagacagatgtagaccctttccctccagagtcacgcacatactcgtcatcgcatcacttgggagaatggttgtatcttatggaaggaattatcacatcaaggagtcaggggaaagtgactggaagcaaacgccctaaaagttacccatcacgtttcagtgtaaatgagtaactatagaagacattgcgttatcttatttccaaaacgttccaactaaaaaacattttcctattaaaatagaccttccgaata

SEQ ID NO: 3992 - protein, 103 aa, Homo sapien [sequence omitted]

SEQ ID NO: 3993 - DNA, 745 bp, Homo sapien
ggggactccaacgctgggtgacattgagctcaccagcgccaccgtccccggcgaagttctgcgctggtcggcggagtagcaagtggccatggggagcctcagcggtctgcgcctggcagcaggaagctgttttaggttatgtgaaagagatgtttcctcatctctaaggcttaccagaagctctgatttgaagagaataaatggattttgcacaaaaccacaggaaagtcccggagttccatcccgcacttacaacagagtgcctttacacaaacctacggattggcagaaaaagatcctcatatggtcaggtcgcttcaaaaaggaagatgaaatcccagagactgtctcgttggagatgcttgatgctgcaaagaacaagatgcgagtgaagatcagctatctaatgattgccctgacggtggtaggatgcatcttcatggttattgagggcaagaaggctgcccaaagacacgagactttaacaagcttgaacttagaaaagaaagctcgtctgaaagaggaagcagctatgaaggccaaaacagagtagcagaggtatccgtgttggctggattttgaaaatccaggaattatgttataacgtgcctgtattaaaaaggatgtggtatgaggatccatttcataaagtatgatttgcccaaacctgtaccatttccgtatttctgctgtagaagtagaaataaattttccaaaaaaaaaaaaaaaaaaaaaaaaaaaaaaa

SEQ ID NO: 3994 - protein, 154 aa, Homo sapien [sequence omitted]

SEQ ID NO: 3995 - DNA, 2077 bp, Homo sapien; identical to SEQ ID NO: 3385

SEQ ID NO: 3996 - protein, 502 aa, Homo sapien; identical to SEQ ID NO: 3386

SEQ ID NO: 3997 - DNA, 744 bp, Homo sapien
ggaagcggagggggagcaggtttgcggggccaagtgttgcggcgacgcacctcacgtcgagaatcgggaggaggagactgcaaggataggcccaggagtaatggagtccaaagaggaacgagcgttaaacaatctcatcgtggaaaatgtcaaccaggaaaatgatgaaaaagatgaaaaggagcaagttgctaataaaggggagcccttggccctacctttgaatgttagtgaatactgtgtgcctagaggaaaccgtaggcggttccgcgttaggcagcccatcctgcagtatagatgggacataatgcataggcttggagagccacaggcaaggatgagagaggagaatatggaaaggattggggaggaggtgagacagctgatggaaaagctgagggaaaagcagttgagtcatagtctgcgggcagtcagcactgatccccctcaccatgaccatcacgatgagttttgccttatgccctgaatcctgatggtttccctgaagttaatagggagacccctgcttcctaaacttacacatttgtggtgtacctttgtcgtaaacgttttgatgttacctatttcttgtgggtctcctattaccagcttctaaatgaatgttgtttttgacccagtttgtaagtttctgtcagcaggagagttttacctattgcatggaaggatgctcattatatattgtgaagttaataaaacagttttaaaaagcaaaaaaaaaaaaaa

SEQ ID NO: 3998 - protein, 128 aa, Homo sapien
MESKEERALNNLIVENVNQENDEKDEKEQVANKGEPLALPLNVSEYCVPRGNRRRFRVRQPILQYRWDIMHRLGEPQARMREENMERIGEEVRQLMEKLREKQLSHSLRAVSTDPPHHDHHDEFCLMP

SEQ ID NO: 3999 - DNA, 2963 bp, Homo sapien
gctgctgcactgacggcgggtgcccgcgcctcagagttactgatttattcttgagattcctctactctcgttatctgacctcatggatgaacttcaggatgttcagctcacagagatcaaaccacttctaaatgataagaatggtacaagaaacttccaggactttgactgtcaggaacatgatatagaaacaactcatggtgtggtccacgtcactataagaggcttacccaaaggaaacagaccagttatactaacatatcatgacattggcctcaaccataaatcctgtttcaatgcattctttaactttgaggatatgcaagagatcacccagcactttgctgtctgtcatgtggatgccccaggccagcaggaaggtgcaccctctttcccaacagggtatcagtaccccacaatggatgagctggctgaaatgctgcctcctgttcttacccacctaagcctgaaaagcatcattggaattggagttggagctggagcttacatcctcagcagatttgcactcaaccatccagagcttgtggaaggccttgtgctcattaatgttgacccttgcgctaaaggctggattgactgggcagcttccaaactctctggcctgacaaccaatgttgtggacattattttggctcatcactttgggcaggaagagttacaggccaacctggacctgatccaaacctacagaatgcatattgcccaagacatcaaccaagacaacctgcagctcttcttgaattcctacaatggacgcagagacctggagatcgaaagacccatactgggccaaaatgataacaaatcaaaaacattaaagtgttctactttactggtggtaggggacaattcgcctgcagttgaggctgtggtcgaatgcaattcccgcctgaaccctataaatacaactttgctaaagatggcggactgtgggggactgccccaggtagttcagcctgggaagctcaccgaggccttcaagtactttttgcagggaatgggctacataccatctgccagcatgactcggctcgcccgatcacgaacccactcaacctcgagtagcctcggctctggagaaagtcccttcagccggtctgtcaccagcaatcagtcagatggaactcaagaatcctgtgagtcccctgatgtcctggacagacaccagaccatggaggtgtcctgctaagcagatgctcctcccctggaccattgcaagtccatccttcaaatgaccactccataatataacatttcatccagtaaactggcctctactatctttaactcatgcatggccactgaacctctctctagtagcctggatttatcattctctctgcctgcccacccccttttttgtatagcccaagaaccacttccatgccatactgtaacattccaacatctttagctgatcagatctctccatatcctctcttgccagctttttcccgtgctcccccaactatgtatcagataagattctttgatcccgactctgtgtgtgcgagcacgcgtgtctgtgtttgtgtgtgcatagttctgtggttttagacacgctttcttgtagtgcttctgcaaaaaacaaaaaagggacttattttgcattctcaatggtgtttttaagggaattaggcagaacagatttctaggttgggtaggccactgcattctcttttgtttgcaaattggtcaacaaaatttgcaaagtgatttcaggagagagcagctttgaggaatgtggaaaatcataattgccgtctggaccattgattgattgtgaccagtagcagaagggtgcctgttacatagagaggctccttctgtccaaatgaatttctgtatactcttctataaataaaagggaggaatatattctgctggaagcccatgaaccatcgctgaggttctgatacaacatagagttttttccaaggagtgaatgtggtttaattactggactctcttagcacaggaaggtggaaacaaaatgccaggcctctgctctgaagagcaaaactgctgtcgctgcagtatctgataccagacatccacatatccacaagaagtgcctcttaggtctgtgacagagagtgtgtctccattcctcagttcccagaaaggggagaggtttggcctaaaaagcatgtagatgggggagaaatgggtggggggagaggaacagccattaacacagtatcatgtttaacaagtatagccttgatttcagtagatgtaatggaagccaaattaaattgatacagaacccatttctcagagtctttttttttttttttgagacagagtctcgctgttacccaggctggagtgcaatggcgcaaacttggctcactgcaacctctgccccctgggttcaagcgattctcctgcctcagcctcccgagtagctgagactacaggcacctgccaccatacccagctaagttatgtatttttagtagagatggagtttcaccatgttggccaggctggtctcaaactcctgacctcaggtgatccacctgcctcagcctcccaaagtgctgggattacaggcatgagtcattgctcccagccattagaaagattgttaatcctatgaactcccttttgtaggagagaaagggccaatctgtaggggtagccctgtccaggtaaagttgttttcagcctcatgtctactgttaggtgagggagtcacagccagacagagagtattgctggagggtgagagaattgtggagaccaactaccacatagcaagagcccagctcttgggagcattgagatgtaagctcagggttacacagttccaaatcttgggaaggggcttttcagacagactgtttgctttctgctgagataaggaatgcatcactctgccagagtatgactttttacagattattaaataaagctgcatatgtctcattgttacc

SEQ ID NO: 4000 - protein, 375 aa, Homo sapien
MDELQDVQLTEIKPLLNDKNGTRNFQDFDCQEHDIETTHGVVHVTIRGLPKGNRPVILTYHDIGLNHKSCFNAFFNFEDMQEITQHFAVCHVDAPGQQEGAPSFPTGYQYPTMDELAEMLPPVLTHLSLKSIIGIGVGAGAYILSRFALNHPELVEGLVLINVDPCAKGWIDWAASKLSGLTTNVVDIILAHHFGQEELQANLDLIQTYRMHIAQDINQDNLQLFLNSYNGRRDLEIERPILGQNDNKSKTLKCSTLLVVGDNSPAVEAVVECNSRLNPINTTLLKMADCGGLPQVVQPGKLTEAFKYFLQGMGYIPSASMTRLARSRTHSTSSSLGSGESPFSRSVTSNQSDGTQESCESPDVLDRHQTMEVSC

SEQ ID NO: 4001 - DNA, 2824 bp, Homo sapien
cccgagccccgcccctccgggcccgggtcggcgcgcccagcctgccagccgcgctgctgctgctcctcctgctgtgggaccgctgaccgcgcggctgctccgctctccccgctccaagcgccgatctgggcacccgccaccagcatggacgctcgccgcgtgccgcagaaagatctcagagtaaagaagaacttaaagaaattcagatatgtgaagttgatttccatggaaacctcgtcatcctctgatgacagttgtgacagctttgcttctgataattttgcaaacacgaaacctaaattcaggtcagatatcagtgaagaactggcaagtgttttttatgaggactctgataatgaatctttctgcggcttttcagaaagtgaggtgcaagatgtattagaccattgtggatttttacagaaaccaaggccagatgtcactaacgaactggccggtatttttcatgccgactctgacgatgaatcattttgcggtttctcagagagtgagatacaagatggaatgaggctgcagtcagttcgggaaggctgtaggacccgcagccagtgcaggcactctggacctctcagggtggcgatgaagtttccagcgcggagtaccaggggagcaaccaacaaaaaagcagagtcccgccagccctcagagaattctgtgactgattccaactccgattcagaagatgaaagtggaatgaattttttggagaaaagggctttaaatataaagcaaaacaaagcaatgcttgcaaaactcatgtctgaattagaaagcttccctggctcgttccgtggaagacatcccctcccaggctccgactcacaatcaaggagaccgcgaaggcgtacattcccgggtgttgcttccaggagaaaccctgaacggagagctcgtcctcttaccaggtcaaggtcccggatcctcgggtcccttgacgctctacccatggaggaggaggaggaagaggataagtacatgttggtgagaaagaggaagaccgtggatggctacatgaatgaagatgacctgcccagaagccgtcgctccagatcatccgtgacccttccgcatataattcgcccagtggaagaaattacagaggaggagttggagaacgtctgcagcaattctcgagagaagatatataaccgttcactgggctctacttgtcatcaatgccgtcagaagactattgataccaaaacaaactgcagaaacccagactgctggggcgttcgaggccagttctgtggcccctgccttcgaaaccgttatggtgaagaggtcagggatgctctgctggatccgaactggcattgcccgccttgtcgaggaatctgcaactgcagtttctgccggcagcgagatggacggtgtgcgactggggtccttgtgtatttagccaaatatcatggctttgggaatgtgcatgcctacttgaaaagcctgaaacaggaatttgaaatgcaagcataatatctggaaaatttgctgcctgccttctacttctcaaatctttcttgtaaaagtttccaattttttcactgaaacctgagttaaaaatcttgatgatcagcctgtttcataagaaactccaatcaagttaatcttagcagacatgtgtttctggagcatcacagaaggtatattgctagttacactttgccctcctgcagtttcttctctgctcccaacccccatctcatagcatccccctctatttccaatgctcctctccaaccgcttagtttctgaatttcttttaaattacagttttatgaaagcatattttatttacttggtgttgaaatagccctcataaaacctaagcacttggaaacacaataatagtattaactaactagatctattgaatttcagagaagagccttctaacttgtttacacaaaaacgagtatgatttagcattcatactagttgaaatttttaatagaatcaaggcacaaaagtcttaaaaccatgtggaaaaattaggtaattattgcagattgatgtctctcaatcccatgtattgcgcttatgttacaagttgttgtcacagttgagacttaatttctcctaatttcttctgcccgaagggtaagtggtgcgtccagcttacacaatcataattcaaaggttggtgggcaatgtaatacttaattaaaataatgatggaagagctatctggagattatgagtaagctgatttgaattttcagtataaaactttagtataattgtagtttgcaaagtttatttcagttcacatgtaaggtattgcaaataaattcttggacaattttgtatggaaacttgatattaaaaactagtctgtggttctttgcagtttcttgtaaatttataaaccaggcacaaggttcaagtttagattttaagcacttttataacaatgataagtgcctttttggagatgtaacttttagcagtttgttaacctgacatctctgccagtctagtttctgggcaggtttcctgtgtcagtattccccctcctctttgcattaatcaaggtatttggtagaggtggaatctaagtgtttgtatgtccaatttacttgcatatgtaaaccattgctgtgccattcaatgtttgatgcataattggaccttgaatcgataagtgtaaatacagcttttgatctgtaatgcttttatacaaaagtttattttaataataaaatgtttgttctaacttgtctgcttttttaaaaataatcttactgtacttaattctaattttttcctcatatttaaataaaaggccatttccaccttttct

SEQ ID NO: 4002 - protein, 450 aa, Homo sapien
MDARRVPQKDLRVKKNLKKFRYVKLISMETSSSSDDSCDSFASDNFANTKPKFRSDISEELASVFYEDSDNESFCGFSESEVQDVLDHCGFLQKPRPDVTNELAGIFHADSDDESFCGFSESEIQDGMRLQSVREGCRTRSQCRHSGPLRVAMKFPARSTRGATNKKAESRQPSENSVTDSNSDSEDESGMNFLEKRALNIKQNKAMLAKLMSELESFPGSFRGRHPLPGSDSQSRRPRRRTFPGVASRRNPERRARPLTRSRSRILGSLDALPMEEEEEEDKYMLVRKRKTVDGYMNEDDLPRSRRSRSSVTLPHIIRPVEEITEEELENVCSNSREKIYNRSLGSTCHQCRQKTIDTKTNCRNPDCWGVRGQFCGPCLRNRYGEEVRDALLDPNWHCPPCRGICNCSFCRQRDGRCATGVLVYLAKYHGFGNVHAYLKSLKQEFEMQA

SEQ ID NO: 4003 - DNA, 2495 bp, Homo sapien
gggtggtggatctgtcggtcccgttttcccgtcgcacgtggtggccactgttggcttctgaatggtttgcaaggcggatatccacgccaaggcctttggatcggccgtgggtacatccgtctgagccgttcctttccatcgcagagcggcggcctccggcggcgctctccagtcatggactaccggcggcttctcatgagccgggtggtccccgggcaattcgacgacgcggactcctctgacagtgaaaacagagacttgaagacagtcaaagagaaggatgacattctgtttgaagaccttcaagacaatgtgaatgagaatggtgaaggtgaaatagaagatgaggaggaggagggttatgacgatgatgatgatgactgggactgggatgaaggagttggaaaactcgccaagggttatgtctggaatggaggaagcaacccacaggcaaatcgacagacctccgacagcagttcagccaaaatgtctactccagcagacaaggtcttacggaaatttgagaataaaattaatttagataagctaaatgttactgattccgtcataaataaagtcaccgaaaagtctagacaaaaggaagcagatatgtatcgcatcaaagataaggcagacagagcaactgtagaacaggtgttggatcccagaacaagaatgattttattcaagatgttgactagaggaatcataacagagataaatggctgcattagcacaggaaaagaagctaatgtataccatgctagcacagcaaatggagagagcagagcaatcaaaatttataaaacttctattttggtgttcaaagatcgggataaatatgtaagtggagaattcagatttcgtcatggctattgtaaaggaaaccctaggaaaatggtgaaaacttgggcagaaaaagaaatgaggaacttaatcaggctaaacacagcagagataccatgtccagaaccaataatgctaagaagtcatgttcttgtcatgagtttcatcggtaaagatgacatgcctgcaccactcttgaaaaatgtccagttatcagaatccaaggctcgggagttgtacctgcaggtcattcagtacatgagaagaatgtatcaggatgccagacttgtccatgcagatctcagtgaatttaacatgctgtaccacggtggaggcgtgtatatcattgacgtgtctcagtccgtggagcacgaccacccacatgccttggagttcttgagaaaggattgcgccaacgtcaatgatttctttatgaggcacagtgttgctgtcatgactgtgcgggagctctttgaatttgtcacagatccatccattacacatgagaacatggatgcttatctctcaaaggccatggaaatagcatctcaaaggaccaaggaagaacggtctagccaagatcatgtggatgaagaggtgtttaagcgagcatatattcctagaaccttgaatgaagtgaaaaattatgagagggatatggacataattatgaaattgaaggaagaggacatggccatgaatgcccaacaagataatattctataccagactgttacaggattgaagaaagatttgtcaggagttcagaaggtccctgcactcctagaaaatcaagtggaggaaaggacttgttctgattcagaagatattggaagctctgagtgctctgacacagactctgaagagcagggagaccatgcccgccccaagaaacacaccacggaccctgacattgataaaaaagaaagaaaaaagatggtcaaggaagcccagagagagaaaagaaaaaacaaaattcctaaacatgtgaaaaaaagaaaggagaagacagccaagacgaaaaaaggcaaatagaatgagaaccatattatgtacagtcattttcctcagttccttttctcgcctgaactcttaagctgcatctggaagatggcttattggttttaaccagattgtcatcgtggcactgtctgtgaagacggattcaaatgttttcatgtaactatgtaaaaagctctaagctctagagtctagatccagtcactgactctgtctggtgttgacagaggatttatttaagctattattttaataaagaactttgtacatttttatttttatatttttttctcttacaaatatgtttttggaagcatgataaatgtttaaatgtagtcaacatctgtaactcttacatgagtgtccagaggcactcatgggaaaattggttttgctttctttgtacacaccagagacccatctgaggtcatctgattataaggccatgtttatataaagggaatttcacccacagttcagctggctgttgattttcactgcaactctgcctttgtgtgtattggcgatcatttgtaatgctcttacacttcgtctttaatgttctttttggagttaggacctctcagttcataaagttttttacaattcaaaaaaaaaaaaaaaaaaaa

SEQ ID NO: 4004 - protein, 568 aa, Homo sapien
MDYRRLLMSRVVPGQFDDADSSDSENRDLKTVKEKDDILFEDLQDNVNENGEGEIEDEEEEGYDDDDDDWDWDEGVGKLAKGYVWNGGSNPQANRQTSDSSSAKMSTPADKVLRKFENKINLDKLNVTDSVINKVTEKSRQKEADMYRIKDKADRATVEQVLDPRTRMILFKMLTRGIITEINGCISTGKEANVYHASTANGESRAIKIYKTSILVFKDRDKYVSGEFRFRHGYCKGNPRKMVKTWAEKEMRNLIRLNTAEIPCPEPIMLRSHVLVMSFIGKDDMPAPLLKNVQLSESKARELYLQVIQYMRRMYQDARLVHADLSEFNMLYHGGGVYIIDVSQSVEHDHPHALEFLRKDCANVNDFFMRHSVAVMTVRELFEFVTDPSITHENMDAYLSKAMEIASQRTKEERSSQDHVDEEVFKRAYIPRTLNEVKNYERDMDIIMKLKEEDMAMNAQQDNILYQTVTGLKKDLSGVQKVPALLENQVEERTCSDSEDIGSSECSDTDSEEQGDHARPKKHTTDPDIDKKERKKMVKEAQREKRKNKIPKHVKKRKEKTAKTKKGK

SEQ ID NO: 4005 - DNA, 2221 bp, Homo sapien; identical to SEQ ID NO: 3337

SEQ ID NO: 4006 - protein, 452 aa, Homo sapien; identical to SEQ ID NO: 3338

SEQ ID NO: 4007 - DNA, 1369 bp, Homo sapien
ggccgacagtgcctgatttgagatggggtcccaggtctcggtggaatcgggagctctgcacgtggtgattgtgggtgggggctttggcgggatcgcagcagccagccagctgcaggccctgaacgtccccttcatgctggtggacatgaaggactccttccaccacaatgtggctgctctccgagcctccgtggagacagggttcgccaaaaagacattcatttcttactcggtgactttcaaggacaacttccggcaggggctagtagtggggatagacctgaagaaccagatggtgctgctgcagggtggcgaggccctgcccttctctcatcttatcctggccacgggcagcactgggcccttcccgggcaagtttaatgaggtttccagccagcaggccgctatccaggcctatgaggacatggtgaggcaggtccagcgctcacggttcatcgtggtggtgggaggaggctcggctggagtggagatggcagcagagattaaaacagaatatcctgagaaagaggtcactctcattcactcccaagtggccctggctgacaaggagctcctgccctccgtccggcaggaagtgaaggagatcctcctccggaagggcgtgcagctgctgctgagtgagcgggtgagcaatctggaggagctgcctctcaatgagtatcgagagtacatcaaagtgcagacggacaaaggcacagaggtggccaccaacctggtgattctctgcaccggcatcaagatcaacagctccgcctaccgcaaagcatttgagagcagactagccagcagtggtgctctgagagtgaacgagcacctccaggtggagggccacagcaacgtctacgccattggtgactgtgccgacgtgaggacgcccaagatggcctatcttgccggcctccacgccaacatcgccgtggccaacatcgtcaactctgtgaagcagcggcctctccaggcctacaagccgggtgcactgacgttcctcctgtccatggggagaaatgacggtgtgggccaaatcagtggcttctatgtgggccggctcatggttcggctgaccaagagccgggacctgttcgtctctacgagctggaaaaccatgaggcagtctccaccttgatggagaggccaggcgggagaactaccgcagcaggtgggcgtacggactgcttggcgcatggcacccgcctggcaagtgctagaactaatgctattcttctggaataagatgccaatgatgtggtggctagaaatgcaacttgtataaaacaaaaatgggagagagagaggtattaaacaaataccccccttagaggataaaaaaaaaaaaaaaaaaaaaaaaaaa

SEQ ID NO: 4008 - protein, 373 aa, Homo sapien
MGSQVSVESGALHVVIVGGGFGGIAAASQLQALNVPFMLVDMKDSFHHNVAALRASVETGFAKKTFISYSVTFKDNFRQGLVVGIDLKNQMVLLQGGEALPFSHLILATGSTGPFPGKFNEVSSQQAAIQAYEDMVRQVQRSRFIVVVGGGSAGVEMAAEIKTEYPEKEVTLIHSQVALADKELLPSVRQEVKEILLRKGVQLLLSERVSNLEELPLNEYREYIKVQTDKGTEVATNLVILCTGIKINSSAYRKAFESRLASSGALRVNEHLQVEGHSNVYAIGDCADVRTPKMAYLAGLHANIAVANIVNSVKQRPLQAYKPGALTFLLSMGRNDGVGQISGFYVGRLMVRLTKSRDLFVSTSWKTMRQSPP

SEQ ID NO: 4009 - DNA, 1174 bp, Homo sapien
tagtttgcgttttcacctggtcgcccggcggccatggcggccgttctgaagccggtgctgctgggccttcgagatgcgccggtgcacggcagccccacagggccgggtgcctggactgctagcaagctgggcggcattccggatgctctgcccaccgtggctgcgcccaggcccgtgtgtcagcgctgcgggcagccgctcgctctggtcgtgcaggtgtattgcccgctggaaggctccccgtttcaccgtctgctgcacgtgttcgcgtgcgcctgccccggctgtagcaccggcggtgcgcgcagctggaaggtgttccgctcccagtgcctgcaggtgccagagagagaggcgcaggacgctcagaaacagggaaacagccttgcagctgaggactggtgtgaaggtgctgatgactggggaagtgatactgaggaggggccttcaccacagtttaccttggattttgggaatgatgccagcagtgccaaagacgtagactggactgctcggctccaagacctccgcctgcaggatgctgtcctgggtgctgcccatcctgtgcctcctgggctgccgctcttcctgccctactacatctgtgttgcagatgaggatgattacagggactttgtcaacctggatcatgcccacagccttctgagggactatcagcagagagaaggcattgccatggatcagttgctttcccaaagccttcctaatgatggtgatgaaaaatatgagaagaccataattaaaagtggagatcagacgttttacaaattcatgaagcgaattgctgcttgtcaggagcagattttgaggtattcctggagtggagagccactctttttgacctgccctacatcagaagtcaccgagctcccagcctgcagccagtgtggaggccaaaggatatttgagtttcagcttatgccagcactggtcagcatgctcaagagtgctaatttaggtctttctgtggaatttggaacaattctagtttacacatgtgagaagagttgctggcccccaaatcatcagactcccatggaagaattttgtattatacaagaagacccagatgaattattgtttaagtagagcatttccttttattaatataaattaaaacaaatgtttacatccaaaaaaaaaaaaaaaaaaa

SEQ ID NO: 4010 - protein, 358 aa, Homo sapien
MAAVLKPVLLGLRDAPVHGSPTGPGAWTASKLGGIPDALPTVAAPRPVCQRCGQPLALVVQVYCPLEGSPFHRLLHVFACACPGCSTGGARSWKVFRSQCLQVPEREAQDAQKQGNSLAAEDWCEGADDWGSDTEEGPSPQFTLDFGNDASSAKDVDWTARLQDLRLQDAVLGAAHPVPPGLPLFLPYYICVADEDDYRDFVNLDHAHSLLRDYQQREGIAMDQLLSQSLPNDGDEKYEKTIIKSGDQTFYKFMKRIAACQEQILRYSWSGEPLFLTCPTSEVTELPACSQCGGQRIFEFQLMPALVSMLKSANLGLSVEFGTILVYTCEKSCWPPNHQTPMEEFCIIQEDPDELLFK

SEQ ID NO: 4011 - DNA, 1985 bp, Homo sapien
gcaccgcccccgcccgcaagaaagatggcagtggcctgatccgggcccgttggcggcgtcactgacgcttcgctccggtcctcggatcccgagcgcggggaggcagaccgactgtgagctgcttgtccccatcctgcggccgtcctggggacacagagccctccgtggtgcccggggattggattggagccaggacctcacttcctcctctgcccctgcccctgcccctcccagcacctggcccacaccctgcagcccgccccatggtctggccctgggtggcgatggcgtccaggtggggtcccctcattggcctggctccgtgctgcctctggctcctgggggcagtccttctgatggacgcgtctgcacggcctgccaaccactcgtccactcgagagagagtagccaacagggaggagaatgagatcctgcccccagaccacctgaacggggtgaagctggagatggacgggcacctcaatcgcggcttccaccaggaggtcttcctaggcaaggacctgggtggctttgatgaggacgcggagccgcggcggagccggaggaagctgatggtcatcttttccaaggtggatgtgaacactgaccggaagatcagtgccaaggagatgcagcgctggatcatggagaagacggccgagcacttccaggaggccatggaggagagcaagacacacttccgcgccgtggaccctgacggggacggtcacgtgtcttgggacgagtataaggtgaagtttttggcgagtaaaggccatagcgagaaggaggttgccgacgccatcaggctcaacgaggaactcaaagtggacgaggaaacacaggaagtcctggagaacctgaaggaccgctggtaccaggcggacagcccccctgcagacctgctgctgacggaggaggagttcctgtcgttcctccaccccgagcacagccggggaatgctcaggttcatggtgaaggagatcgtccgggacctggaccaggacggtgacaagcagctctctgtgcccgagttcatctccctgcccgtgggcaccgtggagaaccagcagggccaggacattgacgacaactgggtgaaagacagaaaaaaggagtttgaggagctcattgactccaaccacgacggcatcgtgaccgccgaggagctggagagctacatggaccccatgaacgagtacaacgcgctgaacgaggccaagcagatgatcgccgtcgccgacgagaaccagaaccaccacctggagcccgaggaggtgctcaagtacagcgagttcttcacgggcagcaagctggtggactacgcgcgcagcgtgcacgaggagttttgagcgcccggccgcgccccgcgccgccccccacgcaccaccggggcggcctcgcgggtgactccgggctccgtggctgtcccggaccccacctcttccctgccgcccgccaccggccgaccgaccgcggctgccccagttgatgagcggcgtgtcccctctgcagcgcgcaccccggcggggctttggctgtgacgcggtcggggcgcggggctgggctgtggccccgcggcgccgcctcctccctggtccctcgaaatcgtggcatctcacttctgagaacgaaatctcgcttcagtcactctgccgaaggcgctgacggcatcgcggccggaacctctgggcccggcccctcccagggccgccgctccgtgggaaaaaacagctcctccatttccttgaaaactgaacgattattaaaaatagattaaacttcgctggaaatgagtagccaggaagttcaggggagggtgccgggtccttcccgggcctggcgtgtcggagccacccaggtcccgcagctgccgctgagaaaatgcaaatatttgttgtgacaagaatcacatacatttactttaaatatagttgccttttttggtcagcttcaaaaaaaaaaaaaaaaaaaaaaaaaaaaaa

SEQ ID NO: 4012 - protein, 362 aa, Homo sapien
MVWPWVAMASRWGPLIGLAPCCLWLLGAVLLMDASARPANHSSTRERVANREENEILPPDHLNGVKLEMDGHLNRGFHQEVFLGKDLGGFDEDAEPRRSRRKLMVIFSKVDVNTDRKISAKEMQRWIMEKTAEHFQEAMEESKTHFRAVDPDGDGHVSWDEYKVKFLASKGHSEKEVADAIRLNEELKVDEETQEVLENLKDRWYQADSPPADLLLTEEEFLSFLHPEHSRGMLRFMVKEIVRDLDQDGDKQLSVPEFISLPVGTVENQQGQDIDDNWVKDRKKEFEELIDSNHDGIVTAEELESYMDPMNEYNALNEAKQMIAVADENQNHHLEPEEVLKYSEFFTGSKLVDYARSVHEEF

SEQ ID NO: 4013 - DNA, 1523 bp, Homo sapien
ggcacgaggcttgcatcaacaatacttcagtcatgatgtttaaaaaggggagctttgaaattggaggaaccatacatccagttgcaattaagtataaccctcagttcggtgatgcattttggaacagtagtaaatacaacatggtgagctacccttcgaatgatgaccagctgggccatcgtctgtgacgtgtggtacatgccccccatgaccagagaggaaggagaagatgcagtccagtttgctaacagggttaagtctgctattgctatacaaggaggcctgactgaacttccctgggatggaggactaaagagagcaaaggtgaaggacatctttaaggaagagcagcagaaaaattacagcaagatgattgtgggcaatggatctctcagctaagaggacggatgacagcctttagatctagaactagcccttagaaatggaatggcttttttgttttgttttgttttattgttttgtttttattattgttaatcttttctacagaatgattgtctctacctctttatgccagaggcagaacctacaggtgccctttttggcttttgttgttgttgtaacattagccccatggattgtaaggtggtttactgagttaaaacagattctgcttttgtaaaatgatggcatcactgtggactgaatgaaatatttgtatagaaaaaagtgcttgaaaagtgtgtttggaactcatcgatagggtaattctccaaaaatgcccaaactctctttctgtaattagccttgccactttcttcagtcacttaaatggtgagattacacatcagtgcaagatgaccattatggttatggtctactgcaaggttgaaaggaaaaatggaggattgtatttaggaaaagggacaactttgtggccacctgctctgaaagtcaaaaggaaatgtaaattagtgtcattagtgtgttggaagagaaatactattcagtaagcttcgccaaagaaaagtgagtcaaagttaatgtgtgtgtgcatttatatgtaggcagctcgtagaccacattttagccagcaactggtaacaaagagcttagttttccttgtttgaatgctgtagatctgtacctagtacccctcccatctactgatttgtttgtttttgtaaccaaacacattttcagatagaaggagccttaaaaaaaaaaaaatcacattgagtaacttcagtatgaatgaatgagagtgtgtggagctacccctcaccctccacccctttgtgctttttattcccgaattttcccagtctcttaaacagaaaaatgactgatataattatcttttggaaactgagccttaattttttttagagggggaaataagttttccccaactcacacagcataagcaatgtttgacagcaatataatgccgttgtaaactactgagagtattgtatctgttctggtaaccatgtacagaatgtgaaactgtcttatgaatataaataaattctatatttctaaaaaaaaaaaaaaaaaaa

SEQ ID NO: 4014 - protein, 78 aa, Homo sapien
MTSWAIVCDVWYMPPMTREEGEDAVQFANRVKSAIAIQGGLTELPWDGGLKRAKVKDIFKEEQQKNYSKMIVGNGSLS

SEQ ID NO: 4015 - DNA, 8311 bp, Homo sapien
gcggccgcgaccccgacggcttcctgcgcgtggagcgcgtcgcggcgctcggactgcgcttcggccagggcgaggaggtggaaaaacttgtgaaatatttggatcccaacgacctggggagaatcaacttcaaggacttttgccggggggtgttcgccatgaaagggtgcgaggagctgctgaaggatgtgctgtcggtggagagcgcggggacgctgccgtgcgcgccagagatcccagactgcgtggagcagggcagcgaggtcacaggccccacctttgctgatggcgagctcatccccagggaacccggcttttttcccgaggacgaggaggaggctatgacgctggcgccacctgagggcccccaggagttgtacacagacagccccatggagagcactcagagcctggaggggtctgtcgggagtcctgccgagaaggacgggggacttgggggcctgtttctgccagaagacaagtccctggtccacactccatccatgacgacctcagacctttctacacactccaccacctcgctcatcagcaatgaggagcagtttgaagactatggggagggtgacgatgtggactgtgcccccagcagcccttgccccgatgatgagaccaggaccaacgtctactcggacctggggtcttcggtgtcttccagtgcggggcagacgcctaggaaaatgcggcacgtgtacaacagcgaattgctagatgtttactgctctcaatgctgcaagaaaatcaacctgctcaatgacttggaagcccgactgaaaaacctgaaggccaacagccccaaccgaaagatctccagcacggcctttggacggcagctcatgcacagcagcaacttcagcagcagcaatggcagcaccgaagacctgttccgggacagcattgactcttgcgacaatgacatcacagagaaggtaagcttcctggaaaagaaggtgacagagctggagaatgacagcctgaccaatggggacctgaagagcaagctgaagcaagagaacacacagctggtgcacagggtgcatgagctggaggagatggtgaaggatcaggagaccacggccgagcaggctctggaggaggaggcgcggcgccaccgcgaggcctacggcaagctggagagggagaaggctaccgaggtggagctgctcaatgccagggtgcagcagttggaggaagaaaatacagagcttagaacaacagtgactcggctcaagtctcaaacagagaaactggatgaggagcggcagcgcatgtctgaccgtctggaggacaccagcctgcggctcaaagatgagatggacctgtacaagcgcatgatggacaagctgcgacagaaccgccttgagttccagaaggagcgggaggcgacgcaggagctcatcgaggacttgcggaaggagctggagcacctgcagatgtacaagctggactgcgagcggccaggcaggggccgcagtgcctcctctggcctaggcgagttcaatgccagggcccgcgaggtggagctcgagcacgaggtcaagcggctcaagcaggagaattataagctgcgggatcagaacgacgacttgaatgggcagattttgagcctcagcctctacgaagcaaaaaacctctttgctgcccagactaaagcccagtctctggctgcggagatagacaccgcctcgcgcgatgagctaatggaagccctgaaggagcaggaggagatcaacttccggctgaggcagtacatggacaagattatcctcgccatcctggaccacaatccctccatcctcgagatcaaacactaaggcacggggctggctgcagagcagccttaggaccctgggaccaagggcagaccctgcccaaggatgcaggcctaagccgggcctcacactcacactgtaaatgtctctctggccaccatgcgttacgtgtacccgtgtatatgtggggaggctgtgcacacgagcgaggggtgagtggccgtggctgtgggcagcatccacacggttagccgtgcatgcactttgtggcccctttgcaaggggcagagggtactggaagtgggaggaggcaaggtctgctatcaggagttactgtaaaaacaagaactggaagctcgtgtttccggtactgggtaaaatgattctacctctggggataaggattcacattcgctctagtacgatgggctctttcaccccactcctagtccccttgggagtgggagcaaaattgtgatctttcctaggagtttgaatgccccatatttgtgtcctcgccagctctttggccacctttcaagccccagtgttcaagctcagagaggatgaaggggcatctggagggtccatgagatggggccctcaccaaatgccttggccaccggccagcagccctctgtgatgtgtgtgcagagtgaacagaggactcaggtttcatagcagctagtgcggggcatcctcatcctgtacctatagagttcgtgcactcccccatccatgctacctacctccccgtttctgtttcagttttaagacaatgaagcagcattcactgcgtcattgtaacatgaagggataaaaatgaaggagaaggagggtttgggatgggtgtctaaggcaggagttgacatcgggcaaccaaagaaatgagttttggggaggaacacaactcccatcccagtcagtttccttcccatggctgcatcttaagatggatgcacggagaaaccgtctgcctggctccctgtcttcattctccacgcagcctggtgatggcaggcctgggtttggatttcagaatcctagctccgggctccactcgtgtggcagcaagactgcttcgttccagcgtttagaaacacacctgtatttgattctcagccaggggagcactcgctgcactggtgggaggcggttgggaaagttgcaggaaaaccttagtcttccatccttctgacccatggtggaaattcacaccatggatttttaatggatctttgttctaggcagctgggaatagacatggtacttaccttagagttttccaatttatctcaattttatatggcttgtgattcattttcttaatccaaatatatataaacgtgtctggtcttattcttccccctgcagtttcttgctttcttcagcacatcttatagtatgagaaggaaggtttgggcatgttgggaagggcggtggagggggagttgcagaaagagagggcagtgagggtgaggagaggggatctggggacttgggtgtgacacctgcttgacagaggcagggctgtggccaggaccaaccttcaattccattccaatcagcctttgcatttgttggatctcgtggcttctttttaatcttttgttggggattagtttcatgctgcacataatggggttgcactggtctgacccaggactttggagccacccacactgggaagactaggctaggcagtcggtcttctaggagtttctcagccccttaggacgcgggtctccttgggctcccccaagggttctgcgaagaggcagtggaagaaggcatgaggagagggtctcttgagaatttgccaataggaaggagtggccacggctgaaaggaacaagacagatcctgacatagctttggcctgggtgttaggtcagaaggagtactggtgcgtgggggccttaccccagggttgagtattttatctgtaaaatgttatctgccctttggctgcattggaatttcagagaaggctgcagaggcctgggttacacagcctgagtcacaacgtgggaaggaatctctgccacgggaaaggtgggcggaagcagctggcagcctggggcgtgcttcaggctcctccctctaaggggcgccatgggaacaggctccggagggagccggcgtctgaaaggcccccgggacctgctgcagtgccagaggggcctctggagcaggcctggcttttaaatggggggctgaattccagctcacacacacctcaagtccaaccttactttcttcagccagaatacatttcttgtaaaacctggcttgttgcttggcttttaaagatggtgtatgtttgtaaaaatattcttctgggctcaaaagctagcttgagggggcagatgccccaggtgtcccagctccacagcccctggcagatcccagaccccttggtggcaggtcccagagcctaggtggtaggagcttgatctttgtttctgcccttacccctcagtagtggggctgcgaggtagtagacaggatgcccagttaagtttgaatttcagatagaaaataattttagaataaatatgttctatctaatacatgggacagatgttatttttagagataggatcttgctctgttgcccaggctggagtgtagtggtatgatcatagctcaccacaaccttgaactcccaggctcaggcgatcctcccgccttggctgcctgagtagctgggactgcaggcatgcaccaccacgcccagctaatttttcttattttttgtggagacagggtctcactgtgttgcctcactcgagctgctgacctcaagtgatcctcccgcctcagcctgccaaagcactgggattacaggcatgagccaccatgcctggccaggacatatttgaaatggggagattttaaaaattctgatgattagactgaatcctcagacgttctggtttgattgttgtgggtgtagcccaggcatgggattttttaaagagctgctcaggtaattccaatttaattgcgtgtcctacttgggttttttgtttgtttttattgtttttgctaaacctggcaaccctaccgagtagggattagcagtaacctatctgaaatttagaggtgttttgggggtggggcgagggtttctgtagtagactcagattttacatggccctgagctgcccttgcgttcagttggaagccacgcaaaatgaactgaaccaggagtgagcttcgtgtacattatctattagaaaatgaagtaccttctggttcagctagtccctgtgcgttgagaggctttaagaaacttctagtaaaaatgtttttttcttttagctttgaattggccagagtttatcctagattattttattttaaattggtagaattctttgcgaactgtcacagagaaattccttttcatgactttatttctgacctattaaaacatgaacaggccaggcatggtggctcacgcctgtaatcctagcacttgggaggcagtggcgggcggatcacttgagctcaggagtcctaaaccagcctgggcaacatagtgataccttgtctctaccaaaagttaaaaaaaaaaaaaaaaaagctcaagaacctgcacgagggcctaaaacagtgggctcagctttggctgtgcattggaatcacctggggagatttgtaagcttctgctgtctgggctgaacccccagaggttcggattgaattggtgtggggtgtggtccaggcatcgagatgtgtaaagacctccccaggtgatgatatgcagtccgaggttgagactgccctgtcctgcaaggtcgttggccagaggtagaggaaactggtcaaagtggctgttgggcttgtcaagcccgtggctgaatgacagtgagctctcttgctgggagggttccttttcctgttgttgaatggtcctggcctgcaggatgggaggccagatgccttcaggagctggtggatccagctgttctcaccagcctggaggttagcagaccagagtgggtgggcaggaccttggcctggtgcccctggaatcagtgggtggcatgtgttgggatatactggctacaggctcatctcaaagagcaggtagaacagagtcagcagggaactgacaggtggggctgtccccctgaaagcagccgcagaaacagctgccacctatttgcatagctgagcaggaggacatactgtctttgtgggttttgcttctggtctgtttcctgactgggttgataaagggagtcccagctcgttccctgttagccaaaccagcatcctactcacacaccggacactccaggtgctagtccactggtgctggtgttcaggggagttggggggggggggcgcggggacagaagcgcgggttcttggttccaatgagggacttagcagaagcctccaggggccagcagggccaggtgaaactgggagaaatgaagccctctgtgtcctgtgtgtgtggtggggtttaatgcattagcaaatttaaacttaaaaactaactctaggccgggcacggtggctcacacctgtaatcccagcactttgggaggccaaggcaggtggattgcctgagctcaggagttcgagaccagcctggacaacatggtgaaactcttgtctttatttttttaaaaaaacaaaaagtaactttcgatgtgatcataccaggaaagttttgcgtggtcaccatgccaagaaaatgactttggttgcccagcagatccacagcgactctttctcaagggctactgtggattctagattgaggaaaggggccacttaggactcagtgctggtatcctccacagtcctttctcccagactctggccctccctttgggacccaggaaatcccctctagggtgacgctgctggctaggaagactgaggtctgctgcgccaaggggcctcaagttagaagggccatgccgttcagtggatgactttgagcgctgatcctagggacctgccaggtcctcacttcctgccctgggtgcacacatgaatggggcagccagcaggaagcgggagaggctggaaccaggagcctgccctacctgcatggcaggacaactctgaggcccttctgccatattctctgctacccaccagagaaaataggctgccttctagaaagatttgtttctaaaagcgtagaccctggggaagtataatgtcaccatgctcaccaggcgaggtttcccatatgacctccctgccccgacctcgtaggttgctcctttccccatctgtaaggtagagatgtctgccccggagctaccagctggggatggcatccaggccatgtctcctgcaggatccaagtgctgttgtccccagggtgaccctgcctcctgctggggcccatccgctttgctgtgctgcacaggctgttttcatctgcatggtttggggtctttgtccttgtgccttttcttccccatcgccactgtacaggattttccacattgcccactgcctccttttctacatcgtctcatctccctggcctttcccgagccctgtaaatgtgtactttttcaacgtgcctcccccaggtgaggccagctctcccgggcacattcgtccacaaggatcaggccccacttacccttggctcgctcagcctgtagacttggtaactttgtacagaatctttcattattgtcttaagcatggggggctaggacccacttagtccctcctccagcctgcagctaatttaggagccttgcattccagaaaagggcaactttgtgtaaagcagcttctcccacagagctttccctgcattgttagtgatgtcgggcaaagcatcactctttaacctggggcattggccccagcagggatatcatgggaccgcagccgctccgtgcactgtctctgcccccagaggaagccctgtccatggttcctggtgcacggccacaggcctgccttgaggccaccacatctggtgtctagaacagctgcgggccccacttgggcagaaggaagaggtgctagctgctgcccctgcctgctgtgaacacctgcccagcccttccttgtctgctgaggtgctcagaccagagtgccattaaataccaactgatgtcacggagcggacggtgcattgccaaggactcacagctgtgggctcccttccagctcctcccactttcttggctgggtcttctgaggcctacgtggaatgaactacacatgtggcctcatgcccaagggtttgttagatggcctctgactctgtgggattcaacttgacttttttgccccaggaggctctgtctggaaacaggcttagctttagtgctggggtgggacctgccctgtgggccccagggaggggacagtgggggtgaggccctgaggctgtccagggtctgagctctttgcctccaacctgcttctgccccaaaaggaacaggctgttggtggcaggctcctcccggggagctgtactgtacagaccaaggtgtaaataaacagtttgctcttct

SEQ ID NO: 4016 - DNA, 1677 bp, Homo sapien
ctgagatcagacacacttgggccgggttgggaggaactggcaggaaaaggactgaacccttaatgtcaggcggttttgaagcacctggggcaagctatggaaatccccacaggaaggctcacgcagtctcttaggcggctgccctccacctgccacgttctttttgattgactaaaaaacgctgaatgaagaacgaagtcgcgtggaaaccctcgccgcgcgcctgcagcggacagcgcagcccgggaggttcggctgcggacttgcgcccgggggctgcgctgcgagcggccacgcatggcggctggacccgggcggccgcaagggcttggctgggccgcgggaggcgggaggttcttcgtcctcccgagccatctccctgaactgacaagcaggactcccgggtccagggggcacagggcccggggcggtgacccggcggatcgggctgccggaggagcccactgtaaatgccgcaactggccccaaacactgcgttcctggactgcaccagcagctcctggcgcggccgcagagttggtggatattttccaagggggaaaaaaatcttttaaatgccatctgtttactttaaaaatgttgattacttaagaaaaacgaatggatgtctgggcaaaggtatggacgtcacaattattttgaaggcgtcctttttaactttaaacagaccacgccaggaggagactgctgacccagagcgcattacctaaaatctggtacccagagtgcacccttcgccctcgttggagttctctcctctctgccaagctttgctccgtgccagaggtgtgctccattgtacctccgctctgtccctgcagtcaggcaaccaattggagaagagtataaatagtaattaaccagggagagttgtaattcagaaacctagttaaaacaagtcctcaaaaactagagaatatgagagtggggagacattttgaaggcattaagaacaaaaaacgatggggacgaatggttgagtctgaggatcagcatcgtaatctgttagagaacgaggtcgtggctgtgtctgtgagtcgttaatgggtttaatcggttgatacacagcctgctagtggcctaaccagtaacccagggcctggcagatttgcatgacatctcggagtttgattgctcttccttccacttggcaaaaggagacaccatcagccggatcaggaggggtcatggtgagatggaacccaccgaggtggtgtacagagctggcgctgccaatggccagagtggcagcctttctacctccttaaccctgcaaaaatcaaacgtgctagtacgcactgtccatccacactggaactccagttggttttagtctgcgatgatgactcttctgggttgacttttccagttcattatgcagccctcttgaagcaggcctcccaaacttagcagacaccaatgagaacctcacagagaggctcatcaagcaggctggtgaaactgggtgttacttcctgttccatgggtaccccatagtgtttgggaaacaccgggctgtggttcaggagaatttcacatatgctaagatggagaaagaacctgccctttacatttaggcttgggatgttaatttaaagtttgaatgaccaaaaattaaatctgtaacttttaaaaaaaaaaaaaaaaaaaaaaaaa

SEQ ID NO: 4017 - protein, 43 aa, Homo sapien
EIRHTWAGLGGTGRKRTEPLMSGGFEAPGASYGNPHRKAHAVS

SEQ ID NO: 4018 - DNA, 2061 bp, Homo sapien
ggaggctcatcataatcgttagctattgtcaccgattgtattgttatgacttctaccaccaccactccccctcctcctgggatggtgattccagggccaggcggcaggctataactagcgcccttccaggtggaacccgccagagccccgaggcagcctaggattttctgagatcagacacacttgggccgggttgggaggaactggcaggaaaaggactgaacccttaatgtcaggcggttttgaagcacctggggcaagctatggaaatccccacaggaaggctcacgcagtctcttaggcggctgccctccacctgccacgttctttttgattgactaaaaaacgctgaatgaagaacgaagtcgcgtggaaaccctcgccgcgcgcctgcagcggacagcgcagcccgggaggttcggctgcggacttgcgcccgggggctgcgctgcgagcggccacgcatggcggctggacccgggcggccgcaagggcttggctgggccgcgggaggcgggaggttcttcgtcctcccgagccatctccctgaactgacaagcaggactcccgggtccagggggcacagggcccggggcggtgacccggcggatcgggctgccggaggagcccactgtaaatgccgcaactggccccaaacactgcgttcctggactgcaccagcagctcctggcgcggccgcagagttggtggatattttccaagggggaaaaaaatcttttaaatgccatctgtttactttaaaaatgttgattacttaagaaaaacgaatggatgtctgggcaaaggtatggacgtcacaattattttgaaggcgtcctttttaactttaaacagaccacgccaggaggagactgctgacccagagcgcattacctaaaatctggtacccagagtgcacccttcgccctcgtggagttctctcctctctgccaagcttgctccgtgccagaggtgtgctccattgtacctccgctctgtccctgcagtcaggcaaccaattggagaagagtataaatagtaattaaccagggagagttgtaattcagaaacctagttaaaacaagtcctcaaaaactagagaatatgagagtggggagacattttgaaggcattaagaacaaaaaacgatggggacgaatggttgagtctgaggatcagcatcgtaatctgttagagaacgaggtcgtggctgtgtctgtgagtcgttaatgggtttaatcggttgatacacagcctgctagtggcctaaccagtaacccagggcctggcagatttgcatgacatctcggagtttgattgctcttccttccacttggcaaaaggagacaccatcagccggatcaggaggggtcatggtgagatggaacccaccgaggtggtgtacagagctggcgctgccaatggccagagtggcagcctttctacctccttaaccctgcaaaaatcaaacgtgctagtacgcactgtccatccacactggaactccagttggttttagtctgcgatgatgactcttctgggttgacttttccagttcattatgcagccctcttgaagcaggcctcccaaacttagcagacaccaatgagaacctcacagagaggctcatcaagcaggctggtgaaactgggtgttacttcctgttccatgggtaccccatagtgtttgggaaacaccgggctgtggttcaggagaatttcacatatgctaagatggagaaagaacctgccctttacatttaggcttgggatgttaatttaaagtttgaatgaccaaaaattaaatctgtaacttttaaagtttctctttgtgattttacttaagtgttggtagatattcttaaattgtaatgacctcagtttgggaattaagttagccaaatattgtgtaattattgtttgttatacaaaaatatgccttagactgtacagcggcagaaactccctctaccacctcggtccccctttccattctgcgttatacaaaataagctgacacgttaatgctgtggcccacattaaacaaagtataccgtaaaaa

SEQ ID NO: 4019 - protein, 52 aa, Homo sapien [sequence omitted]

SEQ ID NO: 4020 - DNA, 3059 bp, Homo sapien
gttcggtggtgtcccggtgcagccacgcgagagtagaagggtggaaaggggaggtgcccagtgaaatggagcctgtcccgtgcactttcgggcatttcgagcatcttgtgggctctcccaagtcgcggcccctcctctgagagccacagtcaggtctgtcctcaggggtcgaggcggctgcgctggggcctcggcccgggaggaggcggggggcacggcctttccattttccctgctcccctctgcagaagcctcatagggcccggcgcggcggctcacgcctgtcattcccagcgctttgggcggattgggtaggaggattacttgaggccaggagttcaagaccaggcagggcaacatagggagaccccccccccaaccatctctaatggaaaaaaaaaaaaaagtctccacatccagcgttgtgccttttctctataaggaacagcatctctgccttcctgttcacggtgaccttcgcttggtgtcctcctggcctcagcaacctgacaattctgtcgtgtcccgagagatggctaatgaatggcgcttgatgacagatgagtaatgcctgttgctgaaagattgacgatcatctttctcaagatgttttctgtcttcatgagtcaaaatttgaagaggaaaggatggtggctgggtggttgacaaattactctcaggactcagtgacctttgaggatgtggctgtggacttcacccaggaggagtggactttgctggatcaaactcagagaaacttatacagagatgtgatgctggagaactataagaatctagttgcagtagattgggagagtcatattaataccaaatggtcagcacctcagcagaattttttgcaggggaaaacatccagtgtggtggaaatggagagaaaccattttggagaggaactgtttgactttaaccaatgtgaaaaagccttgagtgaacactcatgccttaagactcacaggagaacttactttagaaagaaaacctgtgagtgtaatcaatgtgaaaaagccttcagaaaaccctctatctttactttacacaagaaaactgatatcggagaggaacttcctaactgtaatcaatgtgaaacagccttcagccaacatctacatcttgtttgcaagaaaactagccaaaatctacatcttgtttgcaagaaaactcacactcaagagaaaccatataaatgcagtgactgtgaaaaaggcttaccttcctcctcacacctcagagaatgtgtaagaatttatggtggagagagaccatatactcataaggagtatgtcgaaaccttttctcattctacagccctttttgtacacatgcaaactcaagatggagaaaaattctatgaatgtaaagcatgtgggaaacccttcactgagtcgtcatatcttactcaacatttaagaactcatagtagagtgttacctatagaacataagaaatttggcaaagcctttgctttttccccagatcttgctaaacatataagacttagaactagaggaaaacactatgtttgtaatgaatgtggcaaagaatttacttgtttctcaaaactcaacattcacataagggttcacactggagaaaaaccgtatgagtgcaacaaatgtgggaaagccttcactgattcatcaggtcttataaaacacaggcgaactcacactggagaaaagccttatgaatgtaaggaatgtgggaaagcttttgctaactcttcacatcttactgtacatatgagaactcacactggtgagaagccttatcaatgtaaggaatgtggaaaagcctttattaattcctcttcctttaaaagtcacatgcagactcatcctggtgtaaaaccctatgactgtcaacagtgtgggaaagccttcattcgatcctcatttcttattcgacatttgagaagtcacagtgcagaaaggccttttgaatgtgaggaatgtgggaaagcctttagatactcctcgcaccttagtcaacataaaagaatacatacaggggagaggccatataaatgtcaaaagtgtgggcaagccttcagtatctcatcaggccttacagtacacatgagaactcacactggtgaacggccctttgaatgtcaggaatgtgggaaagcctttactcggtccacatatcttattcgacatctaagaagtcatagtgtggagaaaccatataaggaatgtgggcaaacctttagtaattcctcatgccttactgaatgtgtgtgaattggggctgatacttggaaagaatgtggtaaagccactacttcctcacacttactgaacatgtactcattcatagtggcaatgtacacagtcataaggaatgtgggaagccttccttggtgtctcagatcttaacaattccaatagaagagaagacatatgaatgtaaggaatgtgggaaaatcttggctccttccataggccttactattcatgtgtctgtgcatcctaggaaacaaactgaacgtaggaaacctgtcgatgcttacatcttactgagtctgtttgaactcatgctggagagaaatgctatgaatgtgaggaaggtggaaaagctttcattattttcctcgggccttactgagcttgtgagcacattggatataaatgcacgtcctctggctgtaaggaatgtgttgaaacctttcactctgccttataccttaatattcagctgtgatctcacaagtgtgaaaaatcttatgaatgtaaaatgtgtggagattcttctttgtttttagcttccactttgggaacatgtcaaagcacacattgagaagtcccatgagtgaaagagatgttggaaagcccttgaacttggtcgttaggaaacatccacactgaagaggaacctgactgtatggaaggtcaaaaaggctgtattaatttacatgcaaaaagtcacactagaggaatgccatatcagaatgcttttggtaaatatacatgttttaaagaggttatatatcattaataaaaatatctagctggtctgaaaaaaaaaaaaaaaaaaaa

SEQ ID NO: 4021 - protein, 538 aa, Homo sapien
MVAGWLTNYSQDSVTFEDVAVDFTQEEWTLLDQTQRNLYRDVMLENYKNLVAVDWESHINTKWSAPQQNFLQGKTSSVVEMERNHFGEELFDFNQCEKALSEHSCLKTHRRTYFRKKTCECNQCEKAFRKPSIFTLHKKTDIGEELPNCNQCETAFSQHLHLVCKKTSQNLHLVCKKTHTQEKPYKCSDCEKGLPSSSHLRECVRIYGGERPYTHKEYVETFSHSTALFVHMQTQDGEKFYECKACGKPFTESSYLTQHLRTHSRVLPIEHKKFGKAFAFSPDLAKHIRLRTRGKHYVCNECGKEFTCFSKLNIHIRVHTGEKPYECNKCGKAFTDSSGLIKHRRTHTGEKPYECKECGKAFANSSHLTVHMRTHTGEKPYQCKECGKAFINSSSFKSHMQTHPGVKPYDCQQCGKAFIRSSFLIRHLRSHSAERPFECEECGKAFRYSSHLSQHKRIHTGERPYKCQKCGQAFSISSGLTVHMRTHTGERPFECQECGKAFTRSTYLIRHLRSHSVEKPYKECGQTFSNSSCLTECV

SEQ ID NO: 4022 - DNA, 1235 bp, Homo sapien
ggcacgagggtcatcgccgcggggcggaggcgacagtgtctagcgggagctccgcgtgtagctacgccggccgcctggctttgagacaacgtgattctccgcagctggtcgcctacccgtgatgttctgcccacgtcgagacctgagctgaaatggcagacgatctcggagacgagtggtgggagaaccagccgactggagcaggcagcagcccagaagcatcagatggtgaaggagaaggagacacagaagtgatgcagcaggagacagttccagttcctgtaccttcagagaaaaccaaacagcctaaagaatgttttttgatacaaccaaaggaaagaaaagagaataccaccaagaccaggaaaagaagaaagaagaaaattactgatgttcttgcaaaatcagaaccaaaaccagggttacctgaagacctacagaagctgatgaaggactattatagcagcagacgcttggtgattgaattagaagaactgaacctgccagactcctgtttcctcaaggccaatgatttgactcacagtctttcctcatacctaaaaggaatttgtcctaagtgggtaaaacttaggaagaaccacagtgagaagaaatcggtcctgatgctgatcatctgcagctcggccgtccgagccctggagctcattaggtcgatgacagcattcagaggagacggcaaagttataaaattatttgcaaagcacataaaggtccaggcgcaggtaaagttgctggagaagcgtgtggtgcacctgggtgtaggaactccggggagaattaaagaacttgttaaacaaggtggccttaatttgagccccttaaaatttctggtttttgactggaactggagagatcagaagttgaggagaatgatggacattcccgagataagaaaggaggtattcgaacttctggaaatgggagtgctcagtctgtgcaagtcagaatccttgaaactgggccttttctaagtctgtgtcctaatgaagattccagttttcacagtagaagttgcatcttatttaatgactctgatacattgcaagcactcagtaaatatcagcaaatagtttatgttaattgtgtcaacagatggatcactggaatgtggggattctgaaacagaaatgaaactgtccttttgacaactctcttatataataaagtatcaccggcttgtgtatgaaaaaaaaaaaaaaaaaaaaaaaaaaaaa

SEQ ID NO: 4023 - protein, 279 aa, Homo sapien
MADDLGDEWWENQPTGAGSSPEASDGEGEGDTEVMQQETVPVPVPSEKTKQPKECFLIQPKERKENTTKTRKRRKKKITDVLAKSEPKPGLPEDLQKLMKDYYSSRRLVIELEELNLPDSCFLKANDLTHSLSSYLKGICPKWVKLRKNHSEKKSVLMLIICSSAVRALELIRSMTAFRGDGKVIKLFAKHIKVQAQVKLLEKRVVHLGVGTPGRIKELVKQGGLNLSPLKFLVFDWNWRDQKLRRMMDIPEIRKEVFELLEMGVLSLCKSESLKLGLF

SEQ ID NO: 4024 - DNA, 1193 bp, Homo sapien
gtctacaccccctcctcacacgcacttcacctgggtcgggattctcaggtcatgaacggtcccagccacctccgggcagggcgggtgaggacggggacggggcgtgtccaactggctgtgggctcttgaaacccgagcatggcacagcacggggcgatgggcgcgtttcgggccctgtgcggcctggcgctgctgtgcgcgctcagcctgggtcagcgccccaccgggggtcccgggtgcggccctgggcgcctcctgcttgggacgggaacggacgcgcgctgctgccgggttcacacgacgcgctgctgccgcgattacccgggcgaggagtgctgttccgagtgggactgcatgtgtgtccagcctgaattccactgcggagacccttgctgcacgacctgccggcaccacccttgtcccccaggccagggggtacagtcccaggggaaattcagttttggcttccagtgtatcgactgtgcctcggggaccttctccgggggccacgaaggccactgcaaaccttggacagactgcacccagttcgggtttctcactgtgttccctgggaacaagacccacaacgctgtgtgcgtcccagggtccccgccggcagagccgcttgggtggctgaccgtcgtcctcctggccgtggccgcctgcgtcctcctcctgacctcggcccagcttggactgcacatctggcagctgaggaagacccagctgctgctggaggtgccgccgtcgaccgaagacgccagaagctgccagttccccgaggaagagcggggcgagcgatcggcagaggagaaggggcggctgggagacctgtgggtgtgagcctggccgtcctccggggccaccgaccgcagccagcccctccccaggagctccccaggccgcaggggctctgcgttctgctctgggccgggccctgctcccctggcagcagaagtgggtgcaggaaggtggcagtgaccagcgccctggaccatgcagttcggcggccgcggctgggccctgcaggagggagagagagacacagtcatggcccccttcctcccttgctggccctgatggggtggggtcttaggacgggaggctgtgtccgtgggtgtgcagtgcccagcacgggacccggctgcaggggaccttcaataaacacttgtccagtgaaaaaaaaaaaaaaa

SEQ ID NO: 4025 - protein, 234 aa, Homo sapien
MAQHGAMGAFRALCGLALLCALSLGQRPTGGPGCGPGRLLLGTGTDARCCRVHTTRCCRDYPGEECCSEWDCMCVQPEFHCGDPCCTTCRHHPCPPGQGVQSQGKFSFGFQCIDCASGTFSGGHEGHCKPWTDCTQFGFLTVFPGNKTHNAVCVPGSPPAEPLGWLTVVLLAVAACVLLLTSAQLGLHIWQLRKTQLLLEVPPSTEDARSCQFPEEERGERSAEEKGRLGDLWV

SEQ ID NO: 4026 - DNA, 1035 bp, Homo sapien
atgggacaatagtattgaatagatttcagctttatgctggagtaactggcatgtgagcaaactgtgttggcgtgggggtggaggggtgaggtgggcgctaagcctttttttaagatttttcaggtacccctcactaaaggcaccgaaggcttaaagtaggacaaccatggagccttcctgtggcaggagagacaacaaagcgctattatcctaaggtcaagagaagtgtcagcctcacctgatttttattagtaatgaggacttgcctcaactccctctttctggagtgaagcatccgaaggaatgcttgaagtacccctgggcttctcttaacatttaagcaagctgtttttatagcagctcttaataataaagcccaaatctcaagcggtgcttgaaggggagggaaagggggaaagcgggcaaccacttttccctagcttttccagaagcctgttaaaagcaaggtctccccacaagcaacttctctgccacatcgccaccccgtgccttttgatctagcacagacccttcacccctcacctcgatgcagccagtagcttggatccttgtgggcatgatccataatcggtttcaaggtaacgatggtgtcgaggtctttggtgggttgaactatgttagaaaaggccattaatttgcctgcaaattgttaacagaagggtattaaaaccacagctaagtagctctattataatacttatccagtgactaaaaccaacttaaaccagtaagtggagaaataacatgttcaagaactgtaatgctgggtgggaacatgtaacttgtagactggagaagataggcatttgagtggctgagagggcttttgggtgggaatgcaaaaattctctgctaagactttttcaggtgaacataacagacttggccaagctagcatcttagcggaagctgatctccaatgctcttcagtagggtcatgaaggtttttcttttcctgagaaaacaacacgtattgttttctcaggttttgctttttggcctttttctagctta

SEQ ID NO: 4027 - protein, 25 aa, Homo sapien
MKVFLFLRKQHVLFSQVLLFGLFLA

SEQ ID NO: 4028 - DNA, 14709 bp, Homo sapien
agggaattctctggggctttggggaatttagtgcgtgggtgagccaagaaaatactaattaataatagtaagttgttagtgttggttaagttgttgcttggaagtgagaagttgcttagaaactttccaaagtgcttagaactttaagtgcaaacagacaaactaacaaacaaaaattgttttgctttgctacaaggtggggaagactgaagaagtgttaactgaaaacaggtgacacagagtcaccagttttccgagaaccaaagggaggggtgtgtgatgccatctcacaggcaggggaaatgtctttaccagcttcctcctggtggccaagacagcctgtttcagagggttgttttgtttggggtgtgggtgttatcaagtgaattagtcacttgaaagatgggcgtcagacttgcatacgcagcagatcagcatccttcgctgccccttagcaacttaggtggttgatttgaaactgtgaaggtgtgattttttcaggagctggaagtcttagaaaagccttgtaaatgcctatattgtgggcttttaacgtatttaagggaccacttaagacgagattagatgggctcttctggatttgttcctcatttgtcacaggtgtcttgtgattgaaaatcatgagcgaagtgaaattgcattgaatttcaagggaatttagtatgtaaatcgtgccttagaaacacatctgttgtcttttctgtgtttggtcgatattaataatggcaaaatttttgcctatctagtatcttcaaattgtagtctttgtaacaaccaaataaccttttgtggtcactgtaaaattaatatttggtagacagaatccatgtacctttgctaaggttagaatgaataatttattgtatttttaatttgaatgtttgtgctttttaaatgagccaagactagaggggaaactatcacctaaaatcagtttggaaaacaagacctaaaaagggaaggggatggggattgtggggagagagtgggcgaggtgcctttactacatgtgtgatctgaaaaccctgcttggttctgagctgcgtctattgaattggtaaagtaataccaatggctttttatcatttccttcttccctttaagtttcacttgaaattttaaaaatcatggttatttttatcgttgggatctttctgtcttctgggttccattttttaaatgtttaaaaatatgttgacatggtagttcagttcttaaccaatgacttggggatgatgcaaacaattactgtcgttgggatttagagtgtattagtcacgcatgtatggggaagtagtctcgggtatgctgttgtgaaattgaaactgtaaaagtagatggttgaaagtactggtatgttgctctgtatggtaagaactaattctgttacgtcatgtacataattactaatcacttttcttcccctttacagcacaaataaagtttgagttctaaactcattagaattgttgtattgctatgttacatttctcgacccctatcacattgccttcataacgactttggatgtatcttcatattgtagatttaggtctagatttgctagctccaagtaattaaggccatgtaggagagcatggtaaccacagatagaactggtattatcccaagtggtctgcagactgctgagtggggatgggatctgctctctgttgagagttggtaatcattggtttgaaatgtgatgaaaccactcaagccaatgaaggtgggtgtgtaggtggggagtactttgccataatattttaaaacattacctggttagagttctaagtggtacttatttttgtttggttaggggaaagcctgaataaaaacagaaatggacacataatatgcatattccatagtctttgggaggctggaatgtgcctgggatttgggtctaagtgtatgcgtaattcttacctcactaaagaatttgccttgtttttttccttttggtgagtgactaaaacgtctgggcttccctgtgtgcgtgctacagtaagcaagcagaggctgtgcaaaggtgtgagcaggatcacgtggaatctggaggatacatcttggcttgcaaactgcctctgtctcctgggtgggactgttctgtccttgcactgctgttctgtgttacctcttggggtgtaaggttttgcttacaggagacaaactttgggcgtagaatggaagccactgccagcctctgtgctgagaaggaaggtgcttgtttcaaagggagcagcaagggaggcttgttctactcacctgggcctgtttgcctgagaaggggagataagggctgaactgggactagccagggggaccaacacaaatggtgggggatcatgacctgaaggattctttccttcccatgagctgcagggctggttgccgtccttgcaactgtgtcttatttgcctgtgccgttatatcttggtgacccctccacgtgtacactactgacaaacgggtggagtgctggggagaagtcactgtgccgcccacctagtaaaccttctgtctgtgctcatggcatctccaagatggggcactgctgtgtgcagaatccagggtcctctttctgcttgcaactcctttccctggatgccccagaaacaatccaggcctcctttcctatcttacccctttgctttgctttttaccccagcacctctataaccgccttctcttcttttcagaactccttgtttctcatcctgttttttatgattacaaaactcttgcttccaccctggaagataactgctatagatgcctgtatgtaaatggtgctgtctccagcaactggcatgctgaagaagaattgattcacggggtataaatgttggggattggaagtggggatgaaatggcacttgttgatacaggagcagagaggtgaggccgactgctgaagacagctcgccaccctccttgcctccactccaatccaggggctggggccacattctttgccttcatttatcctcagatcaggtgagatcgacaggaggtgttgatggcagtgccagcaattattgctaatccgtttgcatccttatgcatagatctgaattcagactttgtgaatttccagaggtgtgggtaatataatagaattcagtgagtgggcatggctgatcttgtgcaaattaaaagttatggggcataagaatagcaaaagttgaacttcttttaaaaaggaaagtaccctgagagccagtattggttgaggctcttcagtatgcccaggttggcagcactgagaaccgcaggaacggcctgttgttacaaaaaggagattgactcagctgcccttggtgcatctgactgactatgactgctgagagattccaaggacccttaatgccagggctaacctctccatgtgcagtgagacctctggaggaagtgtcatcctctggctttgtgtggtactcattatggtgcagtgcgggcatgaaatgaagacacccaaataggcttacagatacgatatgttttaaatgttcgtatttaacaaaaacatactgacactgtttggaaatggcaacaggaagatagcaaaatgaatactaacattacgaaaagatgaacaggtacatgttccaaggcaggtggctgtgaacttcctctgagtgaaggcatcccctccagcacctttcagcctgctagttaggacgacccgccgccaccctccaggacctccagccctgcactgcctttcctctcttttaaataattcttcattgagttctaatatgtaaaaaaaaaaagtttactgtaaagtttgcaaataaggaaattttttttaaaagtcctcagtaatcttaccagtaacaattgttatgggcacatttgcttttggaagatttcttttgtatgcatgggataagtacatttttaaacaaaaatgggattatgccataaattctattttgtgactttaatatatagtgaacaccttttttaatgatgacaggatgttcccttgcatggctgtatcaatttaaacaatcttgtttcaatgggcatacagggtattttctagtttttttttcctcttagaaaataatacttgcgatgactttccttgtagctcagactttttcacgtctgttgttatctctttgggaatgctgaatacatacatttcgagaaggaaatgactgttaaactcttaagacttcaggttcatattgctaaactgcccagcagggagggattttttcaattagtgttctcactggtgaggcaaacctgatgccttcccctcttcctcagaaccggctttatcacattgaaaacctttgctcctccgacggatcgagtctgctttccctgtggatgtgagcattgctttgtctgctggtgactgaacatctctaccatgtgtcaattggccatttgtggtgtgtgtgtgtgtgcgtgtgtgtgtgtgtgtgtgtgtgtatgattttctaattcctagtcatttttctattgattgttttgcaaaagccatttacatcttaaggatattgataatcttttgttatatttgatgcaaatatttttttccagtttataggttgccttttaattttgtgtttcaggtagataaaagttaaacgattttcttaggttagtttatcactgtggtttctgaacttgttatgtgtagatcttttccaccccaagagtacataaatattaatccatactttcttatggaacttgtatggtttcgttttttacatttaaaccttcttccccgtggtgtgtgttgtggaatctgtgtttgtgtgaggaggggcatggtgctctcagaacccacctcctgtggccagagagccctgtcctgtgagggtggttatcacagtggcagggttcaattcagaagaccttgagggcaggctgatgtttcctgaatgggcccctggttgttgcttgtccctgactctccatttccccatctgagtggatttggacctaatagggcactggagctggttcgaatcctgactggactacttggcaactttatgtctgggagcaagttacttaacctccccaagcctgtgtctgtgaaatgcgggtaaatgaatgtagatgtttggcagcagctactccttgttgagctctcacagtgaactctcctgcctctgccctccttccccgcctcccctggtgcctagcgtcaggtctagccacttcctcctgggcccctctcccttttctgtggctggctgcctgcccgcctggcgctggacctttcatgtaacgggaatcagcatgtatattctggtctggtctgtttctacacttaattttgtttccagtagtatttccctgtaccggcagagttcacaaacacatttgaagaggctttttctcaggattcttaaccttcccaaaggaagtcccatggatgggtttctagaagtctataaatgctctgaaattgtatttttctgtggaaagcataactttcatctgcttgttcgtgctcaaaaaagatcatgaatgaatgattgcatgattttatgccattgtgcttatactaaaggatatgtagcccatctcttgagctgttaaactgttttgactactttaaatcgtgcagctgtgagcatctctgtaaatttagtgtacacatgtatcccctggagtggcattgcctcggcagtgagcacttatggttttataactctcttcacagactcaaatgactccagaaagctacacttcctgttgtgagtatatgatatccatttccctacatagccactaacatcaggtttttacaattttatttatttcttgctactttaagaaatttttgtggtgaaatacatataatagaagttgactatctgaatcatttttaagtatacattcagtagtgttaagtatgtcgccattgttgtacaaccaatctccagaactttttcatcttgcaaaacaaactctgtacccattaaataacattaaacattccattccctccagcctcagcaaccccattctactttctgtttctgtgagtttgactattccaagcacttcatatcagttaaatcatgaagtatttgtctgtctgtgactggcttatttctctgagcacagtgtcctcgagatgcgtctatgttgtagcatatgtcagaatttccttcctttttaaaagatccaaataatattcttattttatatcttttttttatccattcatccattagtggacacttgggttgcttttggctattgtaaataatggtgctatgtacaaatatctatattattgtatttacaagtataatgctgtaatgtacacacatctttttgagatcctaccttcagttcttttgagtatatagccagaagtggtattactaaatcttacgatatttctatttttaatttattgaggaaccactgtagtttttcatagcaactgcaccattttacgttctcaccaagagtgcacaagggttccgaggttcccacatcctccccaacacttgttattttctgctttttttagattgcagccatcatagtgggtgtgaggtgacatttcattgtggttttgatttgcatttccctaatgaggagtgatgctgagcatcttttcatatgcttactggtcatttgtatgttgtctttggaaaaatgtctattcaagtcctttgactattttaaaaattgggttattagagttatcgttgttgttgacttgtaggagtttctttctatattctggatattaatcccctatcagatatatgatttgcaaatatcttctcttattccataaggttactttttcactttgttgattgtgttctttgatgtatagaagtttttagttttgaaatagtctaatttatctgtttttacttttgtggtctgtgcttttggtgtcatatccaagaaatccttgccaaatccaacgttataaggtacttttaaggtattttagttgtcttagtctatatttctgtactcacctttctttatccactcatcagttgatgggcatgtaggttggttccatatctttgcaattctgaattgtgctgtgatcaggtgtctttttagtataatgatttactctcctttgcgtagatacccagtagtgggattgctggatcgaatggtttttataattttctattttaccacagtttctctctgcatttttcctctttgaccactaaccatgtgaaattctcatattgacctttataatgatcatgaactcttagtatcattgggaaggccacatttgccacttatgattgtaaaccttatcctccatttttcctgttattgttggtgcaaaaagcacctattataccaggactttaaaaatcagtctgataagtctttgataagtctaataataataactgataagtccattgaatttgcttctgattactttttctttagtagctaaacatgtatgtactcctatgattacaatgaacactcctctccatttaaattaattatttacattgatgaaatagcaaaatgttaatgactaaatactgtcttggttttttcgttccaggtcagtcaatattaacttcttataattttcttttttttctttatgtgtgtgtgtgtgtgtatttttttttttttaatttcaatggcttttggggtacaaatggcttttggtcatatagatgaattctacagtagtgaagtctgagattttactgcaccggtcacctgagtagtgtacattgtacccaatatgtggttttttataccttgcccccctcttaccctccccactttgagtctctagtgtccattatgtcactctgtatacctttttgtacccataagttagctctcacttataagtgagaacacacagtatttggttttccattcctgagttgcttcacttagaataatatcctccagctccatccaaaattgctgcaaaaaaaaaaaaaaccacaaacattattttgttcttttttattgctaagtcatattccatggtgtagagataccacattttatttatccactcactggttgatgggttggttccacatctttgcaattgtgacttgtactgccatcaagtgtctttctggtataatgacttcttttcctttgggtagatacccaggagtgggattgctagatcaaatggttcttaacattttctctctggatctatttctggaaattttaggctccagtttttgttgttgttgttaataaaatgcaatggaatgtaatgatcatcacttttcattatgctttaaaatctggtaaatggaggctagaacactcctgtaaggcaagaatattctctctgttggaactcaaatacacagaactgggtaaatctcaatcttaatctttgattcaggacacaacatggctctcttttacttgctttctttaattgttttttaataatgtggtaagcatttctgaatctcctatccaatacaaaaactaggacaatacagacagtaactcctatggttacaatgaacactcctctccacttaaattaattatttacactgatgaaattgaaatagcaaaattttaatgactaaatactgtctttgattttttgttccaggtctgtcaatattaacttcttataattttctttttttttctttatgtgtgtgtgtgtgtgtatatatatatatatttaatttcaatggcttttggggtacaaatggcttttggtcatatatatgagttctacagtagtgaagtctgagattttactacaccttccacttatgtggtcccacaccacccgcctcccctgccgcctcctgccaccccctaggccaaggtaataatcatcctgaatcctgggtttatctctcacttgctttcttttcatataattttgcaaaagaatctgatctaaatgtgtttttcagagtatatatttatattttagctgttcttagagaaaatttattattttgcatgtaatcttatggaacattctcatttaataccatggtaagattcagcccttgcccaggggatagttcatttagtttgtttactggatagagctcatcatgtgactatacctcagttagtttatcagttctcccatccatggtgactaggttgcctctcagcctctcaacaacactgtttctcagtgtccttgtagaagtgatatgtgggtgttttctccttacacagagttgaaaggtgacgacaacaacgttggcactaccaatcccccaccctccagaggggtaaccagtgttaccagtttgctgtgtttcctgctacacctcgccttattcacttccatttgtatctgaaaaacgtgttgcatggtttcttttctatagaagtggtaaaatgctattgtgtcctgtacattattgattactttttttcatttaacagtagggagatgcctgggagtacacagagaactgccctcattgttttcaacttctgcactgtatgtctgtgagtttagccattctgctgttaatggaaatttacagtattctaatcttttgatattacaaacagttctgtgcgatcatcgtcatacacaaccccttgtgcacaatgcatgagtgtttctcagggtaggtaccaagaagtgaaattcctgggtcatagggcgtgagtccgacatttttctccattctgccctgttgccctccagagtgggtgtccagctttgcatacctaagtatgagagtatctgttgttcatatcctctacgacgctccatatatgaaacttaagtttctgctagttgccatctttgatctatcatgtatgcagtgacctactaagactgtaattggtacagtagattcttgtcatctgtgtgtgaatttagcattcatgggcttaatgctgacaaggcccccagggtccaagacatataatcatgtataattttgtcaaggtataattttttaaattgcttttgtcatgtgtctgctggtgatgcccaacccagtgctctgcacccaggtcacactgtggctttgtcctctgcttatgcctgcattgcagcaactgtcctgaagagaccaaaattatgcagatttaggtaagtccatggctaatgttattatattatgtgctattgtaatggatggggctgtggagtgtatgaatttataaatcactggtcttgtaattaaaattcaaacactatagaaaaaggccatgtagaagataaaagttcctctataatcccggacccctaagataactactaatgacaacttcatttatattccttcagacattttctggctgtggatgtactaaaatgtatcctattattctctgccctaaaatggaatcatacaaggtgtactgttatttttatggctctataacatgtcatattgtacgtgttggtatggtcattttaaccatttttctagtgatggctttgaggttatttgcagtttcctagccatctcaaagtgtgctgcggggatctcttttgcatccctctgggtgcagagctgaggcacccagaggcagtgtccagaggaggcagcatctgtaggtgtcttcacctgctctggctcttggcacatctggttggtgacactgttttgtgagatgggttgaaagcacgtgctgccaaaatagaataatgttggtcctctcctcatgtgccgtggaactggggtaaaactgcgtagtggctgcagctgcctgtccataccggaatcgagtataacacggtgcctggcttagcacaaaacagtagtgggtcctgcaggccccagagtctaattcctggtattctttcccctacacagattaaataaaccaaaaacaaactattctaggaaagcgtctgtgacatttgtaaaaagtggtatttaatgatcttttattcacttgtctgtttagtttgttgaaatcttaagtggcatcctggtctgggaaggagtgctgtctgcgcctgccctccgctgggcacagcgtggctgcttcaggggctaagcacacactttctgtcttctaaagggccgccacatgccaggagctcaggtgtgagcccggctctggctcttacctcatagggtcactcataggggcacagggagcagaacattgtacacagcgaggcaccacccggcttggcatctgcctcggtggacttactacctctagaaggaaatacctgagttcctctggcctcagctcctagagtgactggtgtgctgtccctgttactcttctgtcaaggtgacaactgtgtgacccatcatctgtgtgtcaaagcaaggccctgcctgggcctctgctcctgtgctgaccccaaaggcaaatgctttgctagtttccttccagttaatttcacctatgaatagatgtgtgaaaactgttcaaagccatacctgcacatgtttgaacttcaaaccctgtgggtgattcagtggcatctttctctaacccccagcctcccttcccacagaggccaccgtcatggccagttgctgcagtttctttccagagaacctgtgtatgtgtaaagctgtacaggcgtgggtacaccacacagcctgtcttgcactgtggactgttgagttactagtacatctaggtaagcaccgcatatctgtattcatgtctgccttggtcttttcaacatctgtgtggtagccgtgtttgaattacccattccctttttggggaaccattaagttgtttcagcaatttttactgtagataaggctataccgcatatctgtgtacatgggtttttatgtacatgggcaagtatatctgtgagagaaaagtttcctcaggaggaattctgggcacagcatgtgtaaatttctaaatatgatggacacccccagcttccacctcaaggaggttggtcccattgacatttccccacaccttcacccaggctgtgcccttaaacttggttatttgtcaatgtgagaagtggaaaatagtatttaattgtagtttggatttgtatttctattgggttgtatacttactgattaataataagagctctttacatattaaggaaattaacccttttcaaatacattcctatttctcactaatctttaagttttattgtaatattttgctctttagtttatatatatatgtatatatatatatatgtatatatatatatatacatatatatatatatatatatatatatatatatatatatatatatatatatatatatatatatatatacatatatatatacatatatatatactaattttcttttatggttcctggattttgtgagtagtttgaaaaggctaatccagctgaagattttgttgttgttgttaaaccccatgttttctcctaactctttttatttttattttggaggactctatctagacttaattttagcataacaagtgacagggttagttagcctgttgtccttacaccattttctggctaatacagctattaactattgatctgtctattcacgtgccagttcctaatggttttacatagtgtaatctgcacttcaaaatagcgaagggaagccctacctcattattctacttttccagaattctcctggctattccaggctgcatgtttaccttaaccttccctgtgatgtcttcatgccgttgtcttcttatgcaagaataaggtacgtctttccatccactcacgtctatttaatttgactttgcattacacagaaagctggtcttggtctgtctacctcggcatctagttgtcctcactgccccctagccgaccccaccccatctgactgactaccccatcacagagtacttttatttacgttttgctctgcctaatggttacttgatactgtcacgccgacagtgtccagttcagtggtctttgcagttgaaatgctcccgtacacactgtcttgttaaaaatgccagtaagttcatacaaacccagcttgcacccaaggtcacattcagagagcgtagggctgggatgggttgttttccaagcttctgccactgtgtggctagctcttcccactgggaagttctgtgtacccggaatgtcggagtggagtcctgttctagtgtccagcacctgaccctgtgcccaacccctcaacagcctattcctgctgtccacagcctgctggaactttttacaaaatatgttgccatgctggaccctgggcactggacataagccccctggcagcctttttcatgtcacccaaaggggtaattgtcctactggtggtctgtaagatgagttagggtgacttgctaatagacattgtaaatcttaatatttatgtatgtattttattattaccggttttccatttatgatggtaatattgtttcttctaagaatatttatttttccttctaaatattgagataaaattcatgcttttgaaatgttctattcagtggcttttagtatatttgctatgttgtgcaaccatcgacactatccatttctagaactttttcgtcatcccaaacagacgctctgtattcataaaaaaataacttcctacctgtctctccccctagtctttggtaacctttgttatactggtaaactttgttgtgctctctgtctgtgtgaatttgcctattctaggggcctcatataagtgtaatcatacagtatttgtctttttgggtctgtctgatttcacttagcgggttttcagggttcattcatgttgcagcatataacagtactgcgttcctttttctggctgaataatattccactgtatggatagaccccattttgtttattcacacatcatttggacatttggattatttctggtttttggctattatgaacaatggtgctatgaacagttgcgtacaagtttttgtgtgaacatatgttttcaattctctcattatatacctaggagtagaattactgggtcatatggtaactgtatatttttgaggaactgccaaactattttcccacgtccatgcaccatttcacattcccaccagtaagtaagagggttccaatttctgcgcattcttgccaacactagttattatctgactttctggttataatcattctaatgagtgtgaagtagcctctggtgtcatttggatttgcatttctctgatgagtgatgctatcaagcacctttgctggtgctgttggccatatgtgtatgttccctggagaagtgtctgtgctgagccttggcccactttttaattaggcgtttgtctttttattactgagttgtaagagttctttatatattctggattctagacccttatcagatacatggtttgcaaatattttctcccattctgtgggttgtgttttcactttatcgataatgtccttagacatataataaatttgtattttaaaagtgacttgatttggctgtgcaaggtggctcacgcttgtaatcccagcactttgggagactgaggtgggtggatcatatgaggaggctaggagttcgaggtcagcctggccagcatagcgaaaacttgtctctactaaaaatacaaaaattagtcaggcatggtggtgcacgtctgtaataccagcttctcaggaggctgaggcacgaggatcacttgaacccaggaggaggaggttgcagtgagctgagatcatgccagggcaacagaatgagactttgtttaaaaaaaaaaaaaa

SEQ ID NO: 4029 - protein, 14 aa, Homo sapien
MPGQQNETLFKKKK

SEQ ID NO: 4030 - DNA, 1911 bp, Homo sapien
gccagcgcaggggcttctgctgagggggcaggcggagcttgaggaaaccgcagataagtttttttctctttgaaagatagagattaatacaactacttaaaaaatatagtcaataggttactaagatattgcttagcgttaagtttttaacgtaattttaatagcttaagattttaagagaaaatatgaagacttagaagagtagcatgaggaaggaaaagataaaaggtttctaaaacatgacggaggttgagatgaagcttcttcatggagtaaaaaatgtatttaaaagaaaattgagagaaaggactacagagccccgaattaataccaatagaagggcaatgcttttagattaaaatgaaggtgacttaaacagcttaaagtttagtttaaaagttgtaggtgattaaaataatttgaaggcgatcttttaaaaagagattaaaccgaaggtgattaaaagaccttgaaatccatgacgcagggagaattgcgtcatttaaagcctagttaacgcatttactaaacgcagacgaaaatggaaagattaattgggagtggtaggatgaaacaatttggagaagatagaagtttgaagtggaaaactggaagacagaagtacgggaaggcgaagaaaagaatagagaagatagggaaattagaagactttagtgtcagtcaccaaagaaggcctggaacttccagaggatgaagaagagaaaaagaagcaggaagagaaaaaaacaaagtttgagaacctctgcaaaatcatgaaagacatattggagaaaaaaagttgaaaaggtggttgtgtcaaaccgattggtgacatctccatgctgtattgtcacaagcacatatggctggacagcaaacatggagagaatcatgaaagctcaagccctaagagacaactcaacaatgggttacatggcagcaaagaaacacctggagataaaccctgaccattccattattgagaccttaaggcaaaaggcagaggctgataagaacgacaagtctgtgaaggatctggtcatcttgctttatgaaactgcgctcctgtcttctggcttcagtctggaagatccccagacacatgctaacaggatctacaggatgatcaaacttggtctgggtattgatgaagatgaccctactgctgatgataccagtgctgctgtaactgaagaaatgccaccccttgaaggagatgacgacacatcacgcatggaagaagtagactaatctctggctgagggatgacttacctgttcagtactctacaattcctctgataatatattttcaaggatgtttttctttatttttgttaatattaaaaagtctgtatggcatgacaactactttaaggggaagataagatttctgtctactaagtgatgctgtgataccttaggcactaaagcagagctagtaatgctttttgagtttcatgttggtttattttcacagattggggtaacgtgcactgtaagacgtatgtaacatgatgttaactttgtgtggtctaaagtgtttagctgtcaagccggatgcctaagtagaccaaatcttgttattgaagtgttctgagctgtatcttgatgtttagaaaagtattcgttacatcttgtaggatctactttttgaacttttcattccctgtagttgacaattctgcatgtactagtcctctagaaataggttaaactgaagcaacttgatggaaggatctctccacagggcttgttttccaaagaaaagtattgtttggaggagcaaagttaaaagcctacctaagcatatcgtaaagctgttcaaaaataactcagacccagtcttgtggatggaaatgtagtgctcgagtcacattctgcttaaagttgtaacaaatacagatgagtt

SEQ ID NO: 4031 - DNA, 3562 bp, Homo sapien
cagaaccagaaggtgaagtcgggccccctaagatcaacggagaggcccagccgtggctgtccacatccacagaggggctcaagatccccatgactcctacatcctcttttgtgtctccgccaccacccactgcctcacctcattccaaccggaccacaccgcctgaagcggcccagaatggccagtcccccatggcagccctgatcttagtagcagacaatgcagggggcagtcatgcctcaaaagatgccaaccaggttcactccactaccaggaggaatagcaacagtccgccctctccgtcctctatgaaccaaagaaggctgggccccagagaggtggggggccagggagcaggcaacacaggaggactggagccagtgcaccctgccagcctcccggactcctctctggcaaccagtgccccgctgtgctgcaccctctgccacgagcggctggaggacacccattttgtgcagtgcccgtccgtcccttcgcacaagttctgcttcccttgctccagacaaagcatcaaacagcagggagctagtggagaggtctattgtcccagtggggaaaaatgccctcttgtgggctccaatgtcccctgggcctttatgcaaggggaaattgcaaccatccttgctggagatgtgaaagtgaaaaaagagagagactcgtgacttttccggtttcagaaaaacccaatgattacccttaattaaaactgcttgaattgtatatatatctccatatatatatatatccaagacaagggaaatgtagacttcataaacatggctgtataattttgattttttttgaatacattgtgtttctatattttttttgacgacaaaaggtatgtacttataaagacatttttttcttttgttaacgttattagcatatctttgtgctttattatcctggtgacagttaccgttctatgtaggctgtgacttgcgctgcttttttagagcacttggcaaatcagaaatgcttctagctgtatttgtatgcacttattttaaaaagaaaaaagccaaatacattttctgacattgtaagattgccttactgtctgtcattccttattgctggcccctttctcaggccggaggccaagtggtggagaaggaaaggaaatgatcgaacgggcatgttgtcaagtgggcatgccactgggaaataccaccagtttaccctgaaacattgtcctcagaggagtaggaaagtggattttgaatctctattttgctcaaaagttcagttcctgagatactgatgactgagagtgctgctgggaaattttcaggattgtgtggtcttttggggttttttgtttttttttttttaagacaaagttgaccgctgttcactgtccacgtgatcagttgtaagattacaatgctgcatgctagttggttacataagatacaattccagtgatggaaggcggttataatggatggtggtgtgtacaagatggcactgccatctttgagcagagcccagctctgcagcgccacttcatctttttaaacaccctagaggtctgtttgttgttgctgttgtcctttattttgaaagagttgcaagagaagttacagtccaggtgaacttggagattgtgggattggttttgtttctgttttgttttgtttatcatttacctgtagtgctattgctgttgatactatcacctataccctgtttctagtgagtgctgaatacagtatggtacaatgacagtaacagccgcgtggtgctgccaggactgcccttgggcatatcagtgacagcccaaatgtgggtggaggaaacctgtaatttccttcttaacatgtgtttgaaataccaagtgaataatactgttctggaaaaaaatgataaactagtggaaattaaagaaattaagggttttatataatagacaggccccacctctcaaaatatttttagaagtctttttgtaaactaatttcttttgatcactattttgcatcagtaaaatgatttttttaaaaccaataaatcatcaattattagaaatagttgtctcacagtgatactggtttttcttttgtgctgttatgatttaacattgacaggaacactattttaaatccttacgttcaggtgtttgtaacttggccttataattaggctgaattatggcttcaaggtctacaatttatgtgtatggttcacagcctagcttctatttacatttgaaaatacagatttttaccaactttggattcttttttagttatatgtttgtctttcctttttaaattgttcaaaactattttttaatggtcaagttactaacacttgaaaatcagatactgcaccaaatacagtgtttttccgtagtgtttttaatgagtgcacctattactactgtgcgagaattcatgttttaccagtcattgttatattacaaacagacttgcatgattaaccagttgttacacttactttttcaagttggagtatatatgactcagtgcagactggtctctcttatgtgaatgcacacatgcagaaatgcagagtcaattttacatgcccataaagacatttgtaaagaattcagctcttatggtctgttgtataaatgtgtatctaggcactttggaatttgacctcacagatgttacaacttgatcagtcgtttgacctaatttgtggtagctatctgtatgttttgcaatcttaatacagacatgctttccaaaaagattaatacagaaccatcctgccgttttggataagtctatccagctgtggaaagggcaacctgtggtttctctgtactggtgtttaatgggggaagaatatgaacagctttaaagagctgtgtattgtggttactactattaaaaaataagatctgcacgagtctgactggcctttgggtggcctttgtggacggctcgtagctggaaagtgttgatctgggttttctggcattcttttaagttaaaaagttaacatcgggacatgggtttgatcttttgttgtacctgatgacagtgcagagattctccacagctggataaaaatgtcacaaagctacttactgtacatgggcagtatcagatttcaaatcctaatatttcagctgtgcttttaatactcaaaatattaggggatggggtgttgaagctttcccttttttgcttttaacaatttatagaatttaacagatgtactgtctttcatgtggcctcacatttaaagttatgagaacatacacatggtttacaacttttactatatacctttccttggccaccaagtattttaaaagtgtgccaccttttaacctttactttttttaagttgaaggtgatactttttctatatatgatgaaactcatgtcaactgaagtgagtgtaatctcagataccaacattattatattttaaaatcacgctatggaaatatcacctgaattctgtcatttgtcagatttacagtacctttttttctttaacttttagcattaaataaaaataaaattgggagcactgaaaaaaaaaaaaaaaa

SEQ ID NO: 4032 - DNA, 1850 bp, Homo sapien
cgcgctcgcagctcgcaggcgccgcgtagccgtcgccaccgccgccagcccgtgcgccctcggcgcgtacccgccgcgctcccatccccgccgccggccaggggcgcgctcggccgccccggacagtgtcccgctgcggctccgcggcgatggccaccaagatcgacaaagaggcttgccgggcggcgtacaacctggtgcgcgacgacggctcggccgtcatctgggtgacttttaaatatgacggctccaccatcgtccccggcgagcagggagcggagtaccagcacttcatccagcagtgcacagatgacgtccggttgtttgccttcgtgcgcttcaccaccggggatgccatgagcaagaggtccaagtttgccctcatcacgtggatcggtgagaacgtcagcgggctgcagcgcgccaaaaccgggacggacaagaccctggtgaaggaggtcgtacagaatttcgctaaggagtttgtgatcagtgatcggaaggagctggaggaagatttcatcaagagcgagctgaagaaggcggggggagccaattacgacgcccagacggagtaaccccagcccccgccacaccaccccttgccaaagtcatctgcctgctccccgggggagaggaccgccggcctcagctactagcccaccagcccaccagggagaaaagaagccatgagaggcagcgcccgccaccctgtgtccacagcccccaccttcccgcttcccttagaaccctgccgtgtcctatctcatgacgctcatggaacctctttctttgatcttctttttcttttctccccctcttttttgttctaaagaaaagtcattttgatgcaaggtcctgcctgccatcagatccgaggtgcctcctgcagtgaccccttttcctggcatttctcttccacgcgacgaggtctgcctagtgagatctgcatgacctcacgttgctttccagagcccgggcctattttgccatctcagttttcctggaccctgcttcctgtgtaccactgaggggcagctgggccaggagctgtgcccggtgcctgcagccttcataagcacacacgtccattccctactaaggcccagacctcctggtatctgccccgggctccctcatcccacctccatccggagttgcctaagatgcatgtccagcataggcaggattgctcggtggtgagaaggttaggtccggctcagactgaataagaagagataaaatttgccttaaaacttacctggcagtggctttgctgcacggtctgaaaccacctgttcccaccctcttgaccgaaatttccttgtgacacagagaagggcaaaggtctgagcccagagttgacggagggagtatttcagggttcacttcaggggctcccaaagcgacaagatcgttagggagagaggcccagggtggggactgggaatttaaggagagctgggaacggatcccttaggttcaggaagcttctgtgtaagctgcgaggatggcttgggccgaagggttgctctgcccgccgcgctagctgtgagctgagcaaagccctgggctcacagcaccccaaaagcctgtggcttcagtcctgcgtctgcaccacacattcaaaaggatcgttttgttttgtttttaaagaaaggtgagattggcttggttcttcatgagcacatttgatatagctctttttctgtttttccttgctcatttcgttttggggaagaaatctgtactgtattgggattgtaaagaacatctctgcactcagacagtttacagaaataaatgttttttttgtttttcagaaaaaaaaaaaaaaaaaaaaaaaaaaa

SEQ ID NO: 4033 - protein, 142 aa, Homo sapien
MATKIDKEACRAAYNLVRDDGSAVIWVTFKYDGSTIVPGEQGAEYQHFIQQCTDDVRLFAFVRFTTGDAMSKRSKFALITWIGENVSGLQRAKTGTDKTLVKEVVQNFAKEFVISDRKELEEDFIKSELKKAGGANYDAQTE

SEQ ID NO: 4034 - DNA, 4301 bp, Homo sapien
gctgcgcgcacgcgaccgcatccgggctccttcggccccgccatgggctgctgcagctccgcttcctccgccgcgcagagctccaaacgagaatggaagccgctggaggaccgtagctgcacagacataccatggctgctgctcttcatcctcttctgcattgggatgggatttatttgtggcttttcaatagcaacaggtgcagcagcaagactagtgtcaggatacgacagctatggaaatatctgtgggcagaaaaatacaaagttggaagcaataccaaacagtggcatggaccacacccagcggaagtatgtattctttttggatccatgcaacctggacttgataaaccggaagattaagtctgtagcactgtgtgtagcagcgtgtccaaggcaagaactgaaaactctgagtgatgttcagaagtttgcagagataaatggttcagccctatgtagctacaacctaaagccttctgaatacactacatctccaaaatcttctgttctctgccccaaactaccagttccagcgagtgcacctattccattcttccatcgctgtgctcctgtgaacatttcctgctatgccaagtttgcagaggccctgatcacctttgtcagtgacaatagtgtcttacacaggctgattagtggagtaatgaccagcaaagaaattatattgggactttgcttgttatcactagttctatccatgattttgatggtgataatcaggtatatatcaagagtacttgtgtggatcttaacgattctggtcatactcggttcacttggaggcacaggtgtactatggtggctgtatgcaaagcaaagaaggtctcccaaagaaactgttactcctgagcagcttcagatagctgaagacaatcttcgggccctcctcatttatgccatttcagctacagtgttcacagtgatcttattcctgataatgttggttatgcgcaaacgtgttgctcttaccatcgccttgttccacgtagctggcaaggtcttcattcacttgccactgctagtcttccaacccttctggactttctttgctcttgtcttgttttgggtgtactggatcatgacacttctttttcttggcactaccggcagtcctgttcagaatgagcaaggctttgtggagttcaaaatttctgggcctctgcagtacatgtggtggtaccatgtggtgggcctgatttggatcagtgaatttattctagcatgtcagcagatgacagtggcaggagctgtggtaacatactattttactagggataaaaggaatttgccatttacacctattttggcatcagtaaatcgccttattcgttaccacctaggtacggtggcaaaaggatctttcattatcacattagtcaaaattccgcgaatgatccttatgtatattcacagtcagctcaaaggaaaggaaaatgcttgtgcacgatgtgtgctgaaatcttgcatttgttgcctttggtgtcttgaaaagtgcctaaattatttaaatcagaatgcatacacagccacagctatcaacagcaccaacttctgcacctcagcaaaggatgcctttgtcattctggtggagaatgctttgcgagtggctaccatcaacacagtaggagattttatgttattccttggcaaggtgctgatagtctgcagcacaggtttagctgggattatgctgctcaactaccagcaggactacacagtatgggtgctgcctctgatcatcgtctgcctctttgctttcctagtcgctcattgcttcctgtctatttatgaaatggtagtggatgtattattcttgtgttttgccattgatacaaaatacaatgatgggagccctggcagagaattctatatggataaagtgctgatggagtttgtggaaaacagtaggaaagcaatgaaagaagctggtaagggaggcgtcgctgattccagagagctaaagccgatggcttcgggagcaagttctgcttgaacctagccgacggttatggaaacccattgacattccaaaacaatatatacacacacacataaatcagccaaaatcagagaaaaggaacagggatttaataccttttttatgcttatttttgtcaaacatgtactcctttcatacgggtggcttttacaaggcaacttccgtcatttaatgttttcaactgtaattgtcttaatggaaatgttaaaattcatatctgattaacatttttaataacttagaggagattttaactttatttaaaaataggtaaaattattgtacctaattatgtctaaagtttattcaggggtaatttccctgatgtctgtataaaatcaagatcttattttactgatgcataagtcctagtgggtcaagactaggcatatgctttcagataaataaggaattactccaatcagttttccccaatcaaagaagccatgtcattttacttttagaaacatacaattgggcccaatatgggaattttcataatagttcatacatttgtcagccaacattaaaaggtaaccaactcctcaggtatttgtagtttaccctaacgcttctttaaaagaaagtaggtaaaaaaagaaaagggtagataatctttcgtatgcaaacttttcccttatattttgtctttctttcctttttgactttagtagcatcctccacacatttgtgtgcctgatttgaaaggaagctggggcacccagcgagtttagcctttaagtttctgtgtattgatttgcagattaagtaatgctgagaggaataaagaagggacagaaacatggaacataaagcattgaaaattccggtgcttgggcttcggcttcagagtaacgtcagtggcttagggttaaacggccattttattcaaatgcttgctatacaatctgaaaacacactggcaggtgctcctctccttggcaattcattgagtatccagagttctacgatgtttaactgaagaattggctaatgttttgatcctccagtgtgactgttgtttttgtttgggggtgggtttggggttttttgcttttttattcctgaagcttaccagatatgaatggctaatactccattgttctgcttgttgtaatggtgaatgctttaagaaaaaaaagtgtaatttgctaagaataattcatgatctgtttatgcgataactcctttttgttacaatttttttaaaaaaagctatttttgttaatgtaaagtaaatatttcagagcaaattttttaaacttattgcactaaatacaggctctgtacaaaaaaaaaaaaaaaaaagcctcagcattttatcattccatggaaggagaatcttttgaaagaaagcattgcctcctaccagaactagacagtgaattagatcggtattatggaaatgcatacaagtaatgtcactagggcttaataagcagccgtttgctaatgtgcttcctttcaaagggttggacctttaaattgctgcaaaaggtaaattgtatttttttttaagtattggtgttctttactctagctaggctaaaatttgctaaatgccttggtttcttttaaaagttcatgtaatatttctgatttttcagaatatttgcaataagagtctggattttaaaaaacacatgcatacacacaattaagagctcatgtcttagcaagatctgggaaaccaacattgcgagagtagctattttgaaagaataattctccagaagttaacatctaatatctagtatcaccaaacagtatcgctgttctcttttattcatttgaaatgaatataattatataactaacaattgtccaaatagatgagagagcaaatcatgtgagaaaattcagaataccatctgtttcatagccgcacagattttggactttcacaaacattgggaactaaatttagaattggcaaaagtctagaagatgggtatcaaaacagaagacattccaggagctagcaattttaagaggtgtccctccaaagtgacctgatggaagtcctgaacttggaaattaggttctactcacttggacatccctgcatcatggactgttgctgctccctgttccatatgctcgcaatctcagctatttggaagctaccaggaatgctttctaattatcatttgcaactagaactgtaatcagaaagaaattttgtatttttgtataacttgattgtgtgccattttatataacaggtcctgttttacaaataaattttgttttactaaaaaaaaaaaaaaaaaaaaaaa

SEQ ID NO: 4035 - protein, 657 aa, Homo sapien
MGCCSSASSAAQSSKREWKPLEDRSCTDIPWLLLFILFCIGMGFICGFSIATGAAARLVSGYDSYGNICGQKNTKLEAIPNSGMDHTQRKYVFFLDPCNLDLINRKIKSVALCVAACPRQELKTLSDVQKFAEINGSALCSYNLKPSEYTTSPKSSVLCPKLPVPASAPIPFFHRCAPVNISCYAKFAEALITFVSDNSVLHRLISGVMTSKEIILGLCLLSLVLSMILMVIIRYISRVLVWILTILVILGSLGGTGVLWWLYAKQRRSPKETVTPEQLQIAEDNLRALLIYAISATVFTVILFLIMLVMRKRVALTIALFHVAGKVFIHLPLLVFQPFWTFFALVLFWVYWIMTLLFLGTTGSPVQNEQGFVEFKISGPLQYMWWYHVVGLIWISEFILACQQMTVAGAVVTYYFTRDKRNLPFTPILASVNRLIRYHLGTVAKGSFIITLVKIPRMILMYIHSQLKGKENACARCVLKSCICCLWCLEKCLNYLNQNAYTATAINSTNFCTSAKDAFVILVENALRVATINTVGDFMLFLGKVLIVCSTGLAGIMLLNYQQDYTVWVLPLIIVCLFAFLVAHCFLSIYEMVVDVLFLCFAIDTKYNDGSPGREFYMDKVLMEFVENSRKAMKEAGKGGVADSRELKPMASGASSA

SEQ ID NO: 4036 - DNA, 963 bp, Homo sapien
  Unsure 947, 953: Unknown base
gggggtttttttcgaggtcggccgcgtggctggaagacatggccactccagtcggtgttgagcacggcgagcagtctcaggcctttagtgatgatgattaaaggtggtggctgtggccttgaaaacagtcatgtgaaaactcatcaccttaaggtgttaagtgtaaggatcttcatgatgaaatttctgtaaatggtgcagtcagcctcagtttccaaagccggaaaaggatcctctagtagccacggtgtggcagctgctctgaaccaggacctggacccggacccaaagtgccatgtctttaatgttagctcccagcgatgccagatgggatcagcacagccctgcctctgctgctaattgttcctctaaagtaatcgccatgcgttcttcgggcttcatctttaaaggaatgaagcaactgagattattctggaaaaccttttggcagttagtgaaattagagtacaactaagaacattttcagacctccactgtggatgacctgggtataatctcacaaatcgatgggactgcaaggattgtaaactgaaatgaacatgattatactctgttggaagagcctaagaggaaactgatgccatgagtttcagagagtaatgcttaaccccagttacacaggatgccgtcttgtgtttcctcttgtttagttacccactacagtgattttgtgatctgctaatgggttgccacccacaaccattgctttagcacttttacttcaaatcaatgaaggattgataaaagttctcctggtgtctccgcagagtgccttccaggaacagatctttgcatagaatatcagtggtttccttttttgtttcaaatagtggtcagaaaatacccagtgttgactcaccaaggcaatcagcttcctttttccctttttttgtttttttttaacattttatatttttgctttattntatttnattttatttt

SEQ ID NO: 4037 - protein, 63 aa, Homo sapien [sequence omitted]

SEQ ID NO: 4038 - DNA, 2891 bp, Homo sapien
cgttttttaattttaaagttggggggggtctcaatttgttaccctgctggtctcgaactcccggacttaagcgatcctctggctccaagcccactaccagtctcaggtttctttactaaaagatcactacctttttttctcttatctgctgccatgtgagatgtggctttcaccttccgccatgattgtgaggccttcccagccacgtagaactgtaagtccaataaacctcttttgtaaattaaaaaaaaaaaatcactatttaagatactaggatggattgtgactgttgaggagtacttacatatcctacatttgactacattatttccaaaccaagtattccatccaaaggaacatactgctatcatagagaccaaggagggactgtttaaggttgccaaggtgaagcgagctgagaggctttgtcctcgtgccagtaactctgaaatctctcttaattcctgctgtccaggcagcagaatgccatggtttccccaagtaggtagctgctttagcagttaaagcccaaatgtctgttctgttgatcagaggtctctgaatttctgaagtggtgtttcgtttctggtgactgagttaatcctttacaatccctcttgtaaagtgtgctaatagaaagaatccacctttcaaagctgcagaaccagaccgtgccctaaattgaccaacgtagctgatgtgcctcaggaagtctcttgccagctgtccctgtgaagacccccctcctcccccccagctgctgccttgcacactgaagcatctcagactgtgcaaagccgtgtagtcatcaagacagtaaatcccagggcttggttaagtgctgtgtgataacttgtttggatgagacttaacttaaaaccacttacaataaacttgggaaactaccgtcagctgagttcaaatttactgacgccatgatatgaggatgaaggtttattacctggtgacatcatcctgttggtgacatcatcctgttggtgacaaggtggtgatacatctctaatgggacttccctcagtggcaggcaggctgccaagcaactaacccccatcaagtgccagaccctcccagtgttctgagagtcatctccatgctaaacagcctgcgttttatatgatttctctacccagccaaaaaaaaaaatggtccatcatgtacgcagttatctagtcttaagttatattctggcttttttctcccactttattatggagcagaagtaagcctatcatgttcttagaaaggctcttaagaggtgtcctggagtccttgaatcactttagcatctggggtaggatgtgccaccaggaggatttgggctggagcgtgtgtgtttgcctttgacctggactgctgtctgatcttgctgaacactccaccgacatttcctaaagttgctcagtgccaatccagcaaagcagtccattttcccttggccaagattgagatgtattgttttagatacagaagagttcttggatgagccaaggacaagctggggtgtcctatattgaacagacctcgatgaaaatcttgaattcaccccagtgccctctgttggcaagggaaggtgaagattgaaaagttaaaaaagcttttggccacttgagaggatcagggccgcaactcttgaagaagcaaagggctcagtgcattggggtcagcgctggtacagctgaaggatgccggccttgtgcaggtccctccacagggcagcttccagggacagatcgtggtttgcataaaatatcaatggcttcatttttcgttcgaaatagtggtcggaaaatttccagtagttgcttgtgatgaatccataggcactgacctggtcacaggtatgcaaagctgtcagcagcatgagagccccggtactaggcatatataggtctccaaaatgtgtgttaatcaactttgatttcaagaacctttctgtcaggtagctgatgaagtccggatgtagcagcttgaatttactggcagaggcttctggtccaaaataggcgtgcggcctgtcccctttatctaggccctcagggacaggcacgcccagaatggccgatctcagcatcacatagtcgcggatgtctgaggggatgaagatatactgcaggtcctgtccttgtggcacggaggtgaagcccagattccagtaggagacgagggagttcttcatcgtgttcacagtgaaaccatagaaggaagtcttggtgcccacatcgcgctcgaagcctttgatcacagctccattgagtctgaatacatagtcatgggcatcgatgttgggaccctggcgggacccattcagaatgcctccgttgcccaccacggcacaccggatacactttggaggggtgtccctgggcggggcaaacagcttggcactctctgagccgttcagaaggctcagggtggaggcgatgacttggtgagagagcccccgccagccatacggggctttgtgttggctcaggcggtcccagagcgctggggtgaagaggtccccccacagcagcactggaatggagagattgaacaggccacggaagtgggggtgccgctgaatggccaggtgaagcaggtgtcggcaggcctggccctttcctgtccaagaattcgatgccttggattgaaagaatgcttcaaatgatgtggtgtccctggctccggccgctggccccgggtaccgctgcaccgccgagaagtacagggcaaagaggagccccgagcaggcagccgtgagcaggagcagcagccagaagaacgacccgcgcgggagccccatacagccccggcccgcgagcgccccgtccgactgacgtcccaggcagaagggagagaaccgggtgggccgggtggcacttgcggag

SEQ ID NO: 4039 - protein, 52 aa, Homo sapien
RFLILKLGGVSICYPAGLELPDLSDPLAPSPLPVSGFFTKRSLPFFLLSAAM

SEQ ID NO: 4040 - DNA, 1990 bp, Homo sapien
atttttcggtttctagggttgttacgaagctgcaggagcgagatggaggtggacgcaccgggtgttgatggtcgagatggtctccgggagcggcgaggctttagcgagggagggaggcagaacttcgatgtgaggcctcagtctggggcaaatgggcttcccaaacactcctactggttggacctctggcttttcatccttttcgatgtggtggtgtttctctttgtgtattttttgccatgacttgttcgctgatatctaaattaagaagttggttcttgagtgaattctgaaaatggctacaaacttcttgaataaagaagacaggactctcaatagaagaatttcacatctccaagggacccttcctttcattttacactttgttactaatttgcagaactctattaattgggtaggatttcacccattcctagctaagttcttaaaattaaaccctttggttcgtgtttaaaaactttcaaacatctgatggctttacaggggctgaatataaaagcatttgtacttaaaggtcttgtgtattcattaagaaatatagtaatgtcttttaatgttttaagagttgatcagggtttactatgatgcaagtaataggatgattaataagggaaggtttttgtgaattcaaaagtcaattattcaaaagcagggaaagattttgagagagggaacaaagtattcttagattgcgtagaagctgctaggttccagttttaatttttaggtttagttggactctgttatgaaaagataggttatgggtgggcgacaggttgatacagtcttagagaaagcaggtaatatcaaagtattggaaagctagcatgcatgccctcttacctgggtatcttcccccttttttccttttaaactcttgagcctcctataacgaaggattatgtgtttcaaacctatttttttttttactgtttcattaagtgtgcttgtgcccaaaatatttacttgtataatatctgtaacttgcttaaatacttcagcaaagtcagcatatttactcattcaacaaatatttgagccaggcattattttagacacagcagtgaacaaaacaaaaaggcattcttgccttcatggagcttacattcttattgttatttaaatctaaatgttataaaacaagaatttatattctagggttgatcagctagtatttaatcaaaaaggccacactcccatagcagctactctaagctgtagtagctaataaaaaatattaatgttggccgggcacagtggctcacgcctataatcccagcactttgggaggccaagggtggtagatcacttgaggtcaagagttgtgacaccagcctggccaacctggtgaaaccctatctctattaaaaaatacaaaaaaatacaaaaaaattagctgggcatgttggcatgcacctgtagtcccagctatttgggaggctgaggcacgagaattgcttgaatccgggaggtggaggttgcagtgagccaagatggggccactgcactctaacgtgggcaacagagaccctgtctcaaaaagaaaatattcctgttagccctaaaggctttacatgaggaatggtagaagtggtcttttgtttaaattagttgcattcagcatatatgaattgtcttaaatattttggggatactcccccgccttttaaacagggcataagatctggtaaactctctgtatatcttcctacctttcaaaatcgttcttagggttagtcaagtctggaatataattgctgactataaagttagcaattatgcttttaaggtgttgtcacatcaacctaaagagaaccatctatggaaggtatggttgaaacatctgtaggaacacagaactgggatttcactgagtttaccaaatcaactgtgtgaactgtttctgcactgcttgctaatggtttcatctaataaatgtttacttatataaaaaaaaaaaaaaaaaaaa

SEQ ID NO: 4041 - DNA, 1469 bp, Homo sapien
ggggggccggactccgctcagtttccggtgcggcgaacaccaaagtccgggaacttaagcattttcggtttctagggttgttacgaagctgcaggagcgagatggaggtggacgcaccgggtgttgatggtcgagatggtctccgggagcagcgaggctttagcgagggagggaggcagaacttcgatgtgaggcctcagtctggggcaaatgggcttcccaaacactcctactggttggacctctggcttttcatccttttcgatgtggtggtgtttctctttgtgtattttttgccatgacttgttcgctgatatctaaattaagaagttggttcttgagtgaattctgaaaatggctacaaacttcttgaataaagaagacaggactctcaatagaagaattccacatctccaagggacccttcctttcattttacactttgttactaatttgcagaactctattaattgggtaggatttcacccattcctagctaagttcttaaaattaaaccctttggttcgtgtttaaaaactttcaaacatctgatggctttacaggggctgaatataaaagcatttgtacttaaaggtcttgtgtattcattaagaaatatagtaatgtcttttaatgttttaagagttgatcagggtttactatgatgcaagtaataggatgattaataagggaaggtttttatgaattcaaaagtcaattattcaaaagcagggaaagattttgagagagggaacaaagtattcttagattgcgtagaagctgctaggttccagttttaatttttaggtttagttggactctgttatgaaaagataggttatgggtgggcgacaggttgatacagtcttagaaaaagcaggtaatatcaaagtattggaaagctagcatgcatgccctcttacctgggtatcttcccccttttttccttttaaactcttgagcctcctataacgaaggattatgtgtttcaaacctatttttttttactgtttcattaagtgtgcttgtgcccaaaatatttacttgtataatatctgtaacttgcttaaatacttcagcaaagtcagcatatttactcattcaacaaatatttgagccaggcattattttagacacagcagtgaacaaaacaaaaaggcattcttgccttcatggagcttacattcttattgttatttaaatctaaatgttataaaacaagaatttatattctagggttgatcagctagtatttaatcaaaaaggccacactcccatagcagctactctaagctgtagtagctaataaaaaatattaatgttggccgggcacagtggctcacgcctataatcccagcactttgggaggccaagggtggtagatcacttgaggtcaagagttgtgacaccagcctggccaacctggtgaaaccctatctctagtaaaaaaaaaaaaaaaaaaaaaaaaa

SEQ ID NO: 4042 - protein, 66 aa, Homo sapien
MEVDAPGVDGRDGLREQRGFSEGGRQNFDVRPQSGANGLPKHSYWLDLWLFILFDVVVFLFVYFLP

SEQ ID NO: 4043 - DNA, 806 bp, Homo sapien
gtgtgtggacacgctgttcctctgcttctgtgaggacctggaaaggaatgacggctctcaggagcgaccctacttcatgtcgcccgagctgagagacatcctgttgaaggggagtgcggaggaggggaagcgggcagaagccgaggagtagagatggaggacctggagaggaatgacggctcggccgagaggccttacttcatgtcttccaccctcaagaaactcttgaacaagaccaacaagaaggcagcggagtcctgaaggccccgtgctccccacctctcaaggagtctcatgccgcagggtgctcagtagctgggtctgttcccccagccccttgggctcacctgaagtcctatcactgccgctctgcccctccccatgagccagatcccaccagtttctggacgtggagagtctggggcatctccttcttatgccaaggggcgcttggagttttcatggctgcccctccagactgcgagaaacaagtaaaaacccattggggcctcttgatgtctgggatggcacgtggcccgacctccacaagctccctcatgcttcctgtcccccgcttacacgacaacgggccagaccacaggaaggacggtgtttgtgtctgagggagctgctggccacagtgaacacccacgtttattcctgcctgctccggccaggactgaaccccttctccacacctgaacagttggctcaagggccaccagaagcatttctttattattattattttttaacctggacatgcattaaagggtctattagctttcaaaaaaaaaaaaaaaaaa

SEQ ID NO: 4044 - protein, 122 aa, Homo sapien [sequence omitted]

SEQ ID NO: 4045 - DNA, 2203 bp, Homo sapien
ctgccttacccctgttttagcctgggaaccagtaattgtgaactcaccaggttaacatgaagagggcatgagagcttattccataaggaattgtctgagacatttggttaccttttcttagtttgtccattagcaaccgtaactaaaatagttttggctgtttgggataattagctaattgaatgattttttgattcaggagcagcttgttgctatataccattgaaaagccttcagagctgagaggttagttgatattttttgttccttacagcttatgccaccaagtaggcagtttctatgatgaatcaaactagctcactatgaccgacagtgaaaatacatgaacacctgagaaactggagaacgcagggagtggggggtaaccatgtctgaggaatctttcacccacagctttgtttttctctaggtactactaaccaataacctgcttggctcaaaggtgagtaatttcacggtattcaatgcactcagtatatagggtaggaaaaagtgcctttttaggcctgtgtttgtgatgacttacatggaatctcgttcggctgatgacttgctgttgagactctgaaatctgattttctgagaatgatgggtgggaacaacataatgcgggatatgagaagcactactgacttggtcttcctcctttcagggccagcaccttctctctaaagcccaagaggagtttgaggtaaatggctttgcaatagttaccatcaatggctgctatataaaattttctgtgatttttgtgtgtgatagcactgtggtctgggtgaatgtacacagacataactggcttaacccaaagtctttgatctcctgaaccaccagtgatgaattgctgctcaccagtgatgagttgaataccgccccagtctgatcaatgtgtgactgaaaggtattttctgagctgtgagcctgccttccagtgacatgttctaaaaattgcaagttatttgaggaggctttacagccaataggaagttcttgggctaagtagtgtttcctataaaatgtgccctgaaacttctttctgccaagcaatagatacaattgagagattgtaaaatgtgacatagaatgaaagtctctcaagactacatttttctttcttgattttgcaggaaaactaggtgtctgtgttcactccaggctgaagttacaggtgagtaaacctaaatgtaaggtggactatgctaaaaattcccaatgaagaaactttcacatgtcttactctctgtcctagtcccagagcctgtaaaggtgaacccactgggactggctgggggagaagaggaagatttgttccagaaggaactgtctgagggatgataaagatttctatacagagaaagggagtaatcatcacttgttgaaaacattggttttattttttccaggtctgagcaaataaggtgtataaaaaatggaatctgtcttggaggacatcagaaggtgaattttccaagttcttggacaacctagctgttgaaaagctttctgggtttggggggtatttcagatgtaccttaaagtgttagcagacacagattaagacactgggagccaatgaaacagcagttgagggtttgctgtgtatcacatttctgtattttatcacccccttcctgcaacattatttatctggaatctacctgcccttttgttttttagatatcaagggcttggttttgttacccaggctggtttcaaggccatagctttaagtagatcctctcaccacagatttgccaaagtgctgggattgcaggtgtgattcatggcacccagactttgctgcctttcttacatgatccaggcccagaacccaaactcaggcactgtatagatgaccactttcgtaaactactgacctagcttgttgccaattgttgattgaacttcccataactccacttcgtgtctgttcctctgtatacagccaccttctgttcctgtcatgagcctttaggtctccatttgcatattgcaaatactatgttccatgtaggtagctcattcagggccttgctcttcacttcaaaaaaggttcccttgaggactggctgtcaatttgtgttgctgtgttggttgttgatgaaaataataaaatgattgattacgtccaaaaaaatctatgtcggtgcggagaaagaggtaatgaaatggcaggaattcg

SEQ ID NO: 4046 - protein, 19 aa, Homo sapien
LPYPCFSLGTSNCELTRLT

SEQ ID NO: 4047 - DNA, 753 bp, Homo sapien
attttccgggaagatggcggcgcacaagtcaggtccggcacatgtttccgcggagcggacccagcaatgacggatgatatcacctcttcttctctggtgagagtctgaggatagagacttttttctcaccatgaatgtcaccccagaggtcaagagtcgtgggatgaagtttgctgaggagcagctgctaaagcatggatggactcaaggcaaaggcctcggccggaaggagaatggtatcactcaggctctcagggtgacactgaagcaagacactcatggggtaggacatgaccctgccaaggagttcacaaaccactggtggaatgagctcttcaacaagactgcggccaacttggtagtggaaactgggcaggatggagtacagataaggagcctttctaaggagaccacccgttataatcatcccaagcccaacttgctgtatcagaagtttgtgaagatggccacattgacttcaggtggagagaagccaaacaaagacttggagagctgcagtgatgacgacaaccaggggtccaagtccccaaagattctgactgatgagatgctgctccaagcctgtgaggggcgaacagcacacaaggctgcccgtcttgggatcacaatgaaggccaagcttgctcgcctagaggcccaggagcaggccttcctggctcgtctcaaaggccaggaccctggggcccctcaactgcagtcagagagcaagccccccaaaaaaaaaaaaaaaaa

SEQ ID NO: 4048 - protein, 207 aa, Homo sapien
MNVTPEVKSRGMKFAEEQLLKHGWTQGKGLGRKENGITQALRVTLKQDTHGVGHDPAKEFTNHWWNELFNKTAANLVVETGQDGVQIRSLSKETTRYNHPKPNLLYQKFVKMATLTSGGEKPNKDLESCSDDDNQGSKSPKILTDEMLLQACEGRTAHKAARLGITMKAKLARLEAQEQAFLARLKGQDPGAPQLQSESKPPKKKKK

SEQ ID NO: 4049 - DNA, 3703 bp, Homo sapien
gctgctcaaggattgcagtgtatgaggcaagtggaacagcctcggaacctccgaaaatgggcacgctccaggtcccagtttctatggtcaaccataccggcaaatggggctccgcaatggtttctcctggaaaaaccgtgattttggttcccgcggacgtctctatggtttcgcacagcctagaaggaacaagaacggcatttccgggaagatggcggcgcacaagtcaggtccggcacatgtttccgcggagcggacccagcaatgacggatgatatcacctcttcttctctggtgagagtctgaggatagagacttttttctcaccatgaatgtcaccccagaggtcaagagtcgtgggatgaagtttgctgaggagcagctgctaaagcatggatggactcaaggcaaaggcctcggccggaaggagaatggtatcactcaggctctcagggtgacactgaagcaagacactcatggggtaggacatgaccctgccaaggagttcacaaaccactggtggaatgagctcttcaacaagactgcggccaacttggtagtggaaactgggcaggatggagtacagataaggagcctttctaaggagaccacccgttataatcatcccaagcccaacttgctgtatcagaagtttgtgaagatggctacattgacttcaggtggagagaagccaaacaaagacttggagagctgcagtgatgacgacaaccaggggtccaagtccccaaagattctgactgatgagatgctgctccaagcctgtgaggggcgaacagcacacaaggctgcccgtcttgggatcacaatgaaggccaagcttgctcgcctagaggcccaggagcaggccttcctggctcgtctcaaaggccaggaccctggggcccctcaactgcagtcagagagcaagccccccaaaaaaaagaacaaagaaaaggaggcagaaagaggaggaagaagctacagcatctgaaaggaatgatgcagatgagaagcacccagaacatgctgagcagaacatcagaaaaagcaagaagaagaaaaggcgacatcaagaaggaaaggtctcagatgaaagagagggtacaactaaagggaatgagaaggaggacgctgcaggaacaagtgggcttggggaattgaatagcagagagcaaaccaatcagtccctcaggaaagggaagaaaaagaagaggtggcaccatgaagaggagaagatgggggtcttggaggaaggaggaaaaggcaaggaggctgcaggcagtgtcaggacagaggaggtagagagcagggcatatgctgacccatgcagccgaagaaagaagaggcagcaacaggaggaggaggacttgaacctagaagatagaggtgaggaaactgttttaggtggtggaaccagggaagcagagagcagagcatgcagtgatggaagaagcaggaaaagcaagaagaaaagacagcagcatcaagaggaggaggacatcttggatgtaagggatgagaaggatagcggggctagggaagcagagagcagagcacacactggctcaagcagcagaggtaagaggaagaggcagcagcatcccaagaaggaaagagctggagtcagcactgtccagaaagccaaaaagaaacagaagaagagagactaaaggtctggtaaaggtagggctcaattgattgattttcaggagttgaagcctcaaagaccagggttgatgcaggtctgcaggtcttctgcacccccctcaatgaggagtccctcccagaaaggaaactgatctctgggatgtcagctgctgagaggagcaagcggtagtaccaccccttagttgagggagtcagcacagtcctttctgcagcttctaacccaggaccatgaactcaggtgcctagagaagccaggcagctaaaggacaaggaatgctgggggctgtgggaacaggaatgcagataccctttgaaggagcattcctgctaaaagaagctgaaaatgtagacctatgtgaagtgctctgatttctaaatattgtgaaggttaagaaaaacataaatttaggtctatgggctagatttagcccacagttgccagtttctagcgctaccaaatgaatgaataaacatgagcttgcgctcctagcctagagataaatcctgactggcatctctgttcccagcctgggaaggtcctgaatacaaattagaagatattccttggaggcctttgaagaaattccttcggttaacctctttgtagtcttgctacactgataagtagaagtagctccctgtctgtgtcccaaatgaataagaattgtgtaaaggacagcacaactcacttggcatctaacagtccattttcattgtttccaaataccatagcaacctcttgccctttgtgttacccctagagagatggcacccaatccccagggttgctctctgacttccaccattcactgacttttattgccagaggagctcccaggaatccacagttctggaagagaggggctctaagtctttattggggagaatacccacccaccttccctcactgcagacgatagacacactcagtgtcagggtagggtggcaggttcagctggtacttcttttccagagcaggtggcacaaaacgaccccccaggtaatggtagcgaccggtaaactgggttgcagattttttgggggctgtgagggagatgagcaagtctggctggatccctccagcatttcccttctccacgtcccatccttctggatcccagcacctgagggaatgtcgatgctggcaatgggcacagtgagtcccttcaggacactcaggatgctgtggaacggttcccgaacatcgcccttgaagctgaagccaaagatggcatccaccaccagctcatacagttcatcaatcgtcatgggctctgcgggcatttccccaaggaaagggatgtccattttctgacactgggtcaccaatgcagtgaagaggggcttgttaggccttttggggtaatagatggttggctcgtagccaaagagtttgaggtgtcgagcacagaccagaccatctcctccattattccccgggccacagatgaccaggacagtaggggggctcctggacatggacgtggggggatatgccttggcgatggctgtagcacagctcagcccggccagttccataagttggtccacgctgaactggtattcgttaaatagctcctggtccacggcctgggcctcctcctggctcaggtacttcaccaccgtgctcgccatgacctctgagtcccagcggccacccgagttcagccgctgcggtccccaccaggtgggtcccgagcgacaggcgatggtctggcttttgatccgcggcaggcgcgagcccgcaaccagcagcccgaggcccagcagcgcccgcagcctggacatccagctcgcagagcgcgcgcccttcattctgtcttgtatcggtcaatcgaccgattttctccctgcctagttccagaagggatttagtggccacttaacaaatatgcaagcaacgttgcaaggaatatctgttaaaaataagaaaaagtgagtggcaggaaaataaaagagccaggagtggcacatgttatgaagatgtaccttgtgagacgtggacgtaagttggactccaggctttgctgcagcc

SEQ ID NO: 4050 - protein, 90 aa, Homo sapien [sequence omitted]

SEQ ID NO: 4051 - DNA, 1847 bp, Homo sapien
agaaacgcgcgcagcgggggcgggaggtcggtaagctccccgcccctgcccgagaccccgccccggcccggccccgcctttttctctgcctcccctccctgcacgtacgggccccgcccctcgcgcgacgttttttgttgacccggaaacggattctccggagccgaggtccgctcggatttgtcttcttagtgcttggatggtgtgagtgaaaacccagaggaatacatttggtggctgagctagtacaatgccatcaccggattccatgaccttcgaggatatcattgtagacttcactcaagaagagtgggccctgctggacacatcccagagaaagctgtttcaagatgtgatgttggagaacatcagtcatctggtctctattggcaaacagctctgcaaatcagttgtgctttcccaattggagcaagtagagaaactttcaacacaaagaataagcttactgcaaagtgagctctaagaagcagtgcttcaataggaggaggagaaacatggccagtgagtagagaagttggcattaaacatcaagagataccattcattcaacatatctatcagaagggcacgtccaccatcagcacaatgagatctcatactcaagaggatccttttctatgcaatgacttaggagaagatttcactcaacatatagcattgactcaaaatgtgattacctacatgagaacgaaacactttgtaagcaaaaagtttgggaaaatcttcagtgactggttatcctttaatcaacacaaggaaattcacaccaaatgtaaatcatatggaagtcatctatttgattatgcctttatccaaaactctgcccttagaccacacagtgtgactcacactagagagataacattggaatgtcgtgtgtgtgggaaaacctttagcaaaaattctaatcttaggcgacatgagatgattcacactggagagaaaccacacggatgtcatctatgtgggaaagcctttactcatttaattattgtgaatacctagaatctttcttggtcctgatttctcttgcttaatccagtctttatctctaactgccccttatttgatcaccatgtactaggagctctgatagccagctcagctcctaatccttgaggcaacattctttttctatttgaacttcagttctgtccttgaatcccgactagatatttcttgccctctggtctcagaattctcttggcttttattccttgatccacttgccagttttatcactttacccttgttcctcatggcttcccatcaagccatgggtattaggtgacagtgtaatttattagattctggttttgcccaaatactgggcatgctttaataataactgaaccatttcattatttggataggcatgggtaccttatcaagcagattaaaaggatatggtacccgtcctttagaaaagaacagctaaaaccttgttgtggattatggatttagcctaaagaaaaataatctggcataaattaagagtaagagagaagattaatagaaatttcacttcacataacttaaaacatggctatttcaataaaggactaaagtttctcctggatcccagaattcaacctgtatttataaatgtataatgtatttagctactttttggtttaaatgaacttgttgggttagcttggtaaatgttataatttttactattttctacaaagaaaatattttctaatttaagttggagctatctgtgcagcagtttctctacagttgtgcataaatgtttttactataaaatgagctaatgtataaaatactgctgtataccataataaagatagtaatacttg

SEQ ID NO: 4052 - protein, 139 aa, Homo sapien
MRSHTQEDPFLCNDLGEDFTQHIALTQNVITYMRTKHFVSKKFGKIFSDWLSFNQHKEIHTKCKSYGSHLFDYAFIQNSALRPHSVTHTREITLECRVCGKTFSKNSNLRRHEMIHTGEKPHGCHLCGKAFTHLIIVNT

SEQ ID NO: 4053 - DNA, 4816 bp, Homo sapien
gcgggcggccgagcggagccgagcgcagccgagccgggccgagccgggccgggccgggcccaggagcgcgcggatgatgcgggcggccaggcgggggtcgacgggtccctgaagcccgcgccccgggccagcaagggagccccgcgcaggccgcgcgcatccggaggcggccgggccccgccatggccggggtcagctacgcggcgccctggtgggtgagcctcctgcaccggctgccccacttcgacctgagctgggaggccactagcagccagttccggcccgaggacaccgactaccagcaggccctgctgctcctgggggccgccgccctggcctgcctcgccctggacctcctcttcctgctcttctactccttctggctgtgctgccggcggcgcaagagcgaggagcacctggacgccgactgctgctgcacggcctggtgtgtcatcatcgccacgctggtgtgcagcgccggcatcgcagtgggattctacggcaacggggagaccagtgatggcatccatagggccacctactcgctccgccacgccaaccgcacggtggccggggtccaggaccgcgtgtgggacacggcggtggggctgaaccacacggcggagcccagcctgcagaccctggagcggcagctggccgggcggcccgagcccctgcgagccgtacagaggctgcagggcctgctggagacgctgctgggctacacggccgccatccccttttggaggaacacggcggtgtcgctggaggtgctggcggagcaggtggatctctacgactggtacaggtggctgggctacctgggcctgctgctgctggacgtcatcatctgcctcctggtgctggttggcctcatccgcagctccaagggcatcctggtgggggtctgcctgctgggagtcctggccctggtcatcagctggggcgcgctgggcttggagctggctgtgtccgtgggctccagcgacttctgtgtggaccctgacgcctacgtgaccaaaatggtggaggagtactcggtgctgagtggggacatcctgcagtactacctggcctgctcgccccgcgccgccaaccccttccagcagaagctgtcgggcagccacaaggcactggtggagatgcaggatgtcgtggctgagcttctgaggaccgtcccctgggagcagccggccactaaggaccccctcctccgcgtccaggaggtgctgaatggcacggaggtgaacctgcagcacctcaccgccctggtggactgccgcagcctgcatctggactacgtgcaagcgctgaccggcttctgctatgacggcgtggagggcctcatctacctggccctcttctccttcgtcacagccctcatgttcagctccatcgtctgcagcgtcccgcacacctggcagcaaaagagaggccctgatgaggacggggaggaggaggccgctccagggccgcggcaggcgcacgacagcctctaccgcgtccacatgcccagcctgtacagctgtggcagcagctacggcagtgagaccagcatcccggccgcggcccacaccgtcagcaacgccccggtcactgagtacatgagccagaacgctaatttccagaacccccgctgtgagaacaccccactcattgggcgcgagtccccgccgccctcatacacctccagcatgagagccaaatacctcgccacgagccagcctcgccctgactccagcggcagccactagaccgcgcccggcagccacccaccccacgtgccaacttcccctccccgtgccagcactgccgcttccacctgggccacccaccggaccctcgcacgccgtgccaggcctgccccagacgcgtctgcaggccgcttgccctcctgtcccctccccgcaggggcacagtggagacgcaggggctctgggcccgtaccgccaactcgggtcacacctgaacgctgctgccagccgatgccccagccctgcacgccacccactatcccggcacgctccctctgcagatggtcgccgcacctacaagccctggccgcacccaacctgtgttgttgccgcccggcccttccctccacagctctccttcctcccgcccggcacttctgtggaccccttcttagttcacaggcacggctggggccgctctgtgctggcgcctgctggccactgagggacagggacacgtgccacctgctcatctctgccctgaggtcaccccgtggtccctccacgtgcccatctctctgcagtgccctcctcgcctgtgcagcccgcccacccacaggctcacccctcctgccggctgccagaggccccctccagcagggcctctctccgttgccccagcttcactctctccctcagcacctgccctgctggaggccccagccctccgtggacagcaggggccacgtggagcccgggccgctcacccgccacccagtgctggccgccttcttggtgccaaacccccttcccccacccagagactgggcagctgtgtctggttcgttctttgcactaaccacatttgtcatctctagggcaggctggggctgcgggctgagggggaccgctggcaccccccttccctcccttcttggttccatttccatccatgacaggtacagcatcccaggagcccggcctgaggggctggacccgagctggctgtgaacatccctcagcccctgctgtccccccttgggactaaccactaacctcacccccaaactccacgggtgcccctagctggcccagagccggcagtgtgagcccaagtccgggctggagccgaggccggagcagctgtctgggagtcaaggctgcagtagcgtttcttcatggggtgctccagggggtgccacagaccgacaggcagcccaagggcctggacacccctccccaggcaggtgctgccccaggaggactgtcctcgggaatgaacctcccgcgggctttggactgaggtccctgtggcctcggtctcctccccatgaagtgggagcgaggctccccaatggtgcttttggctttagtgtacgatgtttgctgtgcttcccgccgtggagggcagagccaccccacatcaggatcggacgtgctacccctcccggtcccggccctggcccagccagcccagccctcgaggctcgatgcctgtgccaaggccaggggcagccagagggcagctggatggccacgtgcaggggtcaaggctgggccctgcagtggggcgggccgccagccccagcagtttacagacgcatggctcttcctcccagagcagccggcagctacctggaccggaaatgtcctcatcccctccctggggccaggctctgccctggccttcctctgtgaacccctcctttctttgtgctggtgtctgggaccaaaaagggggaatatgggagggcagagtggggaggggagtccatgggcctggggccccaagccggggcgtctgagctccccaggcatgaccaaacctcagtggaggggcctctgcttcaggccccgcctggctgacattctgagcccccctcggaggccccgccacagccaacctgcccagtctttcctctgggcttgacccgccaggggagttctccaggcctagggccaggagagaggccctggcaccctggcgtgggtgcccgccaaacgccctgcgaccgctcagaagcacaaatgctgtccatggccgtgaggctgcctgccaggtgaatggacatagcgtgagaggcggtgaggccagggcttccagcctcgtgctgtctcgggactcctgaccgtggtgtgcgtgtgtgcccgtctgtgactttctactcaccaaggttgaagaaaggaaacggggaaaatcaaaaggggttcaaaccccacctcagtaggtggaggggagcgcctgccattggttgtatttttgttctgagttttcggtgccgtgttcctaactactccatcccatgacctcgccacacctactggggcatctggctggtgcctgctgccatggccagcccccactctcaccctgcacagggggtcttgcagcccccaggcccacagcctcgttgggaggacagggtggccctggggacaagagggaggagcccaggggcttacctcactgagagtgctccccagcaggcatccactaccccagggccccccacatgtcatggcaaggttggtagtgaatgggcctggttgggagcagcccctggcccattgcccacccacccatctcactatgcaattcgagttccaagcaacatttgctcctgccctggggccagctctgccccagccctgagaggggtggtgaggcagccccctggaccccagaaccccagacaagggggcaggcgggggaccagggcctctcctgtgggatctttgttttgtgtttaaccataatggttgtgtactgaaccacttcatatttgttatatataatatatatatatataatctccttaagactcagcctcctggtttacccccccggcctgggcatctgacctcccccaccccagtgtgatttaacatccaggaactgaggcctgaaccattttgcatttccccctcctccagcctctgtagggccatggctgtatgtactgtcgctgtgtttttttgtttttttagaactgggtttgggggctgatttttatttctttgggggcttttttttcttggcaaatactaaaaatctcgtcaatgtaatttctgtggtttctattcagcttgggtttcatgttttaaaataaattttaaaaagc

SEQ ID NO: 4054 - protein, 439 aa, Homo sapien
CTAWCVIIATLVCSAGIAVGFYGNGETSDGIHRATYSLRHANRTVAGVQDRVWDTAVGLNHTAEPSLQTLERQLAGRPEPLRAVQRLQGLLETLLGYTAAIPFWRNTAVSLEVLAEQVDLYDWYRWLGYLGLLLLDVIICLLVLVGLIRSSKGILVGVCLLGVLALVISWGALGLELAVSVGSSDFCVDPDAYVTKMVEEYSVLSGDILQYYLACSPRAANPFQQKLSGSHKALVEMQDVVAELLRTVPWEQPATKDPLLRVQEVLNGTEVNLQHLTALVDCRSLHLDYVQALTGFCYDGVEGLIYLALFSFVTALMFSSIVCSVPHTWQQKRGPDEDGEEEAAPGPRQAHDSLYRVHMPSLYSCGSSYGSETSIPAAAHTVSNAPVTEYMSQNANFQNPRCENTPLIGRESPPPSYTSSMRAKYLATSQPRPDSSGSH

SEQ ID NO: 4055 - DNA, 6607 bp, Homo sapien
gacaaagggattttagtctttcagttgaagaggaggccaccagaccacatcccaaagaaaaccaagaaacacttggaaggcaagacacccaagggaaaggagagagctgacgggtctggctatggctccacccttcctccggagaagctgccctatttagtagagttaagcccagggagaaggaatcactttgcctactacaactatcacacttacgaagatggttctgactctagagataagccaaagctttaccgccttcagttaagtgttactgaagttgggacagaaaagttggatgacaactctatccagttgtttggcccaggaattcagccccatcactgtgaccttaccaacatggatggagtggtcactgtgacgcccagaagtatggacgcagaaacctacgtggaaggccagcgcatctcagaaaccaccatgctgcagagtggcatgaaagtgcagtttggggcgtcccatgtatttaagtttgtggaccccagtcaggatcatgctcttgcaaaaagatctgtggatggaggcctgatggttaagggcccaagacataaacctggaattgttcaggagacaacttttgatttgggaggagatattcatagtgggacagcattaccgacaagcaagagcaccactaggctggacagcgacagagtgtcgtctgcctctagcacagccgagcggggaatggtgaagccgatgatcagagtagaacagcagccagattatcgcaggcaagaaagcagaacacaggatgcttctgggcctgaactgatactacctgcaagcattgaattcagggaaagttctgaagattcatttttgtctgccattataaattatactaatagctctacagtccactttaagttgtcccctacatatgtattatatatggcatgccggtatgtattgtccaaccagtacagacctgacatcagccctacagagcgcacacataaagtcattgcagtcgtcaacaagatggtgagcatgatggagggtgtcatccagaaacagaagaatattgcaggggcacttgccttctggatggcaaatgcatctgaacttctcaacttcattaagcaagaccgagaccttagtcggatcacactggatgctcaagatgttttagcacatttggttcaaatggcatttaaatacttggttcactgtcttcaatcagaacttaataattacatgccagcctttctagatgaccctgaagagaacagtctgcaacgaccaaaaatagatgatgtgctgcacacgctcacaggagccatgtccttgctacgacgctgcagagtcaatgccgccctgaccatccagctcttctctcagctcttccacttcatcaatatgtggctgttcaatagattggtgaccgacccagattcggggctgtgctcccattactggggtgcgattatccgtcagcagttgggccatattgaagcctgggctgagaagcaggggctggaactggctgcggactgtcatctgagcaggatcgtgcaggcaacgactttgcttaccatggataagtatgcacctgatgacattccaaatataaacagcacctgctttaagttaaattcattacaacttcaagccttattacagaactatcactgtgcacctgatgagccttttatcccaacggatcttatagaaaatgtagtgactgtggctgaaaacactgccgatgagctggcccgcagtgatggaagggaagtgcagttggaggaggatcctgatctgcagctgccgtttcttttgccagaagatggttattcttgtgatgttgtcagaaacattccaaatggtttacaagaatttttagaccctctgtgccagagaggattttgcaggttaattcctcacacacgttcaccaggtacttggacaatatattttgaaggtgcagattatgaaagtcaccttctgcgtgagaacacagagctggctcagcctctgaggaaagaacctgaaataatcactgtgaccctaaaaaagcagaatggaatgggccttagcattgttgcagcaaagggtgctggtcaagataaactaggaatctacgtgaagtcggttgtgaaaggaggtgctgcagatgtggatggacgtctagctgcaggtgatcagctcctcagtgtggatggacgaagtctggttggactctctcaggaaagggcggcagaactcatgacaagaacaagctctgtggtgacactggaagtagcaaagcagggtgccatctaccacggtctggccacccttctcaatcagccatcccccatgatgcagagaatttcagatcgtcgtggctcaggtaaaccccgaccaaagagtgaaggctttgagctctataataattcaactcaaaatgggtctcctgagagtcctcagctgccttgggcagaatatagtgaaccaaagaaattgcctggtgatgacagactgatgaaaaatagagctgatcaccgttccagccccaacgtagcaaatcagcctcctagtcctggagggaaaagtgcatatgcctctggaacaacagcgaagataacatctgtctctactggaaacctctgcactgaggagcagacgcctccgcctagacctgaagcctaccccatccccactcagacgtacaccagagagtattttaccttcccagcttccaaatcccaggatcggatggctcctcctcagaaccagtggccaaattatgaggaaaagccacatatgcacacagatagtaatcattccagtattgcaattcagcgtgttacacgttcccaagaagaacttcgagaagataaagcttaccaacttgagcggcatcgaatagaggcagctatggaccgaaagtctgatagtgatatgtggataaatcagagctcctcactggactccagtacctctagccaggagcatctgaaccattcctctaagtcggtcacccctgcttccacactgaccaaaagtggccctggccgttggaaaacaccagcagccataccggccacccctgtggccgtctcccagccaatccgaacagacctgcctccgccacccccgccacctccagtccactatgccggtgatttcgatggaatgtccatggatttgcctctcccaccacccccttccgccaaccagatagggctgccgtctgcgcaggtggctgctgctgaacggagaaagagagaagaacatcagcgttggtatgagaaggagaaggcccgcctggaggaggagcgggagaggaagcggagagagcaggagaggaagttgggccagatgcgcactcagtccttaaaccctgctccgttttctcccctgactgcacagcagatgaagcccgaaaagccttccacactccagcggccacaggaaacagtcattcgggagctgcagcctcagcagcagccccgcacgatcgagcgcagagacttgcagtacattacagtcagcaaagaggagctttcctcggggacagtctgtccccccgacccgtggaagcgggacgccaaggagaagctggagaagcagcagcagatgcacatcgtggacatgctgagcaaggagatccaggagctccagagcaaaccggaccgcagcgccgaggagagcgaccggctgcgcaagctcatgctggagtggcagttccagaagagactccaggagtcgaagcagaaggacgaagatgacgaggaggaggaggacgatgatgtggacaccatgctgatcatgcagcgcctggaggctgaacgaagagcgaggactgctatgccagcaatctctgttctagatttgttgcaggacgaggagcggaggcggcagcagcagttagaagagatgcgcaagcgggaagcggaagaccgagcgaggcaagaggaagagcgccggcggcaggaggaggagcgaacaaaacgagacgctgaagaaaagaggcgacaggaagaagggtattacagccgcctggaagccgagaggcgcagacagcacgacgaggcggcgcgcaggttgctggagcccgaggcgcccggtctgtgccgccctccgcttccccgggactacgagcccccgtccccgtcccccgcccggcgcccctcctcccccgcctcagcgaaacgcctcctacctcaaaacacaggtcctctcccccgactcgctgttcactgccaagtttgttgcatacaatgaggaggaggaggaggaggactgcagcctagcaggaccaaactcttacccaggatctactggagcagctgttggagcccatgacgcctgtcgggatgcaaaagagaagcgctctaaaagccaagatgcagattcacctggaagttctggggcccctgaaaacttgacattcaaggaacgccagcgtcttttttcacaaggtcaagatgtatccaataaagtgaaagcttctcgtaaattaacagaactggagaatgaactgaacacaaagtgaaagaaaatgaggagaacactttgtatttaccccaaaatcttttcagttgtgggtttgtaggtgcgagtttgaagaggaaaagaggaagggggttatatttctaagtgatttacaatttctgtttctaaaattgttgggatttagaaatgtttcaattccaagaaattttattttactttaccatgagattgccatttatgtaatttaaacactgtctagtttcttaattatctaactcacacgagggtaagttttttgttggtttcttttttggagtcctgagttcaaaggggacagaactaagggcaggagaagagaatggatgtgtcttctctcccatcttcccctcatcatcgaccgaggagcacaaagaagttctgtttctgtttttttcagaaactttattttagctgtcaagcagagaatagcttgaactattcagactattgttggcactgtttagtagtgaccacacgctcttctacccgggaaggaacatatgacgacatgctcctcccatgtcccctgatggtgtctgttcccacaatatccttctagtctgcatcgtgaagtggcttaggccaaagcttcctgtgtgatgacgcacgtccgagactgttccatctcattcctcgcaaatttgagctcttctgatcaattctaaatatttgattaattttaattctgaaagaaaattttgaggatttaagcttaggggattttatttttataaataccagattattgttagacttaataaatcactgttaaatttaaagatgacagttaccttggaaagttcactaatacttcgctccaaggcgtctgtaaaagaagatatctttattggagcaatgttcatgtgactgggaatgacagaagaatgggagatgagtagggacccctcaagcacagctgtcactcagaaattttaaatttgaaaaagaaatcgattttcatctgtatgccgtcaaggaaggaattcagttacagggcatctgtaacttaaatattgtaagaataactcatatggaagttcaagctatttttatactataatagagttatttaattttaatttgttgaattattagttaccactgtcatttcttcagctatggatatgtggctgatgttggggagacggacctcagtgtgttttatattgtctggtgttaagatgataaattactttgtgattacaagcaaattttctatttgacaaagcccttggtggagtccaaatgatttttctgtaccatattgttctcttacacatacgtatgttaggaaaataggcacactttcaaagagaatgttctcttacacatacgtatgttaggaaaatagacacattttcaaagagaatgttctcttacatatgttaggaaaataggcacactttcaaagagaggtataggggctttttactgccttcgaaatcacttttaataaaagttgtatgataaatcattaaaaatgcgagtgtaaatatttttttttacctctatcagggtttttatttgacagtgtgctcttaccatttccttgtttgagtaagagagtgaatggttctgagtgtttaggaaggatttgcttgcttgcagcagaagttctaggaaaagcaggcacctcccaaatatcttgaggacactggcagccttatggtgactaaatccacactttctttaaagagatgcagatgaattacttttctgttaatatatagaaaaatacacaggagaacatgcagatacatgtaaatatctacatacagggatatttgtatgtgtggttgtgaaacccatacacaagtggatttggccatctttgggcagtgaggtcaaatgtgaatatgtgtaaaagtgcttttcagaactgcattactatgagaaaacatcaaaactgctgtagttttccatttctactgtatttcagttgcaacctatttttaataaactttgtatgtatttaagtgtatttgctattgttttgaaagtgctgacaaagtttatatttgtaacatcagccttcctcgcccatctctttccatctgtctcttcttcattaaacacttactgagtacaaaaaaaaaaaaaaaaa

SEQ ID NO: 4056 - DNA, 5742 bp, Homo sapien
gcgcggggctgagccgcccgggatcagcgcgagcacccagcccgcctcggccgggagggcctgagaaccccgggggcgtgctgagcgtggagctgcccgggctgctggcgcagctggcgcggagcttcgcgctgctgctgcccgtgtacgcgctgggctacctggggctcagcttcagctgggttctcctcgcgctcgcgctgctcgcctggtgtcgccgcagccgcggcctcaaggccctgcgcctgtgccgcgcgctggcgctgctggaagacgaggagcgcgtcgtgcgcctgggggtgcgcgcctgcgacctgcccgcctgggttcattttccagacactgaaagagcagaatggctaaataagactgtaaaacacatgtggcctttcatttgccaatttatagagaagttgtttcgagaaactatagaaccagccgtgcggggagcaaacacccaccttagcacctttagtttcacgaaggtcgacgtgggccagcagcccctcaggatcaatggtgttaaggtatacactgaaaatgtagacaaaaggcaaattattttggaccttcagattagttttgtaggaaattgtgagattgatttggagatcaaacgatatttttgtagagctggtgtgaaaagtatccagattcatggtaccatgcgggtgatcctggaaccgttgattggagatatgcccttagttggagctttgtctatcttcttccttaggaaaccacttttagaaattaactggacaggactgacgaatcttctggatgtccctggattgaatggtttatcagatactatcattttggatataatatcaaactatctggtgcttcccaatcgaatcaccgttccacttgtcagtgaagttcaaatagctcagttgcggtttcctgtaccaaagggtgttctaaggatacattttattgaagctcaggatcttcaggggaaagacacttaccttaagggacttgtcaagggaaagtcagacccctatggaatcattagagttggcaaccaaatcttccaaagcagagtcatcaaggagaacctcagtccaaagtggaatgaagtctatgaggctttagtgtatgaacatcctggacaagaattagagattgagctctttgatgaagacccagacaaggatgactttttaggaagtcttatgattgacctcattgaagttgaaaaggagcgccttttagatgaatggttcactctggacgaggttcccaaggggaagctacacttgagactggagtggctcacgttaatgccaaatgcgtcaaacctcgacaaggtgctaacagacatcaaagctgacaaagaccaagccaacgatggtctttcctctgcattgctgatcttgtacttggattcagcaaggaaccttccgtcagggaagaaaataagcagcaacccaaatcctgttgtccagatgtcagttgggcacaaggcccaggagagcaagattcgatacaaaaccaatgaacctgtgtgggaggaaaacttcactttcttcattcacaatcccaagcgccaggaccttgaagttgaggtcagagacgagcagcaccagtgttccctggggaacctgaaggtccccctcagccagctgctcaccagtgaggacatgactgtgagccagcgcttccagctcagtaactcgggtccaaacagcaccatcaagatgaagattgccctgcgggtgctccatctcgaaaagcgagaaaggcctccagaccaccaacactcagctcaagtcaaacgtccctctgtgtccaaagaggggaggaaaacatccatcaaatctcatatgtctgggtctccaggccctggtggcagcaacacagctccatccacaccagtcattgggggcagtgataagcctggtatggaagaaaaggcccagccccctgaggccggccctcaggggctgcacgacctgggcagaagctcctccagcctcctggcctccccaggccacatctcagtcaaggagccgacccccagcatcgcctcggacatctcgctgcccatcgccacccaggagctgcggcaaaggctgaggcagctggaaaacgggacgaccctgggacagtctccactggggcagatccagctgaccatccggcacagctcgcagagaaacaagcttatcgtggtcgtgcatgcctgcagaaacctcattgccttctctgaagacggctctgacccctatgtccgcatgtatttattaccagacaagaggcggtcaggaaggaggaaaacacacgtgtcaaagaaaacattaaatccagtgtttgatcaaagctttgatttcagtgtttcgttaccagaagtccagaggagaacgcttgacgttgccgtgaagaacagtggcggcttcctgtccaaagacaaagggctccttggcaaagtattggttgctctggcatctgaagaacttgccaaaggctggacccagtggtatgacctcacggaagatgggacgaggcctcaggcgatgacatagccgcagcaggcaggaggcgtcctcttcagcgtagctctccacctctacccggaacacaccctctcacagacgtaccaatgttatttttataatttcatggatttagttatacataccttaatagttttataaaattgttgacatttcaggcaaatttggccaatattatcattgaattttctgtgttggatttcctctaggatttcgccagttcctacaacgtgcagtagggcggcggtagctcttgtgtctgtggactctgctcagctgtgtccgtaggagtcggatgtgtctgtgctttattatggccttgtttatatatcactgaggtatactatgccatgtaaatagactattttttataatctttacatgctggtttaaattcagaaggaaatagatcaaggaaatatatatattttcttctaaaacttattaaattcgtgtgacaaataatcattttcatcttggcagcaaaagttctcagtgacctattttgtggtgtttctttttgaaaagaaaagctgaaatattattaaatgctagtatgtttctgcccattatgaaagatgaaataaagtattcaaaatattaacattttcataaatataaggatgtattattgagaagtaagttgaagggcttataaggaaaaatgttttataactgagtaatatattaagagaattgtcatggttcataaatcacattatgctaatctgaaatttcttacataaaaatgaagtgtcttatgtttattttaattgctgttgtaacttactcatgaaacagtatacagacaccttgtacttttcctcaactgtaagagcagactttcaatgttagcaattaagctgttgtcaaacaatcagtcatgagctttgttaattttcaatgttttcccagcctataaaaaaaggaaggtacacgttgtccttttaaaggttgtgaggtagattggagtgagtagacaggatattgcattaaaaattgaaagctcgatctcattattgtcaggaacccccagtgtgacctcacacataggatgtgggacctttgagccgatgtgcactggccaccaccagggttgggggcgccacagctgcgagcccggcccctgctgttctcagcagccacttcccaggctgcctcactttatgccatgactgaccttaatattgggatattgttatgcaatttttatcctgtttagactgttaaaagcaggtttctgtacttaagagtcccccagacctcctgtgaggtgaggctctgttgcagtgtcgtaggctgtgtgtgtctgtaaagaaagaatgcacatatgtagacgattaagtgtatattataagctatatgctgaaaatggcttccatagccatgagaacatcttaaaactatgtgtaaatatattaaggaaagtatagctttgtaatttaaattggagcttttagcttgtttcatggaactatacaacttgtgggtaactcacatgaccaaacaaaccaaagtgcctgtgacggggcgggtggcgtctacccaccctcccttctagcagattcttattttgtttgaatttataaacaaggctggtggctgtctacccaccctcccttctagcagattttgattttgtttcaatttataacttacactttgaaccatgggtttacttataatggagtctgtagcttcacagcatatttcatgtaatcataaagaccagtatattccctcctgctgaatgacatgcgactgtaaagcctctttataaaccatttccaatgttagtatataggattatttgggaagcgtatcaatacctttatagacaaatacgaacatgtatgcacacaaaacatttaactatggtatttatggaagacaggtaacaacattaaatctagttgctttcccttagtattagatttgttgagggttttttaaaaatcaggtctgttgaaagtcttctgtcataatctataaagcagcagcactcatggaaattgtagcatgccagtaatttttaccaacatcccatacatctgagttctgcagtccagtgtgtaatccgctccatgtgtattttgcttaatggaatgctttatttaagcacttaggcagagtagacacaattaaaggtacaaagcccagaggaagtggtagagcagcaccgtgcctgccctgaggcagtggagtcagtagcgctgtccccagggccttgagtgcctggaggtgcttggcctccagtagctgcctccattctcttttaaaaaaagggggtgattctgaggcactgaagtgcctcccagatgtggaggagtgaagccaccatcgaggccacactcagcactccaggatcccagcgatgtcagacactcttgagttgtcaaaacgttaattttcagttttaaataatcagtttatctaagaaaagggaattttaacttttctaccttgagccaagccaatgaagggaaaattaattaacttagtaaatttgaagtgcagctctgttagctcgtacatgtgggttcttatcctgatcctgtgccttaaagtaggaaggtgtttccaagttcagattaaaatagaagcagctggccgggtgcggtggctcacgcctgtaatcccagcactttgggaggccgaggcgggcggatgacctgaggtcaggagttcaagaccagcctggccaacatggagaaaccccatctttactaaaaatacaaaaattagccgggcgtggtggtggagcgcacgcctgtagtcccagctactcgggaggctgaggcaggagaattgcttgaacccaggaggcggaggttgcagtgagccaagatcgcaccactgcactccagcctgggcaacagagtgagactccgtctcaaaaaataaataaaatagaagcagccttgtaactgtatttaccatgataatatattctgcacggtaagaattccttttacagacattctttatcaagaggtcggcccttctttttcaggcacataagccaaatgcaggcctgtgtgtagctgtgtgttttttctgtggttgccgcatttattccacctccagctggaccccccactgcaaatagagaacagcggtgggggatgggggttaaaaagtagagaacctcctttctgttcaactaatttcacgtgacagtgcatgtatttattcaataaaacctttatgttagctc

SEQ ID NO: 4057 - protein, 843 aa, Homo sapien
AGLSRPGSARAPSPPRPGGPENPGGVLSVELPGLLAQLARSFALLLPVYALGYLGLSFSWVLLALALLAWCRRSRGLKALRLCRALALLEDEERVVRLGVRACDLPAWVHFPDTERAEWLNKTVKHMWPFICQFIEKLFRETIEPAVRGANTHLSTFSFTKVDVGQQPLRINGVKVYTENVDKRQIILDLQISFVGNCEIDLEIKRYFCRAGVKSIQIHGTMRVILEPLIGDMPLVGALSIFFLRKPLLEINWTGLTNLLDVPGLNGLSDTIILDIISNYLVLPNRITVPLVSEVQIAQLRFPVPKGVLRIHFIEAQDLQGKDTYLKGLVKGKSDPYGIIRVGNQIFQSRVIKENLSPKWNEVYEALVYEHPGQELEIELFDEDPDKDDFLGSLMIDLIEVEKERLLDEWFTLDEVPKGKLHLRLEWLTLMPNASNLDKVLTDIKADKDQANDGLSSALLILYLDSARNLPSGKKISSNPNPVVQMSVGHKAQESKIRYKTNEPVWEENFTFFIHNPKRQDLEVEVRDEQHQCSLGNLKVPLSQLLTSEDMTVSQRFQLSNSGPNSTIKMKIALRVLHLEKRERPPDHQHSAQVKRPSVSKEGRKTSIKSHMSGSPGPGGSNTAPSTPVIGGSDKPGMEEKAQPPEAGPQGLHDLGRSSSSLLASPGHISVKEPTPSIASDISLPIATQELRQRLRQLENGTTLGQSPLGQIQLTIRHSSQRNKLIVVVHACRNLIAFSEDGSDPYVRMYLLPDKRRSGRRKTHVSKKTLNPVFDQSFDFSVSLPEVQRRTLDVAVKNSGGFLSKDKGLLGKVLVALASEELAKGWTQWYDLTEDGTRPQAMT

SEQ ID NO: 4058 - DNA, 1613 bp, Homo sapien
agcgccgcgtggttagcgtcggcggcttttggcatggcgactttttctggcccggctgggccaatcctgtcgcttaatccgcaggaagatgtcgagtttcaaaaggaggtggcgcaggttcgcaagcgcataacccagcgaaaaaaacaagaacaacttactcctggagtagtctatgtgcgccacctacctaacctacttgacgaaacccagatcttttcatatttctcccagtttggcactgtgacacggttcaggctgtccagaagtaaaaggactggaaatagcaaaggctatgcatttgtggagtttgagtctgaggatgttgccaaaatagttgctgaaacaatgaacaactacctgtttggtgaaagactcttggagtgtcattttatgccacctgaaaaagtacataaagaactctttaaagactggaatattccatttaagcagccatcatatccatcagtgaaacggtataatcggaatcggacactaacacaaaagctacggatggaggagcgatttaaaaagaaagaaagattactcaggaagaaattagctaaaaaaggaattgactatgattttccttctttgattttacagaaaacggaaagtatttcaaaaactaatcgtcagacgtctacaaaaggccaggttttacgtaagaagaagaaaaaagtttcaggtactcttgacactcctgagaagactgtggatagccagggccccacaccagtttgtacaccaacatttttggagaggcgaaaatctcaagtggctgaactgaatgatgatgataaagatgatgaaatagttttcaaacagcccatatcctgtgtaaaagaagaaatacaagagactcaaacacctacacattcacggaaaaaaagacgaagaagcagcaatcagtgattttcaatgtattatatttcttttgaaaaatataatatttttatgagagtggactttgtatttcactaggtacaatggaatacaacctttgacaagattttcagaggaaaaatacactgtttggtcaagttaaggaaagcagtgtgtaattttggattgcctgcccttggctgaaatacaggggtgcataccatcttgcagtggcttggctgacattgcctctctgtcctggcctctagttttcttttgatatttcatagctctccttagtttactctgcctggatagaaagttgaccactaactgcaggtttaagtactaaactgcagccttttctgtcgccagcaattaaagaccaccaatcttgtttgtccatctacatggtttgtcggggacatttaactcatggaggtgctttagatttcaacatcagatggttgaagctggaagtttaattatatgtagagtgagaaggcagttccagttttagcacagatttgtttatgtgttcagattttaatagagattcaaaaatgactcatttttaccaataatgttaaattagttttggttgtgctagcatgaattaataaccaccattttataccagtatcatcagtgaagaattgtatttcaagattcaaacaataaccagcaattaaacttttttctacaatgtaaaaaaaaaaaaaaaaaaa

SEQ ID NO: 4059 - protein, 293 aa, Homo sapien
MATFSGPAGPILSLNPQEDVEFQKEVAQVRKRITQRKKQEQLTPGVVYVRHLPNLLDETQIFSYFSQFGTVTRFRLSRSKRTGNSKGYAFVEFESEDVAKIVAETMNNYLFGERLLECHFMPPEKVHKELFKDWNIPFKQPSYPSVKRYNRNRTLTQKLRMEERFKKKERLLRKKLAKKGIDYDFPSLILQKTESISKTNRQTSTKGQVLRKKKKKVSGTLDTPEKTVDSQGPTPVCTPTFLERRKSQVAELNDDDKDDEIVFKQPISCVKEEIQETQTPTHSRKKRRRSSNQ

SEQ ID NO: 4060 - DNA, 1782 bp, Homo sapien
ggcacgaggggcggcgtaggggcggaggtcgcgcctgagtgcgtccgcacgagagggcggaaccgtctccatggcaacccgcgcgcagccggggccactcagccaggcgggaagcgctggtgttgcggcgctggcgacagtcggggttgcgagcggcccggggccggggcggccagggccgctgcaggacgagaccctgggtgtggcgtccgtgccctcgcagtggagggccgtccagggcatccgcggggagacgaaaagttgccagacggccagcattgccactgccagtgcatccgcccaggccaggaatcatgtggacgcccaggtgcagacggaggcccccgtgcctgtcagcgtgcagcccccgtcccagtacgacatacccaggcttgcagcctttcttcggagagtggaggccatggtcatccgagagctgaacaagaattggcagagccacgcgtttgatggcttcgaggtgaactggaccgagcagcagcagatggtgtcttgtctgtataccctgggctacccgccagcccaagcgcagggtctgcatgtgaccagcatctcctggaactccactggctctgtggtggcctgtgcctacggccggctggaccatggggactggagcacgcttaagtccttcgtgtgtgcctggaacctggaccggcgagacctgcgtccccagcaaccgtcggccgtggtggaggtccccagcgctgtcctgtgtctggccttccaccccacgcagccctcccacgtcgcaggagggctgtacagtggtgaggtgttggtgtgggacctgagccgtcttgaggacccgctgctgtggcgcacaggcctgacggatgacacccacacagaccctgtgtcccaggtggtgtggctgcccgagcctgggcacagccaccgcttccaggtgctgagtgtggccactgacgggaaggtgctactctggcagggcatcggggtaggccagctgcagctcacagagggcttcgccctggtcatgcagcagctgccacggagcaccaagctcaagaagcatccccgcggggagaccgaggtgggcgccacggcagtggccttctccagctttgaccctaggctgttcattctgggcacggaaggcggcttcccgctcaagtgttccctggcagctggagaggcagccctcacgcggatgcccagctccgtgcccctgcgggccccagcacagtttaccttctccccccacggcggtcccatctactctgtgagctgttcccccttccacaggaatctcttcctgagcgctgggactgacgggcatgtccacctgtactccatgctgcaggcccctcccttgacttcgctgcagctctccctcaagtatctgtttgctgtgcgctggtccccagtgcggcccttggtttttgcagctgcctctgggaaaggtgacgtgcagctgtttgatctccagaaaagctcccagaaacccacagttttgatcaagcaaacccaggatgaaagccctgtctactgtctggagttcaacagccagcagactcagctcttggctgcgggcgatgcccagggcacagtgaaggtgtggcagctgagcacagagttcacggaacaagggccccgggaagctgaggacctggactgcctggcagcagaggtggcggcctgaggggtcccgggaggcgggtgcaagccttcgctgtgccgagccttgtgtttctgacgcaagccaaatgaagaaaagcaaagcttaaaaaaaaaaaaaaaaaa

SEQ ID NO: 4061 - protein, 419 aa, Homo sapien
MVIRELNKNWQSHAFDGFEVNWTEQQQMVSCLYTLGYPPAQAQGLHVTSISWNSTGSVVACAYGRLDHGDWSTLKSFVCAWNLDRRDLRPQQPSAVVEVPSAVLCLAFHPTQPSHVAGGLYSGEVLVWDLSRLEDPLLWRTGLTDDTHTDPVSQVVWLPEPGHSHRFQVLSVATDGKVLLWQGIGVGQLQLTEGFALVMQQLPRSTKLKKHPRGETEVGATAVAFSSFDPRLFILGTEGGFPLKCSLAAGEAALTRMPSSVPLRAPAQFTFSPHGGPIYSVSCSPFHRNLFLSAGTDGHVHLYSMLQAPPLTSLQLSLKYLFAVRWSPVRPLVFAAASGKGDVQLFDLQKSSQKPTVLIKQTQDESPVYCLEFNSQQTQLLAAGDAQGTVKVWQLSTEFTEQGPREAEDLDCLAAEVAA

SEQ ID NO: 4062 - DNA, 583 bp, Homo sapien
ggcacgaggcgttgggaacggttgtaggacgtggctctttattcgtgagttttccatttacctccgctgaacctagagcttcagacgccctatggcgtccgcctcgacccaaccggcggccttgagcgctgagcaagcaaaggtggtcctcgcggaggtgatccaggcgttctccgccccggagaatgcagtgcgcatggacgaggctcgggataacgcctgcaacgacatgggtaagatgctgcaattcgtgctgcccgtggccacgcagatccagcaggaggttatcaaagcctatggcttcagctgcgacggggaaggtgtccttaagtttgctcgcttggtcaagtcctacgaagcccaggatcctgagatcgccagcctgtcaggcaagctgaaggcgctgtttctgccgcccatgaccctgccaccccatgggcctgctgctggtggcagcgtggccgcctcctgagagttggccctcccttgtgccactgccaggggaggaaaggccttgatgttccagacaataataaatgcgcctgtgacttaaaaaaaaaaaaaaaaaaaaaaaaaaaaaaaa

SEQ ID NO: 4063 - protein, 126 aa, Homo sapien
MASASTQPAALSAEQAKVVLAEVIQAFSAPENAVRMDEARDNACNDMGKMLQFVLPVATQIQQEVIKAYGFSCDGEGVLKFARLVKSYEAQDPEIASLSGKLKALFLPPMTLPPHGPAAGGSVAAS

SEQ ID NO: 4064 - DNA, 2318 bp, Homo sapien
gtgtgtgtgtgtgtgtgtgtgagagagagagatgtgttggggtggggggactgcaggtcaggaagtcctgcagatgtgcgtgcctgtgtgtgtttgcgcgcgcgcgcgcgtgtgtgtgtgtctgtgtgtgtgcctggagctgcgcttgcaggtctgagagtcctctgagaatgggttgggggaggcgggtgcaggaccgaggcctggaacagccaacaaagaggccctggaggagggtggggctggccggggacaggaggggtggccaagaaagtcgcaagaaaactccggcccccaagaaaaagagagggcatgggttgcggagccgacatcacggccggggtctttgctgtttagacgcctgggttcccggatcccagacacgcgcacgggcaggaagttagaccggagacagcgagtatagacagcccttctggataggggcagacggcccgggtttccgcttccctccgggcgcgagaagaggggagccaggccgagccccggccctaccgccgccgccgccatgtggcccccagaccccgaccccgacccggaccccgagcctgccggcggctcccgtcccggccccgcggtccccgggctccgcgccctgctgccggcgcgggctttcctctgctctctcaaaggccgcctcctgctggccgagtcgggtctctcattcatcacttttatctgctatgtggcgtcctcagcatctgccttcctcacagcgcctctgctggagttcctgctggccttgtacttcctctttgctgatgccatgcagctgaatgacaagtggcagggcttgtgctggcccatgatggacttcctgcgctgtgtcaccgcggccctcatctactttgctatctccatcacggccatcgccaagtactcggatggggcttccaaagccgctggggtgtttggcttctttgctaccatcgtgtttgcaactgatttctacctgatctttaacgacgtggccaaattcctcaaacaaggggactctgcagatgagaccacagcccacaagacagaagaagagaattccgactcggactctgactgaaggcctggcgggtgccttggcaacctgagccacacaggcctccacccctgcgcctcacaggggtcgctggcgttggagcggaggcctggacttctgagttgcagagggggctgcggacacagcaggccccctacagcctcaggttctgcctgagcccagcctaccaggcttgcccctcagctcagcactgttgaccacgctgcgtatgagggcatcttgggtatcccactccttctccccatttctgtcccacaggccttcagccctttaacgtctctgccaaaaaccagcacaaggagacaaagcagagccttgtctgtatctgggcagcaggtgttccatgctgctaggtggcgggggtcgggggtcttctgtttcactaacaggaacaaagacagaaaccatgacagggctgccccgccaggccccggtgggtttgtctgcacttggtgctcctgcccacaccagccactttggtgacaatgacccttccaagaatctttggttcaaggagcaccagttccctcttcattcttgaagcagggagaaattgacctttgccttgtcgcccaggaagtggggctcggcacccataactaacacctcccacccttggaaaccatgtcttctgggggtgagatgaccattctgggtctaagactgtttcaaagaagagctcatagactgactggtccagaagacagagggtacaacagtggcatcacagtgacagtgtcatggggagctgggcgggcccagccaaaccctccttcttcctagagcccagccagcaggcaggagttcctggaccctcaggacagtgaacttccagacctcagggcaggtctatgggccactgcaggagatgagaccagccttctgtgttcacctaacgatttatactgtgtatctgtctttgatggaattttgtaactttttatatttttttatgcaaaagcagcttcttaacagatggcattttctgtgactctaggcctcacaaaagagccagagttctggacccatgtttggagcatttgtagccttattctcttgcgtgtgaatctcttaccctgaaaaaaagccataatgaattaagccagactgaccacttgcttggagtgtgtgcttgaaaaaaccagagcaatactgttgggtattgtatcaggcttcagtacaaactggtaacaccaatgtggatcctgacagctttcagttttagcaaaaatacacgtgaaatctg

SEQ ID NO: 4065 - protein, 182 aa, Homo sapien
MWPPDPDPDPDPEPAGGSRPGPAVPGLRALLPARAFLCSLKGRLLLAESGLSFITFICYVASSASAFLTAPLLEFLLALYFLFADAMQLNDKWQGLCWPMMDFLRCVTAALIYFAISITAIAKYSDGASKAAGVFGFFATIVFATDFYLIFNDVAKFLKQGDSADETTAHKTEEENSDSDSD

SEQ ID NO: 4066 - DNA, 2126 bp, Homo sapien
ggcgctccgcctgctgcgcgtctacgcggtccccgcgggccttccgggcccactgcgccgcgcggaccgcctcgggctcggacggccggtgtccccggcgcgccgctcgcccggatcggccgcggcttcggcgcctggggctcggggctccggggaggccgtcgcccgcgatgctgctctccaagttcggctccctggcgcacctctgcgggcccggcggcgtggaccacctcccggtgaagatcctgcagccagccaaggcggacaaggagagcttcgagaaggcgtaccaggtgggcgccgtgctgggtagcggcggcttcggcacggtctacgcgggtagccgcatcgccgacgggctcccggtggctgtgaagcacgtggtgaaggagcgggtgaccgagtggggcagcctgggcggcgcgaccgtgcccctggaggtggtgctgctgcgcaaggtgggcgcggcgggcggcgcgcgcggcgtcatccgcctgctggactggttcgagcggcccgacggcttcctgctggtgctggagcggcccgagccggcgcaggacctcttcgactttatcacggagcgcggcgccctggacgagccgctggcgcgccgcttcttcgcgcaggtgctggccgccgtgcgccactgccacagctgcggggtcgtgcaccgcgacattaaggacgaaaatctgcttgtggacctgcgctccggagagctcaagctcatcgacttcggttcgggtgcgctgctcaaggacacggtctacaccgacttcgacggcacccgagtgtacagccccccggagtggatccgctaccaccgctaccacgggcgctcggccaccgtgtggtcgctgggcgtgcttctctacgatatggtgtgtggggacatccccttcgagcaggacgaggagatcctccgaggccgcctgctcttccggaggagggtctctccagagtgccagcagctgatccggtggtgcctgtccctgcggccctcagagcggccgtcgctggatcagattgcggcccatccctggatgctgggggctgacgggggcgccccggagagctgtgacctgcggctgtgcaccctcgaccctgatgacgtggccagcaccacgtccagcagcgagagcttgtgaggagctgcacctgactgggagctaggggaccacctgccttggccagacctgggacgcccccagaccctgactttttcctgcgtgggccgtctcctcctgcggaagcagtgacctctgacccctggtgaccttcgctttgagtgccttttgaacgctggtcccgcgggacttggttttctcaagctctgtctgtccaaagacgctccggtcgaggtcccgcctgccctgggtggatacttgaaccccagacgcccctctgtgctgctgtgtccggaggcggccttcccatctgcctgcccacccggagctctttccgccggcgcagggtcccaagcccacctcccgccctcagtcctgcggtgtgcgtctgggcacgtcctgcacacacaatgcaagtcctggcytccgcgcccgcccgcccacgcgagccgtacccgccgccaactctgttatttatggtgtgaccccctggaggtgccctcggcccaccggggctatttattgtttaatttatttgttgaggttatttcctctgagcagtctgcctctcccaagccccaggggacagtggggaggcaggggagggggtggctgtggtccagggaccccaggccctgattcctgtgcctggcgtctgtcctggccccgcctgtcagaagatgaacatgtatagtggctaacttaaggggagtgggtgaccctgacacttccaggcactgtgcccagggtttgggttttaaattattgactttgtacagtctgcttgtgggctctgaaagctggggtggggccagagcctgagcgtttaatttattcagtacctgtgtttgtgtgaatgcggtgtgtgcaggcatcgcagatgggggttctttcagttcaaaagtgagatgtctggagatcatatttttttatacaggtatttcaattaaaatgtttttgtacatagaaaaaaaaaaaaaaaaaaaaaaagggcgg

SEQ ID NO: 4067 - protein, 382 aa, Homo sapien
RSACCASTRSPRAFRAHCAARTASGSDGRCPRRAARPDRPRLRRLGLGAPGRPSPAMLLSKFGSLAHLCGPGGVDHLPVKILQPAKADKESFEKAYQVGAVLGSGGFGTVYAGSRIADGLPVAVKHVVKERVTEWGSLGGATVPLEVVLLRKVGAAGGARGVIRLLDWFERPDGFLLVLERPEPAQDLFDFITERGALDEPLARRFFAQVLAAVRHCHSCGVVHRDIKDENLLVDLRSGELKLIDFGSGALLKDTVYTDFDGTRVYSPPEWIRYHRYHGRSATVWSLGVLLYDMVCGDIPFEQDEEILRGRLLFRRRVSPECQQLIRWCLSLRPSERPSLDQIAAHPWMLGADGGAPESCDLRLCTLDPDDVASTTSSSESL

SEQ ID NO: 4068 - DNA, 1735 bp, Homo sapien
  Unsure 775-835: Unknown base
gcagtgcatttccaaccatgatccacgggtcttcacattcataattcatcaggtcgggcaaccacctagcaccatcttcccgggcacagggagcggagacccggcctcaaccacaaaccccaggccagcagcacagacccaagaactgcggactcctgtgaggtatggtgctgggtgcagatgcagtgtggctctggatagcaccttatggacagttgtgtccccaaggaaggatgagaatagctactgaagtcctaaagagcaagcctaactcaagccattggcacacaggcattagacagaaagctggaagttgaaatggtggagtccaacttgcctggaccagcttaatggttctgctcctggtaacgtttttatccatggatgacttgcttgggtatggagagtcggcttgactacactgtgtggagcaagttttaaagaagcaaaggactcagaattcatgattgaagaaatgcaggcagacctgttatcctaaactagggtttttaatgaccacaacaagcaagcatgcagcttactgcttgaaagggtcttgcctcacccaagctagagtgcagtggcctttgaagcttactacagcctcaaacttctgggctcaaagtgatcctcagcctcccagtggtctttgtagactgcctgatggagtctcatggcacaagaagattaaaacagtgtctccaatttaatcttcttgtgccatgagactccatcaggcagtctacaaagaccactgggaggctgaggatcactnnnnnnnnnnnnnnnnnnnnnnnnnnnnnnnnnnnnnnnnnnnnnnnnnnnnnnnnnnnnnaggcaagaccctttcaagcagtaagctgcatgcttgcttgttgtggtcattaaaaaccctgaaagcgaagccaacatattaatcagggcaaaatacaaatgtgtgatgcttgttagtagagtaacctcagaatcaaaatggaacggttttacagtgatatcattatatttcatttggcagaatcattacatcattggttacactgaaaatcatcacatgtaccaaaagctgactcacctagtttaggataacaggtctgcctgtttgaagatgaaaaataatacccatttaaaatttgccctactcaatttccttctcagtcacattttaacttttaaacagctaatcactcccatctacagattaaggtgtatatgccaccaaaaccttttgccaccttaaaaatttccttcaaagtttaaactaacctgcatttcttcaatcatgaattctgagtcctttgcttctttaaaacttgctccacacagtgtagtcaagccgactctccatacctgtagaaatttaatctcctttaccaataggtagtaataggtggatttctaaaagatttcccaactactgtttcagtttaagattaatctccattttctttctcagagagattcccatctgctttaattttaaaatcatcactaacagtagctcaatcaattaacgttaacatcaataaaacatatacctttaaaaggtatgacaggaactatcttcatgtccttacccaagcaagtcatccatggataaaaacgttaccaggagctggaatacaaatgaggacttccattaaaatgctaaacatcattaaactcttttcaaagttgtctgtcacagggttcttcagtgttacctttgtctacatgctcatttcaggtcagacattga

SEQ ID NO: 4069 - protein, 82 aa, Homo sapien [sequence omitted]

SEQ ID NO: 4070 - DNA, 2516 bp, Homo sapien
ggcacgagggcagcgagtggccttcccggttggcgcgcgcccggggcggcggcgctggaggagctcgagacggagcctagttatgtctgggaggcgaacgcggtccggaggagccgctcagcgctccgggccaagggccccatctcctactaagcctctgcggaggtcccagcggaaatcaggctctgaactcccgagcatcctccctgaaatctggccgaagacacccagtgcggctgcagtcagaaagcccatcgtcttaaagaggatcgtggcccatgctgtagaggtcccagctgtccaatcacctcgcaggagccctaggatttcctttttcttggagaaagaaaacgagccccctggcagggagcttactaaggaggaccttttcaagacacacagcgtccctgccacccccaccagcactcctgtgccgaaccctgaggccgagtccagctccaaggaaggagagctggacgccagagacttggaaatgtctaagaaagtcaggcgttcctacagccggctggagaccctgggctctgcctctacctccaccccaggccgccggtcctgctttggcttcgaggggctgctgggggcagaagacttgtccggagtctcgccagtggtgtgctccaaactcaccgaggtccccagggtttgtgcaaagccctgggccccagacatgactctccctggaatctccccaccacccgagaaacagaaacgtaagaagaagaaaatgccagagatcttgaaaacggagctggatgagtgggctgcggccatgaatgccgagtttgaagctgctgagcagtttgatctcctggttgaatgagatgcagtggggggtgcacctggccagactctccctcctgtcctgtacatagccacctccctgtggagaggacacttagggtcccctcccctggtcttgttacctgtgtgtgtgctggtgctgcgcatgaggactgtctgcctttgagggcttgggcagcagcggcagccatcttggttttaggaaatggggccgcctggcccagccactcactggtgtcctgtctcttgtcgtcctgtccttcctatctccccaaagtaccatagccagtttccagatgggccacagactggggaggagaatcagtggcccagccagaagttaaagggctgagggttgaggtgagaggcacctctgctcttgttgggaggggtggctgcttggaaataggcccaggggctctgccagcctcggcctctccctcctgagttgccttctgttggtggctttcttcttgaacccacctgtgtaaagaggttttcagttccgtgggtttcccctttgattctgtaaatagtcccagagagaattcgtgggctgagggcaattctgtcttggaggaagaagctggacattcagcctgtggagtctgagttttgaaggatgtagggagccttagttgggtctcagaccataagtgtgtactacacagaagctgtgttttctagttctggtctgctgttgagatgtttggtaaatgccaggttgatagggcgctggctgcttggagcaaagggtgcatttcagggtgtggccaccaggtgctgtgagtttctgtggctcatggcctctgggctggtcccttgcacagggcccacgctggagtcttaccactctgctgcaggggtggaaggtggcccctcttgtcacccatacccatttcttacaaaataagttacaccgagtctacttggccctagaagagaaagttgaagagtcccagacctactagcattttgcaactatgcttgtaaagtcctcggaaagtttcctcgcgtaccagacagcggcgggggctgatagcaattttagtttttggcctccctatcctctcacatgagaacactgcctggatgcatctcatgatctctggagaatttccccatctttctcttctttccatcgtgtggattcaatagtttggatttgaaggctgccctgcccccgactctcctgccgcacccctggccattgtaccttttgatgtttagaagttcgtggaagtagacgctgaggtgtgcagaggagctggtggataacagagaatgccagggaagatgagtgctgggtcagggtacttggatgaaacggtgcaggccaggcgggccctaataaaaccctctgccaggtctgggagtcccaggccatctgctcaacgctctgtggtttgtcagacctgcaagcaagccccctgctggggaagcctaggtgtccttgagctgaaccgcactgaagaactcttgtcctcactggctgatgcagcagaactcttgggaaatgtcttagtcctgcagaatcaggagtcaccagatgatgcagagttgagatcatcattgcaaagttctctgttcctgaggaactaaatttaaggaaaaaatgggattttgttttagagttggaaaaaaagcctgattaaagagtttctgcctgttaaaaaaaaaaaaaaaaaaaaaaa

SEQ ID NO: 4071 - protein, 252 aa, Homo sapien
MSGRRTRSGGAAQRSGPRAPSPTKPLRRSQRKSGSELPSILPEIWPKTPSAAAVRKPIVLKRIVAHAVEVPAVQSPRRSPRISFFLEKENEPPGRELTKEDLFKTHSVPATPTSTPVPNPEAESSSKEGELDARDLEMSKKVRRSYSRLETLGSASTSTPGRRSCFGFEGLLGAEDLSGVSPVVCSKLTEVPRVCAKPWAPDMTLPGISPPPEKQKRKKKKMPEILKTELDEWAAAMNAEFEAAEQFDLLVE

SEQ ID NO: 4072 - DNA, 7130 bp, Homo sapien
cgctgtcccggagccggccagccccgtgcggatccactcgccccgcttcctctggatctctctaggagctgacactcgaaccttcacgacccattcggatttttccaggactcaggagtggcactgggaagaaggggaccgctttctgcaattggcctcgacactggctgccaagaagacctgtcgcctttgtttttaagtctccagaaatggaagaagaaggcgaagtcagttgaagtcacgagaaatcagcgaggcatttgaaggcgcttcctgaaaacctttattccctggcacgttgtctgtttcaacagccctgcccctcctcggagcctgcttgtggaattcttccccttcgggtgtgtggtggcattccccgccacgtccaatgtggactccaaaggatttgtcccttctttgtcatttgaaatgaaatgatggccacgcgtcggactggtctgtctgagggagatggtgacaagctcaaggcctgcgaggtctcaaaaaataaagatggaaaagaacaaagtgaaactgtatcactgtctgaagatgaaacattctcctggccaggtcccaaaacagttacgttgaaaagaacatctcaaggctttggttttacattaagacattttattgtttatcccccagagtctgcaattcaattttcatataaggatgaagaaaatggaaacagaggaggaaaacaaagaaaccgcttggaaccaatggataccatatttgttaagcaagttaaagaaggaggacctgcttttgaagctggattatgtacaggtgaccgaattataaaagtcaatggagaaagtgttattggcaaaacctattcccaagtaattgctttaattcaaaacagtgatacaacattggaacttagtgttatgccaaaagatgaagacattctccaagtgctacagtttacaaaggatgtcacagcactggcatattctcaagatgcctacctgaaaggcaacgaagcttatagcggcaatgcccgcaatatacctgaacctccaccaatctgctatccctggctgccatctgccccatcagccatggcacagccagttgaaatatctcctcctgactcatcattgagcaaacagcaaaccagtacaccagtactgacacaacctggtagggcctatagaatggaaatacaagtgcctccatcaccaacagatgttgcaaaatcaaacacagcagtgtgtgtttgcaatgaaagtgtaaggactgtcattgtgccttctgagaaggttgtagatttgttatccaatagaaacaaccatacaggtccttcacatagaactgaagaagtgaggtatggcgtgaatgagcagacctctttaaaaacagtgtcaagaaccacatcaccaccattatcaattcccaccactcatctaattcatcagcctgcaggctccagatcactggaaccttctggaattttacttaagtctggaaattacagtggacattctgatggaatctcaagcagcagatctcaagctgtggaggctccctctgtatctgttaatcactattcgccaaattcccatcagcacatagactggaaaaactataaaacttacaaagagtatattgataacagacgattgcacataggttgtcggacaatacaagaaagattagatagtttaagagcagcatctcaaagcacgacagattataaccaggtcgtccccaaccgcactactttgcagggacgacgtcgaagcacctctcatgatcgagtgccccagtctgtccagatacggcaacgcagtgtgtcccaagaaagactggaagattctgtgctaatgaagtattgtccaagaagtgcatctcaaggagcactgacgtctccatctgttagttttagtaatcatagaactcgttcatgggattatattgagggacaggatgaaaccttagaaaatgtcaattctggaactccaatacctgattccaatggagagaaaaaacagacttacaagtggagtgggtttactgaacaggatgatagacgaggtatttgtgaaagacctaggcagcaagaaattcataaatcttttcgaggttccaattttactgtggctccaagcgttgttaattctgataacaggcgaatgagtggtagaggagtgggatctgtgtcgcagtttaaaaaaattccaccagatctaaaaacattgcagtcaaacagaaattttcagactacttgtggaatgtcactgcctcggggtatttcacaagacaggtcacctcttgtgaaagtccgaagtaattctctgaaagctccttccacgcatgtcacaaaaccatcatttagccagaaatcatttgtttctatcaaagaccaaagaccagtaaatcacttgcatcagaacagtctgttgaatcagcagacatgggtaaggactgacagtgcccccgatcagcaagtggagactgggaaatccccctctttatctggagcctctgccaagcctgcccctcagtcgagtgaaaacgctggtacttcagatttagaactacctgtcagtcaaaggagtcaagatttaagtttacaagaggctgaaactgagcaatcagatactttagataataaagaagctgtcatcctaagggaaaaacctccatctggacgccagacaccgcagcctttaaggcatcagtcttacatcttggcagtaaatgaccaggagaccgggtcagacactacctgctggctgcccaatgatgcacgtcgagaggtccacataaaaagaatggaggaaagaaaagcctcgagtaccagtccgcctggcgattctttggcttccatcccatttatagatgaaccaactagccctagcattgatcatgatattgcacatatccctgcctctgctgttatatcagcctctacctctcaggtcccctccatagcaacagttcctccttgcctcacaacttcagctccattaattcgccgtcagctctcacatgaccacgaatctgttggccctcctagcctggatgctcagcccaactcaaagacagaaagatcaaaatcatatgatgagggtctggatgattacagagaagatgcaaaattgtcctttaagcacgtacctagtctgaagggaatcaagatcgcagacagccaaaagtcatcagaagactctgggtccagaaaagattcttcctcagaggtcttcagtgatgctgccaaggaagggtggcttcatttccgaccccttgtcaccgataagggcaagcgagttggtggaagtattcggccatggaaacagatgtatgttgtccttcggggtcattcactttacctgtacaaagataaaagagagcagacgactccgtctgaggaagagcagcccatcagtgttaatgcttgcttgatagacatctcttacagtgagaccaagaggaaaaatgtgtttcgactcaccacgtccgactgtgaatgcctgtttcaggctgaagacagagatgatatgctagcttggatcaagacgatccaggagagcagcaacctaaacgaagaggacactggagtcactaacagggatctaattagtcgaagaataaaagaatacaacaatctgatgagcaaagcagaacagttgccaaaaacacctcgccagagtctcagcatcaggcaaactttgcttggtgctaaatcagagccaaagactcaaagcccacactctccgaaggaagagtcggaaaggaaacttctcagtaaagatgataccagtcccccaaaagacaaaggcacatggagaaaaggcattccaagtatcatgagaaagacatttgagaaaaagccaactgctacaggaactttcggcgtccgactagatgactgcccaccagctcatactaatcggtatattccattaatagttgacatatgttgcaaattagttgaagaaagaggtcttgaatatacaggtatttatagagttcctggaaataatgcagccatctcaagtatgcaagaagaactcaacaagggaatggctgatattgatatacaagatgataaatggcgagatttgaatgtgataagcagtttactaaaatccttcttcagaaaactccctgagcctctcttcacaaatgataaatatgctgattttattgaagccaatcgtaaagaagatcctctagatcgtctgaaaacattaaaaagactaattcacgatttgcctgaacatcattatgaaacacttaagttcctttcagctcatctgaagacagtggcagaaaattcagaaaaaaataagatggaaccaagaaacctagcaatagtgtttggtcccacccttgttcgaacatcagaagacaacatgacccacatggtcacccacatgcctgaccagtacaagattgtagaaacgctcatccagcaccatgactggtttttcacagaagaaggtgctgaagagcctcttacaacagtgcaggaggaaagcacagtagactcccagccagtgccaaacatagatcatttactcaccaacattggaaggacaggagtctccccaggagatgtatcagattcagctactagtgactcaacaaaatctaagggttcttggggatctggaaaggatcagtatagcagggaactgcttgtgtcctccatctttgcagctgctagtcgcaagaggaagaagccgaaagaaaaagcacagcctagcagctcagaagatgaactggacaatgtattttttaagaaagaaaatgtggaacagtgtcacaatgatactaaagaggagtccaaaaaagaaagtgagacactgggcagaaaacagaagatcatcattgccaaagaaaacagcactaggaaagaccccagcacgacaaaagatgaaaagatatcactaggaaaagagagcacgccttctgaagaaccctcaccaccacacaactcaaaacacaacaagtcaccaactctcagctgtcgctttgccatcctgaaagagagccccaggtcacttctggcacagaagtcctcccaccttgaagagacaggctctgactctggcactttgctcagcacgtcttcccaggcctccctggcaaggttttccatgaagaaatcaaccagtccagaaacgaaacatagcgagtttttggccaacgtcagcaccatcacctcagattattccaccacatcgtctgctacatacttgactagcctggactccagtcgactgagccctgaggtgcaatccgtggcagagagcaagggggacgaggcagatgacgagagaagcgaactcatcagtgaagggcggcctgtggaaaccgacagcgagagcgagtttcccgtgttccccacagccttgacttcagagaggcttttccgaggaaaactgcaagaagtgactaagagcagccggagaaattctgaaggaagtgaattaagttgcaccgagggaagtttaacatcaagtttagatagccggagacagctcttcagttcccataaactcatcgaatgtgatactctttccaggaaaaaatcagctagattcaagtcagatagtggaagtctaggagatgccaagaatgagaaagaagcaccttcgttaactaaagtgtttgatgttatgaaaaaaggaaagtcaactgggagtttactgacacccaccagaggcgaatccgaaaaacaggaacccacatggaaaacgaaaatagcagatcggttaaaactgagacccagagcccctgcggatgacatgtttggagcagggaatcacaaagtgaatgccgagactgctaaaaggaaaagcatccggcgcagacatacactaggagggcacagagatgctaccgaaatcagcgttttgaatttttggaaagtgcatgagcagagcggggagagagaatctgaactttcagctgtaaaccggttaaaaccaaaatgctcagcccaggacctttccatctcagactggctggccagggaacgcctacgcaccagtacctctgaccttagcagaggagaaatcggagatccccagacagagaacccaagcacacgagaaatagccacgaccgacacacctttgtctcttcattgcaacacaggcagttcttccagcaccttggcttcaacaaacaggccccttctttccataccaccacagtcacctgaccaaataaacggagaaagcttccagaacgtgagcaaaaatgctagttctgcagcgaatgcccaacctcataaactgtctgaaaccccaggcactaaagcagagtttcatccctgtctttaaactgggggtatgtccactctagcaagtaaaaaaactactgttacacgttccagtaactctgtcaatattttcttgtatcagaattgttattatgcagggggccccccccccccttcatttgggctggtttcatcattttgcactgtgaaatagctttacagtgcattactacagccagaagaacatatatatatatatatatttaaaaatatatcggatagttgtatacaaatgagcaaggtatttgttgcaacttactacatagcatatacccaaaatcactgaagaaaatcgctggcatcagtgtgcagcaaatttgttcttttggtttcatcactaacaaaagtgcctcatcataaaaatacagttggtttttagggtgccatattgttaaaattagataacttacttacattgaataaacgaatgcgttttattggtaacagatatcattacatttaccagttttaacacaggtggatacagaacttcccccaaaagttttttttttctttagtcattccaggtggatctgagttttatattcaaacttttaatacagtttttgagttttgtgtgacttgaatttttaatctttctgtaaaatacgtaacttaaatgaacatattaaatgtgtatcttttcttcagataccagatttgatataatgttgtaacataggtgtgtagatagtggatcctggatggaactggcttctttatcgagaagaatataattctgcatgaggacttaatgaatccaaacctgtgtcatgcctgtgtgcatacccaattaaacactggaaataaaaaaaaaaaa

SEQ ID NO: 4073 - protein, 1957 aa, Homo sapien
MATRRTGLSEGDGDKLKACEVSKNKDGKEQSETVSLSEDETFSWPGPKTVTLKRTSQGFGFTLRHFIVYPPESAIQFSYKDEENGNRGGKQRNRLEPMDTIFVKQVKEGGPAFEAGLCTGDRIIKVNGESVIGKTYSQVIALIQNSDTTLELSVMPKDEDILQVLQFTKDVTALAYSQDAYLKGNEAYSGNARNIPEPPPICYPWLPSAPSAMAQPVEISPPDSSLSKQQTSTPVLTQPGRAYRMEIQVPPSPTDVAKSNTAVCVCNESVRTVIVPSEKVVDLLSNRNNHTGPSHRTEEVRYGVNEQTSLKTVSRTTSPPLSIPTTHLIHQPAGSRSLEPSGILLKSGNYSGHSDGISSSRSQAVEAPSVSVNHYSPNSHQHIDWKNYKTYKEYIDNRRLHIGCRTIQERLDSLRAASQSTTDYNQVVPNRTTLQGRRRSTSHDRVPQSVQIRQRSVSQERLEDSVLMKYCPRSASQGALTSPSVSFSNHRTRSWDYIEGQDETLENVNSGTPIPDSNGEKKQTYKWSGFTEQDDRRGICERPRQQEIHKSFRGSNFTVAPSVVNSDNRRMSGRGVGSVSQFKKIPPDLKTLQSNRNFQTTCGMSLPRGISQDRSPLVKVRSNSLKAPSTHVTKPSFSQKSFVSIKDQRPVNHLHQNSLLNQQTWVRTDSAPDQQVETGKSPSLSGASAKPAPQSSENAGTSDLELPVSQRSQDLSLQEAETEQSDTLDNKEAVILREKPPSGRQTPQPLRHQSYILAVNDQETGSDTTCWLPNDARREVHIKRMEERKASSTSPPGDSLASIPFIDEPTSPSIDHDIAHIPASAVISASTSQVPSIATVPPCLTTSAPLIRRQLSHDHESVGPPSLDAQPNSKTERSKSYDEGLDDYREDAKLSFKHVPSLKGIKIADSQKSSEDSGSRKDSSSEVFSDAAKEGWLHFRPLVTDKGKRVGGSIRPWKQMYVVLRGHSLYLYKDKREQTTPSEEEQPISVNACLIDISYSETKRKNVFRLTTSDCECLFQAEDRDDMLAWIKTIQESSNLNEEDTGVTNRDLISRRIKEYNNLMSKAEQLPKTPRQSLSIRQTLLGAKSEPKTQSPHSPKEESERKLLSKDDTSPPKDKGTWRKGIPSIMRKTFEKKPTATGTFGVRLDDCPPAHTNRYIPLIVDICCKLVEERGLEYTGIYRVPGNNAAISSMQEELNKGMADIDIQDDKWRDLNVISSLLKSFFRKLPEPLFTNDKYADFIEANRKEDPLDRLKTLKRLIHDLPEHHYETLKFLSAHLKTVAENSEKNKMEPRNLAIVFGPTLVRTSEDNMTHMVTHMPDQYKIVETLIQHHDWFFTEEGAEEPLTTVQEESTVDSQPVPNIDHLLTNIGRTGVSPGDVSDSATSDSTKSKGSWGSGKDQYSRELLVSSIFAAASRKRKKPKEKAQPSSSEDELDNVFFKKENVEQCHNDTKEESKKESETLGRKQKIIIAKENSTRKDPSTTKDEKISLGKESTPSEEPSPPHNSKHNKSPTLSCRFAILKESPRSLLAQKSSHLEETGSDSGTLLSTSSQASLARFSMKKSTSPETKHSEFLANVSTITSDYSTTSSATYLTSLDSSRLSPEVQSVAESKGDEADDERSELISEGRPVETDSESEFPVFPTALTSERLFRGKLQEVTKSSRRNSEGSELSCTEGSLTSSLDSRRQLFSSHKLIECDTLSRKKSARFKSDSGSLGDAKNEKEAPSLTKVFDVMKKGKSTGSLLTPTRGESEKQEPTWKTKIADRLKLRPRAPADDMFGAGNHKVNAETAKRKSIRRRHTLGGHRDATEISVLNFWKVHEQSGERESELSAVNRLKPKCSAQDLSISDWLARERLRTSTSDLSRGEIGDPQTENPSTREIATTDTPLSLHCNTGSSSSTLASTNRPLLSIPPQSPDQINGESFQNVSKNASSAANAQPHKLSETPGTKAEFHPCL

SEQ ID NO: 4074 - DNA, 1435 bp, Homo sapien
ggcacgaggcggcggcggagcgggcggcggagcggcggcagcagcggtgagcgcgagccccggagccccgggcggccggcctcccgcgcccgcgcagccccgcgtctgcgtccggccggagacgccgggccccgcgccgcgccgcgccatgtcggtgaacatggacgagctgcggcaccaggtcatgatcaaccagttcgtgctggccgcgggctgcgcggccgaccaggcgaagcagctgctgcaggcggcccactggcagttcgagaccgcgctgagcacgttcttccaagaaaccaacattcccaacagccaccaccaccaccagatgatgtgcactcccagcaacacccctgccacgccgcccaacttccccgatgcgctggccatgttctccaagctccgcgcctccgagggcctgcagagcagcaacagccccatgacagccgcagcctgctccccacctgcaaacttcagccccttctgggcctcgtccccgcccagccaccaggcgccctggatcccgccctcctcccccaccaccttccaccacctccaccgcccacagcccacgtggcccccaggagcacagcaggggggcgcccagcagaaagccatggcggccatggacggccagagatgagactggacgccgccgggcgctgggctggagctgggggcagcccagggttgtggggacacaggagggccagggaggggggagccggggagggcagggggtttcccgaagatcgcactggaagattttataaaagaatttttgtgggtcggggggacagtaaacttcctgggccacgtgggtccttcaggagtttttcaggcaagtttttcctctgtttttaatatataactataatatatatgaatagataaatataactaatgtgcgtgagaatgggcctggcacacctggggtgctcgggggtagggctgccatgctgcagagctgatggagtgatgttgtgggcacaaggcatctgtcagctgcctcctttaacagccatgccttctggaatctggaagaggacaccactcctgcagtcaccgggcagccacatagcagctgcaggtcccaggagggcctgaggtcaaagctgtggaaggccctcttggtatcagggctctctccccatggcctcttccccacctctgattgctggttgtggccccatagctcatcacccctgtctcctgctgaatgtgcagggctgatgtggcactgaggagctgactttggtcaaaggccaggctctgcccagcaggggacttgactgcccctcccgctgcgtgtccaggtccaaagtggagagcctgcctttgggtttagttcccgaatcagaatcccatctcaccagggcgaaattttaatttaaaaacttaaaaagagacttttctaaaaaaaaaaaaaaaaaaa

SEQ ID NO: 4075 - protein, 164 aa, Homo sapien
MSVNMDELRHQVMINQFVLAAGCAADQAKQLLQAAHWQFETALSTFFQETNIPNSHHHHQMMCTPSNTPATPPNFPDALAMFSKLRASEGLQSSNSPMTAAACSPPANFSPFWASSPPSHQAPWIPPSSPTTFHHLHRPQPTWPPGAQQGGAQQKAMAAMDGQR

SEQ ID NO: 4076 - DNA, 5475 bp, Homo sapien
gaaaagagagcacgcaaaacaacatgggatgatccgcacagagataacaggagctgagattgcggaagaaatggagaaggaaaggcgcctctttcagctccaaatgtgtgaatatctcattaaagttaatgaaatcaagaccaaaaagggtgtggatctgctgcagaatcttataaagtattaccatgcacagtgcaatttctttcaagatggcttgaaaacagctgataagttgaaacagtacattgaaaaactggctgctgatttatataatataaaacagacccaggatgaagaaaagaaacagctaactgcactccgagacttaataaaatcctctcttcaactggatcagaaagaatctaggagagattctcagagccggcaaggaggatacagcatgcatcagctccagggcaataaggaatatggcagtgaaaagaaggggtacctgctaaagaaaagtgacgggatccggaaagtatggcagaggaggaagtgttcagtcaagaatgggattctaaccatctcacatgccacatctaacaggcaaccagccaagttgaaccttctcacctgccaagtaaaacctaatgccgaagacaaaaaatcttttgacctgatatcacataatagaacatatcactttcaggcagaagatgagcaggattatgtagcatggatatcagtattgacaaatagcaaagaagaggccctaaccatggccttccgtggagagcagagtgcgggagagaacagcctggaagacctgacaaaagccattattgaggatgtccagcggctcccagggaatgacatttgctgcgattgtggctcatcagaacccacctggctttcaaccaacttgggtattttgacctgtatagaatgttctggcatccatagggaaatgggggttcatatttctcgcattcagtctttggaactagacaaattaggaacttctgaactcttgctggccaagaatgtaggaaacaatagttttaatgatattatggaagcaaatttacccagcccctcaccaaaacccaccccttcaagtgatatgactgtacgaaaagaatatatcactgcaaagtatgtagatcataggttttcaaggaagacctgttcaacttcatcagctaaactaaatgaattgcttgaggccatcaaatccagggatttacttgcactaattcaagtctatgcagaaggggtagagctaatggaaccactgctggaacctgggcaggagcttggggagacagcccttcaccttgccgtccgaactgcagatcagacatctctccatttggttgacttccttgtacaaaactgtgggaacctggataagcagacggccctgggaaacacagttctacactactgtagtatgtacagtaaacctgagtgtttgaagcttttgctcaggagcaagcccactgtggatatagttaaccaggctggagaaactgccctagacatagcaaagagactaaaagctacccagtgtgaagatctgctttcccaggctaaatctggaaagttcaatccacacgtccacgtagaatatgagtggaatcttcgacaggaggagatagatgagagcgatgatgatctggatgacaaaccaagccctatcaagaaagagcgctcacccagacctcagagcttctgccactcctccagcatctccccccaggacaagctggcactgccaggattcagcactccaagggacaaacagcggctctcctatggagccttcaccaaccagatcttcgtttccacaagcacagactcgcccacatcaccaaccacggaggctccccctctgcctcctaggaacgccgggaaaggtccaactggcccaccttcaacactccctctaagcacccagacctctagtggcagctccaccctatccaagaagaggcctcctcccccaccacccggacacaagagaaccctatccgaccctcccagcccactacctcatgggcccccaaacaaaggcgcagttccttggggtaacgatgggggtccatcctcttcaagtaagactacaaacaagtttgagggactatcccagcagtcgagcaccagttctgcaaagactgcccttggcccaagagttcttcctaaactacctcagaaagtggcactaaggaaaacagatcatctctccctagacaaagccaccatcccgcccgaaatctttcagaaatcatcacagttggcagagttgccacaaaagccaccacctggagacctgcccccaaagcccacagaactggcccccaagccccaaattggagatttgccgcctaagccaggagaactgccccccaaaccacagctgggggacctgccacccaaaccccaactctcagacttacctcccaaaccacagatgaaggacctgccccccaaaccacagctgggagacctgctagcaaaatcccagactggagatgtctcacccaaggctcagcaaccctctgaggtcacactgaagtcacacccattggatctatccccaaatgtgcagtccagagacgccatccaaaagcaagcatctgaagactccaacgacctcacgcctactctgccagagacgcccgtaccactgcccagaaaaatcaatacggggaaaaataaagtgaggcgagtgaagaccatttatgactgccaggcagacaacgatgacgagctcacattcatcgagggagaagtgattatcgtcacaggggaagaggaccaggagtggtggattggccacatcgaaggacagcctgaaaggaagggggtctttccagtgtcctttgttcatatcctgtctgactagcaaaacgcagaaccttaagattgtccacatccttcatgcaagactgctgccttcatgtaaccctgggcacagtgtgtatatagctgctgttacagagtaagaaactcatggaagggccacctcaggagggggatataatgtgtgttgtaaatatcctgtggttttctgccttcaccagtatgagggtagcctcggacccggcgcgccttactggtttgccaaagccatccttggcatctagcacttacatctctctatgctgttctacaagcaaacaaacaaaaataggagtataggaactgctggctttgcaaatagaagtggtctccagcaaccgttgaaaggcatagaattgactctgttcctaacaatgcagtattctcaattgtgttactgaaaatgcaacattagcaaagaggtgggttctgttttccaggtgaaacttttagctccatgacagaccagcctgtagttatctgtgtacacagtttacagctacaaaaacctactttggtatttattacagaaaagtgctcagttaaatgtaagtgttattccttcagcaaaatattcactgacccaaaactctttatggcattttacaatgcacacagcctcatgcaagtttagacaagtggatttatactgtcttatgagtgcccgcccctgatatattacctcattatgcaaaaataacatatctttcatgactattttgacaaaagtttaaaacacatatgaagttcaaatttcaggaaccaaggactgccagaaaatattagcctctacattacgcatgcatttagaagcttacctgaaatctgccttttataaaggaatagtatggataagtggaattgtacattttttaaacttgattgccattaaagcagaaattataaggttgcaacaatatttgtttctaatcactggctttctcaagagtatggattgacatattgtgttatgaatgcacatctctcagatgtgttgaagcatccattgcatccattttttattattttcttagttttgttcttggacaaatttaaacttttaaaagattattcaagatgaatttaaaagtcaacccttcacacagtttccctactgtatgtagaatccaggtgctgaaaccaagtgtttcttttcccatgctctttgttaaaccccaattatagataatttttccagtcttaagctctgtccaccttcaagtcaattcataaccaagtttttgaacgctgctatgaattgcactgtgaaaagcactcttccctctcagttttcttttcatcccagccatgtttatcagatccttaagaacattgtatttcagtcttttacatcagtctgaattttggaaaagaatgcaatagttgtactccacagtcagtggaactgttccctgagtccgaggctcatgtgtcattctggcactacatttgcttaaattgctattttggcaacagcacagaaaactaatatttttaagcagagaatcttggcaatgagtgagagatgttaatttcacagaagcacaactcccaacccaacccttaggaaaagccctcttccatcgttacagtgctcagtgaatattaatttagttctgcttaagtggttgctatacaaactttgaatagccacctaataaataaaccttgcatgacaaacctgcaaaatattttatcagctgttattggaaagtgattttaagcaattgcttcctcagtgtcagggcacatgtgaatttccacaccaaacagagcatgaggaaccagttgacatgctgggttgtgactggcagctttagcagcctcggtactgaagccacaccagtgtccggatggaagtctgcatctgaggttgctcagtgtcccggtcattcatttacacattttaacttgcattaaagagctgttcttttctgtggcctagactcttttcactgatctcaaaataaactggtttttttcaaaaaaaaaaaaaaaacaaaaacaaaaaaaaaacacaaaagctgcatgtctaaaattacatggagttagtgtctattctttttccccttttgcagcaacttacacagcatttttaacaccttttttttctagtttttttgttcggttttgttttccatcaggaatttgagttctctctaacccagcttactgtgggacataggaaaactcagtagaaatacctttggtgatcttgttgagtttaagtctgatcttgatcttaaactcagtaagccactatctgcaattttgtacattatatagtattttgaagatatggaaccttatgaaaaaaaaatagcaaattagttctttttcccccagaggggaaagttatgttctgcaaatagtgtgtgtcttattttactgttgaacagcaattgctatttatttttttattgcctagaacttcaacatgttgtataggaatcctgtagtgccactagttaaatgccgaattctcatctggatgttaccatcaaacatcagtacacttgtcatttcacatgtgtttaatgtgacagtttttcagtactgtatgtgttaatttctactttttttaatatttaaaattgcttttaaataaacatattctcagttgatccc

SEQ ID NO: 4077 - DNA, 2458 bp, Homo sapien
atgggaaaaatgcttagaggttactattttgactacaaagttgagtttttttctgtagttaccataatttcattgaagcaaatgaatgagtttgagaggtttgtttttatagttgtgttgtattacttgtttaataataatctctaattctgtgatcaggtactttttttgtgggggtttttttttgtttttttttttttgttgttgtttttgggccatttctaagcctaccagatctgctttatgaaatccaggggaccaatgcattttatcactaaaactatttttatataattttaagaatataccaaaagttgtctgatttaaagttgtaatacatgatttctcactttcatgtaaggttatccacttttgctgaagatattttttattgaatcaaagattgagttacaattatacttttcttacctaagtggataaaatgtacttttgatgaatcagggaatttttttaaagttggagtttagttctaaattgactttacgtattactgcagttaattccttttttggctaggggtggtttgataaaccacaattggctgatattgaaaatgaaagaaacttaaaaggtgggatggatcatgattactgtcgataactgcagataaatttgattagagtaataattttgtcatttaaaaacacagttgtttatactgcccatcctaggatgctcaccttccaagattcaacgtggctaaaacatcttctggtaaattgtgcgtccatattcattttgtcagtagccaggagaaatggggatgggggaaatacgacttagtgaggcatagacatccctggtccatcctttctgtctccagctgtttcttggaacctgctctcctgcttgctggtccctgacgcagagaccgttgcctcccccacagccgtttgactgaaggctgctctggagacctagagtaaaacggctgatggaagttgtgggacccacttccatttccttcagtcattagaggtggaagggaggggtctccaagtttggagattgagcagatgaggcttgggatgcccctgctttgacttcagccatggatgaggagtgggatggcagcaaggtggctcctgtggcagtggagttgtgccagaaacagtggccagttgtatcgcctataagacagggtaaggtccgaagagctgagcctgtaattctgctgtaataatgatagtgctcaagaagtgccttgagttggtgtacagtgccatggccatcaagaatcccagatttcaggttttattacaaaatgtaagtggtcacttggcgattttgtagtacatgcatgagttaccttttttctctatgtctgagaactgtcagattataacaagatggcaaagagatcgttagagtgcacaacaaaatcactatcccattagacacatcatcaaaagcttatttttattcttgcactggaagaatcgtaagtcaactgtttcttgaccatggcagtgttctggctccaaatggtagtgattccaaataatggttctgttaacactttggcagaaaatgccagctcagatattttgagatactaaggattatctttggacatgtactgcagcttcttgtctctgttttggattactggaatacccatgggccctctcaagagtgctggacttctaggacattaagatgattgtcagtacattaaacttttcaatcccattatgcaatcttgtttgtaaatgtaaacttctaaaaatatggttaataacattcaacctgtttattacaacttaaaaggaacttcagtgaatttgtttttattttttaacaagatttgtgaactgaatatcatgaaccatgttttgatacccctttttcacgttgtgccaacggaatagggtgtttgatatttcttcatatgttaaggagatgcttcaaaatgtcaattgctttaaacttaaattacctctcaagagaccaaggtacatttacctcattgtgtatataatgtttaatatttgtcagagcattctccaggtttgcagttttatttctataaagtatgggtattatgttgctcagttactcaaatggtactgtattgtttatatttgtaccccaaataacatcgtctgtactttctgttttctgtattgtatttgtgcaggattctttaggctttatcagtgtaatctctgccttttaagatatgtacagaaaatgtccatataaatttccattgaagtcgaatgatactgagaagcctgtaaaaaggagaaaaaaacataagctgtgtttccccataagtttttttaaattgtatattgtatttgtagtaatattccaaaagaatgtaaataggaaatagaagagtgatgcttatgttaagtcctaacactatagtagaagaatggtagcagtgcaaataaattacatttttcccaaaaaaaaaaaaaaaaaaaaa

SEQ ID NO: 4078 - protein, 47 aa, Homo sapien
MGIMLLSYSNGTVLFIFVPQITSSVLSVFCIVFVQDSLGFISVISAF

SEQ ID NO: 4079 - DNA, 4415 bp, Homo sapien
gaccgcggctgcaggaacggaggcggaaggggccctgcggcgacgacgtcgtcgacgggggtggccgtgggagctgagcacggagaagactccctctctcggaagccggatcccgagccgggcaggatggatcaccaccagccggggactgggcgctaccaggtgcttcttaatgaagaggataactcagaatcatcggctatagagcagccacctacttcaaacccagcaccgcagattgtgcaggctgtgtcttcagcaccagcacttgaaactgactcttcccctccaccatatagtagtattactgtggaagtacctacaacttcagatacagaagtttacggtgagttttatcccgtgccacctccctatagcgttgctacctctcttcctacatacgatgaagctgagaaggctaaagctgctgcaatggcagctgcagcagcagaaacatctcaaagaattcaggaggaagagtgtccaccaagagatgacttcagtgatgcagaccagctcagagtggggaatgatggcattttcatgctggcatttttcatggcatttattttcaactggcttggattttgtttatccttctgtatcaccaataccatagctggaaggtatggtgctatctgcggatttggcctttccttgatcaaatggatccttattgtcaggttttctgattattttactggatatttcaatggacagtattggctttggtggatatttcttgtacttggcctgctccttttcttcagaggatttgttaattatctaaaagtcagaaacatgtctgaaagtatggcagctgctcatagaacaaggtatttcttcttattgtagagactgcatcaacccgacattcctttcttataccaatgtgaaatttccagatcatctgtaaacctacaactttaatagaagactactaataacagaagacaaattagtgaagaaaagacggagtttcgaaattgaatggcagggtggtttttgcttacaagccatttctgttcattctttaagtatctatatttcatttgttttgcacatatgcatatgtgcccatttaagatatttgcatatacttgatagaaaccataaagttgtagcagttaagtccagtcacatttggttaatcagtgtttgatataattgaaagagttgagtggataaacagtcttccagcttgtaaatgccattgacttctgacctgacatttagtataataaaaatgaaattcttaaccatgtcaaatgatttagtttctggctcttagactcatctggcagttctacacatgaaacatcttttgttatataaggtgtattgaaacctgcagtgctgattattagaaaggatttgtcggatttttgaacatgatatttacattattatttaggaaaactcttcctgtaaataaccatgcataacttactttctgcaatgttttcttagaaattgtgtccagatagctttcactaattttaaattaagtgaactaaatatatatgtgtatatgtatacacatatatatacacacacacatatatatatttagaaacgtgagtgttaaagatagaatttgttttaggacaaattttaagaaaatgtgggaataccaaatgtcctttataagaaaaataaattttgttttaagggacataccagttttagggattttcagatgggaagctgcatttttaggattgcccatcttaagagatcttgcaggaagagattgtattagatattatatttatttcatttaagataattttcaaagttaattttctaaataagataattctcatttgtgtttgtcttttaaaaggccaataaaatatctttcagtatcattgtaataattttttagagtttaatttgtaaagcttagcaaataaaatcttgtactatgaatagcttcttgctttatgactttaggattaacttgtaaaaaacatatcctgaactgagatatgcaaaatactcattttcaagttatggaaatgtgtttgtggcatataggactgtggggtctgtgtgtgtagtgagagtgtgtagccactattataactggaatttaatttacattcataaactactatatttcccatcttgcaaatcattttatgtctcatctgtttttcctttcggttatatctttggttttgaataccaacatttaaaatgatggtattttatcttttaaacttaaaaattatttaatacagctatatggaccttataaaattgatttcttatttattattagacattactactaaaaggtacatctaactattcagggacatttttccatttccaaaaaataaaatttattatgctttataacctcttctgtattttctaattttttcattgtctttgataaataaaacagttttgttttgctaatatagcctattttttgttttgtctcattcagtttactttcctgcgtagaatttttattgttatattaaaatttttattgttgtattaaagtacctgtgttacaccccttgaagtaagacagtagcatggggtaaagaaaaaatatttagtttagttgcctaatttggaagttaattaaaattaaactgtactaataacatattcaaactcatgctggatctctttcatattaatttcttatagacctgtactttattctttcaataatttttaaatgaaattaagctttgctacatggtaattaaataattactaggaagcttagctatcaaacatcgacttactaaaatttcattttagcttttatggtatatgtgcttgttttctgaatatggatacatgttacttttgatccagcatcaaaacttcactttttgttttgacttttccccccaaatctgtaaggttcaagtatacatattactgaatcctctataattggcataattcaatggtagccttaaatctcatcatgtaagcaggggaatcagaatgttattttcaagaacttaatgttcccttcagatatataaaatcctgcatacttcatttcctgtgagcttgaacagctgctgttgtgttttggggatgcttgatcatctttgcactctgccttaaagattgaaaaatcaaaactcttgttagggtatctaaacatttttgagtgtgaactggggattggaagttaatacaaaaaaatttcaaattatttctattgtaaatgaataagctagtcatggctaggataatccattttcatgtatttatgcaataaactgaattttaaggcaaaaacaacacttttctatatagtgtatgcaggacagattttagaaacttagattaaaatacaaatcccattacatttggttaaaatgaatctctgcttaatggaaaaaatactaatctttagcctattttgagtctataagatatatttcattttagacatgccttctaagttgttcacagatttttacctgctaaaacaatattatttccagtaaaacctctcctaacaggaaaagtggagttcaaaatatccaattggagaaaaattcagagttccttcattaaatataatttttttcatctagtatgtactatttcaagaagtgcaaaaagtaatgatagtgaatgtgataccatacttaactaaggtaatatatatccttagtttgctcaaaagagtcctggttattcctgttttctcagcttaatagtgcctcatcgtactctcaaaagtgttctaatttggaggataagttatatgatcatcctgtgtataattgtagactgtaccaagaagcaactaccttagctccactgccctttgagggatggaactggggtaagggcaggagccagttattattgccacagtgttttctaatgaaccatttggcctgtagaagaggaatagtattttttttaatagttgtatttgaatgattccagcttatcgtaaatactaaactgaatggcttttatatttttaactgctgttaaatgttattttagcatttattagttgtttattatttaattcttcaaatagtcatatgaaaacatatatttgataaaggtcaattgttagatgataatgtgccattcattatcataggaatgtccttgcccatatataaaacatgctggcatgtattttacttgttaataaagttgtatagatgtggaagtgtgaacctgtgatgcatccttttcaaaatcagtttaagattcgcatattatcatgactgtgacctcactaaactgtttatgtgacaaacctttcaagattggagatgaaaacaacacttgtgaaattaggttggggttgcaacatcttttaacttctcagttatttgtatgtcaggaaacagattgtggtttaattttaataaacaaaatatcatctttttgaaaat

SEQ ID NO: 4080 - protein, 284 aa, Homo sapien
DRGCRNGGGRGPAATTSSTGVAVGAEHGEDSLSRKPDPEPGRMDHHQPGTGRYQVLLNEEDNSESSAIEQPPTSNPAPQIVQAVSSAPALETDSSPPPYSSITVEVPTTSDTEVYGEFYPVPPPYSVATSLPTYDEAEKAKAAAMAAAAAETSQRIQEEECPPRDDFSDADQLRVGNDGIFMLAFFMAFIFNWLGFCLSFCITNTIAGRYGAICGFGLSLIKWILIVRFSDYFTGYFNGQYWLWWIFLVLGLLLFFRGFVNYLKVRNMSESMAAAHRTRYFFLL

SEQ ID NO: 4081 - DNA, 4585 bp, Homo sapien
gaggaggccgcagcagtcgccgcgcgaacatggcggccgaaatccactccaggccgcagagcagccgcccggtgctgctgagcaagatcgaggggcaccaggacgccgtcacggccgcgctgctcatccccaaggaggacggcgtgatcacggccagcgaggacagaaccatccgggtatggctgaaaagagacagtggtcaatactggcccagcatttaccacacaatggcctctccttgctctgctatggcttaccatcatgacagcagacggatatttgtgggccaggataatggagctgtaatggaatttcacgtttctgaagattttaataaaatgaactttatcaagacctacccagctcatcagaaccgggtgtctgcgattatcttcagcttggccacagagtgggtgatcagtaccggccacgacaagtgtgtgagctggatgtgcacgcggagcgggaacatgctcgggaggcacttcttcacgtcctgggcttcgtgtctgcaatatgactttgacactcagtatgctttcgttggtgattattctgggcagatcaccctgctgaagcttgaacagaacacgtgttcagtcatcacaaccctcaaaggacatgaaggtagtgtcgcctgcctctggtgggaccctattcagcggttactcttctcaggagcatctgacaacagcatcatcatgtgggacatcggaggaaggaaaggccggacgctgttacttcagggccatcatgacaaggtgcagtcgctgtgctaccttcagctcaccaggcagctcgtctcctgttcctcggacggcggaattgcagtgtggaacatggatgttagcagagaagaggctcctcagtggttggaaagtgattcttgtcagaaatgtgagcagccatttttctggaacataaagcagatgtgggacaccaagacgctggggctaagacaacatcactgcaggaaatgcgggcaggctgtctgcgggaagtgcagcagcaagcgctcaagttacccagtcatgggcttcgagttccaagtccgggtttgtgattcttgttacgactccatcaaagatgaagatcggacttctctagcgacctttcatgaaggaaaacataacatttcccacatgtccatggacattgccaggggactgatggtgacctgtgggaccgaccgcattgtaaagatctgggacatgacacctgtggtgggctgcagtctggcgactgggttttctccgcactgatctgagagctgggcggcgtccacacctaagaacagcagctccaccaaatgaagtccctctcacgcagctccacagcgctgtctcgtgaatggacagtagccacttacaaacaaatcaacattcttaaaaagaaaatgtaaaggtgtgttttggggcatttgtggaacttacccatggggactaatatggaaaaggtctgtccatagtggttccctgaagactggaattacttcagcaaaacttccccatgaacagctaatgtgtagtgaaagaatgagctagcaaatgagttttagcggggacaaaaaatcaaacaaaaaagtgaatgcttagaaccttctcaaagcagtcacaagtacagacacttcacttagcctagggggccttccagggttcttgtggctgttgtcagagcaggagctgggggagggaagacttgttctctctttcttgaggggtggcattaggaacttacgaaaccagagacctttccctatgacttggcagtatgtgaatatcctctacacttagttattgataaacttcttaaagagatctgttattttcaggtagtgccataatctgcacttagcattggcttgcttcagttgtttctcttcccagccagtatgccacaggtgaactttcgaggttgtcattaagtaagttgtgaaatttctgtaataacaaaggcagtccgcattcttccctttcccccaaattcctagggcaaaacttttttatggtgctgttaacatgggagtcacacaagccgcctgactttttctcattgccattagtaatgactgatggaaaacccagccaccactgtgatgcgaaatgatcagtctgttgcctgaaacagcccagtcctcttaactgaaacagcattctacttcttgttccaagatgagcctctgcaatattctggcaatttaatataccccctacaaaagcactccacagcttttacactattttgactttgagttataactagtattattcatgttttcataaaaagaagttagtgacccagagctataatcatccatcaagtcttccacaataattcccaactcataaattgctttcctaacaactagcaaaagctattgttcataatggcatttaaagcttttgggcactgtgtaccaggatgaggaagagaagaaatgaggagcctgtcttttaatattccagtatttgtgtgtttgattttttttgacaacagtacatatatctatttctctagggatatggaagtaagtggagaagggcctacctttttaaaggacaaatataaaaatagcaacagtatctttgctaatcttactaatggatattgattaaaaaaaaaaaacctcagtactgcatcactgtgttgggatcgtaccaggacaatagggtcattccatatgataaaactaaaggactaaatttgttttataatgatgtcttagagggactgaaaagtttaaggaggcgatcgaactaaaatgtcttaatggctgtgtgacacacgtaaggaaaggaaagggggtcacgcacatcatgtactggaatgatctgcattaaacattgacttgtcttcagaaataagactgaagggttttgttgttccttagagttttcgtgttacatcacctaaagagatttcttttaaaaactttctagactctttgcaaaatgtatattactaacatagtttggaagaaaaattgagtagtggtaagttttgttcaagcacaatgttgaatgttaagcttcctgtattaattttagttcagttaatggttcagcccatacaaaggtgctatcctagggattttatgaattcctgaaaggaaaatagaatatgatcaattccttgccctgtggaagagtgcagaactgtggttttgttttcctttgacttctgtaaaatgtgaccgtttgacatctgtggtagattgaacggaatatcacagctgctgagtttactccatagctttcaaaccttttttattttaagaaattcttgaaaaaccctatgttccatgggaacataaagttattatagtgcctcctaaggggttaatataaatcaaggaggaagtttatatttaaggaagaattggagtgacgtatcttagaaaaggaaaggctgatgtttccatatagcttgctctccaccaggcctatcatttttctttttagagacaaacgtgacaggctagtcttgtctctctcatatgctaggtagcaaatggggtgatatttttatagaagtgggcaaaaattattttctcaattttactgagtaggcacagaagaaaagtacagataggctgatggttattgccttattttgactgcatttctcttaaatggatcatttaaattagttcttcaagtaacagtttactggttgttccattcctgaatatgcaggctaatttgtacagatagggattaaggaatacagactattagagaagatccttatatttacatctagtatatatgtggtaaggaaatgccgattcttcattataaacaagttttaaaattgttctttcttagttcaaatgatagcaatacccctatagcattaggtagaaacaaattattcattacatcgtaaatctctttactatgtcctagctctgtcctgctacctaaaggatataaagaaatattattgctctagaatgtattactttgttctcccatgaaagaattcagtttgttagtacctatatttttaaactggtgaaactgacccaaatatgtaataaataccatagtagctcagacccaaggagatatttttctaaaatcagttttcgttaaagtacttctacttccgttattggatatggtatctcctaaagtgtaaaaaaaatctgttactatatagtgataaaccatctgctcatcgtaagtgtaaggcttaacaaataagtaatacatgctatatttattcaagtgtctattgcttaattgttaattgtgagcagatttattgaatgcctattctattttctgcagtttacaatacaataactctttgagtaagttgaagtttaattgtgcaacaaatttgtattagagtacaatttaaagtgtttttctctatagccttttttgactggggaagcaaggggtaatgttaattagtacactttgttcttgtactagctatgtttctataagatatggtgccctgtgtatcccagagatgctagaaaactgttctttgctcctatttgtgggttctgtttttgtgggttttttttttttttgagaaaatgtacacaataaaacattccttgcttgtt

SEQ ID NO: 4082 - protein, 410 aa, Homo sapien
MAAEIHSRPQSSRPVLLSKIEGHQDAVTAALLIPKEDGVITASEDRTIRVWLKRDSGQYWPSIYHTMASPCSAMAYHHDSRRIFVGQDNGAVMEFHVSEDFNKMNFIKTYPAHQNRVSAIIFSLATEWVISTGHDKCVSWMCTRSGNMLGRHFFTSWASCLQYDFDTQYAFVGDYSGQITLLKLEQNTCSVITTLKGHEGSVACLWWDPIQRLLFSGASDNSIIMWDIGGRKGRTLLLQGHHDKVQSLCYLQLTRQLVSCSSDGGIAVWNMDVSREEAPQWLESDSCQKCEQPFFWNIKQMWDTKTLGLRQHHCRKCGQAVCGKCSSKRSSYPVMGFEFQVRVCDSCYDSIKDEDRTSLATFHEGKHNISHMSMDIARGLMVTCGTDRIVKIWDMTPVVGCSLATGFSPH

SEQ ID NO: 4083 - DNA, 4415 bp, Homo sapien; identical to SEQ ID NO: 4079

SEQ ID NO: 4084 - DNA, 2457 bp, Homo sapien
acaggaagtgaagagcttccgccgggagaccgcggctgcaggaacggaggcggaaggggccctgcggcgacgacgtcgtcgacgggggtggccgtgggagctgagcacggagaagactccctctctcggaagccggatcccgagccgggcaggatggatcaccaccagccggggactgggcgctaccaggtgcttcttaatgaagaggataactcagaatcatcggctatagagcagccacctacttcaaacccagcaccgcagattgtgcaggctgcgtcttcagcaccagcacttgaaactgactcttcccctccaccatatagtagtattactgtggaagtacctacaacttcagatacagaagtttacggtgagttttatcccgtgccacctccctatagcgttgctacctctcttcctacatacgatgaagctgagaaggctaaagctgctgcaatggcagctgcagcagcagaaacatctcaaagaattcaggaggaagagtgtccaccaagagatgacttcagtgatgcagaccagctcagagtggggaatgatggcattttcatgctggcatttttcatggcatttattttcaactggcttggattttgtttatccttctgtatcaccaataccatagctggaaggtatggtgctatctgcggatttggcctttccttgatcaaatggatccttattgtcaggttttctgattattttactggatatttcaatggacagtattggctttggtggatatttcttgtacttggcctgctccttttcttcagaggatttgttaattatctaaaagtcagaaacatgtctgaaagtatggcagctgctcatagaacaaggtatttcttcttattgtagagactgcatcaacccgacattcctttcttataccaatgtgaaatttccagatcatctgtaaacctacaactttaatagaagactactaataacagaagacaaattagtgaagaaaagacggagtttcgaaattgaatggcagggtggtttttgcttacaagccatttctgttcattctttaagtatctatatttcatttgttttgcacatatgcatatgtgcccatttaagatatttgcatatacttgatagaaaccataaagttgtagcagttaagtccagtcacatttggttaatcagtgtttgatataattgaaagagttgagtggataaacagtcttccagcttgtaaatgccattgacttctgacctgacatttagtataataaaaatgaaattcttaaccatgtcaaatgatttagtttctggctcttagactcatctggcagttctacacatgaaacatcttttgttatataaggtgtattgaaacctgcagtgctgattattagaaaggatttgtcagatttttgaacatgatatttacattattatttaggaaaactcttcctgtaaataaccatgcataacttactttctgcaatgttttcttagaaattgtgtccagatagctttcactaattttaaattaagtgaactaaatatatatgtgtatatgtatactcatatatatacacacacacacatatatatatctagaaacgtgagtgttaaagatagaatttgttttaggacaaattttaagaaaatgtgggaataccaaatgtcctttataagaaaaataaattttattttaagggacatactagttttagggattttcagatgggaagctgcatttttaggattgcccatcttaagagatcttgcaggaagagattgtattagatattatatttatttcatttaagataattttcaaagttaattttctaaataagataattctcatttgtgtttgtcttttaaaaggccaataaaatatctttcagtatcattgtaataattttttagagtttaatttgtaaagcttagcaaataaaatcttgtactatgaatagcttcttgctttatgactttaggattaacttgtaaaaaacatatcctgaactgagatatgcaaaatactcattttcaagttatggaaatgtgtttgtggcatataggactgtggggtctgtgtgtgtagtgagagtgtgtagccactattataactggaatttaatttacattcataaactactatatttcccatcttgcaaatcattttatgtctcatctgtttttcctttcggttatatctttggttttgaataccaacatttaaaatgatggtattttatcttttaaacttaaaaattatttaatacagctatatggaccttataaaattgatttcttatttattattagacattactactaaaaggtacatctaactattcagggacatttttccatttccaaaaaataaaatttattatgctttataacctcttctgtattttctaattttttcattgtctttgataaataaaacagttttgttttgct

SEQ ID NO: 4085 - protein, 242 aa, Homo sapien
MDHHQPGTGRYQVLLNEEDNSESSAIEQPPTSNPAPQIVQAASSAPALETDSSPPPYSSITVEVPTTSDTEVYGEFYPVPPPYSVATSLPTYDEAEKAKAAAMAAAAAETSQRIQEEECPPRDDFSDADQLRVGNDGIFMLAFFMAFIFNWLGFCLSFCITNTIAGRYGAICGFGLSLIKWILIVRFSDYFTGYFNGQYWLWWIFLVLGLLLFFRGFVNYLKVRNMSESMAAAHRTRYFFLL

SEQ ID NO: 4086 - DNA, 1290 bp, Homo sapien
ccacgcgtccggactagttctaggtcgcgatctagaaccccacgcgtccggaagtccttatagtccagggcctgtttccctgtagcagctccttattgctggagaaggagaaaagtgcccaagatcctttcaggatatttggttttttgggcgcgacacaaatcgaggtgagggaagagagaggaaaatcccctgaatccctgcaggattaatttattcaaaaaggaaataaaaaatactcaatatgcaaaagtcttgtgaagaaaatgagggaaaaccacagaacatgccaaaggccgaggaagatcgccctttggaggatgtaccacaggaggcagaaggaaatcctcaaccttccgaagaaggcgtaagccaggaagcagaaggaaaccccagaggagggccgaatcagcctggccagggatttaaagaggacacacccgttaggcatttggaccctgaagaaatgataagaggagtagatgagcttgaaaggcttagggaagagataagaagagtaagaaacaagtttgtgatgatgcattggaagcaaagacattcacgcagccgtccttatcctgtgtgctttaggccttgaattcatttttgcctaatattaaaatctggccccagctttctttctgttagcattttctgatgtatctttgacctccattttacttttaatcatctgatgaaattttgttttaggtaatttccttggtaccagcatctcattggattttggattttgacccattttccaggtctatttttcaattggaaactttcacacatttgcatgggaatatgttcattccatgttgtaaagtaaaacataacaggttatggcaaagcagcatatttaatatcagctcacatatgtaggataaaattccaaactttgtgtgtgtgcgtgtgtgtatacatacatccatataacatatatcacaaacttaaccaagcttatttctgtgtggtgtgaaattttatttgttttcttctttttgttctttttgcttatatgtactttttaatgaacacgtgtctcacacacaaaaagaattaaggattttttttacaagtaagagtcaaataatttgcaaccagcttatgagggcaatgggggcacctaaactcttgatgaaagaactttaaaaagaaatgtaaacctcaaattacctctggatctcttagccagaggaataaactggcaattattacagaaaaaaaaaaaaaaaaaaaaaaaaaaaaaaaaaaaaaaaaaaaaaaaaaaaaaaaaaaaaaaaa

SEQ ID NO: 4087 - protein, 117 aa, Homo sapien
MQKSCEENEGKPQNMPKAEEDRPLEDVPQEAEGNPQPSEEGVSQEAEGNPRGGPNQPGQGFKEDTPVRHLDPEEMIRGVDELERLREEIRRVRNKFVMMHWKQRHSRSRPYPVCFRP

SEQ ID NO: 4088 - DNA, 4790 bp, Homo sapien
gaaagagacattcacttggagggctcttgctgaaaatgggtttaactctccttttgccagtcaccaccagcctgacctcatacacttttagtacaatggagtggctgagcctttgagcacaccaccattacatcatcgtggcaaattaaagaaggaggtgggaaaagaggacttattgttgtcatggcccatgagatgattggaactcaaattgttactgagaggttggtggctctgctggaaagtggaacggaaaaagtgctgctaattgatagccggccatttgtggaatacaatacatcccacattttggaagccattaatatcaactgctccaagcttatgaagcgaaggttgcaacaggacaaagtgttaattacagagctcatccagcattcagcgaaacataaggttgacattgattgcagtcagaaggttgtagtttacgatcaaagctcccaagatgttgcctctctctcttcagactgttttctcactgtacttctgggtaaactggagaagagcttcaactctgttcacctgcttgcaggtgggtttgctgagttctctcgttgtttccctggcctctgtgaaggaaaatccactctagtccctacctgcatttctcagccttgcttacctgttgccaacattgggccaacccgaattcttcccaatctttatcttggctgccagcgagatgtcctcaacaaggagctgatgcagcagaatgggattggttatgtgttaaatgccagcaatacctgtccaaagcctgactttatccccgagtctcatttcctgcgtgtgcctgtgaatgacagcttttgtgagaaaattttgccgtggttggacaaatcagtagatttcattgagaaagcaaaagcctccaatggatgtgttctagtgcactgtttagctgggatctcccgctccgccaccatcgctatcgcctacatcatgaagaggatggacatgtctttagatgaagcttacagatttgtgaaagaaaaaagacctactatatctccaaacttcaattttctgggccaactcctggactatgagaagaagattaagaaccagactggagcatcagggccaaagagcaaactcaagctgctgcacctggagaagccaaatgaacctgtccctgctgtctcagagggtggacagaaaagcgagacgcccctcagtccaccctgtgccgactctgctacctcagaggcagcaggacaaaggcccgtgcatcccgccagcgtgcccagcgtgcccagcgtgcagccgtcgctgttagaggacagcccgctggtacaggcgctcagtgggctgcacctgtccgcagacaggctggaagacagcaataagctcaagcgttccttctctctggatatcaaatcagtttcatattcagccagcatggcagcatccttacatggcttctcctcatcagaagatgctttggaatactacaaaccttccactactctggatgggaccaacaagctatgccagttctcccctgttcaggaactatcggagcagactcccgaaaccagtcctgataaggaggaagccagcatccccaagaagctgcagaccgccaggccttcagacagccagagcaagcgattgcattcggtcagaaccagcagcagtggcaccgcccagaggtcccttttatctccactgcatcgaagtgggagcgtggaggacaattaccacaccagcttccttttcggcctttccaccagccagcagcacctcacgaagtctgctggcctgggccttaagggctggcactcggatatcttggccccccagacctctaccccttccctgaccagcagctggtattttgccacagagtcctcacacttctactctgcctcagccatctacggaggcagtgccagttactctgcctacagctgcagccagctgcccacttgcggagaccaagtctattctgtgcgcaggcggcagaagccaagtgacagagctgactcgcggcggagctggcatgaagagagcccctttgaaaagcagtttaaacgcagaagctgccaaatggaatttggagagagcatcatgtcagagaacaggtcacgggaagagctggggaaagtgggcagtcagtctagcttttcgggcagcatggaaatcattgaggtctcctgagaagaaagacacttgtgacttctatagacaatttttttttcttgttcacaaaaaaattccctgtaaatctgaaatatatatatgtacatacatatatatttttggaaaatggagctatggtgtaaaagcaacaggtggatcaacccagttgttactctcttaacatctgcatttgagagatcagctaatacttctctcaacaaaaatggaagggcagatgctaggatcccccctagacggaggaaaaccattttattcagtgaattacacatcctcttgttcttaaaaaagcaagtgtctttggtgttggaggacaaaatcccctaccattttcacgttgtgctactaagagatctcaaatattagtctttgtccggacccttccatagtacaccttagcgctgagactgagccagcttgggggtcaggtaggtagaccctgttagggacagagcctagtggtaaatccaagagaaatgatcctatccaaagctgattcacaaacccacgctcacctgacagccgagggacacgagcatcactctgctggacggaccattaggggccttgccaaggtctaccttagagcaaacccagtacctcagacaggaaagtcggggctttgaccactaccatatctggtagcccattttctaggcattgtgaataggtaggtagctagtcacacttttcagaccaattcaaactgtctatgcacaaaattcccgtgggcctagatggagataatttttttttcttctcagctttatgaagagaagggaaactgtctaggattcagctgaaccaccaggaacctggcaacatcacgatttaagctaaggttgggaggctaacgagtctacctccctctttgtaaatcaaagaattgtttaaaatgggattgtcaatcctttaaataaagatgaacttggtttcaagccaaatgtgaatttatttgggttggtagcagagcagcagcaccttcaaattctcagccaaagcagatgtttttgccctttctgcttcactgcatggatacagttggtaaaatgtaataatatggcagaattttataggaaacttcctagggaggtaaattatgggaagattaagaaaggtacaaattgctgaggagaagcaggaaacctgtttccttagtggcttttatcccctcggcatgcgatggggctgatgtttctataattgcctcagactttcacatttactagtagggctgagagaggctttagtgaggaaggaatattcagaataaaacggttgagaaagctgagaagaccattgagttttgatcagttgtgaatagagtgcaaagccatggccaagctgtttttggaaacgctggccggcgtgtcttcagtggaaaaagcaaatcaaaatggagcgagagcaaaggggcgtcctcagtcctcaacctacaatcactgtatggaatcggtcctggcagctgaacataggaggtcactggaacaagtgatagtgcagattggctttcaaacatcctcctggcttgagttttatcagctacagtgtgggtcctcttttgaagccttaattcacaacagcagctttttgggggtggggctgggcgggtgttgtcattgttctttcccttcctgtaagtgtcgctagttgctgcctcgtatctcaggtttttctctgtttttgagaaatggacagttttttgaccaggatgtgacttcatgtttcctatggtgacttctaaaaccagcacagaatgatatgactcaacacagaccgacttggttatggggatgatgagccgcacagacctcactagttgtgcacaaataatgtgctatgatggggtgtaaagtgaaggcagaagagggtcagccgcattgttatgatactgggaaagtgctggtcaacgatttgagttagtttttagatatacattgaaatctttaatcagacattctcaagtttcacacagtagtttttgatgttatgtacacacacaccaaatgtgtaacagttcaccacttccagagtgtggtcatgcccaaaacatgtttaagaaaggaaagcagtagctccttgctaacgatgtttcaggaggtttgggggacttggttttaatgagcttctgtcatttagggcttctcttggccatggtccccttccttctggaactgtgatgtagtcacatcctacagcctttagtgctggttcactagtgtcagataatcagttcttggaatcgagactgccgtggcgaaggggtggcctcggaggcaggctctggagctgcttggatgtctttaggtggggtggtggctggctctcttcagcatgtaattggggaaaccctcgtttctactaggggtgatacagatggtgattttaaagagcaaaactagacttctatgtgagaagtgctggaaaatgatttaggacatgtgtaaagttagatggaaagactgtaaatgtttaatatgaatatagtgttcttttgaagtaaggccagctgttgaacggttaaactgtgcatttctcattttgatgtgtcatgtatgttaatgtatgaaatgattaaataaaatcaaaactggtacctgtttatacat

SEQ ID NO: 4089 - protein, 690 aa, Homo sapien
AFEHTTITSSWQIKEGGGKRGLIVVMAHEMIGTQIVTERLVALLESGTEKVLLIDSRPFVEYNTSHILEAININCSKLMKRRLQQDKVLITELIQHSAKHKVDIDCSQKVVVYDQSSQDVASLSSDCFLTVLLGKLEKSFNSVHLLAGGFAEFSRCFPGLCEGKSTLVPTCISQPCLPVANIGPTRILPNLYLGCQRDVLNKELMQQNGIGYVLNASNTCPKPDFIPESHFLRVPVNDSFCEKILPWLDKSVDFIEKAKASNGCVLVHCLAGISRSATIAIAYIMKRMDMSLDEAYRFVKEKRPTISPNFNFLGQLLDYEKKIKNQTGASGPKSKLKLLHLEKPNEPVPAVSEGGQKSETPLSPPCADSATSEAAGQRPVHPASVPSVPSVQPSLLEDSPLVQALSGLHLSADRLEDSNKLKRSFSLDIKSVSYSASMAASLHGFSSSEDALEYYKPSTTLDGTNKLCQFSPVQELSEQTPETSPDKEEASIPKKLQTARPSDSQSKRLHSVRTSSSGTAQRSLLSPLHRSGSVEDNYHTSFLFGLSTSQQHLTKSAGLGLKGWHSDILAPQTSTPSLTSSWYFATESSHFYSASAIYGGSASYSAYSCSQLPTCGDQVYSVRRRQKPSDRADSRRSWHEESPFEKQFKRRSCQMEFGESIMSENRSREELGKVGSQSSFSGSMEIIEVS

SEQ ID NO: 4090 - DNA, 5925 bp, Homo sapien
  Unsure 89-112, 517-541, 2887-2915, 4943-4971: Unknown base
gcttccagttgggatggggaaggcctttgtgtgtgtattggggggaggggttaaaaaataattatcccaaactttttaatgtactgccnnnnnnnnnnnnnnnnnnnnnnnnccactataccattttaagttctgacctcaggcctccatttgggccgatggcctcttggaggcttaaagttttctgtaccttgtgatgaatgttaataggtgtttttattatacaaagctgaatgtcatttctcgtttgtagctttctgtcactcattccatcttccttcagacatcaccacgtttctctaaagtcagaaaacattccgttttggtctttttcaaaaaggtcccaaatgctgcactctacacatgaaggccctctcacacagacgtgacgtcctgccagaaagagaatgaatgacagaaaaaaaaaagagagacaaactctaggaacaatgccgattcattccacgcagcagtattgggggtggttcgggggaggggtgtttcggattttcttttnnnnnnnnnnnnnnnnnnnnnnnnnggcagcaaccattaataaatgccaccacattctaccagcacaaggaaacataggcagcactgaaaaaaaaaaaaaagctcatattaattagactgacaatatggccttggaaggctctcccttgtggaaccaagttgccatgggccttgggtgctctgcgataacgggtgtgggttggttttgtttgcaaaatggccaaaaaaaaaaaccggcttccccgagcagctgccctgaaagtaggggtggcggcggcggcgctgagtttatacattagttcagacctacttggtggcattaaactgtttgaatgcaaattcgatttcagattgaacttgttaagggagttaacgagggctgagttcagcaaatgctaaagtgttaatttcaaatatgcaaatttggtactgcagtttgttatgcaatattatatcaccaacccagtatcacaaaaactcatagaagatatcatgtaggccctgggctttgggggggtcccaaacatggtatgcagaaatgtgatggttacaggtcagtacaacctcagtccttagaacccctccacacttcagctctgcacccactttcctgtcatttatttatataggactgtagttttttttagttcgagagcctttcgaagcttaatttatattctttctttgtaccttttttctaaaattaccaaagatattacacaaaggtaaattatgttctctgttttatgctttatctgatgaagccaaatatcctcttattgttgatcaaaggaggcaaaagaatttagaggcaaatgacaagcgataggctattgcaacctgagaaagagaactgctccttcatcgtaaatttagaagaccaagtagataatggaaccaaagttgttacttttttctagtagttatttttcctttttctttttgtgtacctctacagagaccaaaactcattctcttaaagagattttatggggctactgcagataaaaataggacacaatattaaaggagctacagaaggaagggagtcccatctcaaaaaaaaaatgaatgtatgccactgcaattagagtatccaataaaggagacagtttagagtcaggacagaaaagcttccataattgaactagattacataatagtatttctagaaaaagagatatttttagattgtatgccacttttgtttaagaactgtgctgtgatcactgtattaattttggtttatcttggcatatatccttcagtttgtttttatttttaatttttcctttttttccgattaggctttggtcagcatttttcatttaaagaaaagtaacactcccatccactcataagcttggtacaaaaacttctctggcagttacttttgaagcttcactctgctttctgtataaagggcagtctgtggtcacgcaagactttaaaaaaaaaaaaacaaagagcccataaaaacagacaaaaaacttttccaggcagcttcatgatgtgcaggcagtagccagacagggtcatgggaagggggccctgtgcttctaaactgagtggttgctggttagtttggtattcaaaagaggataaaaatctggtagattagttcattctcagcatgtgtagctagacatgagtaaagataacagcatgagaaactgttagtacgcatacctcagttcaaacctttagggaatgattaaaatttaaaaaaaaaacatttcactcagttgcacttagtcgtatgtcttgcatgcttagtctaaagactgtagcaaaaaaaaaaaaaaaagaaaaattagattttacatatctttgcaggtatcacagccttgcagaagaaccaactgaaaaaaaaattctcaggctttacagcaagcaaacttcactatgatttttacaattctgattctgtatcccctgggggttatcccagttgcttctttaggatggggtttattacgttgtacatatatcccgatgtgtctgtgtgaatctttgtcttttttgggggagggcagagggcggttctttttttagatattgttcctaaaaaggaataaatgcatacacctgtttgtcaaaacacctttgctttttgtgcaactgctttatattaacgatactaaaaaaaaatagctttggaaaaaaaactactgtatgtaacggaattgcagaatatgctgcacatgtattttatttagttatccttgctttaagaatattggatgacatttcctgacatgtgggagggagaaactccctaactttttttttctgcttttaaactgtaacatagttgaagatttcttttttctgttctcattgattggagcattttgtacaagttttgtannnnnnnnnnnnnnnnnnnnnnnnnnnnncgtgtgtgttaatctgttttttgatacattcctatcccttgtgtttatcctaccactgccttcctggctatcttaaacaagttcatacatttgaaaagaaaaaaaaatgttgtttaaaaaatgttttctcctgctgcagtaaatattttgcatgatgaaattccagggtcacacttttccaagtttatcagtgaagtagtgattaacaatggggagtgtcaaaactattgaacttttgtataacacaaaaaaaactttacaaggtgccaagatgtaaagaaaatctgttactttttttttctcaaagaaaagcatacattagggaggtagtcccgtgtgtcagacaaatgcactgtcaggaatgaggatccaacctacctgtccctagagtccgtcttgtaagatgagttaggctgccccttggaccagccacaaaatggaatatcaaggcttatgtacatacgtgaagagttaccaccagtcctgccacctttggacagctctaacaccatccccagcatccagtcagacctagtaaagaaaaccttggattcttaacccaagataggctgtaaatcactagcttttttttcctcatgaaaaaaaatagagttaaaaaatatttcctctcttttccatattccagctgaactccgtttccaaaggcacaaagaagagtgtgcttattcagattttgaatctttttggtaccttttggttaatgacatagcctcctgaaattctggatgtcttcaaagtcagttttgcttctttatcctgaaaatcagatttacaatgctgaaggcatttcttgggcccagtgtagctcacgcaatctctgctacccataagccttgatgaagatgatacagtccggactgtgagcatggtgcttcatgtatatgtgctgccagtaacaagaatttttttgttttgttttgttttgttttgataaggcataaaagaaactcattccttgacatcaactgtaattccatcattccatgtctgcggatacagacaataaaaaaaatgttgtgtagtcagtactaattactgacattataagcattctcaaatgcaataaaaatgctggttgttcacgctggtagtaaaagttgccacagcctaagtttgtttccctttctgacctgctgatattgtatgttaggcatatgccttaggtttatcaccagctgcttccaatgcagaattaaaatcaatcttaaagctttcatgatcagggaaggctgaagctcttatcctcaggatttccaagtgaaagtatccacttagagaattgggaagtaaaaaaaaaagagcaagagatgttatcttttctcttgaggaagcacactcttatttttttcatcaaattttataaagaaaaacaaaatgtttaataactagcattaagagcaaactaaaatttcagaggaaagcaactttcatgaataattcattgaaagatttcacagtctggcaagattaggtcatccaaataaaagtgctaatggtcaaaaacatgcaccgtctataatattctcatcaagaaatctttttgcatataatgataaatgcttagattagaacaaatgattttataaaaatattctatcaaaagtatgctagataattgcattcattgaagaaaacagaacttcagtacctaaatattccagaaaaaccatcttaattttgagattttaaaaaaataattagatgcatttaggaaatgtgctgtttctttttaatattactctatagtatatattctagggattaatgaatttgagcatcacctttcaataaaaaattaaattgccaatatgaaagcagtattttaagtggccaaaccgtggtaacataaaaccattacatatataattcagagcacataattcagggcaaaggatgacttgaaaattaacctcccagtctttattctgcaaaacacccaccgatgctgaggatacaagtgaacattctttcccagcattgttttgaaaagcccatattagcaaagtnnnnnnnnnnnnnnnnnnnnnnnnnnnnnaacaagtagattttgctattaagttgcaaactagtgtcctctttgaattaacaattatgccctatctagaaaccccttagtctcaataattagcaaaacatttgaacctttaattctcacctggctactgagactataatcttagggttaattcaaattcctgtaattaccaggcttaaacctaaatactgcttacagcctatccattagtaaccatttaaaaatgtacagatacttcttttaatcaactggaggacctaaaccaagtatgacgatatgttagtgaagattttgctggttgaggcatagtacattttaacttatatttcaggaattgttctcaagcaggaacactcttttacatatttatttcaggcttgtcactctcataaacgaggcagcaaacccaaaatattggctcttcttataaataggcgcctttatataaagaacataaaactcttaagactaatttcacaccaacacaggcagcttcataatagtaaccacctctccctccccactaaaaaagataaaaacaaagtataattagtctttcttattagatttttgtctttgatgatattacgtatttatgtgtagggtagtaatcacaatttatccttcatcttcattgtagttgaatcaaataaaagtattctttattcaaataatgtgaagttgggtgtctcaaaccttcatttaatgaattgatgaaaggtttaagacaaaattcacgttggagggaaattaagttacatacaaaaacactggttttaactgtgggacaatatttggattagaaaaccatctctagatataacctacttatatttatttttaaatggtattttattttttaaaataacaaaacccaatgttgtcttatttccactttgattgtaaaatgacattcaatgcttaataccaaaatatatatctatattcacattt

SEQ ID NO: 4091 - protein, 64 aa, Homo sapien
  unsure 30-37: unknown amino acid
  Unsure 89-112, 517-541, 2887-2915, 4943-4971: Unknown amino acid
FQLGWGRPLCVYWGEGLKNNYPKLFNVLPXXXXXXXXHYTILSSDLRPPFGPMASWRLKVFCTL

SEQ ID NO: 4092 - DNA, 4954 bp, Homo sapien; identical to SEQ ID NO: 3879

SEQ ID NO: 4093 - protein, 677 aa, Homo sapien; identical to SEQ ID NO: 3880

SEQ ID NO: 4094 - DNA, 3957 bp, Homo sapien
gcgccggggccgggtagctgctccaggcgcgcgagctaaccgagtgcggcgagggcctaccaggggcgacagggtttctctccgcaagcgcgcgatgcagcgggcggcggcgctggtccggcggggctgtggtccccggacccccagctcctggggccgcagccagagcagcgcggccgccgaggcctcggcggtgctcaaggtgcggcccgagcgcagccggcgcgagcgcatcctcacgctggagtccatgaacccgcaggtgaaggcggtggagtacgccgtgcggggacccatcgtgctcaaggccggcgagatcgagctcgagctgcagcggggtatcaaaaagccattcacagaggtcatccgagccaacatcggggacgcccaggctatggggcagcagccaatcaccttcctccggcaggtgatggcactatgcacctacccaaacctgctggacagccccagcttcccagaagatgctaagaaacgtgcccggcggatcctgcaggcttgtggcgggaacagcctggggtcctacagtgctagccagggtgtcaactgcatccgtgaagatgtggctgcctacatcaccaggagggatggcggtgtgcctgcggaccccgacaacatctacctgaccacgggagctagtgacggcatttctacgatcctgaagatcctcgtctccgggggcggcaagtcacggacaggtgtgatgatccccatcccacaatatcccctctattcagctgtcatctctgagctcgacgccatccaggtgaattactacctggacgaggagaactgctgggcgctgaatgtgaatgagctccggcgggcggtgcaggaggccaaagaccactgtgatcctaaggtgctctgcataatcaaccctgggaaccccacaggccaggtacaaagcagaaagtgcatagaagatgtgatccactttgcctgggaagagaagctctttctcctggctgatgaggtgtaccaggacaacgtgtactctccagattgcagattccactccttcaagaaggtgctgtacgagatggggcccgagtactccagcaacgtggagctcgcctccttccactccacctccaagggctacatgggcgagtgtggttacagaggaggctacatggaggtgatcaacctgcaccctgagatcaagggccagctggtgaagctgctgtcggtgcgcctgtgccccccagtgtctgggcaggccgccatggacattgtcgtgaaccccccggtggcaggagaggagtcctttgagcaattcagccgagagaaggagtcggtcctgggtaatctggccaaaaaagcaaagctgacggaagacctgtttaaccaagtcccaggaattcactgcaaccccttgcagggggccatgtacgccttccctcggatcttcattcctgccaaagctgtggaggctgctcaggcccatcaaatggctccagacatgttctactgcatgaagctcctggaggagactggcatctgtgtcgtgcccggcagtggctttgggcagagggaaggcacttaccacttcaggatgactatcctccctccagtggagaagctgaaaacggtgctgcagaaggtgaaagacttccacatcaacttcctggagaagtacgcgtgaggacgcctgagccccagcgggagacctgtccttggctcttcctcccaatgcccgtcaggctgaactcgcctcccccgtgactctgcctcgggcctcgcagaggccgctggtcacttcgtcatcattttgcccctggagacgtctttctttgtgccttgatgttgagagcgcctctcttttgagcaaacaagcattctatatgcaaccagagtagaggggacctgctcagcaggtgtgaccagggttctctgaatctgttattgtttttgcttctggaaagttcatttggggtttacaacaactaggatgtgttgggtgagatgtttcagatctggagaaatgagcaggtgtcgggaaatgtgtgacttaaccgtggtgagggctggaaatccaaactcaccaccatgatctgtgaaataaagcccttagcggtgtgaagcatccggtcctttgaacagaagggcctggaaggcccctggggctgagaaagggtccgcccggtggcctggaggcaggcgccgggagcgcagtagcacgtggactgggcaggatgttgcactagcttggggtagatgctgggggctgcggccacggtcagagggccccactgtgaggcgtgggtgtgagccaggctgcaggaggaactgggcctccgcttcccagcaacgcagccaggcctgagaattctgtgcgcccggcgggctttgggaatgaggggttcccttgaacatgcgtaggctggaaccccgtctgagaggtctccctgaatttcagtgacacatagtgcagcccggcagtgtcccacttccgtggagagagccgctggaatggtgtggacccatcccgcgggtgaccggtgcctgttctcccctgaccgagcctgtgagcacatcgccccctgctggcgacagcggggaaatgagggctgaaaatatcctccccacaagggcaatccccgggacctgccgagcagccaaggccctgtcctttcttgaatggtggcgagctgaatctggtcggtttcctagcttttaggtggtaaaagtgcctggcagcttggctgccgtggaggagtcagtcgtggttggaggttcattgccgtgctttcatgcagagtgttttgccttcatgttagcttccggctcccctcccaggctgcagactctgacctgtggcatcaggcttctcccagtacaggagggtgccatcccccagcatgcggcttctctgccattagcagccctgggcgggccgaccacactcgaggctgcggtgctacgggcttagccctcgcctccctcactgggagcttccccatcctccctgccttccccagtgggaagttagggaagctcaggagcctgggaccccgcatgtcccaaaatgggattggagaagctggagagaaagcagaagaggccgaggagtgaggcagcagcctctatgcttgatttccacaccgggtccgtgcagaggaaacagaaactcccaactgtccttacccaccgacatcacagcccctatgaagaaagtagccacaatctcaaataacaaaagggaatgttctaaaactttttcttccttaaaaaatggagaaaattgcacttgtgcttgctgtgtggtatataaaccaggattagtcccagggtcgtgaggtttctggtgaaaaggttaaatcgtagaagctagtatattttttatatttttgtaacaattgcttttttcatgggggaggcggggttagtatttatagtcctaacaagtccagtaattttttataaatcttcagattataaacagcccctaaaaactttacaacgtttacacagttttttaaaaagagactgtatacacttgatttgctttcaaaataaataaggtcagctagtctaggaggttaacgtcgggtaggaatgctgatcatgataggtttggttttctacagattctgttccggtgcctttcctatccaggcaccacctgagaaagttgtcatttgaggtcgcacttggaagttacatctgtgaagtttctgtcattcgtccagatctgtgtgtgtagcatgtgctgaggaagcacgtgctgggctgtgcctcagacagtgcatcaccgggcacccagaggcttgcctggctattcctgttctggtgtgtgtggagtgttggggaggaacagatgcagatcaacctgtggctgttttcccgtctaggttctcacaggtatctcctgacagaggtacttaacaatggctctgctggaaatttctataaataaaatgtccaaaatggaaa

SEQ ID NO: 4095 - protein, 523 aa, Homo sapien
MQRAAALVRRGCGPRTPSSWGRSQSSAAAEASAVLKVRPERSRRERILTLESMNPQVKAVEYAVRGPIVLKAGEIELELQRGIKKPFTEVIRANIGDAQAMGQQPITFLRQVMALCTYPNLLDSPSFPEDAKKRARRILQACGGNSLGSYSASQGVNCIREDVAAYITRRDGGVPADPDNIYLTTGASDGISTILKILVSGGGKSRTGVMIPIPQYPLYSAVISELDAIQVNYYLDEENCWALNVNELRRAVQEAKDHCDPKVLCIINPGNPTGQVQSRKCIEDVIHFAWEEKLFLLADEVYQDNVYSPDCRFHSFKKVLYEMGPEYSSNVELASFHSTSKGYMGECGYRGGYMEVINLHPEIKGQLVKLLSVRLCPPVSGQAAMDIVVNPPVAGEESFEQFSREKESVLGNLAKKAKLTEDLFNQVPGIHCNPLQGAMYAFPRIFIPAKAVEAAQAHQMAPDMFYCMKLLEETGICVVPGSGFGQREGTYHFRMTILPPVEKLKTVLQKVKDFHINFLEKYA

SEQ ID NO: 4096 - DNA, 3781 bp, Homo sapien
gggccggctcgcgggcgctgccagtctcgggcggcggtgtccggcgcgcgggcggcctgctgggcgggctgaagggttagcggagcacgggcaaggcggagagtgacggagtcggcgagcccccgcggcgacaggttctctacttaaaagacaatgactactgatgaaggtgccaagaacaatgaagaaagccccacagccactgttgctgagcagggagaggatattacctccaaaaaagacaggggagtattaaagattgtcaaaagagtggggaatggtgaggaaacgccgatgattggagacaaagtttatgtccattacaaaggaaaattgtcaaatggaaagaagtttgattccagtcatgatagaaatgaaccatttgtctttagtcttggcaaaggccaagtcatcaaggcatgggacattggggtggctaccatgaagaaaggagagatatgccatttactgtgcaaaccagaatatgcatatggctcggctggcagtctccctaaaattccctcgaatgcaactctcttttttgagattgagctccttgatttcaaaggagaggatttatttgaagatggaggcattatccggagaaccaaacggaaaggagagggatattcaaatccaaacgaaggagcaacagtagaaatccacctggaaggccgctgtggtggaaggatgtttgactgcagagatgtggcattcactgtgggcgaaggagaagaccacgacattccaattggaattgacaaagctctggagaaaatgcagcgggaagaacaatgtattttatatcttggaccaagatatggttttggagaggcagggaagcctaaatttggcattgaacctaatgctgagcttatatatgaagttacacttaagagcttcgaaaaggccaaagaatcctgggagatggataccaaagaaaaattggagcaggctgccattgtcaaagagaagggaaccgtatacttcaagggaggcaaatacatgcaggcggtgattcagtatgggaagatagtgtcctggttagagatggaatatggtttatcagaaaaggaatcgaaagcttctgaatcatttctccttgctgcctttctgaacctggccatgtgctacctgaagcttagagaatacaccaaagctgttgaatgctgtgacaaggcccttggactggacagtgccaatgagaaaggcttgtataggaggggtgaagcccagctgctcatgaacgagtttgagtcagccaagggtgactttgagaaagtgctggaagtaaacccccagaataaggctgcaagactgcagatctccatgtgccagaaaaaggccaaggagcacaacgagcgggaccgcaggatatacgccaacatgttcaagaagtttgcagagcaggatgccaaggaagaggccaataaagcaatgggcaagaagacttcagaaggggtcactaatgaaaaaggaacagacagtcaagcaatggaagaagagaaacctgagggccacgtatgacgccacgccaaggagggaagagtcccagtgaactcggcccctcctcaatgggctttcccccaactcaggacagaacagtgtttaatgtaaagtttgttatagtctatgtgattctggaagcaaatggcaaaaccagtagcttcccaaaaacagcccccctgctgctgcccggagggttcactgaggggtggcacgggaccactccaggtggaacaaacagaaatgactgtggtgtggagggagtgagccagcagcttaagtccagctcatttcagtttctatcaaccttcaagtatccaattcagggtccctggagatcatcctaacaatgtggggctgttaggttttacctttgaactttcatagcactgcagaaaccttttaaaaaaaaatgcttcatgaatttctcctttcctacagttgggtagggtaggggaaggaggataagcttttgttttttaaatgactgaagtgctataaatgtagtctgttgcatttttaaccaacagaacccacagtagaggggtctcatgtctccccagttccacagcagtgtcacagacgtgaaagccagaacctcagaggccacttgcttgctgacttagcctcctcccaaagtccccctcctcagccagcctccttgtgagagtggctttctaccacacacagcctgtccctgggggagtaattctgtcattcctaaaacacccttcagcaatgataatgagcagatgagagtttctggattagcttttcctattttcgatgaagttctgagatactgaaatgtgaaaagagcaatcagaattgtgctttttctcccctcctctattccttttagggaataatattcaatacacagtacttcctcccagcattgctactgctcagcttcttctttcattctaatccttgctattaagaatttaagacttgtgcttacaatatttttgacctggagtggatctatttacatagtcatttaggatccatgcagctttttttgtctttttaagattattggctcataagcatatgtatactggtttatggaactttatttacactcctctatcatgcaaaaaaattttgactttttagtactaagcttaatttttaaaaacaaaatctgtagtgttgacaaataaatagttgctcttctacactaggggtttcacctgcaggtttgacacgcagttgctcgcttttcctgccctgtcaagcttctctgttctggcgtgagttgtgaaagagttgaagacagcttcccatgccggtacacagccagtagcctaaatctccagtacttgagctgaccattgaactagggcaagtcttaaatgtgtacatgtagttgaatttcagtccttacgggtaaacagattgagcatggctctctattccctcagcctaagaaacactcatgggaatgcatttggcaacccaaggaaccatttgcttaaacctggaacatctcacctttttaaatcctaaaaaacactggcagttatattttaaattagtttttatttttatgatggttttatcaaaagacttttattattagattgggacccccttcaaacctaaaaatcaagttatttccttttataatacttttcttccccatggaacaaatgggatcaatttgtgagttttttcctttaatgataactaaaatccctctaatttctcatttatgcttttgtcttttttatgaaatatttcttttaaaagccccagtctcacctacgaaatatgaagagcaaaagctgattttgcttacttgctaaactgttgggaaagctctgtagagcatggttccagtgaggccaagattgaaatttgatactaaaaaggccacctagctttttgcagataacaaacaagaaagctattccaagactcagatgatgccagctgtctcccacgtgtgtattatggttcaccagggggaactggcaaaagtgtgtgtggggaggggaagggtgtgtgagtggttctgagcaaataactacagggtgcccattaccactcaagaagacacttcacgtattcttgtatcaaattcaataatcttaaacaatttgtgtagaagtccacagacatctttcaaccaccttttaggctgcatatggattgccaagtcagcatatgaggaattaaagacattgtttttaaaaaaaaaaaatcatttagatgcacttttttgtgtgttctttaaataaatccaaaaaaaatgtgaaaaaaaaaa

SEQ ID NO: 4097 - protein, 457 aa, Homo sapien
MTTDEGAKNNEESPTATVAEQGEDITSKKDRGVLKIVKRVGNGEETPMIGDKVYVHYKGKLSNGKKFDSSHDRNEPFVFSLGKGQVIKAWDIGVATMKKGEICHLLCKPEYAYGSAGSLPKIPSNATLFFEIELLDFKGEDLFEDGGIIRRTKRKGEGYSNPNEGATVEIHLEGRCGGRMFDCRDVAFTVGEGEDHDIPIGIDKALEKMQREEQCILYLGPRYGFGEAGKPKFGIEPNAELIYEVTLKSFEKAKESWEMDTKEKLEQAAIVKEKGTVYFKGGKYMQAVIQYGKIVSWLEMEYGLSEKESKASESFLLAAFLNLAMCYLKLREYTKAVECCDKALGLDSANEKGLYRRGEAQLLMNEFESAKGDFEKVLEVNPQNKAARLQISMCQKKAKEHNERDRRIYANMFKKFAEQDAKEEANKAMGKKTSEGVTNEKGTDSQAMEEEKPEGHV

SEQ ID NO: 4098 - DNA, 4055 bp, Homo sapien
  Unsure 484, 495, 546, 567, 615, 1221, 1411, 2798, 3467, 3516: Unknown base
cttttcgaggtaggagtcgactcctgtgaggtatgttttatctttgcgaatgttgcgggttttggggcgctccagcctttgtctgctaaggtcaccctgaattgactgggacttctaagccagtcgcgcgcctttgcagggcctacaagttgaggatggtgggggattgcacatatggtgcatgcgtgacctaagctgcgactatgttagagtagaactgcggagaagcctcggctctcgtgccctgcctctgatgaagcctgtgttggtagggacatctgacagtaatgatgaatgccaaccgctctgatggtggcacatgccgagtcacccgagtaagctattgttaagggccgtgacccgagcctccatcagccgtccgctctcatgaaaggctgtcggtggtagtccacgtgcttaagtgcctgcattccgcagtgtcaccaatatttccattagtgtttcttttttcttttttgagacngagcctcgttntgtcacccaggctggaatgcagtggctcgacatcggttaatggcaacctcngcgtcccgagttaagcagttntgcctcagcctcccaagtaactgggactacaggcgcgcgccaccatgntaggcttttatatttttagtagagacggggtttcaccatgttggcgagactggtcttgaactcctgacctcaggtgatccaccagccgtggtcccccaacatactgggattacaagccgtgagccaccgcgcccggccgccatcggtggttcttaactgcgggtgcagtgcttctttgtaacattaagtgtatcctttacctgtcgctagataatgaatggtatgttacctgcatcattggtttaaaaagacgaaccgtttttttaaagaacactctttaaaaaaaagaaccgtggaacaatgaattaaaatctgtacctgatctctttaggtatggtgctgggtgcagatgcagtgtggctctggatagcaccttatggacaggtaagaattggggaaagtatggtgggaagaatgaaatctaagaggtggtctcagcctgtgatgctttaagagtagtggacagaagggatttctgaaattctattctgaggctttaatgttaacagcatttatatttaacgtgactgctgtgaggttcattctcactgttttgcttgcatctttttgttttctagttgtgtccccaaggaaggatgagaatanctactgaagtaagttgaaaattccctctcaaaaaggtttaaagccattggatgtgccacaatgatgacagtttatttgctactcttgagtgctagaatgatgaggatcttaaccaccattatcttaactgaggcaccaaaatggtgagttggggaacatagagagtacacctaattcacatgaatttgtntcttcccaggtcctaaagagcaagcctaactcaagccattggcacacaggtgagacacttctattttgtacttctcacttttaagggattagaaaatagccaaagcaatgatgattatctatgttagtgcttctctcccctcttttcaaatgagaattttgctctcatattgatactaagtttaatactgaagaaaatgtgaaaacagatactatgatggttgcatagttcagcagatttaatcatgaagagatgtactatctgtctgatgtatctggggtagttgtggtttgctgttaatggttaagcagtgtaccaccaatctaccattaaaatattttttgctgacaattttgtattaaaattacaggcattagacagaaagctggaagttgaaatggtaagtgaaactgtatccaagtaagcaggtaactgggcaaacttcctacggcacaaatggctttttagttacctcctagtgctgaatgcattaaataaatggcggattcttgtcttgttatgattaataagaaagtttgtaaatgcagcctggatgatgatagcaaatgctgactgaacatgaaggtcttaattagctctaactgactaaaggcatttgttagctttggcagggggtgaacactcatctgtggctattctaagaccactcttatttcttaggtggagtccaacttgcctggaccagcttaatggttctggtaagtattaatgaaaacagtagatagacttaatgaaaatgctgatggtgatatgcttactgctgagctaatggcttaaggcttggctgatgaatactgactgtattttccttgagcatgtctggaacagtgtttatgtgttttccttgagcatgtttggaacggggtttgtgtaatgatgttgatcaaatgtctgacctgaaatgagcatgtagacaaaggtacactgaagaacctgtgacagacaactttgaaaagagtttaatgatgtttagcattttaatggaagtcctcatttgtattccagctcctggtaacgtttttatccatggatgacttgcttgggtaaggacatgaagacagttcctgtcataccttttaaaggtacatgttttattgatgttaacgttaattgattgagctactgttagtgatgattttaaaattaaagcagatgggaatccctctgagaaagaaaatggagattaatcttaaactgaaacagtagttgggaaatcttttagaaatccacctattactacctattggtaaaggagattaaatttctacaggtatggagagtcggcttgactacactgtgtggagcaagttttaaagaagcaaaggtatagcagttccaagtatttttttttttttttagacaagantctagctcttgcccagaatggagtgcagcggcactatcagttcgctgcaacctctgcctcccaggttcaaggaattctcctgcctcagcctcttgagtagctgggattacaggcatgtgacaccatgcctggctaattttgtacagctatgttgtccaggctggtctcgaactcttgacctcaagtgacactgcccgcactgacctcccaaagtgctgggattacaggcgtgagccaccatgccccgcctcaagtctggtttttaagtgttgtaaagccgatacaatgatgataacatagttcagcagactaacgctgatgagcaatattaagtctttcgctcctatctgatgtatctggcggtaacattctagtttatgccccgaaaaggggaatatagccattctataatgtttggagattttggattactcctaattgtatgcaagttgtcttactgtgtattgtcccttaatttcaggactcagaattcatgattgaagaaatgcaggttagtttaaactttgaaggaaattttaaggtggcaaaaggttttggtggcatatacaccttaatctgtagatgggagtgattagctgtttaaaagttaaaatgtgactgagaaggaaattgagtagggcaaattttaaatgggtattatttttcatnttcaaacaggcagacctgttatcctaaactaggtgagtcagcttttggnacatgtgatgattttcagtgtaaccaatgatgtaatgattctgccaaatgaaatataatgatatcactgtaaaaccgttccattttgattctgaggttactctactaacaagcatcacacatttgtattttgccctgattaatatgttggcttcgctttcagggtttttaatgaccacaacaagcaagcatgcagcttactgcttgaaaggtgaggattggaaatgttgggactattataattgcagaatacatgatgatctcaatccaacttgaactctctcactgattacttgatgacaataaaatatctgatattctgcattcccatgtagcattttaattgaagtctgtaaatgtggctaaaagtcttgtcttattttttgagacagggtcttgcctcacccaagctagagtgcagtggcctttgaagcttactacagcctcaaacttctgggctcaagtgatcctcagcctcccagtggtctttgtagactgcctgatggagtctcatggcacaagaagattaaaacagtgtct

SEQ ID NO: 4099 - DNA, 1748 bp, Homo sapien
ccacgcgtccgctttctcttaggtttcaggaagactgtcacatacagtaagcttttttccttctgacttataatagaaaatgttttgaaagtaaaaaaaaaaaatctaatttggaaatttgacttgttagtttctgtgtttgaaatcatggttctagaaatgtagaaattgtgtatatcagatactcatctaggctgtgtgaaccagcccaagatgaccaacatccccacacctctacatctctgtcccctgtatctcttcctttctaccactaaagtgttccctgctaccatcctggcttgtccacatggtgctctccatcttcctccacatcatggaccacaggtgtgcctgtctaggcctggccaccactcccaacttgacctagccacattcatctagagatggttcctgatgctgggcacagactgtgctcatggcacccattagaaatgcctctagcatctttgtatgcatcttgatttttaaaccaagtcattgtacagagcattcagttttggctgtggtaccaagagaaaaactaatcaagaatataaaccacattccaggctgctgttttctctccatctacaggccacacttttactgtatttcttcatacttgaaattcattctgctattttcatatcagggtacagacttataagggtgcatgttccttaaaggtgcataattattcttattccgtttgcttatattgctacagaatgctctgttttggtgctttgagttctgcagacccaagaagcagtgtggaaattcactgcctgggacacagtcttataagaatgttggcaggtgactttgtatcagatgttgcttctcttttctctgtacacagattgagagttaccacagtggcctgtcgggtccaccctgtgggtgcagcacagctctctgaaagcaagaaccttcctacctattctaacgtttttgccctctaagaaaaatggcctcaggtatggtatagacatagcaagaggggaagggctgtctcactctagcaaccatccctccattacacacagaaagccctcttgaagcaaaagaagaagaaagaaagaaagcttatctctaaggctactgtcttcagaatgctctgagctgaatgctcttgctcctttcccaagaggcagatgaaaatatagccagtttatctatacccttcctatctgaggaggagaatagaaaagtagggtaaatatgtaacgtaaaatatgtcattcaaggaccaccaaaactttaagtaccctatcattaaaaatctggttttaaaagtagctcaagtaagggatgctttgtgacccagggtttctgaagtcagatagccattcttacctgccccttactctgacttattgggaaagggagaactgcagtggtgtttctgttgcagtggcaaaggtaacatgtcagaaaattcagagggttgcataccaataatcctttggaaactggatgtcttactgggtgctagaatgaaaatgtaggtatttattgtcagatgatgaagttcattgtttttttcaaaattggtgttgaaatatcactgtccaatgtgttcacttatgtgaaagctaaattgaatgaggcaaaaagagcaaatagtttgtatatttgtaataccttttgtatttcttacaataaaaatattggtagcaaataaaaataataaaaacaataactttaaactgcaaaaaaaaaaaaaaaaaaaaaaaaaaaaaaaa

SEQ ID NO: 4100 - protein, 62 aa, Homo sapien
MTNIPTPLHLCPLYLFLSTTKVFPATILACPHGALHLPPHHGPQVCLSRPGHHSQLDLATFI

SEQ ID NO: 4101 - DNA, 8570 bp, Homo sapien
gccttataagtggtttagtgctcagttggctctagtaaccagaggacacagaaagtatcttttggaaagtttagccacctgtgctttctgactcagagtgcatgcaacagttagatcatgcaacagttagattatgtttagggttaggattttcaaagaatggaggttgctgcactcagaaaataattcagatcatgtttatgcattattaagttgtactgaattctttgcagcttaatgtgatatatgactatcttgaacaagagaaaaaactaggagatgtttctcctgaagagcttttggggttgggaactattcttttttaattgctgtactacttaacattgttctaattcagtagcttgaggaacaggaacattgttttctagagcaagataataaaggagatgggccatacaaatgttttctactttcgttgtgacaacattgattaggtgttgtcagtactataaatgcttgagatataatgaatccacagcattcaaggtcaggtctactcaaagtctcacatggaaaagtgagttctgcctttcctttgatcgagggtcaaaatacaaagacatttttgctagggcctacaaattgaatttaaaaactcactgcactgattcatctgagcttttggttagtattcatggctagagtgaacatagctttagtttttgctgtgtaaaagtgttttcataagttcactcaagaaaaatgcagctgttctgaactggaatttttcagcattctttagaattttaaatgagtagagagctcaacttttattcctagcatctgcttttgactcatttctaggcagtgcttatgaagaaaaattaaagcacaaacattctggcattcaatcgttggcagattatcttctgatgacacagaatgaaagggcatctcagcctctctgaacttgtaaaaatctgtccccagttcttccatcggtgtagttgttgcatttgagtgaatactctcttgatttatgtattttatgtccagattcgccatttctgaaatccagatccaacacaagcagtcttgccgttagggcattttgaagcagatagtagagtaagaacttagtgactacagcttattcttctgtaacatatggtttcaaacatctttgccaaaagctaagcagtggtgaagtgaaaagggcatattgccccaaggttacactgaagcagctcatagcaagttaaaatattgtgacagatttgaaatcatgtttgaatttcatagtaggaccagtacaagaatgtccctgctagtttctgtttgatgtttggttctggcggctcaggcattttgggaactgttgcacagggtggagtcaaaacaacctacatataaaaagagaaaaagagaaacttgtccatttagctttcataagaaatcccatggcaaagggtaataaaaaggacctaatcttaaaaatacaatttctaagcacttgtaagaacccagtgggttggagcctcccactttgtccctcctttgaagtggatgggaactcaaggtgcaaagaacctgttttggaagaaagcttggggccatttcagccccctgtattctcatgattttctctcaggaagcacacactgtgaatggcagacttttcatttagccccaggtgacttactaaaaatagttgaaaattattcacctaagaatagaatctcagcattgtgttaaataaaaatgaaagctttagaaggcatgagatgttcctatcttaaataaagcatgtttcttttctatagagaaatgtatagtttgactctccagaatgtactatccatcttgatgagaaaactcttaaatagtaccaaacattttgaactttaaattatgtatttaaagtgagtgtttaagaaactgtagctgcttcttttacaagtggtgcctattaaagtcagtaatggccattattgttccattgtggaaattaaattatgtaagcttcctaatatcataaacatattaaaattcttctaaaatattgcttttcttttaagtgacaatttgactattcttatgataagcacatgagagtgtcttacattttccaaaagcaggctttaattgcatagttgagtctaggaaaaaataatgttaaaagtgaatatgccaccataattacttaattatgttagtatagaaactacagaatatttaccctggaaagaaaatattggaatgttattataaactcttagatatttatataattcaaaagaatgcatgtttcacattgtgacagataaagatgtatgatttctaaggctttaaaaattattcataaaacagtgggcaatagataaaggaaattctggagaaaatgaaggtatttaaagggtagtttcaaagctatatatattttgaaggatatattctttatgaacaaatatattgtaaaaatttatactaaggtcatctggtaactgtgggattaatatggtcgaaaacaaatgttatggagaagctgtcccaagcaaactaaattacctgtacttttttcccatttcaagggaagaggcaaccacatgaagcaatacttcttacacatgcctaagaacgttcattgaaaaaataaatttttaaaaggcatgtgtttcctatgccaccaatacttttgaaaaattgtgaaccttacccaaaaccatttatcatgtccattaagtatatttgggtatataattaggaagatatttacatgttccatctccacagtggaaaaacttattgaggctaccaaagtgtgccaagaaatgtaagtccttagagtaattagaaatgctgttttcctcaaaagcatgagaaactagcattttcatttcttatttactccctttctatatcaatgcaattcacaacccaattttaatacatccctatatctcaagcatttctatcttgtactttttcagaaaataaaccaaaaataatccttggtctctctatcttctgaccttgtaagcaacagaaatgtaaaaacagaaggggtccaatttttacacgtttttttctcaagtagcctttctggggatttttattttcttaatgaagtgccaatcagcttttcaaaatgttttctatttctcagcatttccaggaagtgataacgtttagctaaatgagtagaagtggacttccttcaacatattgttaccttgtctagccttaggaagaaaacaagagccacctgaaaataaatacaggctcttttcgagcatctgctgaaatactgttacagcaatttgaagttgatgtggtaggaaaggaaggtgacttttcttgcaaaagtctttctaaacattcacactgtcctaagagatgagctttcttgttttattccggtatattccacaaggtggcacttttagagaaaaacaaatctgatgaagactaaagaggtacttctaaaagagatttcattctaactttatttttctgcgcatatttaactctttcctagcacttgttttttgggatgattaatagtctctataatgttctgtaacttcaatattttacttgttacctaggttctgaacaattgtctgcaaataaattgttcttaaggatggataatacacccattttgatcatttaagtaaagaaagcctagtcattcattcagtcaagaaaaaatttttgaagtacccagttaccttacttttctagattaaaacaggcttagttactaaaaaggcagtcctcatctgtgaacaggatagtttcgttagaagtataaaactcctttagtggccccagttaaaacacacataccctctctgctgctttcaaattccctagcatggtggcctttcaacattgattaaattttaaaatcctaatttaaagatcaggtgagcaaaatgagtagcacatcagtaattcagtagacaaaacttttgtctgaaaaattgctgtattgaaacagagccctaaaataccaaaagaccaggtaattttaacatttgtggaatcacaaatgtaaattcataagaagctctaattaaaaaaaaaaagtctgaagtatatgagcataacaacttaggagtgtgtctacatacttaacttttgaagttttttggcaactttatatactttttttaaatttacaagtctacttaaagacttcttataccccaaatgattaagttaattttagaggtcacctttctcacagcagtgtcacttgaaatttagtagggaaggatattgcagtatttttcagtttccttagcacagcaccacagaaagcagcttattccttttgagtggcagacactcgacggtgcctgcccaactttcctcctgagtggcaagcagatgagtctcagtaattcatactgaaccaaaatgccacatacactaggggcagtcagaaactggctgagaaatcccccgcctcattcgcccctctgctcccaggaactagagtccagttaaagcccctatgcgaaaggccgaattccaccccagggtttgttataacagtggccagtctgaaccccatttgctcgtgctcaaaacttgattcccacttgaaagccttccgggcgcgctgcctcgttgccccgcccctttggcaggagagaggcagtgggcgaggccgggctggggccccgcctcccactcacctgccggtgcctgaaattatgtgcggccccgcgggctgctttccgaggtcagagtgccctgctgctgtctcagaggcatctgttctgcaaatcttaggaagaaaaatgtccctagtagcaaacgggtgtcttctgtgcataaataagtacaacacaattctccgaaagttcgggtaaaaagagatgcggtagcagctgccctgtgtgaagctgtctaccccgcatctctcaggcgctaagctcagtttttgtttttgtttttgtttttttaaagaaaagatgtataattgcaggaatttttttttatttttttattttccatcattctatatatgtgatggtgaaagatatgcctggaaaagttttgttttgaaaagtttattttctgcttcgtcttcagttggcaaaagctctcaattctttagcttccagtttcttttctctctttttctttgttaggtaattaaaggtatgtaaacaaattatctcatgtagcaggggattttcatgttgagaggaatcttccgtgtgagttgtttggtcacacaaataaccctttctcaattttaggagtttggattgtcaaatgtaggtttttctcaaagggggcatataactacatattgactgccaagaactatgactgtagcactaatcagcacacatagagccacacaattatttaatttctaactctctgtggtccctagaaaaattccgttgatgtgcttaggttaaagttctgaagatacccgttgtacccttacttgaaagtttctaatcttaagttttatgaaatgcaataatatgtatcagctagcaatatttctgtgatcaccaacaactctcagtttgatcttaaagtctgaataataaaacaaatcccagcagtaatacatttcttaaacctcacagtgcatgatatatcttttcattctgatcctgtgtttgcaaaaatatacacatgtatatcatagttcctcactttttattcatttgttttcctattacctgtagtaaatatattagttagtacatggaatttatagcatcagctacccccaggaacagcacctgacaggcgggggattttttttcaagttgttctacatttgcataaattatttctattattattcatgtatgttatttatttctgaatcacactagtcctgtgaaagtacaactgaaggcagaaagtgttaggattttgcatctaatgttcattatcatggtattgatggacctaagaaaataaaaattagactaagcccccaaataagctgcatgcatttgtaacatgattagtagatttgaatatatagatgtagtattttgggtatctaggtgttttatcattatgtaaaggaattaaagtaaaggactttgtagttgtttttattaaatatgcatatagtagagtgcaaaaatatagcaaaaataaaaactaaaggtagaaaagcattttagatatgccttaatttagaaactgtgccaggtggccctcggaatagatgccaggcagagaccagtgcctgggtggtgcctcctcttgtctgccctcatgaagaagcttccctcacgtgatgtagtgccctcgtaggtgtcatgtggagtagtgggaacaggcagtactgttgagaggagagcagtgtgagagtttttctgtagaagcagaactgtcagcttgtgccttgaggcttccagaacgtgtcagatggagaagtccaagtttccatgcttcaggcaacttagctgtgtacagaagcaatccagtgtggtaataaaaagcaaggattgcctgtataatttattataaaataaaagggattttaacaaccaacaattcccaacacctcaaaagcttgttgcattttttggtatttgaggtttttatctgaaggttaaagggcaagtgtttggtatagaagagcagtatgtgttaagaaaagaaaaatattggttcgcgtagagtgcaaattagaactagaaagttttatacgattatcattttgagatgtgttaaagtaggttttcactgtaaaatgtattagtgtttctgcattgccatagggcctggttaaaactttctcttaggtttcaggaagactgtcacatacagtaagcttttttccttctgacttataatagaaaatgttttgaaagtaaaaaaaaaaaaatctaatttggaaatttgacttgttagtttctgtgtttgaaatcatggttctagaaatgtagaaattgtgtatatcagatactcatctaggctgtgtgaaccagcccaagatgaccaacatccccacacctctacatctctgtcccctgtatctcttcctttctaccactaaagtgttccctgctaccatcctggcttgtccacatggtgctctccatcttcctccacatcatggaccacaggtgtgcctgtctaggcctggccaccactcccaacttgacctagccacattcatctagagatggttcctgatgctgggcacagactgtgctcatggcacccattagaaatgcctctagcatctttgtatgcatcttgatttttaaaccaagtcattgtacagagcattcagttttggctgtggtaccaagagaaaaactaatcaagaatataaaccacattccaggctgctgttttctctccatctacaggccacacttttactgtatttcttcatacttgaaattcattctgctattttcatatcagggtacagacttataagggtgcatgttccttaaaggtgcataattattcttattccgtttgcttatattgctacagaatgctctgttttggtgctttgagttctgcagacccaagaagcagtgtggaaattcactgcctgggacacagtcttataagaatgttggcaggtgactttgtatcagatgttgcttctcttttctctgtacacagattgagagttaccacagtggcctgtcgggtccaccctgtgggtgcagcacagctctctgaaagcaagaaccttcctacctattctaacgtttttgccctctaagaaaaatggcctcaggtatggtatagacatagcaagaggggaagggctgtctcactctagcaaccatccctccattacacacagaaagccctcttgaagcaaaagaagaagaaagaaagaaagcttatctctaaggctactgtcttcagaatgctctgagctgaatgctcttgctcctttcccaagaggcagatgaaaatatagccagtttatctatacccttcctatctgaggaggagaatagaaaagtagggtaaatatgtaacgtaaaatatgtcattcaaggaccaccaaaactttaagtaccctatcattaaaaatctggttttaaaagtagctcaagtaagggatgctttgtgacccagggtttctgaagtcagatagccattcttacctgccccttactctgacttattgggaaagggagaactgcagtggtgtttctgttgcagtggcaaaggtaacatgtcagaaaattcagagggttgcataccaataatcctttggaaactggatgtcttactgggtgctagaatgaaaatgtaggtatttattgtcagatgatgaagttcattgtttttttcaaaattggtgttgaaatatcactgtccaatgtgttcacttatgtgaaagctaaattgaatgaggcaaaaagagcaaatagtttgtatatttgtaataccttttgtatttcttacaataaaaatattggtagcaaataaaaataataaaaacaataactttaaactgctttctggagatgaattactctcctggctattttcttttttactttaatgtaaaatgagtataactgtagtgagtaaaattcattaaattccaagttttagcagaaaaa

SEQ ID NO: 4102 - protein, 29 aa, Homo sapien
PYKWFSAQLALVTRGHRKYLLESLATCAF

SEQ ID NO: 4103 - DNA, 2334 bp, Homo sapien
tcttacctatcaaaaagaaacatttgtttgagaattccaggcttctgcagcctccaaaaggtgttcttctctatgggcctccaggctgtggtaaaacgttgattgccaaggccacagccaaagaagcaggctgtcgatttattaaccttcagccttcgacactgaccgataagtggtatggagaatctcagaaattggctgctgctgtcttctcccttgccataaagctacaaccatccatcatctttatagatgaaatagactcctttctacgaaaccgttcaagttctgaccatgaagctacagccatgatgaaagctcagtttatgagtctctgggatggattggatactgatcacagctgccaggtcatagtaatgggagctaccaatcgtcctcaggaccttgactcggctataatgagaagaatgcctacaagatttcatatcaaccagcctgctttaaaacagagagaagcaatcctgaaactcatcttgaaaaatgaaaatgtggataggcatgtagacctgctagaagttgcccaggaaactgatgggttttcaggaagtgacctaaaagagatgtgtcgagatgctgccctcctctgtgttagagaatatgttaattctacatcagaagaaagccatgacgaagatgaaattcggcctgttcaacagcaggacctgcatcgggcaattgaaaagatgaagaaatcaaaggatgcagcatttcagaatgttttaacacatgtttgtttagattaagagtaaagatcatttgtacagttcagtgatctagtttggtgtgtcctcttatcagttagtggaaatagaacggaaagagtgctctttaaacaatgagggagctcagtgtttatggttttatactctgaattctaagttattgagatatagttgttacataggtggtattactgttggtcaaaaatcatgaggaggaacagttgaatccagcctgaacgtgggtgcttgtgtttgaccttttcagccatatattgtacagccttatagaatctaagctggtcttaaagtcataaatgattcattgggtcattagtgagaaacggggatgtggttaggtgctggttcctagacatgtgagtatgcgtttgtgtgtgtgcgtgtatgtatgtgtatattaaatgtatatatccacacattttatattgacattctgtagatatgtttgaatatagaaactttttttaccccaactactgaatccaggagtaccaaataatatatagtaaaactaagatttaaggttgtgtcaaaaaggtacagtgattcagccatttccatttgtcatttgtttcaaccttttttaagttgagtgtttttatttctgcagttattagttggatcctccacatcttgcatatatacatgggctcaattattatgtttgtcaggataatcaaatgaaaatactagttcagtgatcagcattgaatggttgttaggcagccatgtgctcaacactgatttcacctcttgagtataaactttttaaatttaaattggtttacatgaaagtggattaaaaggcctttcaaaagaatgggtttgaaaaacctcagtaccctttaatacatgtacatttctttcctttttttcatttaatgtaacatgtctgttgtaactatgtttcttaaatattattttaaggttatgtgttctttaattatggtcaaatataatttggtcaccaaaaatgaaataatagtttaaaacaagtagctgttactaagtgtgctaaaaatactcattttataattaattttagttttcttagtatattattataaattgtgccctaagtcaggtacaaatgtacacatcaaaatgcccatattgtatctatctgtagtcgtttaatgtgaattatatgtgaatttttttcaaaattttactaaccagaattctgttataggcacctaaccacgcagcatgaggaaaacggcacaacacaatcttgaggtgccttctgaatcatcagattaaattatgcttcatatgtttttgcttttactgtatttctttaaaaactctaaatctttattcatgtgtcactggattaatttatctgataatgtgtctcacaagaatctgttagatcgtttattcttcagttgtactttgaatggtggggtggaagtttcaggtgaacaatggataacaaaaagcaagttatggaagattgtgaagaggatggaaaaactgaatacaagataccaaaaatgaaaaaaagtgtcccatttttaataactatattctattattttataaatgtgtaataaaggggtccctcttt

SEQ ID NO: 4104 - protein, 151 aa, Homo sapien
MMKAQFMSLWDGLDTDHSCQVIVMGATNRPQDLDSAIMRRMPTRFHINQPALKQREAILKLILKNENVDRHVDLLEVAQETDGFSGSDLKEMCRDAALLCVREYVNSTSEESHDEDEIRPVQQQDLHRAIEKMKKSKDAAFQNVLTHVCLD

SEQ ID NO: 4105 - DNA, 3781 bp, Homo sapien; identical to SEQ ID NO: 4096

SEQ ID NO: 4106 - protein, 457 aa, Homo sapien; identical to SEQ ID NO: 4097

SEQ ID NO: 4107 - DNA, 792 bp, Homo sapien
ggagttgcgcgggctgacgcgccactatgtagcgggtttcgggcgggccacgcgtgcgggacaggaacccaaccccagccgaccttgagctccaggagttcgtctcttacgtctgcggaagtgcagctgcctcagttcttagcgcaggttgacaactacaggcacaagccattgaagctggaatgtcctgttgctggtatttcaattgacttaagccaactatcccttcagttacaataggaaagtgcctctaataaggccaaatatgcgtactaacttgtagcaaccacgtgtccgtgcagtgccacaggagctagagcagtgacaatgctggtggcaacagggcagtgtagcaggtgcttcatgttcaccttttcaaccttttcatttaattgtcacaactcggaggtggattctgttagggacaggctgccccaggaccactccgcccccgctaactcaatgcagctgacccttaccctgaatactctgcagctgcattcctgaaccgttatctaggcgctatagcaaggtcaccagacttgctacaccgaagccctctgggtggcacgggggaggtcatgagaaacgtggattacacccccttgtaaattcctattttcacaagataatatattgtaagccggtcatgagattatatgtggtaaagttaattgactaacaaccccagggtctctctcccccatataaacccctcattttgtaagctcagggctgccacctccgactggtggagaagcctggcaggttaataaacttacttggcctgac

SEQ ID NO: 4108 - DNA, 5861 bp, Homo sapien
cggcgccgcgcggccgcgctagaatggaggcgcccagcggcagcgagcccggcggcgacggggccggggactgcgcccacccggacccccgggcccctggcgccgcggcgcccagctccggccccggcccgtgcgcggccgcccgggagtccgagcgccagctgcgcctccgcctctgcgtcctcaacgagatcttgggcaccgagagggactacgtgggcaccttgcgcttcttgcagtcggcattcctgcatcgcatccggcagaacgtggccgactcagtggagaagggcctcacggaggagaatgtcaaggtcctgttctcgaacatcgaagacatcctggaagttcataaggatttcttggccgccttggagtattgtttacacccggagccgcagtctcagcatgaacttgggaatgttttcttaaaattcaaggacaagttctgcgtgtacgaggagtattgcagcaaccatgagaaagccctgaggctgctggtggagctgaacaagatccctaccgtgcgcgccttccttttgagctgcatgcttctgggaggccggaagaccacggacatccctttggaaggctacctgttgtctccgatccagaggatctgcaagtacccgctcctccttaaggagctggccaagaggactcccggcaagcacccagaccaccccgcggtccagagtgccctgcaggccatgaagaccgtttgctccaacatcaatgagaccaagcggcagatggagaagctggaagccctggagcagctgcagtcccacatcgaaggctgggagggttccaacctcacagacatctgcactcagctcctcctgcaagggactttgttaaagatctctgcgggcaacatccaggaaagggccttcttcctcttcgacaaccttctcgtctactgcaagcggaaatccagggtcaccgggagcaagaagtccaccaagaggaccaaatccatcaacggctccctctacatcttcaggggtcgaatcaacactgaagtcatggaggtggagaatgtggaagatgggacagcggattaccatagcaatggctataccgtcaccaacggctggaagatccacaacacggccaagaataagtggtttgtctgcatggccaagacggcagaggagaagcagaagtggctggatgccatcatccgcgagcgggagcagcgcgagagcctgaagctgggcatggagcgtgatgcctacgtcatgattgcggagaagggggagaagctgtaccacatgatgatgaacaagaaggtgaacctcatcaaggaccgccggagaaagctgagcactgtccccaagtgctttcttggcaatgagttcgttgcctggctcctagaaattggtgaaatcagcaagacggaagaaggagtcaacttgggccaagccctgttggagaatggcatcatccaccatgtttccgacaagcaccagttcaagaatgagcaggtgatgtatcgcttccgctacgacgatggcacctacaaggcccgaagtgagctggaggacatcatgtccaagggtgtgaggctttactgccgtcttcacagcctctacaccccggtgatcaaagaccgtgattaccacctgaagacctacaagtcagtgcttcccgggagcaagctggtggactggctgctggctcagggagactgccagactcgggaggaggcagtggcgctcggcgtgggtctgtgcaacaatggcttcatgcaccacgtgctggagaagagcgagttcagggatgagtcccagtacttccgctttcatgctgacgaggagatggaggggaccagcagcaagaacaaacagcttcgcaacgacttcaagctggtggagaacattctggccaagcgcctgctgatcctgccccaggaggaggactatggctttgacatcgaggagaagaacaaggctgtggtggtgaagtccgtccagaggggctcgctggctgaggtggctggcctgcaggtggggaggaagatctactccatcaatgaggacctggtgttcctgcggccgttttcagaggtggagtccatcctcaaccagtccttctgctcccgccgccctctgcgcctcctggtggccacgaaggccaaagagatcatcaaaatccccgaccagccggacacactgtgcttccagattcgtggagctgccccaccgtacgtctatgctgtggggagaggctctgaggccatggctgcagggctctgtgctggtcagtgcattctgaaggtcaatggcagcaacgtgatgaacgatggtgcccctgaggtcctggagcacttccaggcattccggagtcggcgcgaagaggccctgggcctgtaccagtggatctaccacacccatgaggatgcccaggaagcacgagccagtcaggaggcctccactgaggaccccagtggcgagcaggcccaggaggaagaccaggctgattcagccttcccactgctgtccctgggtccccggctgagcctgtgtgaggacagccccatggtcaccctgactgtggacaacgtgcacctggaacacggcgtggtgtatgagtatgtgagcacggcaggcgtcaggtgccatgtgctggagaagatcgtggagccccgcggctgcttcggcctcaccgccaagatcctcgaggcctttgctgccaatgacagcgtcttcgtggagaactgcaggcggctcatggccctgagcagcgccatcgtgaccatgccccactttgagttccgcaacatctgtgacaccaagctggagagcattggccagaggattgcctgctaccaggagtttgcagcccaactgaagagcagggtcagcccacccttcaaacaagcccccctggagccccacccgctgtgtggcctggacttctgccccaccaattgccacatcaacctcatggaagtgtcctaccccaagaccaccccctcagtgggcaggtccttcagcatccgctttggacgcaaaccctccctcatcggccttgacccggagcaaggccacctgaaccccatgtcgtacacccagcactgcatcaccaccatggctgctccctcctggaagtgcttgcctgctgcagagggtgatccccaaggccagggtctccatgatggcagcttcgggccagccagtgggacccttggtcaggaagaccggggcctcagcttcctactcaagcaggaggaccgtgagatccaggatgcctacctgcagctcttcaccaagctggatgtggccctgaaggagatgaagcaatatgtcacccagatcaacaggctgctgtccaccatcacagagcccacctcgggtgggtcctgcgacacatccttggctgaggaggcctcctccctgcccctggtcagtgaagagagcgagatggacaggagtgaccatgggggcatcaagaaggtgtgcttcaaggtggccgaggaggaccaggaggactcaggccacgacaccatgagttatcgcgactcctacagcgagtgtaacagcaatcgagactcggtcctgtcctacaccagcgtgagaagtaacagctcctacttgggcagcgacgagatggggtctggagatgagctgccctgtgacatgcggatcccatctgacaagcaggacaagcttcatggctgcctggagcacctctttaaccaggtggactccatcaatgctctcctcaaggggccagtcatgagccgggctttcgaagagaccaagcatttccctatgaaccacagcttacaagagtttaaacagaaagaagagtgtacaatccgtggccggagcctgatccagattagcatccaggaggacccctggaacctccccaactccatcaagaccctggtggacaacattcagagatatgtggaagatgggaagaaccagctgctcctggccttgctgaagtgcacagacacggagctgcagctgcgcagagacgcgatcttctgccaggccctggtggccgccgtgtgcaccttctccgagcagctgctggcggccctgggctaccgctacaacaacaatggcgagtacgaggagagcagccgcgacgccagccgcaagtggctggagcaggtggcggccacgggcgtcctgctgcactgccagtccctgctctcgccagccacagtgaaggaggaacggaccatgctggaggacatctgggtgacgctgtcagagctggacaatgtcaccttctcctttaagcagctggacgagaactatgtggccaacaccaacgtcttctaccacattgagggcagccggcaggcgctgaaggtcatcttctacctcgacagctaccacttctccaagctgccctcccgcctggagggtggggccagcctgaggctgcacacagcgctgttcacgaaagtgctggagaacgtggaggggctgccttctccaggcagccaggccgcggaggatttgcagcaggacatcaacgcgcagtccctggagaaagttcagcagtattaccgcaaactcagggcattttacctggagcggtctaacctgcccacggatgccagcaccacggcggtaaagatagaccagctgatccgccccatcaatgccctggatgagctctgccgcctcatgaagtcctttgtccacccaaagcctggtgctgctgggagtgtgggcgccggcctcatccccatctcctcggagctctgctaccgcctgggggcctgccagatggtcatgtgtggcacaggcatgcagaggagcaccctgagcgtgtccctggagcaggcggccatcttggcacggagccacgggttgctgcccaagtgcatcatgcaggccacggacatcatgcggaagcagggcccaagggtggagattctggccaaaaacctgcgagtcaaggaccagatgccccagggtgctccgcgcctctaccgcctctgccagccgccggtggatggggacctctgaacacccaaatgccccacgctgggccgcggcctctggagctgggatttgggaggacacagcaggcagcgctggccttctccagggatggcccaaggcttccgcagccgcccgttccgggacctgcccagcgtcctccctgcctccttccgggacaagcctggccaccctcgctgtgatgacgagctggctgattggccctgggccggcccattcttcacacgcctgccagaagctggaggggtgctggagacccatagagctgatgggagcagctggtgcctggccttcggctcctgcgtccccagaacccaagggaacgtcatggaggccacatggggccacccggctccctcgggatggctccgcctgcacttttgaaaccccggtttccttcaacgtccacattccaggtgaccacacgtgtctcctcctcctcatcttagcttccaggttcaccctaaccctgtactaacctgcttggtggacttggaaaagacttggctctgtcgggaaaggagagacggggcctccatcacgcctgttaccagaggatccccgagagccacaccagctctggacatcaccgcccctggaactggggccaccagccctgggcacgagatttgctctgactttatttatatggcatgaaatctctggtttattttgggattttttgttgttggtgttgtcaaagtttgttttttctaaagttgtgtgattatatatttgacattttacatttcaaagaaaggtatgttgtctaacaggggaccaacagaaggtagtattgacaactgttcccgcttctactaaaaaaaaaagagcacaaaagaaaaactaaattattgaaaaatt

SEQ ID NO: 4109 - protein, 1659 aa, Homo sapien [sequence omitted]

SEQ ID NO: 4110 - DNA, 1350 bp, Homo sapien
ggcctcggcagcggtgttctcgcgcttgcgaagcgggctccggctcggctcgcggggactgtgcacgaggttggcgacgccgccccgccgggccccagatcaggccgcagagatcgggagccgcgggagcactaaggcgcaagggccacagcagcagccgggctcagagggtcccagctatgccaaaaaagttgcgctctggcttgctgggctgcttggagctggtgggactgtgagcgtcgtctatatctttggaaacaacccggtggacgaaaatggtgccaagattcctgatgagttcgacaatgatccaattctggtacagcagttgcgccggacatacaaatatttcaaagattatagacagatgatcatcgagcccaccagcccttgccttctcccagaccctctgcaggaaccgtactaccagccaccctacacgctcgttttggagctcaccggcgtcctcttgcatcctgagtggtcgctggccactggctggaggtttaagaagcgcccaggcatcgagaccttgttccagcagcttgcccctttatatgaaattgtcatctttacgtcagagactggcatgactgcgtttccactcattgatagtgtggacccccatggcttcatctcctaccgcctattccgggacgccacaagatacatggatggacaccatgtaaaggatatttcatgtctgaatcgggacccagctcgagtagtagttgtggactgcaagaaggaagccttccgcctgcagccctataacggcgttgccctgcggccctgggacggcaactctgatgaccgggtcttgttggatctgtctgccttcctcaagaccattgcactgaatggtgtggaggacgtgcgaaccgtgctggagcactatgccctggaggatgacccgctggcggctttcaaacagcggcaaagccggctagagcaggaggagcagcagcgcctggccgagctctccaagtccaacaagcagaacctcttccttggctccctcaccagccgcttgtggcctcgctccaaacagccctgaactctgggcctcctcaaactcagtgcctgggtccagggccccagtgcttccagaccaagacttgggccaccacttgtccaataaagtacatcccagacgccacacctgctgtgtcccgagagtctccagatgggggcatcagggtgaggtccgggactcttgggtcatcgtcccacagtggctgatcggctgccaagcacagtgggggtgctttgttggatcagagcagatttttcaccctggtctcggaatctaaaaaccctcgctgtgtaaaaaaaaaaaaaaaaaaaaaa

SEQ ID NO: 4111 - protein, 351 aa, Homo sapien
ASAAVFSRLRSGLRLGSRGLCTRLATPPRRAPDQAAEIGSRGSTKAQGPQQQPGSEGPSYAKKVALWLAGLLGAGGTVSVVYIFGNNPVDENGAKIPDEFDNDPILVQQLRRTYKYFKDYRQMIIEPTSPCLLPDPLQEPYYQPPYTLVLELTGVLLHPEWSLATGWRFKKRPGIETLFQQLAPLYEIVIFTSETGMTAFPLIDSVDPHGFISYRLFRDATRYMDGHHVKDISCLNRDPARVVVVDCKKEAFRLQPYNGVALRPWDGNSDDRVLLDLSAFLKTIALNGVEDVRTVLEHYALEDDPLAAFKQRQSRLEQEEQQRLAELSKSNKQNLFLGSLTSRLWPRSKQP

SEQ ID NO: 4112 - DNA, 959 bp, Homo sapien
gctttcgccgcctgggagccgtccggcgcagcagtttctaggtccccactgtccccgccgtcccgccccttcgcgtcccgggaaccggctggcttccgagccgcactcgccgatcctccaggcatgccccgctacgagctggctttaatcctgaaagccatgcagcggccagagactgctgctactttgaaacgtacgatagaggccctgatggacagaggagcaatagtgagggacttggaaaacctgggtgaacgagcgcttccttataggatctctgcccacagtcagcagcacaacagaggcgggtatttcttggtggatttttatgcacccaccgcagctgttgaaagcatggtggagcacttgtctcgagatatagatgtgattagagggaatattgtcaaacaccctctgacccaggaactaaaagaatgtgaagggattgtcccagtcccactcgcagaaaaattatattccacaaagaagaggaagaagtgagaagattcgccagattttagccttatatgtaattccttcacatttgggcagcatggacgagaaggaagaatttgcaagtttggcctttatataagcatgtgttgcaggtgctgtttgatttttctaaggtatttttagcccttgatcccctttgcttgcgagaggtggggaactgctcactgacagcttctctgtaacctgcagtaccagtggatcattcttgattttgttttcattagtgtcatttctttgtcattgaggacttttccccttacaacagtaacaccattttttgaagagcaaaacttataatacctcctgggattgtgagctagtcattcagcctgtgtaaccatgtggaaataaaaattgacgaccaatgtattatatggacaacttttgctttgagtaataaacttgattgtagggaaaaaaaaaaaaaaaaaaaaaaaaaaaaa

SEQ ID NO: 4113 - protein, 125 aa, Homo sapien
MPRYELALILKAMQRPETAATLKRTIEALMDRGAIVRDLENLGERALPYRISAHSQQHNRGGYFLVDFYAPTAAVESMVEHLSRDIDVIRGNIVKHPLTQELKECEGIVPVPLAEKLYSTKKRKK

SEQ ID NO: 4114 - DNA, 4708 bp, Homo sapien
ggcacgagggccgttttcagaggtggagtccatcctcaaccagtccttctgctcccgccgccctctgcgcctcctggtggccacgaaggccaaagagatcatcaaaatccccgaccagccggacacactgtgcttccagattcgtggagctgccccaccgtacgtctatgctgtggggagaggctctgaggccatggctgcagggctctgtgctggtcagtgcattctgaaggtcaatggcagcaacgtgatgaacgatggtgcccctgaggtcctggagcacttccaggcattccggagtcggcgcgaagaggccctgggcctgtaccagtggatctaccacacccatgaggatgcccaggaagcacgagccagtcaggaggcctccactgaggaccccagtggcgagcaggcccaggaggaagaccaggctgattcagccttcccactgctgtccctgggtccccggctgagcctgtgtgaggacagccccatggtcaccctgactgtggacaacgtgcacctggaacacggcgtggtgtatgagtatgtgagcacggcaggcgtcaggtgccatgtgctggagaagatcgtggagccccgcggctgcttcggcctcaccgccaagatcctcgaggcctttgctgccaatgacagcgtcttcgtggagaactgcaggcggctcatggccctgagcagcgccatcgtgaccatgccccactttgagttccgcaacatctgtgacaccaagctggagagcattggccagaggattgcctgctaccaggagtttgcagcccaactgaagagcagggtcagcccacccttcaaacaagcccccctggagccccacccgctgtgtggcctggacttctgccccaccaattgccacatcaacctcatggaagtgtcctaccccaagaccaccccctcagtgggcaggtccttcagcatccgctttggacgcaaaccctccctcatcggccttgacccggagcaaggccacctgaaccccatgtcgtacacccagcactgcatcaccaccatggctgctccctcctggaagtgcttgcctgctgcagagggtgatccccaaggccagggtctccatgatggcagcttcgggccagccagtgggacccttggtcaggaagaccggggcctcagcttcctactcaagcaggaggaccgtgagatccaggatgcctacctgcagctcttcaccaagctggatgtggccctgaaggagatgaagcaatatgtcacccagatcaacaggctgctgtccaccatcacagagcccacctcgggtgggtcctgcgacgcatccttggctgaggaggcctcctccctgcccctggtcagtgaagagagcgagatggacaggagtgaccatgggggcatcaagaaggtgtgcttcaaggtggccgaggaggaccaggaggactcaggccacgacaccatgagttatcgcgactcctacagcgagtgtaacagcaatcgagactcggtcctgtcctacaccagcgtgagaagtaacagctcctacttgggcagcgacgagatggggtctggagatgagctgccctgtgacatgcggatcccatctgacaagcaggacaagcttcatggctgcctggagcacctctttaaccaggtggactccatcaatgctctcctcaaggggccagtcatgagccgggctttcgaagagaccaagcatttccctatgaaccacagcttacaagagtttaaacagaaagaagagtgtacaatccgtggccggagcctgatccagattagcatccaggaggacccctggaacctccccaactccatcaagaccctggtggacaacattcagagatatgtggaagatgggaagaaccagctgctcctggccttgctgaagtgcacagacacggagctgcagctgcgcagagacgcgatcttctgccaggccctggtggccgccgtgtgcaccttctccgagcagctgctggcggccctgggctaccgctacaacaacaatggcgagtacgaggagagcagccgcgacgccagccgcaagtggctggagcaggtggcggccacgggcgtcctgctgcactgccagtccctgctctcgccagccacagtgaaggaggaacggaccatgctggaggacatctgggtgacgctgtcagagctggacaatgtcaccttctcctttaagcagctggacgagaactatgtggccaacaccaacgtcttctaccacattgagggcagccggcaggcgctgaaggtcatcttctacctcgacagctaccacttctccaagctgccctcccgcctggagggtggggccagcctgaggctgcacacagcgctgttcacgaaaggtgagcttcaggcctggggcagggaggaccacgggggccgggccaaggccaccaagcacaccggctcccaaccgcctgcccgcccccgacatctcccctcccagtgctggagaacgtggaggggctgccttctccaggcagccaggccgcggaggatttgcagcaggacatcaacgcgcagtccctggagaaagttcagcagtattaccgcaaactcagggcattttacctggagcggtctaacctgcccacggatgccagcaccacggcggtaaagatagaccagctgatccgccccatcaatgccctggatgagctctgccgcctcatgaagtcctttgtccacccaaagcctggtgctgctgggagtgtgggcgccggcctcatccccatctcctcggagctctgctaccgcctgggggcctgccagatggtcatgtgtggcacaggcatgcagaggagcaccctgagcgtgtccctggagcaggcggccatcttggcacggagccacgggttgctgcccaagtgcatcatgcaggccacggacatcatgcggaagcagggcccaagggtggagattctggccaaaaacctgcgagtcaaggaccagatgccccagggtgctccgcgcctctaccgcctctgccagccgccggtggatggggacctctgaacacccaaatgccccacgctgggccgcggcctctggagctgggatttgggaggacacagcaggcagcgctggccttctccagggatggcccaaggcttccgcagccgcccgttccgggacctgcccagcgtcctccctgcctccttccgggacaagcctggccaccctcgctgtgatgacgagctggctgattggccctgggccggcccattcttcacacgcctgccagaagctggaggggtgctggagacccatagagctgatgggagcagctggtgcctggccttcggctcctgcgtccccagaacccaagggaacgtcatggaggccacatggggccacccggctccctcgggatggctccgcctgcacttttgaaaccccggtttccttcaacgtccacattccaggtgaccacacgtgtctcctcctcctcatcttagcttccaggttcaccctaaccctgtactaacctgcttggtggacttggaaaagacttggctctgtcgggaaaggagagacggggcctccatcacgcctgttaccagaggatccccgagagccacaccagctctggacatcaccgcccctggaactggggccaccagccctgggcacgagatttgctctgactttatttatatggcatgaaatctctggtttattttgggattttttgttgttggtgttgtcaaagtttgttttttctaaagttgtgtgattatatatttgacattttacatttcaaagaaaggtatgttgtctaacaggggaccaacagaaggtagtattgacaactgttcctgcttctactaaaaaaaaaagagcacaaaagaaaaactaaattattgaaaaattaaaaaatgtcattgtttcctgtttgttaatattagggttgtaaggtgtcgttttgaggtatcgactgtgattccttcccccaccctccattctccagcggttggccggtgttagaactcgctctctttgagtgactggctacaagggcctgagaggtggccagccagggttggagctggaggggatggagccccacctgaggtgccgtgtcacacgggttagagggtcactgggaaacaccgggcggtggcttctgtgatttattttcttgatggtaacttctcagagcagggcgattgggacatcaccagccagagcacaggaagccaccctgcctgctggggaggagggacccacacaagccccctcggcagtttgtccccccagcttcggtatgccttcagggaaaggtcacagctggggaggaagcggggggacgcctgtcacccctggcaggtggtgagttcaggtgggggctccctgctgcccccaggcctgggagcttgaagccctcccggcatctggcatccgagcctcccgccctccagggtgcgcttccctctcttgccgcagcatacacgagggcaggcagtggccttgtcactgtatcttgcatcagagacaaaggaggacccgctttagccctgctgcgggaaatgggggagggcccagggccagcgcattgtgcactggtttactttaaaatgtacagattcttctcgttaaattcttgatagattttttattattattaaaagtcagtttataatacaaaaaaaaaaaaaaaaaaaaa

SEQ ID NO: 4115 - protein, 885 aa, Homo sapien
ARGPFSEVESILNQSFCSRRPLRLLVATKAKEIIKIPDQPDTLCFQIRGAAPPYVYAVGRGSEAMAAGLCAGQCILKVNGSNVMNDGAPEVLEHFQAFRSRREEALGLYQWIYHTHEDAQEARASQEASTEDPSGEQAQEEDQADSAFPLLSLGPRLSLCEDSPMVTLTVDNVHLEHGVVYEYVSTAGVRCHVLEKIVEPRGCFGLTAKILEAFAANDSVFVENCRRLMALSSAIVTMPHFEFRNICDTKLESIGQRIACYQEFAAQLKSRVSPPFKQAPLEPHPLCGLDFCPTNCHINLMEVSYPKTTPSVGRSFSIRFGRKPSLIGLDPEQGHLNPMSYTQHCITTMAAPSWKCLPAAEGDPQGQGLHDGSFGPASGTLGQEDRGLSFLLKQEDREIQDAYLQLFTKLDVALKEMKQYVTQINRLLSTITEPTSGGSCDASLAEEASSLPLVSEESEMDRSDHGGIKKVCFKVAEEDQEDSGHDTMSYRDSYSECNSNRDSVLSYTSVRSNSSYLGSDEMGSGDELPCDMRIPSDKQDKLHGCLEHLFNQVDSINALLKGPVMSRAFEETKHFPMNHSLQEFKQKEECTIRGRSLIQISIQEDPWNLPNSIKTLVDNIQRYVEDGKNQLLLALLKCTDTELQLRRDAIFCQALVAAVCTFSEQLLAALGYRYNNNGEYEESSRDASRKWLEQVAATGVLLHCQSLLSPATVKEERTMLEDIWVTLSELDNVTFSFKQLDENYVANTNVFYHIEGSRQALKVIFYLDSYHFSKLPSRLEGGASLRLHTALFTKGELQAWGREDHGGRAKATKHTGSQPPARPRHLPSQCWRTWRGCLLQAARPRRICSRTSTRSPWRKFSSITANSGHFTWSGLTCPRMPAPRR

SEQ ID NO: 4116 - DNA, 6160 bp, Homo sapien
ctcgcgaggagagcggagcaggcgcgcggcccaggcggaggagcgccgactctggagcagccggagctggaagaggaggaggaggagaggcggcggggaaggaggaggagggggagagtcgctcccgccgggcgagcatggggcgcctggcctcgaggccgctgctgctggcgctcctgtcgttggctctttgccgagggcgtgtggtgagagtccccacagcgaccctggttcgagtggtgggcactgagctggtcatcccctgcaacgtcagtgactatgatggccccagcgagcaaaactttgactggagcttctcatctttggggagcagctttgtggagcttgcaagcacctgggaggtggggttcccagcccagctgtaccaggagcggctgcagaggggcgagatcctgttaaggcggactgccaacgacgccgtggagctccacataaagaacgtccagccttcagaccaaggccactacaaatgttcaacccccagcacagatgccactgtccagggaaactatgaggacacagtgcaggttaaagtgctggccgactccctgcacgtgggccccagcgcgcggcccccgccgagcctgagcctgcgggagggggagcccttcgagctgcgctgcactgccgcctccgcctcgccgctgcacacgcacctggcgctgctgtgggaggtgcaccgcggcccggccaggcggagcgtcctcgccctgacccacgagggcaggttccacccgggcctggggtacgagcagcgctaccacagtggggacgtgcgcctcgacaccgtgggcagcgacgcctaccgcctctcagtgtcccgggctctgtctgccgaccagggctcctacaggtgtatcgtcagcgagtggatcgccgagcagggcaactggcaggaaatccaagaaaaggccgtggaagttgccaccgtggtgatccagccatcagttctgcgagcagctgtgcccaagaatgtgtctgtggctgaaggaaaggaactggacctgacctgtaacatcacaacagaccgagccgatgacgtccggcccgaggtgacgtggtccttcagcaggatgcctgacagcaccctacctggctcccgcgtgttggcgcggcttgaccgtgattccctggtgcacagctcgcctcatgttgctttgagtcatgtggatgcacgctcctaccatttactggttcgggatgttagcaaagaaaactctggctactattactgccacgtgtccctgtgggcacccggacacaacaggagctggcacaaagtggcagaggccgtgtcttccccagctggtgtgggtgtgacctggctagaaccagactaccaggtgtacctgaatgcttccaaggtccccgggtttgcggatgaccccacagagctggcatgccgggtggtggacacgaagagtggggaggcgaatgtccgattcacggtttcgtggtactacaggatgaaccggcgcagcgacaatgtggtgaccagcgagctgcttgcagtcatggacggggactggacgctaaaatatggagagaggagcaagcagcgggcccaggatggagactttattttttctaaggaacatacagacacgttcaatttccggatccaaaggactacagaggaagacagaggcaattattactgtgttgtgtctgcctggaccaaacagcggaacaacagctgggtgaaaagcaaggatgtcttctccaagcctgttaacatattttgggcattagaagattccgtgcttgtggtgaaggcgaggcagccaaagcctttctttgctgccggaaatacatttgagatgacttgcaaagtatcttccaagaatattaagtcgccacgctactctgttctcatcatggctgagaagcctgtcggcgacctctccagtcccaatgaaacgaagtacatcatctctctggaccaggattctgtggtgaagctggagaattggacagatgcatcacgggtggatggcgttgttttagaaaaagtgcaggaggatgagttccgctatcgaatgtaccagactcaggtctcagacgcagggctgtaccgctgcatggtgacagcctggtctcctgtcaggggcagcctttggcgagaagcagcaaccagtctctccaatcctattgagatagacttccaaacctcaggtcctatatttaatgcttctgtgcattcagacacaccatcagtaattcggggagatctgatcaaattgttctgtatcatcactgtcgagggagcagcactggatccagatgacatggcctttgatgtgtcctggtttgcggtgcactcttttggcctggacaaggctcctgtgctcctgtcttccctggatcggaagggcatcgtgaccacctcccggagggactggaagagcgacctcagcctggagcgcgtgagtgtgctggaattcttgctgcaagtgcatggctccgaggaccaggactttggcaactactactgttccgtgactccatgggtgaagtcaccaacaggttcctggcagaaggaggcagagatccactccaagcccgtttttataactgtgaagatggatgtgctgaacgccttcaagtatcccttgctgatcggcgtcggtctgtccacggtcatcgggctcctgtcctgtctcatcgggtactgcagctcccactggtgttgtaagaaggaggttcaggagacacggcgcgagcgccgcaggctcatgtcgatggagatggactaggctggcccgggaggggagtgacagagggacgttctaggagcaattggggcaagaagaggacagtgatattttaaaacaaagtgtgttacactaaaaaccagtcctctctaatctcaggtgggacttggcgctctctcttttctgcatgtcaagttctgagcgcggacatgtttaccagcacacggctcttcttcccacggcactttctgatgtaacaatcgagtgtgtgttttcccaactgcagctttttaatggttaaccttcatctaattttttttctcccactggtttatagatcctctgacttgtgtgtgtttatagcttttgtttcgcggggttgtggtgaggaaggggtgatggcatgcggagttctttatcttcagtgagaatgtgcctgcccgcctgagagccagcttccgcgttggaggcacgtgttcagagagctgctgagcgccaccctctacccggctgacagacaacacagacctgtgccgaaggctaatttgtggcttttacgaccctaccccaccccctgttttcaggggtttagactacatttgaaatccaaacttggagtatataacttcttattgagcccaactgctttttttttttttttttttgcttctctgccccttttccatttcttttgtatttgttttctgtgagagcactgaaatggcagccctggaatctacaatttggctctccactgagcaccttatcttgccaccttagccttaagaatgaatatgaagaaaaatacacagccacctctgtccagggcagtaagaagggctgcaaggaaggggaggatggggacaaggaaaggatcagatacctgctccagtagttgtgaggccactgtgtctcaggggactccaggaggagcagaagagggatcccacgaagttattcttacgcagctggggccaggagggtcagagtggtgccaggtgcaagttaggctaaagaagccaccactattcctctctcttgcccattgtggggggcaaaggcattggtcaccaagagtcttgcagggggacccacagatatgccatgtccttcacacgtgcttgggctccttaacctgaaggcaaattgctacttgcaagactgactgacttcaaggaatcagaaattacctagaagcaccatgttttttctatgaccttttcagtccttcaggtcattttaaggtccactgcagggggttagtgagaaagggtatactttgtggtatgttttgctttcctaatagggacatgaaggaaacccagcaatttgctgttatgtgaatggcctgtagagcagagtcaagagcggtgtgctttgcccgactgctcccatcaggaataggagagtagacagagatcttccacatcccaggcttctgctgctgctttaaaagctctgtccttggagcctcccgctccctgaagtgtctcgccccctgcacagcactggcctttcggaagcatcccagtagggttttctgaggctcgctggtgactcatgccctaattgcaatcctctgcttttatcttgactttgaaggatctaacactgctctctcttccaaaggggaaaaaaagattcatttgttttgagcaataaactaatacaaaatgatggccattcatgtgcagctctttgtcaccatgggccggatgagttgtgctcctcctggctcaccatttccccctgctcccccacagccggttctgcacttatcaccgagtcgcccctggaagcagattcccattgagttttccccaccaaggggaccatgcacatggtagaaacattagattctgcattgacagtagcctttccttggcccgggcctgtggtgggaagacgggcaacaagtataccccaccagggcctgagtgactagaggaagaggacgaggccttgttggcactagatttgggtattttctgcatgtcataacatatcctaactgctatttcagaagaggcagcttgtaggtgattgtacaagtgagaattaaagagagaacagatatttaaacaggtgctgtattagtaacagccagtgccctttcagcccttgcatctattaaaaggagattcaggattttattggcacaggcccttcttagtaggaagaaagggtgcttagctttggacctgaccgggtgtgtgtaaaaccatggactgagtcacagcagacactcgatggtggtaaatgtgatgggtgcttacacactgtaccttttcctttcatactgatgctgcagttcagggctggagttgttaaggcattgacctccacccacctgccccatgtccactgggctgcccaagctgcatgtcacctgagggctggcaggaaggggcgagaaatcccagggcattgtaccaaggacctagttccttctagggatataaatttccaggaatgtgtatttttaatgtggtgagatgcactcttttgttgtaccaaatagggctccccaccccacccctgcgacaagtgctcttctagaacaggttcctaccagcagcactggtgtgaatgaaagagagacccagccgcgtctcacacaggtggaattgcacttcttaacaaaaaggaactttataaaagtttgggattttttttcctaatcataaaaatagccccagaaagagcctaagctatgttcagatagaagcctcgaaattcctgtaaattgtttactttatgatgtttacatacacgtttcactttgaaaaaaaatgcaaatcgactttttaacaactgttgagatgtttcatgggacagtagaactctgactcaccaactgggctaaattttaatttaaaaatgtatttatttgagtgtctttccccccctcaccctcaccatctgaggggctccctgagatcttggtagaggaggcccctcctgcccagaccttcgtttgtttccccggtggcccttgcttcttgctttgcagactgcctgcagccatgattttgtcactgacatctgtgagccaaagactgagcctttttggcaggaataataagcaatactacacaacttgctactttcagaaaacttttttttagcttcaccgatgacaacagaggaagaagggaactgggatttgggtaagttctcctccactgtttgaccaaattctcagtgataaatatgtgtgcagatccctagaagagaaaacgctgactttctttttaagtgtggcacataaggatctgcagaattttccgtagacaaagaaaggatcttgtgtatttttgtccatatccaatgttatatgaactaattgtattgttttatactgtgaccacaaatattatgcaatgcaccatttgttttttatttcattaaaggaagtttaattt

SEQ ID NO: 4117 - protein, 924 aa, Homo sapien
REESGAGARPRRRSADSGAAGAGRGGGGEAAGKEEEGESRSRRASMGRLASRPLLLALLSLALCRGRVVRVPTATLVRVVGTELVIPCNVSDYDGPSEQNFDWSFSSLGSSFVELASTWEVGFPAQLYQERLQRGEILLRRTANDAVELHIKNVQPSDQGHYKCSTPSTDATVQGNYEDTVQVKVLADSLHVGPSARPPPSLSLREGEPFELRCTAASASPLHTHLALLWEVHRGPARRSVLALTHEGRFHPGLGYEQRYHSGDVRLDTVGSDAYRLSVSRALSADQGSYRCIVSEWIAEQGNWQEIQEKAVEVATVVIQPSVLRAAVPKNVSVAEGKELDLTCNITTDRADDVRPEVTWSFSRMPDSTLPGSRVLARLDRDSLVHSSPHVALSHVDARSYHLLVRDVSKENSGYYYCHVSLWAPGHNRSWHKVAEAVSSPAGVGVTWLEPDYQVYLNASKVPGFADDPTELACRVVDTKSGEANVRFTVSWYYRMNRRSDNVVTSELLAVMDGDWTLKYGERSKQRAQDGDFIFSKEHTDTFNFRIQRTTEEDRGNYYCVVSAWTKQRNNSWVKSKDVFSKPVNIFWALEDSVLVVKARQPKPFFAAGNTFEMTCKVSSKNIKSPRYSVLIMAEKPVGDLSSPNETKYIISLDQDSVVKLENWTDASRVDGVVLEKVQEDEFRYRMYQTQVSDAGLYRCMVTAWSPVRGSLWREAATSLSNPIEIDFQTSGPIFNASVHSDTPSVIRGDLIKLFCIITVEGAALDPDDMAFDVSWFAVHSFGLDKAPVLLSSLDRKGIVTTSRRDWKSDLSLERVSVLEFLLQVHGSEDQDFGNYYCSVTPWVKSPTGSWQKEAEIHSKPVFITVKMDVLNAFKYPLLIGVGLSTVIGLLSCLIGYCSSHWCCKKEVQETRRERRRLMSMEMD

SEQ ID NO: 4118 - DNA, 3272 bp, Homo sapien
  Unsure 2167-2368: Unknown base
ggttggtgcgagcttccagcttggccgcagttggttcgtagttcggctctggggtcttttgtgtccgggtctggcttggctttgtgtccgcgagtttttgttccgctccgcagcgctcttcccgggcaggagccgtgaggctcggaggcggcagcgcggtccccggccaggagcaagcgcgccggcgtgagcggcggcggcaaaggctgtggggagggggcttcgcagatccccgagatgccggagttcctggaagacccctcggtcctgacaaaagacaagttgaagagtgagttggtcgccaacaatgtgacgctgccggccggggagcagcgcaaagacgtgtacgtccagctctacctgcagcacctcacggctcgcaaccggccgccgctccccgccggcaccaacagcaaggggcccccggacttctccagtgacgaagagcgcgagcccaccccggtcctcggctctggggccgccgccgcgggccggagccgagcagccgtcggcaggaaagccacaaaaaaaactgataaacccagacaagaagataaagatgatctagatgtaacagagctcactaatgaagatcttttggatcagcttgtgaaatacggagtgaatcctggtcctattgtgggaacaaccaggaagctatatgagaaaaagcttttgaaactgagggaacaaggaacagaatcaagatcttctactcctctgccaacaatttcttcttcagcagaaaatacaaggcagaatggaagtaatgattctgacagatacagtgacaatgaagaagactctaaaatagagctcaagcttgagaagagagaaccactaaagggcagagcaaagactccagtaacactcaagcaaagaagagttgagcacaatcaggtgggagaaaaaacagaggaaagaagagtagaaagggatattcttaaggaaatgttcccctatgaagcatctacaccaacaggaattagtgctagttgccgcagaccaatcaaaggggctgcaggccggccattagaactcagtgatttcaggatggaggagtctttttcatctaaatatgttcctaagtatgttcccttggcagatgtcaagtcagaaaagacaaaaaagggacgctccattcccgtatggataaaaattttgctgtttgttgttgtggcagtttttttgtttttggtctatcaagctatggaaaccaaccaagtaaatcccttctctaattttcttcatgttgaccctagaaaatccaactgaatggtatctctttggcacgttcaacttggtctcctattttcaataactgttgaaaaacatttgtgtacacttgttgactccaagaactaaaaataatgtgatttcgcctcaataaatgtagtatttcattgaaaagcaaacaaaatatatataaatggacttcattaaaatgtttttgaactttggactagtaggagatcactttgtgccatatgaataatcttttttagctctggaactttttgtaggctttatttttttaatgtgggcatcttatttcatttttgaaaaaatgtatatgttttttgtgtatttgggaaacgaagggtgaaacatggtagtataatgtgaagctacacatttaaatacttagaattcttacagaaaagattttaagaattattctctgctgaataaaaactgcaaatatgtgaaacataatgaaattcagtaagaggaaaagtaacttggttgtactttttgtaactgcaacaaagtttgatggtgtttatgaggaaaagtacagcaataatctcttctgtaacctttattaatagtaatgttgttgtagccctatcatactcactttttaagacacagtatcatgaaagtcctatttcagtaagacccatttacatacagtagatttttagcagagatcttttagtgtaacatacatattttagagaattgttggctagctgtacatgttttgaaaagctgtttagctagctataaggctataattggaaatttgtattttttatttacagcaaaacatttattcagtcatccagtttgctaccaaaatatgttttagataagtgtgtgtatgtttgtttagaagttagaaattgtaaacactggtcttatgtttcatttggattcattnnnnnnnnnnnnnnnnnnnnnnnnnnnnnnnnnnnnnnnnnnnnnnnnnnnnnnnnnnnnnnnnnnnnnnnnnnnnnnnnnnnnnnnnnnnnnnnnnnnnnnnnnnnnnnnnnnnnnnnnnnnnnnnnnnnnnnnnnnnnnnnnnnnnnnnnnnnnnnnnnnnnnnnnnnnnnnnnnnnnnnnnnnnnnnnnnnnnnnnnnnctcttgaaatggttatctttgtggatgatttttttttttaagctgaaacttacctcatgaataacttgattaaagtagtaggtgattaaaatttcaatagaatcaaatgagacaaaaattttaaactgactcatttgagtttcaactttacagtcattgaccataaagcacactaaaaatgtaagttatttttaaatacatctgaaataaaaatacttactaaaaaggaagaagccgaagatgtatatttagaccagcacacaattttgatttcaattagccttattctaatatttagcttttagatctttcatacacattttcacgtactttgcaattgagaccagaaagacttgtaggtctttctgcagaatgagtgggtccttgcaaagtgagtgggaaacttactcctagatcagaaatgtttgcctctctgagtaaaatgtttctttcagatgagccatagagggggcaccttttactcaacttttctttgttttgaaactttgtttcccatactgttttcagccttttgtttataattagaaattgtgagaagcttcatttagtgtttaaaaatgtggggagataaatcagacttaacatgtatgtaagatcaattcacttaaaagtatggtccaaatagcaaaaataggaccaggtgaaacatgtagtcattttttaaaaacatgtacttggtcttttgtgtgtgtctgttttattccattagaataaatgtgtccttgatgtaaatgcaaagcatttcttcctgattaaattgtagatgtagactttacaatataattcaataataaaaagtaattaacctctagttttgtcgttgcaataaatggttttcagatagcacaaactgtgatttctggataacatttcttatgaaaaa

SEQ ID NO: 4119 - protein, 424 aa, Homo sapien
  Unsure 2167-2368: Unknown amino acid
VGASFQLGRSWFVVRLWGLLCPGLAWLCVREFLFRSAALFPGRSREARRRQRGPRPGASAPGVSGGGKGCGEGASQIPEMPEFLEDPSVLTKDKLKSELVANNVTLPAGEQRKDVYVQLYLQHLTARNRPPLPAGTNSKGPPDFSSDEEREPTPVLGSGAAAAGRSRAAVGRKATKKTDKPRQEDKDDLDVTELTNEDLLDQLVKYGVNPGPIVGTTRKLYEKKLLKLREQGTESRSSTPLPTISSSAENTRQNGSNDSDRYSDNEEDSKIELKLEKREPLKGRAKTPVTLKQRRVEHNQVGEKTEERRVERDILKEMFPYEASTPTGISASCRRPIKGAAGRPLELSDFRMEESFSSKYVPKYVPLADVKSEKTKKGRSIPVWIKILLFVVVAVFLFLVYQAMETNQVNPFSNFLHVDPRKSN

SEQ ID NO: 4120 - DNA, 833 bp, Homo sapien
  Unsure 533-668, 737: Unknown base
atgggatggggtaggaaggaatgttaatatgagagaaattttaaaatgtataaaaaagtaaaaggttgtatgtttgctcagtttgaaataaagtgaataccgtgcctggccagaaaatctggattcttattcctagttcttcatttctgtcacatgcacttagttgacattacatctacatatattagctttttcctacatgagccatctatttacttagtaaccagtgttcttaatgaagtatttagtcttgggtttcttgtaaaatttctctgcattccttagacagtgtactatacatgaaatattcttgttgacctagtaatttatattattccatttaattcttaaacctatggcctttttattgagcacactcttaaatcattatttggcttgtaaacattcatctgaattgtggctacaatcctctttaaataatctaggaaaaaagaaagataaagcttacattttcacagttttggctcttaaacacattccacaaatgccattaagaatttattttgttttannnnnnnnnnnnnnnnnnnnnnnnnnnnnnnnnnnnnnnnnnnnnnnnnnnnnnnnnnnnnnnnnnnnnnnnnnnnnnnnnnnnnnnnnnnnnnnnnnnnnnnnnnnnnnnnnnnnnnnnnnnnnnnnnnnnnnnntttgttttagagtcatttaatgtgtttttatgcacaataatagtgggaggttgttttgttgcgtttgtntgtttgttttggtttgtttgttttgctttccatgtgggaaaagttaacattggaactgtttctagtaaaagatttttttcaggctgggcacggtgg

SEQ ID NO: 4121 - protein, 110 aa, Homo sapien
  unsure 60-105: unknown amino acid
  Unsure 533-668, 737: Unknown amino acid
MAFLLSTLLNHYLACKHSSELWLQSSLNNLGKKKDKAYIFTVLALKHIPQMPLRIYFVLXXXXXXXXXXXXXXXXXXXXXXXXXXXXXXXXXXXXXXXXXXXXXXCFRVI

SEQ ID NO: 4122 - DNA, 1683 bp, Homo sapien
agaaacggcagtggcagcagcgtccggagcagccgcagccttctggaagctccaggcggtctttctgccgagcctcggtcccggcccccatcctccccgccccatcggttgttgtctgggcggatttaaacagtcaagtaaaatcaagctgggtaatcatggcagaaggtggatttgatccctgtgaatgtgtttgctctcatgaacatgcaatgagaagactgatcaatctgttacggcagtcccagtcctactgcacagacacagagtgtcttcaggaattaccgggaccctctggtgataatggcatcagtgttacaatgatcttggtagcctggatggttattgcattgatcttgttcttactgagacctcctaatctaagaggatccagcctacctggaaagccaaccagtcctcataatggacaagatccaccagctcctcctgtggactaactttgtgatatgggaagtgaaaatagttaacaccttgcacgaccaaacgaacgaagatgaccagagtactcttaaccccattagaactgtttttccttttgtatctgcaatatgggatggtattgttttcatgagcttctagaaatttcacttgcaagtttatttttgcttcctgtgttactgccattcctatttacagtatatttgagtgaatgattatatttttaaaaagttacatggggcttttttggttgtcctaaacttacaaacattccactcattctgtttgtaactgtgattataatttttgtgataatttctggcctgattgaaggaaatttgagaggtctgcatttatatattttaaatagatttgataggtttttaaattgctttttttcataaggtatttataaagttatttggggttgtctgggattgtgtgaaagaaaattagaaccacgctgtatttacatttaccttggtagtttatttgtggatggcagttttctgtagttttggggactgtggtagctcttggattgttttgcaaattacagctgaaatctgtgtcatggattaaactggcttatgtggctagaataggaagagagaaaaaatgaaatggttgtttactaattttatactcccattaaaaatctctaatgttaagaaaaccttaaataaacatgattgatcaatatggcagatgatttacagtccattatatgacatttgtaagccactcaacactagccttacaaggttcatgaaaggaggaaaacattaattctttctgcctttgctgatataatccacatagtaataatttaagctataatttatttttaaaatgagtgcctcttgggaagcttcttttctgttctaacagttccctgttaaaatgaaaatcttaggccagtgcagtggctcacacctgtaatctcagcactttgggaggctgaggtgggtggatcacttgaggtcaggagttcgagaccagcctggccaacatggtgaaaccctgtctctactaaaaatacagaaaaattagccagggttggtgcatgtgcctgtaatcccagctactcaggaggccaaagcaggagaattgcttgaacccgggaggtggaggttgcagtgaaccaagatcgcaccactgcattccagcctaagcaatagagcgagactccctcccaaaaaaaaaaaaaaaaaaaaaaaaaaa

SEQ ID NO: 4123 - protein, 99 aa, Homo sapien
MAEGGFDPCECVCSHEHAMRRLINLLRQSQSYCTDTECLQELPGPSGDNGISVTMILVAWMVIALILFLLRPPNLRGSSLPGKPTSPHNGQDPPAPPVD

SEQ ID NO: 4124 - DNA, 688 bp, Homo sapien
cagagcgcggcggctggaagctgctaagtcagagccgcgatgttccggattgagggcctcgcgccgaagctggacccggaggagatgaaacggaagatgcgcgaggatgtgatctcctccatacggaactttctcatctacgtggccctcctgcgagtcactccatttatcttaaagaaattggacagcatatgaagacaggacatcacatatgaatgcacgatatgaagagcctggttacagtttcgactcctctctgcaagtgaataggcccagaaaggtgtaagagactctttgaatggacataaaattctgcttgttaagaacaagtttggctctggtaactgaccttcaaagctaaaatataaaactatttgggaagtatgaaacgatgtctcgtgatctggtgtacccttatccctgtgacgtttggcctctgacaatactggtataattgtaaataatgtcaaactccgttttctagcaagtattaagggagctgtgtctgaaatggcactgtcttgtcagtcatttctgtttacctttttcttctgcccagagtgtatttgtgaagagtctcttatattatgttttgtggaaatcagcacacaaccacaatgacatttaagcacaggatcattattagtctatgtttttaataaacatatcaattaaaaaaaaaaaaaaa

SEQ ID NO: 4125 - protein, 51 aa, Homo sapien
MFRIEGLAPKLDPEEMKRKMREDVISSIRNFLIYVALLRVTPFILKKLDSI

SEQ ID NO: 4126 - DNA, 2440 bp, Homo sapien
gctcgggcgcggggcgttcttggtgcgccgggccgtggtgagtccgggctcccgtggccgcgtgctgggaggagactggagcccggttaggaagaatggagttggcgactcgctaccagatccctaaagaagtggctgacatctttaacgcccccagtgatgatgaagagtttgttggcttccgagatgatgttcccatggaaaccctctcgtcagaggagagctgcgatagttttgactcactagagtcagggaaacagcaggatgtgcgctttcattccaaatacttcacagaagagctaagaagaatttttatagaggacactgactcagagactgaggattttgcaggatttacgcagagtgatctgaatggaaagactaacccagaagtaatggtcgtggagtcagatttgagtgatgatggcaaagcatctttggtgagcgaggaagaggaagatgaagaagaagataaggctacccctagaagaagcaggtctagaagaagtagtattggtcttcgagtagcctttcagttccccaccaagaagctggccaacaaaccagataaaaacagttcttccgagcagttgttttctagcgcacgcttacagaatgagaaaaaaacaattcttgaaagaaagaaagactgtagacaggtgatacaaagggaagattctacctctgagtctgaggatgactctcgggatgagagccaggagagttcagatgctttgctgaaaaggaccatgaacatcaaggagaacaaagccatgcttgcccagttattggcggaattgaactcgatgccagatttcttcccagtacgaaccccaacctcagcttctaggaagaagacagtgaggcgggccttccggagggacagatcacgcggcgtatgaacccaacccggagtgcgcggcctcctgagaagtttgctctagagaacttcactgtctcagccgctaaatttgcggaagagttttacagcttccgaagaaggaagacaattggggggaaatgccgggagtacagacgacgtcaccgtatatcttcttttcggccagtggaggatatcaccgaagaggacttagaaaatgttgccataactgttcgagataaaatctatgataaagttctgggtaacacgtgccatcagtgtcgacaaaagaccatcgacaccaagacagtgtgtcggaaccagggttgctgtggtgtgcgaggacagttctgtggaccatgcctgcggaaccgctatggggaggatgtcagatcggcattgctggacccggattgggtgtgtcccccctgtcgtgggatctgcaattgcagctactgtcggaagcgtgacggccgctgtgccacaggaatcctcattcatctggccaagttttatggttatgacaatgttaaggaatatctggagagcttacaaaaggagctggtagaagacaattaagaggaaaacaaacagaaccagccacctcaccatagagtactccaacaagacatgcataccattggtgcctaagatttattaaaacttgactgaacaaaaggggaccatcaacattgtagacactggaggccttacagagtgctagcctcttccttcaggactcacctggggcctgctgcttttatattttgaaagagtttaagggctaataatttaatttgttgtttgttaaaaattaaaatctccgttctttccggctgcattgcttttgcatgttcacatatgatgtacttttatgatgtacttttttttttttgagatggagtcttgttctgttgcccaggagggagtgcagtggtgcaacctcggctcactgcaacctttgcctcctaggttcaagtgattctcctacctcctgagtaactgggattacagtcgtgtgccaccacgctcagccctgagttagtttctagtatttttttctgactttcactctaaggatagcgttgaaaaaagaatgcacgtgtgagttactaaaaagttagaataatgtgcatgggaacagtgcagcaacatgctagaaaatcctcactgcactccagcagaggctagaggaatgccagtgttaccttacgcttctagaagcagagccactccagccagaacccattttgcagtcttctcttcgctcttcagcctgaaggtccagatgtagctggggcctctcagtttggttctatacacagggcactcgtaggtctgtttggtttcttgtctgtccacgggggtggcttttgcaaagatgaccggcatagggcatgccagctccttgagacgggcttcaacaatggttcctgcttgggtgtcccagcgggcgcctatggcaaaaacacagcggttgcaattgtgtggcagcttgctactaatgataatgatcaagttgtttgatgcaataaacattcaacattctggttttgtcat

SEQ ID NO: 4127 - protein, 268 aa, Homo sapien
MELATRYQIPKEVADIFNAPSDDEEFVGFRDDVPMETLSSEESCDSFDSLESGKQQDVRFHSKYFTEELRRIFIEDTDSETEDFAGFTQSDLNGKTNPEVMVVESDLSDDGKASLVSEEEEDEEEDKATPRRSRSRRSSIGLRVAFQFPTKKLANKPDKNSSSEQLFSSARLQNEKKTILERKKDCRQVIQREDSTSESEDDSRDESQESSDALLKRTMNIKENKAMLAQLLAELNSMPDFFPVRTPTSASRKKTVRRAFRRDRSRGV

SEQ ID NO: 4128 - DNA, 1939 bp, Homo sapien
  Unsure 108-139: Unknown base
gtggtagaggaggtttccaaggcaggggagattatggtggaagagggggttatggtggaagagggggctatggtggaagaggctatggagatcccatatggcaggcannnnnnnnnnnnnnnnnnnnnnnnnnnnnnnncaggtggatatagaagatactaaaaactataaaaattagatagcagtgcttgcttctttatagatacattagaaatagtgttccaaataacatacttgaatatcatctttgaagtaaacaccatgttagactccctggtgataccactcttgaattggttaatatgtaagaacattgttttttattaccagttgatctctcaaatgaagtgatgactttttccatattctgtgtacccttgagcatgttgtgtctttttaaaaaacaaaaaaaagaacaaaaattattttttaaaatgtaaatatttattaccatcagacttggaaaatggaaagtattttattgtcatgattgaatttagattgttacctgtattttgttcaggtttgagacatataaaagaccccacctgtaatagaaaggaatatagacccttgcctcacctgtattgctgtggatgtgttttgtgggtttttcattcgattttacaaaatagggaaaggcacttccagttgtatttagtaggcagttgttgtgaatcatttttttctcttataggaggagattcctctctagccatgtttctgttaaagtttcattaattgaagcccaagtttactttttactgtacatacttattttctaattggatttgaaatcagcatgattttgtttgacaaagcaaagtttaagattgaggtcagaaatactttaatggagcaaagacacataccaactttacatgacggtgtgagaaatagtcctataaactggtctcttcatcatttatgctctcactttagatatccaaatattaaaaggcaggctgacctgtatcacacagaattaaggcagtaattttctgcttcagtagatcaagggtagggctaaggcatcctgtggtaattctgattcacagctagatttgggaaacacaaagttagggaatggctatatgtgatttgctagttggagcagtcaaagtcttagctatcaagagttgtgaatttgaatcatggcactaggtcaggggtgctatggattgaaatgaccttagttctcaaggagtgatttgtcctcatttgtcaaatgaggaatgagacacttaccatcatctcaggttgtttcttaaagacctaaatacaaatacaatttgttaaaaacttacagagggcctattttgaatgctttaagatgtaggccaagtaatgtatttttctcttagtgtagaaagttaagagaaaaagagctggtaccataaattttttcaatcttagtgtaaaatctgtatctcattgtaggcttctggtcaatacctatacataacaacttaatgtgatctaaccaactcaactgatagaaagctgaattgttcccagtggacaagtggtatttgatgtttagcaggtttttttgttgttatttttttggtaaactctgtggtaaaatctaaaataatgttaaaaccctaaaagtaactattgaatattctgtaatcttagacatgtatttttcaagctaaccctttgaagaaatgtgttcaaggtaggaaaatataaaattttttggttatttgtaaatttattttttgtgtgtttatatttaatgaaaagatgtaatttcatttgtgatagctgaaaaaaaggctttccataattaagaaaatacctttatcagtagctatgaactctgaaaaataatttttaaaaacttttaagaaaaaaactacttgagtaaaatatttcaagagttgtttaaaaatcttctttaaaacctttacatttctgcctcacttctttt

SEQ ID NO: 4129 - protein, 84 aa, Homo sapien
  Unsure 108-139: Unknown amino acid
MIEFRLLPVFCSGLRHIKDPTCNRKEYRPLPHLYCCGCVLWVFHSILQNRERHFQLYLVGSCCESFFSLIGGDSSLAMFLLKFH

SEQ ID NO: 4130 - DNA, 15059 bp, Homo sapien
  Unsure 9210-9228: Unknown base
cgcccggccccctcccccggcgccggccacgggaggcggtgatgcgggcgcgggcggcctcggctgcgccgagagcggagacacaggctcaagatggcagattccgactgaggctgggggggccgagctcgcgcgccgctttcccgtccccgttgccatgaaccgcggacaccccggccccgatggcccccgtgtacgaaggtatggcctcacatgtgcaagttttctcccctcacacccttcaatcaagtgccttctgtagtgtgaagaaactgaaaatagagccgagttccaactgggacatgactgggtacggctcccacagcaaagtgtatagccagagcaagaacatccccctgtcgcagccagccaccacaaccgtcagcacctccttgccggtcccaaacccaagcctaccttacgagcagaccatcgtcttcccaggaagcaccgggcacatcgtggtcacctcagcaagcagcacttctgtcaccgggcaagtcctcggcggaccacacaacctaatgcgtcgaagcactgtgagcctccttgatacctaccaaaaatgtggactcaagcgtaagagcgaggagatcgagaacacaagcagcgtgcagatcatcgaggagcatccacccatgattcagaataatgcaagcggggccactgtcgccactgccaccacgtctactgccacctccaaaaacagcggctccaacagcgagggcgactatcagctggtgcagcatgaggtgctgtgctccatgaccaacacctacgaggtcttagagttcttgggccgagggacgtttgggcaagtggtcaagtgctggaaacggggcaccaatgagatcgtagccatcaagatcctgaagaaccacccatcctatgcccgacaaggtcagattgaagtgagcatcctggcccggttgagcacggagagtgccgatgactataacttcgtccgggcctacgaatgcttccagcacaagaaccacacgtgcttggtcttcgagatgttggagcagaacctctatgactttctgaagcaaaacaagtttagccccttgcccctcaaatacattcgcccagttctccagcaggtagccacagccctgatgaaactcaaaagcctaggtcttatccacgctgacctcaaaccagaaaacatcatgctggtggatccatctagacaaccatacagagtcaaggtcatcgactttggttcagccagccacgtctccaaggctgtgtgctccacctacttgcagtccagatattacagggcccctgagatcatccttggtttaccattttgtgaggcaattgacatgtggtccctgggctgtgttattgcagaattgttcctgggttggccgttatatccaggagcttcggagtatgatcagattcggtatatttcacaaacacagggtttgcctgctgaatatttattaagcgccgggacaaagacaactaggtttttcaaccgtgacacggactcaccatatcctttgtggagactgaagacaccagatgaccatgaagcagagacagggattaagtcaaaagaagcaagaaagtacattttcaactgtttagatgatatggcccaggtgaacatgacgacagatttggaagggagcgacatgttggtagaaaaggctgaccggcgggagttcattgacctgttgaagaagatgctgaccattgatgctgacaagagaatcactccaatcgaaaccctgaaccatccctttgtcaccatgacacacttactcgattttccccacagcacacacgtcaaatcatgtttccagaacatggagatctgcaagcgtcgggtgaatatgtatgacacggtgaaccagagcaaaacccctttcatcacgcacgtggcccccagcacgtccaccaacctgaccatgacctttaacaaccagctgaccactgtccacaaccagccctcagcggcatccatggctgcagtggcccagcggagcatgcccctgcagacaggaacagcccagatttgtgcccggcctgacccgttccagcaagctctcatcgtgtgtccccccggcttccaaggcttgcaggcctctccctctaagcacgctggctactcggtgcgaatggaaaatgcagttcccatcgtcactcaagccccaggagctcagcctcttcagatccaaccaggtctgcttgcccagcaggcttggccaagtgggacccagcagatcctgcttcccccagcatggcagcaactgactggagtggccacccacacatcagtgcagcatgccaccgtgattcccgagaccatggcaggcacccagcagctggcggactggagaaatacgcatgctcacggaagccattataatcccatcatgcagcagcctgcactattgaccggtcatgtgacccttccagcagcacagcccttaaatgtgggtgtggcccacgtgatgcggcagcagccaaccagcaccacctcctcccggaagagtaagcagcaccagtcatctgtgagaaatgtctccacctgtgaggtgtcctcctctcaggccatcagctccccacagcgatccaagcgtgtcaaggagaacacacctccccgctgtgccatggtgcacagtagcccggcctgcagcacctcggtcacctgtgggtggggcgacgtggcctccagcaccacccgggaacggcagcggcagacaattgtcattcccgacactcccagccccacggtcagcgtcatcaccatcagcagtgacacggacgaggaggaggaacagaaacacgcccccaccagcactgtctccaagcaaagaaaaaacgtcatcagctgtgtcacagtccacgactccccctactccgactcctccagcaacaccagcccctactccgtgcagcagcgtgctgggcacaacaatgccaatgcctttgacaccaaggggagcctggagaatcactgcacggggaacccccgaaccatcatcgtgccacccctgaaaacccaggccagcgaagtattggtggagtgtgatagcctggtgccagtcaacaccagtcaccactcgtcctcctacaagtccaagtcctccagcaacgtgacctccaccagcggtcactcttcagggagctcatctggagccatcacctaccggcagcagcggccgggcccccacttccagcagcagcagccactcaatctcagccaggctcagcagcacatcaccacggaccgcactgggagccaccgaaggcagcaggcctacatcactcccaccatggcccaggctccgtactccttcccgcacaacagccccagccacggcactgtgcacccgcatctggctgcagccgctgccgctgcccacctccccacccagccccacctctacacctacactgcgccggcggccctgggctccaccggcaccgtggcccacctggtggcctcgcaaggctctgcgcgccacaccgtgcagcacactgcctacccagccagcatcgtccaccaggtccccgtgagcatgggcccccgggtcctgccctcgcccaccatccacccgagtcagtatccagcccaatttgcccaccagacctacatcagcgcctcgccagcctccaccgtctacactggatacccactgagccccgccaaggtcaaccagtacccttacatataaacactggaggggagggtgggagggagggagggagagaatggcccgagggaggagggagagaaggagggaggcgctcctgggaccgtgggcgctggccttttatactgaagatgccgcacacaaacaatgcaaacggggcaggtgcggggggggggggggcagagggcagggggacggggtcgggacaccagtgaaacttgaaccgggaagtgggaggacgtagagcagagaagagaacatttttaaaaggaagggattaaagagggtgggaaatctatggtttttatttaaaaaaggaaaagggaaaaaaaaaaaggtcaataacaaaaaacccagctcaagaacccattctacgccaaactggaaaggagaagagagcaacaggaagattccagaaacggggggccccagtttttgaagaactttatgaacttttcaaagattattttcatatggcagcaagtgatacggaagactgctgtcagggacacctgatatggaaatcaaatagatttttaattaattgaacataagatttagggatttttccagaactcgaaagggtcaacagccctccagaatgtcgggctgcagcctgaggaggctgatgtttggagctggtgtgggattggcgaagcccagtccgggctccctagtcaggaaagacgggggacggccaggctgctggaaggcccccgggggcgcggggcgagttttctttttctgagcactctggataaatccctaagcaacgttgtttctcaaatgtcattaataatgtgtgttgcaaactttaggtttttttcttttctgaaaatgtattttctctttgaatccacccctagtcgcgtagcgtagggctagcggtcgtcacagacaccctagtagaatgtagcactcagcacccttgtctcctaccttgtgttcaactccaatgataccaatagaatattcctcaatgtaattgcacaaaaaaaagcgatataacataggcatgtaaccaatgtggcggtgcaggtgtgcgggtgagcgagcacgtgtgggtgtgcacgcgccgccctccccgcgtggccctcggcgccgccaccctagctggcgcagtcttgacactgcatccttccctcctagtgccttaccgagcgacagacgcggcgtgagggtttacttccactggtactccaagaaactgaggctagtcagacacaatctcagctcttctgttgtgctgttgtaacagtttacgctggccttttttttttctttttctttttctttttaaaatgttaatgcccgttgtctttcctgggctgtttgctagcggaaggatgccagggaagccagcaggagctaggagagagtccgtggatctcgaaagaaatatgggagacagatgcccggcgggtgcgtctggagatggggacggcgggagttgagttgtggcagtagttgagttgtaatttgtgggcggaggcccagagagactccccacccttcacccctgccccactctgtccccagttccgccatttgtgaggccagaggtttccggactgttggcctcgccaggcagccgtctcccgccccaggcggcatcccccagtccctcccgcctccacgagagcctggagctctcagcctcgcccggggctccactctctcctccggctccctgggctgttttgctctaacgatcttgccagatccctccctctgtagacaaccaccaacctctgtttgctgttgaattctctcctcacattacccaggtctgctcaagacatgattttggttttggtttctgagggttctagtgggcagaaggttggagggacacttatgagggtggccgggggtctgacgctgcactttggaaaaactcacacagttgaatttccaaagaaatctgccctttgccctctttgcacctttgatacattctggaagttttctcaggctttggacacttctggggatggaggtgtggagaagtggggagttccctctcttcatagtaaataactctgaaatatgtgaatgtgaatggcaggagaatctggccaaggatggggccgaaaagggtggttctaattgtttgcttctgatgttgagtctttagctgaccccacaggcaggtttccaaggtgcaaagagatctttcccgagtcagcggccccatcctcatcctccctccctttacttcctcactgtgcagtctccctcaaggatctactgtgaaaggtgtgtttgtagtgatatccaacctaactcagtaacgaagtcgttacttagctcttagctgtgaaataactctggaaacttccccaccccaaccataaattcttacttataaagaaacaggtccccaaactggaaacagcttagtccaggcctcagcgagaaggaaggacaccatgactgctccatgctgggcacagccgggcagtcttgccaagtgcctgctggaggctgtgccggcaagaggcctgcagcaaggagattcccttccctcgggccattatcaatactgtctttatctggaggtggggaagcgcagccctctgagacagcaggacaatggtcagttcagagagggtgagggcagcaaacgcttcagaggacacagaagccagaggacccccccccgccccacagctgggtcagcctggaaaatccatctattagggactttttggcagccagatggcagcaatagcccattaggtctcatcccgagttccaagtcttggctgcaaatgagcctcagttcgccttactggagagcacccccagattcctgggcacagttcatttccagccctttctagatctgatcttttagggggaaagacagcttaaaatgttcttttcattttaaagaaaattattctgtctgcttaagttggaggctacttactctttcacctgacattttctttccttttattcttccagatcaggaatgaaatttccatgctgctcataaagataatattattgtactaattatttttattaccattgtaattatgatcattatgttgatattttagtcagggttttaaatgcacatttattccaagtatctttgtgttttctctttaatatttaaacttattctctctgtgagtatataagtagactggagggacatccagatgtccagttttgtcaggccaaaaaaaaaaggaaagacttaggaagtaggaaaattgtttctgtcatctctatcccaacaagagacgtcaagaaagatccaccacagaacaaaagtttaaagaagaatcaaagccttgattgggcttctgacaacatggtcaccatcaaggttgtcattttctagatcccagaggcctgggatgcgacgtcaggtggcatctcatgggctcggggaatgtcgagtcactgactgtccagcccttagccagcttctctcccacatcctcagagctctcctgtgcttctgaaatctgttaactaaatctttggcttgcctctggtatttaagcaagaaaattccctcccagaggtgaccccatccgcttccccacaatccatccttttgccatcggcgcacctggggcgtggcttaggttcttcaatgcagggacatttgccccctcccagaagctgctgggcacagtgaggtggcgtaagagtgactggcaggtggtaccttccccaggaaatttcaccacaccacccagttcctcagcctgccccctccccctgtgatgcatgcccccagcacccaattctagccagctggaagtgggtggagggacagcaggaggccagagaaaccctgaacaaagctgggcggctgctcaggcatcacaggctgcaccccctctgaaagcatccccactgggctccggccacatcttcagtgcactgtgctgtgtgcgctgggtgctcacacgctgtccccagacccacaaagtgctaggccccagttgaagaaaggggtgaaatagccagcttcaccgaagggaagggaagggaagtattgggcgatgccagccccacagacgctcagcaaacattagtgcacattctcctagtcctcacccaatggcctcctctacccccatgcatggagctgccacatcagaagccccaagagaagctccctgcaggagaggccagctccctggatgcccaattgcatacctggccgaatctgccattgagtcaccttagcaaataggctgctgtcactaggaccaagctctcaagcagagggatgccaacctagtccttacttagcccacgaatcatctagagcatcctctagtcttttgtgggctccctccttcccatttgaagagacattgttcagaggaagaggggaagatttgaaatgtcaggtcacggaggagtgtttaactggagcctggtgaaccgcagggcaatttgcttctgctcactgggttctgactggcccgtctggacgtgggcccccatgtctctgtgcttagggcctcttcatgatgttttggatgtttccaagggaagtgggtgagcagatcaaggggtgggagagtcgaggcttgattccagttaatactgtgaagtggagcgtgcggtcagtggaattcagaggaaaaagaagggttggagcaaagcggcattcatctcctggactgttagcctttctagtcttcctggtggctgaggtgttcacgggctgggggagccagctgacctttgtcctcttcaacctagaagactcagcccgcccagacaccaacgtgtgagacggatggacatcaggaagggaaggggagattagcccaactgctgacagaacgatttcccttggttggaccttgggaatggcaaacactcatattggaacaagcttggggtggaagatttaggccgtgtgagcgtgtgtgagtgagtggaacaaactttcttggaaactggagggaggagatgaggaggcttcgggaagtattactgatggctcatggttgagagagcgacgtggggacccagctcgccccagcttttgtcccaggttctctttgtctgatgctgagggcagggtggggtgtgggaccaccactcttgttggcctgtcaagtagaccctaggacagaaaatggaaagaaggaaatggctcggtgctctcaactagcagagagaattgaggagaggtaagggttccttctgcaggccagcctgggactccacagcgccagcaggagtgacttggccacaagacattccagccccagggactttgcaggcttcattccctgtctgtgtcttttccttctggtgtgttttacagacttctgatggggaagcttcaaacttgagcaggccagagatgtccttaccaaattggaaaggaaggtgaaactgttcctttctttagccaaagaacccttctcaaagacgcctccagaaatggacaaaatggccttcccttcgttcctttccaggcaataatgacatcattagtgatgcaattctatttgtctttctctttcctctctgtccnnnnnnnnnnnnnnnnnnntgcatttatttcaaaactgtgctattcttttaagaggagtggaggtgaccccttcgatgctgctgctatcgggagacaaggtgccataccaatacgtgggcttgactaatcccaggccaccatgggagagagcaaagcagggctgccaggagttcagttgcatcaagggcgtagagcacgcgggggctgggctcggaatagcagtacttttccactttgatgccttagaactctcacttctcatctccacagaccagactcagtaaaatctcaggccactagagaatggaaggcggtgaaacaggatttaaatgcaaaaaaaacctattggaggcttttggcaccgtggctcactagagggacccagcatagtagaggtttctcttgttgcagcttctgaaaagttcaaaaaagaactccaggccgttcttccctcaaacccagtgagagtttgcagagaagtgccccctgcagggctcccgtcccagaacaccagcaccagagagggtcttcccgatgccccccgctggacttgcccaagcctctgggagcccctcatctcagatccctgtgttgaacatgacactgactgtcccttatttgttaaaatttgcaatatctctcaagtaaataatagccaacatttgttgaatgctttcatgactcccgggctaaggcctttatgagcgttgtctcaaggggccccaacagccatcccacagggagggggataacagcccccatttatagataagggagctgaccggatgctctgagaagtggcaggtgttgaaggaaggataaagcagtgatgggccagaatccccaaggttcccttttttgttcatcaggcccttcctgagatgtgatttttaatcttttaactttttttaattaatagcaatgcgtggcctcatatttctatgaaccatttagtgatactcccgcttcctgcatgccacacactgtgctgggaattgctcatgggttgtcctgtttcatcttctccgtagccctgtgagatcggcaatattagtccccctacagccaaggaaactgcccagagccacacaactcttgaggggcgaggagggcttgaacctgagtctgcccagctccagaactgagcttgcagccattagccacagctgtctcctgcatgtctgagcaaagaaaggcctttacacagcatcaccctgtgccatcccatgcaccgtgggactcagctaaaggactgtgcaaagagggggctcctgagttggatttaggcaaaaggggcagaattcgtttgatttttagagaaaatctctggagagtttcttttgattcatagaattccttttagatttctttccagcataccaactagctttagtagtgctgctacaaccagctcttataagtaagagtgaaaaagtattcttttcttctttaaaaaataagtttttcttgcttatagttaattctagaaaggcaatactaaaggtatatatttttttcaaaatgctattttttactgcacttgataattatcctgacagctctgatctctgtaatagattcactcttcagctctgggcagaaccagaggcagggttcacaccaaatttgtaaataccatatgtgggtctggtgtccaggaacttttttctttctgttaaaaaaaagaacaaaaaaagaacaaaaaaaaagaagtagaggtggaagaaagacaagacttagaggaacaaaagaatgttttcttttgagatactcttctcaaagaaatagcaacaattgtataaacaggaaaaccagccagctttcatgataaaaggaaggcgtgtctcttgccctggtatgagattaacagaaatacagatgcatttttattttgattgaaagatggtgagaatgtagaaatgcttaggactagatttttaattttttaaaataactattatcatttattatgaaatatttgttcagttgttttgagtgggtttcttgtcccttttttcatttaaaaccttctttgttgactggctccaggcttgtttgcctaaattcttaggtagtttacacaagttctagaatcttttagaactttaactccattggaagcaaacctaactaatcggagtttgagatcctggttggtttcaataggtattctggaattctggcagaacacctaaagattttttttttttttagaaggttttagatacattatcttacacaaactgtgacctaatggcaataattacctcaaatgtgggcattcatcctggttttagccttttttgaaatcatgtagccagcttgatcttggaatttaaagactatgaattctctgtgggctgaaaataatgattacttcatacccccggtcatcgttgcttaagtgaattctgaaaatagctcatctttacaacaaaaattaaaccaaggaagagattattctttgtgtgttgtactcaaatgcgatgttcaaatgcacatgttaagtatatatgtttttagctactgtaaaatgctgttagccttctaagctatcaaaacagtcacattttaaatgagtaaactaaacaattgactgtggatacttaagcatatttctggctacgttttatagttaaagtgttttatagtttacatttagactggtactttttaaagaaaagttctgtttataactgacatccgcaaaccccagtgaatgcctcttagttggaggttgtgtctcccccaaggcaagtgtgttgtcccagactcttctgtagtccagcatgcgcacttccctctggattattactttccacgtgaactcaagagaacatgaaaggcaatccagatggagggaaaaggtgtgagtccgcagcccgggccagatgcgaaggtctcatgcgtgtcgtctaaacacttgtcttcaaggccttctctctgacatcttggaagagtcattgagaacagataacctggttcattgatttttgtcttgatttgaatatttaacttattaatagatccactgatttccaggcaccaggcagtagaagagactgggattcaggtgaccatgaaggcacagctgctacttctgggccgggggtgatattttgatcagcgttttgtaggggaggaccatatacccctattcccatggtcgctggctgggttttccatatatctgctgtcatttattcgttttccccttaaaagcaaaatcaatgtaaaaggctatgtttacgttttactcattgtccagcttagactcaaagtctagttcggtgggagggggaccttagcatcctctcagagatggtcagggctgagcaggaggaggcagagacagaggggcagctcagcctggtccattgagacccactctaaacagacatcatatttggaacaagaagatgcttcgagacaggaatgggccccactgtcatgcagaaacagactgggggaatggcagtttccctgagtcttggtttcttttatgttttctcttgtgccaccaccaaactgcagaggacctgctgtgacctaaagggcattcctttagcagataagaccttgaaaactgcaaaacacctgggaccagggagcttttaaaaaatacaaaaaaataccacatttgctttttccctgtgaactgtattgacagcgtgttcttaggacagtcttttggtggaaatgttactgtaaaatagttttcatctcacccctcctaatcatactcccactttcctgtttgtgtggtggtgttgctgttttttcctttacatgaattaaccaaatgaattttgtgtcattgtttttggggcttatatttttaaaacatagaaattgccttttgttcatttgaaaagtaagtatgttgtatctgaaaaagggctctgcctctgctctccctcgcttccttgtaaccaatctccaaacgaatctctcctggcaccgcccccttccttatatagggtcactgtccccggggccacctctgcctccaccctgctgtcaccactgccctgggccaaggcacccaggactcccagaaagcgcgagagccagcaagaaggccccactcagccttgagactggtggtcacacctccctgtcagagtcgcctgctgggctgaaggggcaatggattgtcattgttgaaattgtttggctcaggttataaggaggaacttgggaagtagaaagtgacttgaccatgtgcatccttggtagcttcctgtaactaacaaatggaacagagagcacacccccgccccgccccaccccaagcagatgttcccgtcagcgctgccctgagtcagtcggtcccccgtttctgctctcctcccttttgtgttcctgctcacttcaagcttcttccatggactttccagggcacagtcatctctagcccccaaatcatctcttcatcctctgtgtgtgcatttttttaaccaaatgaaatagacaagaaagtcatactttggggcagcagaatttctaatttagtagaatcactgtatagagatagatgttgatatatatgtttgtgtatatatatcaaaccaaattggataggagaagtatagctttacagatgaggagaaggagctctttagaggtcggagtcaagactggtgtcttggacgtgcatgggctgtgtcccaggccactccgcacacatggggctgaggcgtggcgccgggcccttgtcatccacctcaccacggcagagccagcaggccctgtagggtgctgctgctgtctcactgggtcccagcttcaagcgcatcagtgggtgacgggggcaacaaatcagagtgactggaagtttccatcccgttttgctttgaccacgtgtactgagctgcagcctctgatactctgtcacgtttccaaaaatggtatccattaggatagaaagagaatggatctgcagaaatgtttacctttcaactgctcatgaattcaggacactggatagaaagactcactccccaaaatgagaacagggaagaggagacccggcgacactaagtcaccaggtccaaggaacgtggctccctccccagggtcatctcacctagatctttctctcccaggtcatctcagctcaatctcaataaccctatgaaagccctggtctgttgtgttccttcaccgtacggtttctgtaataaaaagtgttaatccatgttaatctgtgtgaaaattattgcgtgcaacagtattttctcgtgtacctctttttcctatgtgaattgtccctcttttttatttataaatgtctacttttgtttttttaaagacaaaccaatgtgttgtagacctatatgtaacctattccttagtctcatattataggtatgttataagaatggatattttacttggctttagaatgttttacaagaaaactaattcttaactgatcaagtccttgctactaaaatgcttgtgtttttcatcatgacgtcgtgtgcttctaaattaatcattttcgttgtagaaaaatggagtgaatttatattagtcttggaaactaataatagcattgtaaatttatgagatgattttaacagaaaaaatatagaagaatatagttattttaattgtaatattactaactgtagggtgagaaaaaggggggggggtcccattgtggtgaactatgttatagcttgttactcatagtttctttttgatcattttttcggtctccgaggtgaaatgacttattaattaaaatttgtaaactcacatatgcatattgtatatgtgtagaaatgtaatcacactttgtcttggaattacattaaactgtttgaaatcactgtaaaaaa

SEQ ID NO: 4131 - protein, 1171 aa, Homo sapien
  Unsure 9210-9228: Unknown amino acid
MAPVYEGMASHVQVFSPHTLQSSAFCSVKKLKIEPSSNWDMTGYGSHSKVYSQSKNIPLSQPATTTVSTSLPVPNPSLPYEQTIVFPGSTGHIVVTSASSTSVTGQVLGGPHNLMRRSTVSLLDTYQKCGLKRKSEEIENTSSVQIIEEHPPMIQNNASGATVATATTSTATSKNSGSNSEGDYQLVQHEVLCSMTNTYEVLEFLGRGTFGQVVKCWKRGTNEIVAIKILKNHPSYARQGQIEVSILARLSTESADDYNFVRAYECFQHKNHTCLVFEMLEQNLYDFLKQNKFSPLPLKYIRPVLQQVATALMKLKSLGLIHADLKPENIMLVDPSRQPYRVKVIDFGSASHVSKAVCSTYLQSRYYRAPEIILGLPFCEAIDMWSLGCVIAELFLGWPLYPGASEYDQIRYISQTQGLPAEYLLSAGTKTTRFFNRDTDSPYPLWRLKTPDDHEAETGIKSKEARKYIFNCLDDMAQVNMTTDLEGSDMLVEKADRREFIDLLKKMLTIDADKRITPIETLNHPFVTMTHLLDFPHSTHVKSCFQNMEICKRRVNMYDTVNQSKTPFITHVAPSTSTNLTMTFNNQLTTVHNQPSAASMAAVAQRSMPLQTGTAQICARPDPFQQALIVCPPGFQGLQASPSKHAGYSVRMENAVPIVTQAPGAQPLQIQPGLLAQQAWPSGTQQILLPPAWQQLTGVATHTSVQHATVIPETMAGTQQLADWRNTHAHGSHYNPIMQQPALLTGHVTLPAAQPLNVGVAHVMRQQPTSTTSSRKSKQHQSSVRNVSTCEVSSSQAISSPQRSKRVKENTPPRCAMVHSSPACSTSVTCGWGDVASSTTRERQRQTIVIPDTPSPTVSVITISSDTDEEEEQKHAPTSTVSKQRKNVISCVTVHDSPYSDSSSNTSPYSVQQRAGHNNANAFDTKGSLENHCTGNPRTIIVPPLKTQASEVLVECDSLVPVNTSHHSSSYKSKSSSNVTSTSGHSSGSSSGAITYRQQRPGPHFQQQQPLNLSQAQQHITTDRTGSHRRQQAYITPTMAQAPYSFPHNSPSHGTVHPHLAAAAAAAHLPTQPHLYTYTAPAALGSTGTVAHLVASQGSARHTVQHTAYPASIVHQVPVSMGPRVLPSPTIHPSQYPAQFAHQTYISASPASTVYTGYPLSPAKVNQYPYI

SEQ ID NO: 4132 - DNA, 5034 bp, Homo sapien
agcggccgccaacgccgcccggactggagccctgacattgctgcgctcggggggctccaggcagcccgtatcggggcctttatttctcgtcggcggcgccctgcaccgcgcctcgcaaagccaaacaccagagcaccctagaaggtttaactaaaagaatgctcatgtttgacccagttcctgtcaagcaagaggccatggaccctgtctcagtgtcatacccatctaattacatggaatccatgaagcctaacaagtatggggtcatctactccacaccattgcctgagaagttctttcagaccccagaaggtctgtcgcacggaatacagatggagccagtggacctcacggtgaacaagcggagttcacccccttcggctgggaattcgccctcctctctgaagttcccgtcctcacaccggagagcctcgcctgggttgagcatgccttcttccagcccaccgataaaaaaatactcacccccttctccaggcgtgcagcccttcggcgtgccgctgtccatgccaccagtgatggcagctgccctctcgcggcatggaatacggagcccggggatcctgcccgtcatccagccggtggtggtgcagcccgtcccctttatgtacacaagtcacctccagcagcctctcatggtctccttatcggaggagatggaaaattccagtagtagcatgcaagtacctgtaattgaatcatatgagaagcctatatcacagaaaaaaattaaaatagaacctgggatcgaaccacagaggacagattattatcctgaagaaatgtcaccccccttaatgaactcagtgtcccccccgcaagcattgttgcaagagaatcacccttcggtcatcgtgcagcctgggaagagacctttacctgtggaatccccggatactcaaaggaagcggaggatacacagatgtgattatgatggatgcaacaaagtgtacactaaaagctcccacttgaaagcacacagaagaacacacacaggagaaaaaccctacaaatgtacatgggaagggtgcacatggaagtttgctcggtctgatgaactaacaagacatttccgaaaacatactggaatcaaacctttccagtgcccggactgtgaccgcagcttctcccgttctgaccatcttgccctccataggaaacgccacatgctagtctgattgcctctgtgtcctgcctcagcgtgactccccactcacctggctctctctctgtcctgcctcccattatctaacacattttttacatgtacattttaatttgattcagctggtctgaatctctgaatttatatcatccaaaacttccatatggtcagtagtagatgttctctaatcctccctctccttaccacgggtcagacctaaagaatgtgaacacttttttttttttttctggggatgctaagcaaacccttcttacagatacgtttaatgtaataagaacaagggaacatgtaaactaacataaccaattgtcagttctccatgtattcctcaaaagaatgtcagagtaaatgtattagaaatacagtatccagactgctagtccttgccagagacattcttacctctgccctgtgataatattttatgcttgacagtgaaaacaagtgtggccccttgcaccggttagctagaagtacagccagatttcaagctagtgcagtcacctcttccgtcattcttcacaaatcttgtcaacctggatcttagacttcatctgaatcgagttctttgccctcctttgtgcctgcagctcatatggaggtctttgccaccaatgggagatgagcccaaactttcgatctaggtgggtgatgtgtagcagttcaagggaagggtgctgtgttttcatagcatggagtcggaggagagggccatttagcagggggagcagaagaggcaattcctcctgggctaggggttgtcaatgaggtttcaacattttgttagctgtgtgcagcattcccagagcttcagtctctgtgcatactcagctttgtagaaccatgctgcaaagccatataccgatggggttatccatgcaactatctccattcctacaatgtccttaatatgagatcatcaaacattgatagtagggactccatggaatatttgcccagtaatggtaagaaatctttcgggtaagagtatggatggttcttcttttacccaatctgcttatagctttttttgtaaacagggaaatgttgagtggtacttgtattcccttatcaaattaatcacatagcttttatacagaaactcttcctgtgtgagctgttaaggtgccaaattggctgtcatttgtattcatgacacataccataaagcatctgctaatgctttaatggattgattcaattaagacctgagtgacactatttgtaaatataactagttgtgaagcacacatacctttattttgggaatttatgagaaaatatagaaaaccacagatcagggattcatatatgtagctcaaaaattcccaaaagtttactgttagagttggcaatttcctatcactatttcagtgtcagaacaaactgaaaataatggctcgtgtttatgttgaagataaatagcaccattattgggggaagttattcaaaagcaggcttttgagcaccatagtctaaatgccaataaaaataattcatacatagaaatgtcattggtcctgaatttgaagaaagtgagcaacagtagttaaatgtgggtgcatataaccaaattccccttcatcaagaatggaggagaagagagaagaatgaaatcctgaagattcatcccagccgcaactcaggatccaacacaactttaactgggaggaatacattgtttgatcatttttaaaacatctgtgaatgagtgattccggaggcctgtgaattgtgtggggagcttgctttgatggcactgtgttaataaaagttgtagggactgtgcacctaagaggctaagaggtcccactcatccgccctgtgaaccagctgtaaagaaatgtagttaagaaatgcaaagaaatgtgttatcttggcacttgggtttgattttcctttttttaaagcactgcaaaacttctttaggatactaaaacatcctaattgggctgtttttttgttttgttttgtttttcagctaaaggcaaagataatttttttttcagctgaagtttttcttttttgcaactatgacatgaattgagtgataaaatggctctttgaaaagtagatattgtctgtattgtaaatgcttagtcatattcatggcaaagtgttcatttcttgagatggttctttcacaacacacaagaatcaagatggaacgcaaggaaaatctttttgttttgaccgaggtaaccagtttatgtgtgttccaatccatagagaagtgggggaaagggcgagaaaggatcagattgatctgggatcagctttgagcctgagttcagtgaatagcctcatgggcatctcatggaattgatgcatttgctgtggcatatttaaattttgttcaaaagatttgaagcaagaccttgcaaagactcttaacattactgttcagcttgcttagattgtgttaacagttcatttaacaaagatccgttttaactctgaacaaaagcaacccagagcggccattctctattcccatgctggtcaatacgctttcattaccaattggcccttaccaaacttttcttatatatatatttgtattttactatgatagttgagaaatttagcctcttagtcatttttagctgttattgtggaagacctcaaatacaagattagatgcccttgaacatgttttaatgatgtgtgtcatgttactatcaatggtgatttcaatcgcaatattttaaattgatgagaatgatttgtaaacatgaagttactattacgtaaattctgtttgttatagagtttcttcagttgttacccaagtgtcatcctagagaagtcagaagaatcagaatccatcgtattttagagttatgtgaatctacatcataaatgggcattaacattctaaattgcttggtttggagaatgtgttagcagcatagctatattcaactagggagatgctaaatacacagaagtttcaagagccttggaacagaattacaggggaactatatatgtatatgtatattttattaaacacccatctgcactatcagtattgcactaatgtggaatttgaaagactattttgctgatactgtatatatgcgcatcattcctgattagattgttgtaaagacaatctgaaagatctaaggttttaaaataatttggtttgaaaatatacagttgtcttgaaggaattgctgtcatacatgaagttgctccgagctgtctttattctcttcttggtcaaggttaacaattgctaaatgatcgcaaattcacctaaacaatacatttacaaagccatctttacatgcattaaacgagggctacaacaatattgttttacaaatactagcacttttttttctgttatgtacttagtgttagagggtcaaaataatctttctgcttagcatctcttaaaccatacctgcaaatatagcaggattattacatttacagtactttaatacttgtataaactatgcagaaatttttaataaagtgtaatatattttataagctaataagactgaatgggtaaaggtttttagcatgcgttagtatacttgcagatactgaaacattttggtaatctttcttactaaagatgtgaatgtttaatgtaccttctctgtttctactctgtagtccaatgggaattcagtaatgacattttgtcatgtcaaactgtgaacataaatttgtactgtacagtcctcatatactatatacagtatgcaatatatattatatacttgttaataaaaccatcagaatattaaaaaaaatctatgtcgggtgcggagaaagaggtaatgaaatggcaggaattcgatatcagc

SEQ ID NO: 4133 - protein, 345 aa, Homo sapien
MLMFDPVPVKQEAMDPVSVSYPSNYMESMKPNKYGVIYSTPLPEKFFQTPEGLSHGIQMEPVDLTVNKRSSPPSAGNSPSSLKFPSSHRRASPGLSMPSSSPPIKKYSPPSPGVQPFGVPLSMPPVMAAALSRHGIRSPGILPVIQPVVVQPVPFMYTSHLQQPLMVSLSEEMENSSSSMQVPVIESYEKPISQKKIKIEPGIEPQRTDYYPEEMSPPLMNSVSPPQALLQENHPSVIVQPGKRPLPVESPDTQRKRRIHRCDYDGCNKVYTKSSHLKAHRRTHTGEKPYKCTWEGCTWKFARSDELTRHFRKHTGIKPFQCPDCDRSFSRSDHLALHRKRHMLV

SEQ ID NO: 4134 - DNA, 952 bp, Homo sapien
ccacgcgtccggcacttccgcccatccccctccggatccctctgttcgggctcgggtttccgccgagacgacagggactgccaggtcggaagtagtgtgaggctcgtgggcggagccaagcgccgccatgtccgccgccctgctgcggcggggcctggagctgctggcggcgtccgaggccccccgggaccctccaggtcaggccaagccgagaggggctccggtgaaacggccccggaagacgaaggcaattcaggcccagaaactgcggaactcggccaagggaaaggtgcccaagtcggcactggacgagtaccggaagcgagagtgtcgagaccacctcagagtaaacctgaagtttctgaccaggacgagaagcaccgtggctgagtctgtgagccagcagattttgcgccagaaccggggccgcaaggcctgtgaccggcctgtggccaagaccaagaagaagaaggctgagggcaccgtgttcaccgaggaagacttccagaagttccagcaggaatacttcggcagctaggctccctggagggcacggtgaagaggccttcaagccctgcagcctccgactcctgctggctccaggaaccggccgtgccgcgcggccagcagatggcgatgcaggaccagcctggctcgaggaagccgcggagctgagccgagtggaggctggaatggagctggtgggccggaagtcctggggaggatttacacacagaccggagctggcttccgcaggcctgggcagagcatctgcacctgccggaaaggaacgtatctgttttgtttgcttttgcccaggtggggcctctgggctgtttgctgtggagcaaggctaattcctgagcccttggggacgacagctccaggagtaggaagaagggtgggcttccaagttacaataaatgtgaacccaagaaaaaaaaaaaaaaaa

SEQ ID NO: 4135 - protein, 129 aa, Homo sapien [sequence omitted]

SEQ ID NO: 4136 - DNA, 3468 bp, Homo sapien
ctcttacaacattggctgccggcgtgactttgaccgcttcccggtgcgttaccggcagctgaacccacccggcgccacgggactttgacgcgtgctctgcgcttgccatgagactcctgggagctgcagccgtcgcggctctggggcgcggaagggcccccgcctccctaggctggcagaggaagcaggttaattggaaggcctgccgatggtcttcatcaggggtgattcctaatgaaaaaatacgaaatattggaatctcagctcacattgattctgggaaaactacattaacagaacgagtcctttactacactggcagaattgcaaagatgcatgaggtgaaaggtaaagatggagttggtgctgtcatggattccatggaactagagagacaaagaggaatcactattcagtcagcagccacttacaccatgtggaaagatgtcaatattaacattatagatactcctgggcatgtggacttcacaatagaagtggaaagggccctgagagtgttggatggtgcagtccttgttctctgtgctgttggaggggtacagtgccagaccatgactgtcaatcgtcagatgaagcgctacaacgttccgtttctaacttttattaacaaattggaccgaatgggctccaacccagccagggccctgcagcaaatgaggtctaaactaaatcataatgcagcgtttatgcagatacccatgggtttggagggtaattttaaaggtattgtagatcttattgaggaacgagccatctattttgatggagactttggtcagattgttcgatatggtgagattccagctgaattaagggcggcggccactgaccaccggcaggagctaattgaatgtgttgccaattcagatgaacagcttggtgagatgtttctggaagaaaaaatcccctcgatttctgatttaaagctagcaattcgaagagctactctgaaaagatcatttactcctgtatttttgggaagcgccttgaagaacaaaggagttcagcctcttttagatgctgttttagaatacctcccaaatccatctgaagtccagaactatgctattctcaataaagaggatgactcaaaagagaaaaccaaaatcctaatgaactccagtagagacaattcccacccatttgtaggcctggcttttaaactggaggtaggtcgatttggacaattaacttatgttcgcagttatcagggagagctaaagaagggtgacaccatctataacacaaggacaagaaagaaagtacggttgcaacggctggctcgcatgcatgccgacatgatggaggatgttgaggaagtatatgccggagacatctgtgcattgtttggcattgactgtgctagtggagacacattcacagacaaagccaacagcggcctttctatggagtcaattcatgttcctgatcctgtcatttcaatagcaatgaagccttctaacaagaacgatctggaaaaattttcaaaaggtattggcaggtttacaagagaagatcccacatttaaagtatactttgacactgagaacaaagagacagttatatctggaatgggagaattacacctggaaatctatgctcagaggctggaaagagagtatggctgtccttgtatcacaggaaagccaaaagttgcctttcgagagaccattactgcccctgtcccgtttgactttacacataaaaaacaatcaggtggtgcaggccagtatggaaaagtaataggtgtcctggagcctctggacccagaggactacactaaattggaattttcagatgaaacattcggatcaaatattccaaagcagtttgtgcctgctgtagaaaaggggtttttagatgcctgcgagaagggccctctttctggtcacaagctctctgggctccggtttgtcctgcaagatggagcacaccacatggttgattctaatgaaatctctttcatccgagcaggagaaggtgctcttaaacaagccttggcaaatgcaacattatgtattcttgaacctattatggctgtggaagttgtagctccaaatgaatttcagggacaagtaattgcaggaattaaccgacgccatggggtaatcactgggcaagatggagttgaggactattttacactgtatgcagatgtccctctaaatgatatgtttggttattccactgaacttaggtcatgcacagagggaaagggagaatacacaatggagtatagcaggtatcagccatgtttaccatccacacaagaagacgtcattaataagtatttggaagctacaggtcaacttcctgttaaaaaaggaaaagccaagaactaactttgcttactgtgagttgactgactctaattgaatctgcgtggttttgatactttgatggattccagtggaataaattcaggctgctgaaacaagaaattctgagcccaggaagcgggctcttctttcttcaaaagaagcccttcttgttcatattcaggagcttctgttatattcaaaggtaattctatgtctatctcaactctattgattggttttatagttcattgaaaatcctcaaataaaatataattattactgaaatatgtttaatatttaaggggaaaagagactaatttcagttatacttttaagcttagaatgtatgttcatttccaaattttgtatcataagagttttcaacatagagaaaagctgaaaaaatgcaaagaataaccacatactttccatctaccttcctttgttaacgggttgtttatcatataataatttgttttgtcatatttgctttcactgtctattatctgtttaagtctcataactctatttttagtttgctgaagacttgaaagtgaatcgcatatatcatgacacttcttggagtgtcattaatgggcaggcttttctgttgaagagtggattccgtatgttcttcatagagagtgtttttcagattcttcattgggatattaaaatattagccaaatttctctctgttttatatatgtctgtttatttcagtttgtggtttctgcaaatttgtaactgcctctgttttaggagtataagtattacttccttgtggtctattgtgaagtaaaaagtagacccttgcatatactattcttgtttgtgttcatcttaatgtttttgtacagctaaatcaaatgtaatttatagagttagtttcatcaacctaatgaatgctagttaaatttgaattccttggaatttatcgtatattgtattcactgagattatgaagggacaaatgttaatcttttgtttccagaaaaagttgggctttcccaagcagttctattacccggttcagaattgcttcatccaaaaatcatctgatggtatagatggatcctagtccttttcattacctgatggtagaaataaaataattgattttaaa

SEQ ID NO: 4137 - protein, 751 aa, Homo sapien
MRLLGAAAVAALGRGRAPASLGWQRKQVNWKACRWSSSGVIPNEKIRNIGISAHIDSGKTTLTERVLYYTGRIAKMHEVKGKDGVGAVMDSMELERQRGITIQSAATYTMWKDVNINIIDTPGHVDFTIEVERALRVLDGAVLVLCAVGGVQCQTMTVNRQMKRYNVPFLTFINKLDRMGSNPARALQQMRSKLNHNAAFMQIPMGLEGNFKGIVDLIEERAIYFDGDFGQIVRYGEIPAELRAAATDHRQELIECVANSDEQLGEMFLEEKIPSISDLKLAIRRATLKRSFTPVFLGSALKNKGVQPLLDAVLEYLPNPSEVQNYAILNKEDDSKEKTKILMNSSRDNSHPFVGLAFKLEVGRFGQLTYVRSYQGELKKGDTIYNTRTRKKVRLQRLARMHADMMEDVEEVYAGDICALFGIDCASGDTFTDKANSGLSMESIHVPDPVISIAMKPSNKNDLEKFSKGIGRFTREDPTFKVYFDTENKETVISGMGELHLEIYAQRLEREYGCPCITGKPKVAFRETITAPVPFDFTHKKQSGGAGQYGKVIGVLEPLDPEDYTKLEFSDETFGSNIPKQFVPAVEKGFLDACEKGPLSGHKLSGLRFVLQDGAHHMVDSNEISFIRAGEGALKQALANATLCILEPIMAVEVVAPNEFQGQVIAGINRRHGVITGQDGVEDYFTLYADVPLNDMFGYSTELRSCTEGKGEYTMEYSRYQPCLPSTQEDVINKYLEATGQLPVKKGKAKN

SEQ ID NO: 4138 - DNA, 3468 bp, Homo sapien; identical to SEQ ID NO: 4136

SEQ ID NO: 4139 - protein, 751 aa, Homo sapien; identical to SEQ ID NO: 4137

SEQ ID NO: 4140 - DNA, 3305 bp, Homo sapien
tcgcagatatggccagtacactatgaaccaggaaagcaccaccatcaaagttatggagaagcctccatttgatcgatcaatttcccaggattctttggatgaactatctatggaagactattggatagaactagaaaacatcaagaaatctagtgaaaacagccaagaagatcaagaggtggttgttgtcaaagagcctgatgagggagaattggaagaagagtggcttaaagaggccggtttatccaatctcttcggagagtctgctggagatccacaggaaagcattgtgtttttatcaacattgacgcggacccaggcagcagcagttcagaagcgagtagagacggtctcccagaccttgaggaaaaaaaacaaacagtaccagattcctgacgtcagagacatatttgctcaacagagagaatcaaaagaaacagctccaggtggcactgaatcgcagtcacttagaacaaatgaaaacaaataccaaggaagagatgacgaggcatctaaccttgttggtgaagagaagctgatcccacctgaggagacgcctgcccctgaaacagacatcaacctggaggtatcatttgccgagcaagcactcaatcagaaagagagctccaaggagaaaatccagaagagcaaaggcgatgatgccacattacctagtttcagattgccaaaagacaaaacgggtaccacaaggattggtgacctcgcaccccaggacatgaagaaagtttgccatttagccctaattgagctgactgccctctatgatgtattgggtattgagctgaaacaacaaaaagctgtgaaaatcaaaacaaaagattctggtcttttttgcgttccattgacagcgctattagaacaagatcagaggaaagtaccaggaatgcgaatacccttgatctttcaaaaactgatttctcgaattgaagagagaggtttggaaacagaaggcctcttacggatccctggagctgccattagaatcaagaatctttgccaagaactagaagcaaagttttatgaagggacttttaattgggaaagtgtcaaacagcatgatgccgccagcctgctgaagctcttcattcgggagttgccccagccactgctcagtgtggagtatctcaaagcctttcaggctgtccagaatcttccaaccaagaagcagcaactacaggctttgaaccttcttgtcatcctcctacctgatgcaaacagggacacactgaaggcccttcttgaatttctccaaagagtaatagataataaagaaaaaaataaaatgacagtcatgaatgtagcaatggtcatggccccgaatctctttatgtgtcatgcattgggattgaagtccagtgaacagcgagaatttgtaatggcagctgggacagcaaataccatgcacttattgattaagtaccaaaaacttctgtggacaattcccaagtttattgtaaaccaagtgaggaagcaaaacacggaaaatcataaaaaggataaaagagccatgaagaaattgctgaagaaaatggcttatgaccgagaaaaatatgaaaagcaagataagagtacaaatgatgctgacgttcctcagggagtgattcgagtgcaagctccccatctttcgaaagtttccatggcaatacagctaactgaagaactaaaagccagtgatgtacttgccaggtttctcagccaagaaagtggggttgcccagactctcaagaaaggagaagtttttttgtatgaaattggaggaaatattggggaacgctgccttgatgatgacacttacatgaaggatttatatcagcttaacccaaatgctgagtgggttataaagtcaaagccattgtagaagacttaacaagctgcagataaccatgtggacttctgtcataattcttgctgagtcaagagtgtaaataaaagaaatggcaggactcatattattcagttgtacccaagtatttaaaaatgactctcttaagccttaaaaagtcatagatttgtgctgctgccagaattatattaattattattaatgttattattagaaaaaaaatttctggagtgagagtaaagaggcttaattagtttgtgggcagttttcatatgctctgtgaaatgtgtccagatgtgacatagtttttttttttaatatgtggaaatgtcttctcttcccattcttttctcctaaaatcatatatactgtaatatatgctctctcacctctattacctcctcacatctaccctttcccagttaggtttgctttttgaccaaaaagataacaaataccaggtatggcaagttgtgaagacagcacattaaaacatacctaatttcacagtattcctgtcacgacagaatgttagtattcatctctttgaatcatttgctcaaataataacattccaccttttcctgctgtatcacaggaagtgatttgcattttttttcagttcatctgacttatgttcacagaaccgtatcagcgaccaagaaaataggactgtcagaagctgccagttattactgaaccattaaatacttatatactaagaataaataaaatatacccatgtgaaataataattggattatggataacaagagagtgaaagccaaagcactttctgtctactgtactcttctaaatggaattttaaaagtcatagctggctttacgtgttgtcattattagcattataaatatgcatgatagtataatccagtaatggttgaagaatgtattttacttaaagagggatttttttttttaagtcctgaataagtctactggaagaattattcttctgggtgaaaaagcttttgtttgtgttcttattttaaataatcggagtcaatttattaaaatgttcttgaaagtactattcccagggattttaatgcacaaaccatattgtgacaagagatgagcctctgtactgtaaataagaaatgaagtagagaaatgttaaatattttatgagtttagaatatagtaaataaaaggtgatgtaaatgaatgctgcacaaacggtgttcatgatacttttagtagtactttaggaaaaactacacattctcagaagctcttgatgtctctaatgaagggggggaatgctgttaatgagaacagtcataaatttttagcatataattacaagaacagcctgtggatatgatcacttaaatgattttgtggtgattcgtgccattgcttttttatttaaaagaaaattttgtaattaaatgcctttttctaaattaaaaaaaaa

SEQ ID NO: 4141 - protein, 618 aa, Homo sapien
MNQESTTIKVMEKPPFDRSISQDSLDELSMEDYWIELENIKKSSENSQEDQEVVVVKEPDEGELEEEWLKEAGLSNLFGESAGDPQESIVFLSTLTRTQAAAVQKRVETVSQTLRKKNKQYQIPDVRDIFAQQRESKETAPGGTESQSLRTNENKYQGRDDEASNLVGEEKLIPPEETPAPETDINLEVSFAEQALNQKESSKEKIQKSKGDDATLPSFRLPKDKTGTTRIGDLAPQDMKKVCHLALIELTALYDVLGIELKQQKAVKIKTKDSGLFCVPLTALLEQDQRKVPGMRIPLIFQKLISRIEERGLETEGLLRIPGAAIRIKNLCQELEAKFYEGTFNWESVKQHDAASLLKLFIRELPQPLLSVEYLKAFQAVQNLPTKKQQLQALNLLVILLPDANRDTLKALLEFLQRVIDNKEKNKMTVMNVAMVMAPNLFMCHALGLKSSEQREFVMAAGTANTMHLLIKYQKLLWTIPKFIVNQVRKQNTENHKKDKRAMKKLLKKMAYDREKYEKQDKSTNDADVPQGVIRVQAPHLSKVSMAIQLTEELKASDVLARFLSQESGVAQTLKKGEVFLYEIGGNIGERCLDDDTYMKDLYQLNPNAEWVIKSKPL

SEQ ID NO: 4142 - DNA, 3305 bp, Homo sapien; identical to SEQ ID NO: 4140

SEQ ID NO: 4143 - protein, 618 aa, Homo sapien; identical to SEQ ID NO: 4141

SEQ ID NO: 4144 - DNA, 3389 bp, Homo sapien
agtgcctccctccagactcgggagggtcgagggggcgcgggagagagcgcgggcggccgccggggctggtcgcctgcagggatgggggacgagcggccccactactacgggaaacacggaacgccacagaagtatgatcccactttcaaaggacccatttacaataggggctgcacggatatcatatgctgtgtgttcctgctcctggccattgtgggctacgtggctgtaggcatcatagcctggactcatggagaccctcgaaaggtgatctaccccactgatagccggggcgagttctgcgggcagaagggcacaaaaaacgagaacaaaccctatctgttttatttcaacattgtgaaatgtgccagccccctggttctgctggaattccaatgtcccactccccagatctgcgtggaaaaatgccccgaccgctacctcacgtacctgaatgctcgcagctcccgggactttgagtactataagcagttctgtgttcctggcttcaagaacaataaaggagtggctgaggtgcttcgagatggtgactgccctgctgtcctcatccccagcaaacccttggcccggagatgcttccccgctatccacgcctacaagggtgtcctgatggtgggcaatgagacgacctatgaggatgggcatggctcccggaaaaacatcacagacctggtggagggcgccaagaaagccaatggagtcctagaggcgcggcaactcgccatgcgcatatttgaagattacaccgtctcttggtactggattatcataggcctggtcattgccatggcgatgagcctcctgttcatcatcctgcttcgcttcctggctggtattatggtctgggtgatgatcatcatggtgattctggtgctgggctacggaatatttcactgctacatggagtactcccgactgcgtggtgaggccggctctgatgtctctttggtggacctcggctttcagacggatttccgggtgtacctgcacttacggcagacctggttggcctttatgatcattctgagtatccttgaagtcattatcatcttgctgctcatctttctccggaagagaattctcatcgcgattgcactcatcaaagaagccagcagggctgtgggatacgtcatgtgctccttgctctacccactggtcaccttcttcttgctgtgcctctgcatcgcctactgggccagcactgctgtcttcctgtccacttccaacgaagcggtctataagatctttgatgacagcccctgcccatttactgcgaaaacctgcaacccagagaccttcccctcctccaatgagtcccgccaatgccccaatgcccgttgccagttcgccttctacggtggtgagtcgggctaccaccgggccctgctgggcctgcagatcttcaatgccttcatgttcttctggttggccaacttcgtgctggcgctgggccaggtcacgctggccggggcctttgcctcctactactgggccctgcgcaagccggacgacctgccggccttcccgctcttctctgcctttggccgggcgctcaggtaccacacaggctccctggcctttggcgcgctcatcctggccattgtgcagatcatccgtgtgatactcgagtacctggatcagcggctgaaagctgcagagaacaagtttgccaagtgcctcatgacctgtctcaaatgctgcttctggtgcctggagaagttcatcaaattccttaataggaatgcctacatcatgattgccatctacggcaccaatttctgcacctcggccaggaatgccttcttcctgctcatgagaaacatcatcagagtggctgtcctggataaagttactgacttcctcttcctgttgggcaaacttctgatcgttggtagtgtggggatcctggctttcttcttcttcacccaccgtatcaggatcgtgcaggatacagcaccacccctcaattattactgggttcctatactgacggtgatcgttggctcctacttgattgcacacggtttcttcagcgtctatggcatgtgtgtggacacgctgttcctctgcttcttggaggacctggagaggaatgacggctcggccgagaggccttacttcatgtcttccaccctcaagaaacccttgaacaagaccaacaagaaggcagcggagtcctgaaggccccgtgctccccacctctcaaggagtctcatgccgcagggtgctcagtagctgggtctgttcccccagccccttgggctcacctgaagtcctatcactgccgctctgcccctccccatgagccagatcccaccagtttctggacgtggagagtctggggcatctccttcttatgccaaggggcgcttggagttttcatggctgcccctccagactgcgagaaacaagtaaaaacccattggggcctcttgatgtctgggatggcacgtggcccgacctccacaagctccctcatgcttcctgtcccccgcttacacgacaacgggccagaccacgggaaggacggtgtttgtgtctgagggagctgctggccacagtgaacacccacgtttattcctgcctgctccggccaggactgaaccccttctccacacctgaacagttggctcaagggccaccagaagcatttctttattattattattttttaacctggacatgcattaaagggtctattagctttctttccgtctgtctcaacagctgagatggggccgccaaggagtgccttccttttgctccctcctagctgggagtgacgggtgggagtgtgtgtgcccaggtgggggtgtctcctggctgggaaggagggaaagggagggagagttttgcgggggttggcagtggagagcaggctggagaggagatggctaatagctgtttaatggaaacctgctgggctggagggagttaggctgaatttcccgacttcctctgccagttattgacacagctctctttgtaagagaggaaagaaactaaacccacccaagggatgatttcagggggagaggtggagggcagatgtcctgggcaaaccgggcccctctgcccacacacctcacttgatccttttgccaaacttgtcaaactcaggggaactggcttcccagttgcccctttgccatattccaagtccccctcagacttcatgtctctgctcatcagcactgtcccaggatcctggagagggagaacccctggccccaggggaaagaggggggggtctcccgtttcctgtgcctgcaccagccctgcccccattgcgtctgcacacccctgcgtgtaactgcattccaaccactaataaagtgcctattgtacaggtaaaaaaaaaaaaaaaa

SEQ ID NO: 4145 - protein, 706 aa, Homo sapien
MGDERPHYYGKHGTPQKYDPTFKGPIYNRGCTDIICCVFLLLAIVGYVAVGIIAWTHGDPRKVIYPTDSRGEFCGQKGTKNENKPYLFYFNIVKCASPLVLLEFQCPTPQICVEKCPDRYLTYLNARSSRDFEYYKQFCVPGFKNNKGVAEVLRDGDCPAVLIPSKPLARRCFPAIHAYKGVLMVGNETTYEDGHGSRKNITDLVEGAKKANGVLEARQLAMRIFEDYTVSWYWIIIGLVIAMAMSLLFIILLRFLAGIMVWVMIIMVILVLGYGIFHCYMEYSRLRGEAGSDVSLVDLGFQTDFRVYLHLRQTWLAFMIILSILEVIIILLLIFLRKRILIAIALIKEASRAVGYVMCSLLYPLVTFFLLCLCIAYWASTAVFLSTSNEAVYKIFDDSPCPFTAKTCNPETFPSSNESRQCPNARCQFAFYGGESGYHRALLGLQIFNAFMFFWLANFVLALGQVTLAGAFASYYWALRKPDDLPAFPLFSAFGRALRYHTGSLAFGALILAIVQIIRVILEYLDQRLKAAENKFAKCLMTCLKCCFWCLEKFIKFLNRNAYIMIAIYGTNFCTSARNAFFLLMRNIIRVAVLDKVTDFLFLLGKLLIVGSVGILAFFFFTHRIRIVQDTAPPLNYYWVPILTVIVGSYLIAHGFFSVYGMCVDTLFLCFLEDLERNDGSAERPYFMSSTLKKPLNKTNKKAAES

SEQ ID NO: 4146 - DNA, 2829 bp, Homo sapien
ccacgcgtccgcacggaacagggaactatcagcccgtcggcctccgggccctgcattctctagccatggaccgggaccttttgcggcagtcgctaaattgccacgggtcgtctttgctctctctacttcggagcgaacagcaggacaatccacacttccgtagcctcctggggtcggccgccgagccagcccggggcccgccgccccagcacccgttgcagggcagaaaagagaagagagttgacaacatcgagatacagaaattcatctccaaaaaagcggatctgctttttgcactttcctggaaatcagatgcacctgcaacttctgaaattaatgaagacagtgaagatcattatgcaatcatgccacctttagagcaattcatggagatacctagtatggatcggagagagctgtttttccgagatattgagcgtggtgatatagtgattggaagaattagttctattcgggaattcggttttttcatggtgttgatctgtttaggaagtggtatcatgagagatatagcccacttagaaatcacagctctttgtcccttaagagatgtgccttctcacagtaaccatggggatcctttatcatattaccaaactggtgacatcattcgagctggaatcaaggatattgacagataccatgaaaagctagcagtatctctgtatagctcttctcttccaccacacctatctggtattaaattaggtgtaattagctctgaagagcttcctttatactacaggagaagtgttgagctaaatagcaattctttggagtcctatgaaaatgtcatgcagagttccttgggatttgttaatccaggagtagttgaattccttctagaaaaactaggaatagatgaatctaatccaccatctttaatgagaggcctacaaagcaaaaatttctctgaagatgattttgcttctgcattgagaaaaaaacaatccgcatcttgggctttaaaatgtgtgaagatcggagttgactattttaaagttggacgccatgtggatgctatgaatgaatacaataaagctttggaaatagacaaacaaaacgtggaagctttggtagctcgtggagcattatatgcgacaaaaggaagtttgaacaaagcaatagaagattttgagcttgcattagaaaactgtccaactcacagaaatgcaagaaaatacctctgccagacacttgtagagagaggaggacagttagaagaagaagaaaagtttttaaatgctgaaagttactataagaaagctttggctttggatgagacttttaaagatgcagaggatgctttgcagaaacttcataaatatatgcagaaatctttggaattaagagaaaaacaagctgaaaaggaagaaaagcagaaaacaaagaaaatagaaacaagtgcagaaaagttgcgtaagctcttaaaagaagagaagaggctaaagaagaaaagaagaaaatcaacttcttcttcaagtgtttcttctgctgatgaatcagtgtcttcatcatcatcctcttcctcttctggtcacaaaaggcataagaaacataagaggaaccgttcagagtcttctcgcagttccagaaggcattcatctagggcatcctcaaatcagatagatcagaataggaaagatgagtgctacccagttccagctaatacttcagcatcttttcttaaccataaacaagaagtggagaaactactggggaagcaggataggttacagtatgaaaagacacagataaaagagaaagatagatgccctctctcttcatcttcacttgaaataccggatgattttggaggtaggtctgaagatccaagagatttttataacagctataaaacccaagcaggtagtagcaaaacagaaaagccatataaatcagaaagacatttttccagtagaagaaattcctcagattccttctgtaggaattcagaggacaagatttatggttataggagatttgaaaaggatatagagggaagaaaagagcactatagaaggtgggaaccaggttctgtgaggcattctacctcaccagcaagctcagaatactcttggaagtcagttgagaaatacaaaaaatacgctcactctggatcacgtgatttcagtagacatgagcaaagataccgtttaaatacaaatcaaggagaatatgaaagagaggacaattatggggaggatatcaaaacagaggttccagaagaagatgcactaagtagcaaagaacactcagaaagcagtgttaagaaaaatttacctcagaatttactgaatatatttaatcagatagctgaatttgaaaaagaaaaaggaaataagtcaaaaaattaatacaccaaggatatcggcaccattacacaaaatgccattaagtgaagtttttggttgtattagtcataacagttgagtgcagaaatctctgcttctaaaattatttgtagagattacaggaaacaaatgcttttaagtaagtttttctcaaattttgtttcagttctaggtcccttgtcacagcttggtttttagactttttatgtatatgtttatgtacagtatattactcttgacagtttgaatttcttcacctaaagataattctctgaaagtactgtttcttcattctattgcggtatatgagaattcctgggtgcatcttattctgctgtttgagagaaaaatttgtgcattgaacacttggatcatttttataaaaattaatttcattttcttttctgttaaattaaaaatcgtcagcttttgaaagaaaaaaaaaaaaaaaaaa

SEQ ID NO: 4147 - protein, 770 aa, Homo sapien
MDRDLLRQSLNCHGSSLLSLLRSEQQDNPHFRSLLGSAAEPARGPPPQHPLQGRKEKRVDNIEIQKFISKKADLLFALSWKSDAPATSEINEDSEDHYAIMPPLEQFMEIPSMDRRELFFRDIERGDIVIGRISSIREFGFFMVLICLGSGIMRDIAHLEITALCPLRDVPSHSNHGDPLSYYQTGDIIRAGIKDIDRYHEKLAVSLYSSSLPPHLSGIKLGVISSEELPLYYRRSVELNSNSLESYENVMQSSLGFVNPGVVEFLLEKLGIDESNPPSLMRGLQSKNFSEDDFASALRKKQSASWALKCVKIGVDYFKVGRHVDAMNEYNKALEIDKQNVEALVARGALYATKGSLNKAIEDFELALENCPTHRNARKYLCQTLVERGGQLEEEEKFLNAESYYKKALALDETFKDAEDALQKLHKYMQKSLELREKQAEKEEKQKTKKIETSAEKLRKLLKEEKRLKKKRRKSTSSSSVSSADESVSSSSSSSSSGHKRHKKHKRNRSESSRSSRRHSSRASSNQIDQNRKDECYPVPANTSASFLNHKQEVEKLLGKQDRLQYEKTQIKEKDRCPLSSSSLEIPDDFGGRSEDPRDFYNSYKTQAGSSKTEKPYKSERHFSSRRNSSDSFCRNSEDKIYGYRRFEKDIEGRKEHYRRWEPGSVRHSTSPASSEYSWKSVEKYKKYAHSGSRDFSRHEQRYRLNTNQGEYEREDNYGEDIKTEVPEEDALSSKEHSESSVKKNLPQNLLNIFNQIAEFEKEKGNKSKN

SEQ ID NO: 4148 - DNA, 4018 bp, Homo sapien
  Unsure 2276-2477: Unknown base
aaccgcgccatcgtgttggtacccgggaattcggccattatggccgggggaggccggttccggcgaagttaaaccctcggagctggcctcggactgctggggcgttaccccttcggccacccccgctgaccatggcagtgtttcatgacgaggtggaaatcgaggacttccaatatgacgaggactcggagacgtatttctatccctgcccatgtggagataacttctccatcaccaaggatcagtttgtgtgtggagaaacagtcccagccccttcagccaacaaagaattagttaaatgctgaagaagccttcaggaatccaaatcctgaacatttggaatgagcccagatagaaatatcgaatgcaaagctactggcttcacagagacaaccatttatgatttgctgttctgtaagagtgtggattctttctatcaactgctgatatcatcttcaggaagcaagtccataacatgacatatctggattttgtgcttagaaccttaaattggaagcattcttaattatgcatctaaatttaaaagaagataatttcaaaacagtgctttctttcccttggtttcatcattttcatatcttaaaccaaattacttcggtatctgacaacagcatcatctacctcagtcattaggatttcttaataaaaaagagattgtatttttgacttggttattaagattattaaaattagcccttcctttgaaatatgacatcagctttgctgttctaaatttaaaattagttgcttcatcagtaccacacttccagtttctataccaagccagtctcctcagttttcccattagaatggacatgttctgttcagcgtgtcatttctgtaatgcttcatgcagagagtttggtcatagtattaaagagaaaatacagtgaggtcacaatgtctccagagctaaaagttagtgaacaagaaagaaagtccaaaatgaagtgatgaaagaatgaggacttttcttatattctgcatatttcttggaagtcaggacaagatgaaaagaaaaacatccaaaagaagtgaaattggtgacagaatgagaggagcaaagcataccagtgtagtaagtggaatgtttgaatgactttgccaggtcagagcaagtaatatttctgtatctgagtttttgtttgtgttttgataaggctaatgaaattgcattccaggtaggggttaacgtcaaatttccatggctggtagctgtgcttttggcatatcacagtgttgtgtcactactacaaggtaaagcatctacagcggagaatgagcttgaaaatgagagacctattgtgaataaatatgcccatgagagcatatttaataagcctctataacatgcagccaaaccagacattcactcctgcagagaaatgttgccctggagaaaaagagatatataaagataggctatcacccttcttttgctgcagtactaagcatagcaagaaattagaatcatttacattggaaatttgaaaattccctttatatacacaactttactgtgtataaataaaaaatatttattaatgcagtgatgtccgtcaggttgttttaggaatggcttctgcaattagaaaaatagcttgctagaatgtaaatgttctgttactggtaaatgtactgcacacattcattggacgttaaaacaagtgagtagccttttttacctgccagcagcatggctgtgtgcagccactaggctgagacaataaattaccaaaaattataatgtaccgagctgaaaatgctcagtacattatgtggcatattctggatgtgatgagaaatctcattgccatttgggacactgacatcccagaagtaatccacaactgctttgcaaaagcaaagtgactgctcagatgaacagagcagagtactcactcactatggtggcatcagctgcaaagcaaaatgaactgtcccatgatcatgttgatggttttctagatactgccaacatgttagctctttctgatgctgatgagtttcaaacacgaacagacacccttgatgtgggtttgctaagaacatagaagaacaggaagaaaagttgccaggttcacacatcccaggaaaaaagaagcataaaaagcattagcagtcagtgactgatgataatgctgcaataatgggaatggttttgtttctaaaccaaattatttctaaatcaaatcatttattgctttgtttctaaagcagttgagtcactaagtttgtgaactgtaggagaacannnnnnnnnnnnnnnnnnnnnnnnnnnnnnnnnnnnnnnnnnnnnnnnnnnnnnnnnnnnnnnnnnnnnnnnnnnnnnnnnnnnnnnnnnnnnnnnnnnnnnnnnnnnnnnnnnnnnnnnnnnnnnnnnnnnnnnnnnnnnnnnnnnnnnnnnnnnnnnnnnnnnnnnnnnnnnnnnnnnnnnnnnnnnnnnnnnnnnnnnnagcaaaattgctttgggccccaggagtttgaggctgtgggtgagctgtgatcacacccacttgcgttcccagcctgtgtgacatgggcaagacctcatgcctaaaaaataaagagaaagcagagtaaaactggactctgagatatgactaaagttctgtgtgatacgtgtgccttatttagctcaagacattcctggagcacctataaaaactgacttgtaatccaggctatgtctctttttagcttcgtaatctttggcaaggccattggattcttcagctgtacaattaggagactcgatcaggtgattgcctttctcagctgtcagttctctaatttcaggcttggtagcttgtaggaactgaaattgcaattaaaacctttataaactcaaactaaatcatgaattacagaaaaagtccattcttccaaaacttgatgttaccacacttacaagtttaaaatatgaagtcgactgtttaaaggattctgcatatattctagtgtgcacattcagaaacatttttcttggaaaaagtacccaacattttttataactgcacatattaatttattgccagaataaattgcattgcatgctaaataaagtcagataattcaaatccatttgcttttatgtagtttttcttctaaatgtcaacattttgaattaaaatgtttatgattttatatgaggtagaaatcttaactgctttggggtattgttaatagactttttgttatggacagtagtttttaaataaggaaattgccaatttctacagtttgggctctggatttctattgtttgggaaaaaaataactgagtcaagtggtagtaagacaaagttgacattcttagatgagtaactcagtttattacaaggaaagaaaactgattgtttaaggctgatgatcaattcttggagtggtttcagagcccagctctggtcagaagacaatttgaatcttagttcctccactgtgatctccgagaagttacttaataattatattctggtttgtgaaatctggatcatagtacctctttgacagggttgctgtgtgaacccattcattctgcaattagaaaaatagctgtcatgtgctatgcactaggcaaagaagtacctgtcacatgctaggcactaggggaagaagattcggtttctacatttggaaacttagtggaactagaagagacagaagcaagattacagatgagttagagcccccaaggaaacaaaccaggtgatgtgggagagagtaactgggtcaggtgactttttaagggagtctgagctctggcactttttctaagacctgaaggatgagaaggaaacagccttgtgaaaatgattaaatgagctagtatctataaaacatgacagctaatgcctgtcatgtgcaaaaaatggttaactattctaactccgaaaggaattaaacattgttttgcgctttctcctagtccatgttctgctgctgtaacaatacctgagactggataatttatcaagaataaaggttaatttggctc

SEQ ID NO: 4149 - protein, 100 aa, Homo sapien [sequence omitted]

SEQ ID NO: 4150 - DNA, 1038 bp, Homo sapien
ggcacgaggctcggccatgctacgcgcgctgagccgcctgggcgcggggaccccgtgcaggccccgggcccctctggtgctgccagcgcgcggccgcaagacccgccacgacccgctggccaaatccaagatcgagcgagtgaacatgccgcccgcggtggaccctgcggagttcttcgtgctgatggagcgttaccagcactaccgccagaccgtgcgcgccctcaggatggagttcgtgtccgaggtgcagaggaaggtgcacgaggcccgagccggggttctggcggagcgcaaggccctgaaggacgccgccgagcaccgcgagctgatggcctggaaccaggcggagaaccggcggctgcacgagctgcggatagcgaggctgcggcaggaggagcgggagcaggagcagcggcaggcgttggagcaggcccgcaaggccgaagaggtgcaggcctgggcgcagcgcaaggagcgggaagtgctgcagctgcaggaagaggtgaaaaacttcatcacccgagagaacctggaggcacgggtggaagcagcattggactcccggaagaactacaactgggccatcaccagagaggggctggtggtcaggccacaacgcagggactcctaggggcccagtaaggacagtgcccgccagggaccatgtatgtatcatggcggaagagttggccctgacctggaataaagcagttggtgttgcttatgaggaaggttcagccttatccagcacagccttcacgttttgccctctgctgtcaccacttggtcagaaacttccaaacgcagtgccctgttctgccggtgtgtacagcctcagcgcaccaggagaccctagagtggtttccatctcacagagaatcagacagggccacagccccctcaggcagccaggtcatctgagtatcattaagagtagtgatgggaagattacagtctgagggccaaacgtgcctgcttcctgtttttgtaaataaagttttgttggaacacaaaaaaaaaaaaaaaaaaaaaaaa

SEQ ID NO: 4151 - protein, 205 aa, Homo sapien
MLRALSRLGAGTPCRPRAPLVLPARGRKTRHDPLAKSKIERVNMPPAVDPAEFFVLMERYQHYRQTVRALRMEFVSEVQRKVHEARAGVLAERKALKDAAEHRELMAWNQAENRRLHELRIARLRQEEREQEQRQALEQARKAEEVQAWAQRKEREVLQLQEEVKNFITRENLEARVEAALDSRKNYNWAITREGLVVRPQRRDS

SEQ ID NO: 4152 - DNA, 706 bp, Homo sapien
ataggctccgcccctcgcggcgcttcccccggaatagcgtcatcagttctataagagagcgtgtgccgaaggcctcggcctttcacattcgggaagcgtcgggattaggtgaaagtacgtagttgtctttcgtaagttaaaatgataattgggccgaaacttactgccttacctaaaaggcagcgcagtcaggatattggtaggtcgggggcggctttggaaacccttaagtttacaagcatgcgcggacttgagtgctcattaggtcgccgggcgtccacgtgcagccctggaccctgaaccccggcgtgcgtgggccgtgggccctcggggaaaggttccgtgcactcggggactccggtgaagcctgttcagccgtctgtgtcatgtggccatcttgagtctactctgtcgctcttgtgccctagcaccccgagaaccgtcagtttgagccagatggaagctgagctgaacacattacgatggatgatggaaacataagactatcaagaaatccaagtggtaatgggcgaagtttattcagcatccggcaatggacttatcgtagttggggaaacgggtgttccgaataatatcctggaagttatcaggacacctattttaaatataggcctgaattttgtaaagtaatatttaaggtggtccgtgataattaaataaaatgcttaattcatgtggctaaaac

SEQ ID NO: 4153 - protein, 52 aa, Homo sapien
MIIGPKLTALPKRQRSQDIGRSGAALETLKFTSMRGLECSLGRRASTCSPGP

SEQ ID NO: 4154 - DNA, 2580 bp, Homo sapien
ggtatggcccggccggagttaaggccggggggaggcggcgagtcccgcggcggcggcgacgatggggctgcgtgcaggaggaacgctgggcagggccggcgcgggtcggggggcgcccgaggggcccgggccgagcggcggcgcgcagggcggcagcatccactcgggccgcatcgccgcggtgcacaacgtgccgctgagcgtgctcatccggccgctgccgtccgtgttggaccccgccaaggtgcagagcctcgtggacacgatccgggaggacccagacagcgtgccccccatcgatgtcctctggatcaaaggggcccagggaggtgactacttctactcctttgggggctgccaccgctacgcggcctaccagcaactgcagcgagagaccatccccgccaagcttgtccagtccactctctcagacctaagggtgtacctgggagcatccacaccagacttgcagtagcagcctccttggcacctgctgccaccttcaagagcccagaagacacacctggcctccagcaggctgggccatgcagaagggatagcaggggtgcattctctttgcacctggcgagagggtctgactctgggcacccctctcaccagctacaaggccttggactcactgtacagtgtgggagccccagttcccacctctgtgacaataggatcatggccttacccttgaagcattaccgagaaggagaacagagatgggcttgaagagccacgtgctgccggctccaaattcccaaggacaaggatccctctgcatttttgtctatgtaacctcttatatggactacattcagctgcaaggaaaggaaaaccttgattgcagtggtttaaacaaacagaagattgtttttccacatagcatggattctggagatgggtggctaatggtattggttcaacaactccacgaaggtaggggtcacgtcttggatccttttgccttaatctcagtgctcgttacttcatggtcccaagatggctgctgtatccccaagaatcatgtctgcgttcaaggaaggaggggtggaggaagaggaagggccaaactagctggacccgtcaccttctatcagaaagtaaaacctcgtcagaagtctgtttcctgctctctccctctgcatatcttcacttagatgcccttggcccgagccagctaccattgcacctctagctgcaaacaaagctaagacagcagggaacagaattgtcatggctgaatagaccaatcgtgttccatctactgagactggcacactgcctcctgcaataaaactgggatcccattaccaagagagaaatgcagaattgtgtaccagttagcttttgctgtgtaacaaaccatccccaaacttggcagctagaaacaaaccctgtattttcccacaatcctatgggttggcaatttgggctgggctcaacagggcagttctgctgctcacacctgggatccctcatggagctaaggtcagctgttacctcagctgggcctggatggtctaggatagccttactcacttgcctggcaggtgacaggctgttggctggaattgcttggttctcctccatgtggcctctccagcaggctagctcaggcttattcacatgatggcttcaggattccaaagagagtgagagtagaagctgaaagacttcttgagttcttggcctggaactgggactaggacagtgtcacttctgctaagttcttttggtcagagcaaatcacaaggctttacccagattcaagggatgagaaacagactacatgtcttgatgaggggaaccacaaagagcttgtggccatttttcacctatcacaaataattttggatgggtatttatttggataaaggtatttccctcttccccctttctctctgtctcatggggcctcactctgccaagttggaaggcactaagacattgtcctggccctcagggtctaggggaagaggtgttggggcaggaagtgagtctctccatgggctggacccactgtagtaggagtgcctccttgtctgcactgctggtatggggttaggccaggtaggacattccagaggggcttctgaaaaccaagagtccctggggaaagggaacagagtaaggcaggccttgttctcactgccctctaagggaacttggtcactcggcacttttaagcctcagtttctccagttcaataataaggacaagagcttttcccatgcattctctttccccgggaaagttgactgaggtgaccagtaatagaattgaaaagggagagtgtcttcagtgcaatgtggcatcctggattgggtcttggaacaaaaacaggacattagtgggaaaattggaaatctgaaaaaagtctgaattttagttaatataccaatttcagtctcttggttttgacagatgtaccatggtgatgtaagatgttgaccttggggtaggctgggtgaagggtatacaggaactctttgtactatctctgcaacttctctgtaaatctagtatcattccaaaataaaagtttatttaatttaaaaaaaaaaaaaaaaa

SEQ ID NO: 4155 - protein, 137 aa, Homo sapien
MGLRAGGTLGRAGAGRGAPEGPGPSGGAQGGSIHSGRIAAVHNVPLSVLIRPLPSVLDPAKVQSLVDTIREDPDSVPPIDVLWIKGAQGGDYFYSFGGCHRYAAYQQLQRETIPAKLVQSTLSDLRVYLGASTPDLQ

SEQ ID NO: 4156 - DNA, 5306 bp, Homo sapien
  Unsure 2899-2999: Unknown base
gttaaaaaccaaggacctgatatcttataattcagtttaagcctaatacagttcatgtaaactccttttttggcaatttaacatatacatggatcaagtttagtaggtttagaggaaaatgaatgtcttgttctgaaaaaatagcagtaccagctgagctttggggaggtgacagattgagtcacttcacagcttaattctgttatgaactggtcccatgggcatggattgtcaattagggagacttgaatcttttagatattaaatctacaggcagacaacaaagaacacattattcttttgtaaaaatagaggaacctggctgtctactacagaactagaggaacctagcttagacagaagctcatcccacttcagcacctacaacagatttgatacctttgagcaagattggatacttttctcaaagtaaatactgggttggtaccccagagttatgcaccactgaacatggattttaacttaaaatacttaagggcagatttttactgttagttttcttgactaacagagcaacccagtgcagttcctaaagacttctgattttgtgtagcaccagctcctgttgcattttctgaatgaattagtattaaaaatggagccccaagaagctggttaaatttttagccttctgcatttaagctgtagcccaggctgtgagctagtatcgcatcttattcattatccaacatagaaccaggtttacaacaggcactcaaaatgtttgtgggatgaatgaatgagaaactgccaattctggggatttctgtttcagaagagttgatgctaagctgttctttctaacaatggttcccaggttcagctgtttcagtccacaccttgttcacagtaagatattcaattcaattcagcaaacatttgttgtgtgcttgctgctctgtgcctgaccagaagaaatgaagccaagatacaaataatagaaccctgtcatgagcacagaaagacctggtgagtttctattgattgtggtaaaccagcctgcatccagttccaagtaacagctgcccacttagtgaatactctctcatgtttcaacactcagttctagtgtagcctcttctataaagcctttcttttccagatgcagctcaaaaagctgtgtctgccctgaaggccagtggggttcaagctcaaatggcaaagcaacaggaacaagatcctaccaacctctacatttctaatttgccactctccatggatgagcaagaactagaaaatatgctcaaaccatttggacaagttatttctacaaggatactacgtgattccagtggtacaagtcgtggtgttggctttgctaggatggaatcaacagaaaaatgtgaagctgttattggtcattttaatggaaaatttattaagacaccaccaggagtttctgcccccacagaacctttattgtgtaagtttgctgatggaggacagaaaaagagacagaacccaaacaaatacatccctaatggaagaccatggcatagagaaggagaggtgagacttgctggaatgacacttacttacgacccaactacagctgctatacagaacggattttatccttcaccatacagtattgctacaaaccgaatgatcactcaaacttctattacaccctatattgcatctcctgtatctgcctaccaggtgcaaagtccttcgtggatgcaacctcaaccatatattctacagcaccctggtgccgtgttaactccctcaatggagcacaccatgtcactacagcccgcatcaatgatcagccctctggcccagcagatgagtcatctgtcactaggcagcaccggaacatacatgcctgcaacgtcagctatgcaaggagcctacttgccacagtatgcacatatgcagacgacagcggttcctgttgaggaggcaagtggtcaacagcaggtggctgtcgagacgtctaatgaccattctccatatacctttcaacctaataagtaactgtgagatgtacagaaaggtgttcttacatgaagaagggtgtgaagctgttattggtcattttaatggaaaatttattaagacaccaccaggagtttctgcccccacagaacctttattgtgtaagtttgctgatggaggacagaaaaagagacagaacccaaacaaatacatccctaatggaagaccatggcatagagaaggagaggctggaatgacacttacttacgacccaactacagctgctatacagaacggattttatccttcaccatacagtattgctacaaaccgaatgatcactcaaacttctattacaccctatattgcatctcctgtatctgcctaccaggtgcaaagtccttcgtggatgcaacctcaaccatatattctacagcaccctggtgccgtgttaactccctcaatggagcacaccatgtcactacagcccgcatcaatgatcagccctctggcccagcagatgagtcatctgtcactaggcagcaccggaacatacatgcctgcaacgtcagctatgcaaggagcctacttgccacagtatgcacatatgcagacgacagcggttcctgttgaggaggcaagtggtcaacagcaggtggctgtcgagacgtctaatgaccattctccatatacctttcaacctaataagtaactgtgagatgtacagaaaggtgttcttacatgaagaagggtgtgaaggctgaacaatcatggatttttctgatcaattgtgctttaggaaattattgacagttttgcacaggttcttgaaaacgttatttataatgaaatcaactaaaactatttttgctataagttctataaggtgcataaaacccttaaattcatctagtagctgttcccccgaacaggnnnnnnnnnnnnnnnnnnnnnnnnnnnnnnnnnnnnnnnnnnnnnnnnnnnnnnnnnnnnnnnnnnnnnnnnnnnnnnnnnnnnnnnnnnnnnnnnnnnnncttcaattttctgggtatgcacaaagaccatgaagacttatccaagtgcatgaccggatttttgtggttttgttcattttgtgtttaatttgtgtttttttttttccagctgtatgaaatgggctttctgaagtttaaatagtccgacttcacccatggtgttctgtgcttgcagtgcgagtgttgctgtaattcagtgttgccgtcagtgtctcttttcttagctttctgtctttctttcaacgtagtgtgaagtgtcttatccttttctatgaattccaatttgccttaactcttttgatgctgtagctgtttcagtaaaagttagttcaaactaatgatgtagaatgctttgaccaaatgagctggtctattatgccttgtaaaacagcagcatagggcttttaaaaggtagtcaataaaagttgctgaaattttggcttttttaaatatgtagtaggtgtttttaatgatttttcacataatgtgtaaggtagtgaaatgcaagaagggaaaaatgttttgtgtgaaacacattttctgactggggaacttttattagggtaaattgtttgtaaggctgtacgccaacagtttcctctgatagtttgactgatttaggatatctgctgtatgatgcaatgtaaagtcttttttgccttttttcaggaaaaaaaaaaaagctaacttgatgtactagatttagtgtaggtagtgttggggttggggatgggggtgggggaggggagtcactgaatgttttgtccttcctttatactaatgatagtgctttagaatgagaattatgcctgaaatctggcaaaccgaaaaatgttgctattgcaacaaagtggcaaaagctaaaagtaaggatttatcttcaaacataagctgagataacgaatagaagcaaaacgattggctactagctctctctctctctctctattaggtaaatttgaaaaataaaaatgacttggcacttttaaaggtaacttcaccaaagaccgaagagccagtaaccagtagctccaacttgtctcagcatcacatcttctgtgctctttatttttgccggaccagtttgcggttaggagaatgtgccttttttgtacctttgcatttaggttttataattttaattgatgtatggacacacacaaacaaaaaagcatgaaggaagatttggatccaagcagtgccacactttacatcatcactacaagtgttcaagtgtaaagaaaaccaattttgaaactatgaaattcctgattcataaatacacagttatttctactttagtacatataagataattcactgttattaaagctcttttattaaggcaattgcatatgttttaaaagcaatggtaaattaagttgtcttccaaaactgtgtacttgtctggtcagctgtgtatgatcagttatctacctcagagtctattttcttttgtgctgggacaggttgctggccctccctgtttccacagaccaaatcctcctagctcaggagctagggctaagcagttatttctttcaagtattttttagttcttaaattttatgcttgtatttgatgatagatgtcagtgacatttcatagtttcaaaagtccttgctgctctgagaagtgtagattctagtgaaaattacatagtcataagagaaatgtgtttttgtttttgtttttgtttcatttttttaaagttgtggtattattggttctatgctccctggaatattactgctttgtgaaagtccagactgaacgcagcaccctctgtgtacctagtacagttataaacctgggtctctcactacttgatatttttgcattagttaagacagaaatttgatagctcggttagaggggaggggaaatctgctgctagaaatgtctgaactaagtgccatactcgtctgggtaagatttgggaaacataacctctgtacataaaaaaaaaaaaatcagttaaacatcacatagtagacagccattaaattataaaaaaattaatttatgaagaaagaccttttgtacagattgaaaaaaaaagattttcatagagatatctatatgatcaagagagttaattttttatttttgttttactagtgccacagacttgccagtggtaacttatttgtccggttcaagataactctgtagttttctttcctaggacttgttgttaaacgccaaaagacatttttgaactgtacatttgatcagattgttagcttttctgttttatttcttttgagaacctttgaataaaaaacatctgaaattttaaaaaaa

SEQ ID NO: 4157 - protein, 499 aa, Homo sapien
  Unsure 2899-2999: Unknown amino acid
MAKQQEQDPTNLYISNLPLSMDEQELENMLKPFGQVISTRILRDSSGTSRGVGFARMESTEKCEAVIGHFNGKFIKTPPGVSAPTEPLLCKFADGGQKKRQNPNKYIPNGRPWHREGEVRLAGMTLTYDPTTAAIQNGFYPSPYSIATNRMITQTSITPYIASPVSAYQVQSPSWMQPQPYILQHPGAVLTPSMEHTMSLQPASMISPLAQQMSHLSLGSTGTYMPATSAMQGAYLPQYAHMQTTAVPVEEASGQQQVAVETSNDHSPYTFQPNKNCEMYRKVFLHEEGCEAVIGHFNGKFIKTPPGVSAPTEPLLCKFADGGQKKRQNPNKYIPNGRPWHREGEAGMTLTYDPTTAAIQNGFYPSPYSIATNRMITQTSITPYIASPVSAYQVQSPSWMQPQPYILQHPGAVLTPSMEHTMSLQPASMISPLAQQMSHLSLGSTGTYMPATSAMQGAYLPQYAHMQTTAVPVEEASGQQQVAVETSNDHSPYTFQPNK

SEQ ID NO: 4158 - DNA, 4444 bp, Homo sapien
aggaatgaaaggtcataagccattagaaatagtggcattattatgcaataacaacaccctagctaacctgcttttgtcatctgtagcacttacaataaagaatgatgaccttccaaccctggacactacctcgataaagcaaaccagagatcctctctacactttctatggaagccataaaagttgccatcaatatatccactttcatagttctatacttttatactttctagacttttttatagactttatgatcagatctttttgtctcagaggataggttttgcaagattcaaaggaaaatcaaactccttggttgttccagctttgaagcttttgcttcagtaaatttgtttaaagaaccagatcacataccatttatcaaattctttacttaagtcagaatactttgcagacatacatatttggaaaacaaactgtttcttgttcactagatagaatctgtattgtagtaagaaactacttacaaggtggctttctttctgctttgttactctatgtattactcaataatatatgtatggtcacaggttcctggagttgttttatttctttatgacagacacatgagtatgcacctctctctaatcctctgatgtcactgcagcttcagtctctctcactctgtttttgagtgccttcaaaatgccagcatcctggaacattcttttcctgatctaaatcctacctctgactatttcattatccatgaatattggaattcacccatattccaatgggcttaactctacaaactagctaaaaccttggacaagaatttgaccgtatttctagttttgttcctccatgtcatttttaggttatatttttaacttttatttatatcttatttcttcacatatttcgtctctctgttgaaagattttatccttatttgactcttcactttttttactttcaccagaaatttgacgttcctttaaaattaaaggtcattgaatgtcttttgaacacctttttctcaactgaagtcttcctgaatgcctcccctttctgatgaaaggatcctgagtgctgctgttgctctgccctgttcccatgtgcccactcccttccgtacacattttgcaagactatactctttattttagtcaaattaatttaaaattgctccctgggtttctgctctctcatggccctgtccctcaaaaacttctgtttactttttctagctgttttcatctaatttgtttaaaatgtatgatggatccataatatatgaaggatgtaatgaaaaggaggttgcagtgttttatataatatgatcgagcacctccgtgatgaaacatttagcaattggctagtccttcacagccagagtggaagtttgtgctgtggacaggtctttttactcccttccagttctcctccaaaactggacgaaaaaggaaaaaaaaaaagaactctttcaaatgaggagatttgattgcatttttttaggtgaatgaaagcttggagttgagcatttgggccttagtcagcatttttcctttctgacttaaaatctcatgtccttttccttaaagttaatagtactcaggtttttaagactaataaccacacaaggtgggtatctaagaaggcagctgttaatacattctccatctttcctgtctggcaacaggaaagatattattggtgagatagtgcaaaattgtgagaattggttatgttcgatgatgaataaattcaagatttttgaaggcttcactgctatttgggatgggaaggtgagtttacaaaatgaaaaaggtagatttttatgttacagaaatcagtaacgggtttcttgttgtgttaattacctttcacttgatttgccatgatgtttcttcctcattattgatctagaagtttgcctcttggatagtaactagcaacttagtatctactttaaaatttgtggcttttctcttcagggtcccaggccataaaacaacggagagctgtacttgcttgtcacttggaggaaccacatccttgagacagcctgctgtcttgtatgtcttcagtaggaaacttctgacacacacattcaagggagttcctgcccctgagaagtgttcccatagctttccagtcgcaggttactttcacactacgtcagcttctctggtgagatcagggatgttacatattacttgaaaatgatttcataggaagtgaggatggggcaagaaaggaggtagaagctgaattttgcttaacttcagaaggaaatctgatacttgccttggctagttctgatcaactaaagagcctgtgtctgtactggatgtgccaaagagtcaagttgtttctggaatatccagctcctctgaatgaacacagcttcctccctacctgtcttttatgggtgaaaagggaccgtctgatgagcatgatagacatcctgtacaggactcaagactgtttcattgcatttgaaagttggtgggaagtattttattctgctagagctcctaaccctcctagaaatatcttttcatgctctattaattcaattcattagtttaaaaagaaacagtgtgacataattttggtgtttacttcttaagttgtctccccaagggcatatatgtagcctctgaaaatgggatgatttcttctcaatcttccataaatttgaatatgcattttattcatttcttgacatgggctgtgtgactgttttccatcagcagttctggctttgtccacaagggagcaataaagtacgttagctttattctcaaccttctaaagaaagatcccacttttaaatctcttctggaatagcctcttagctcaaagcttattcatgtattttgattatttaagaaattttcccttattacaaagtccagtcgtcgttcatccctcatgatgccaagcaatgattgatgtgtgggtgtggagtccttgtgggtcaggcatcttaattaattagactttttacatattgatgatccccagattgaaagccaggaccttcccataggggcgcctttgtgtgctaaaggcagagcaggcaggcttctccactcctatctcctccgcaggccaccaccatcacatctataggaggaacaagagcactgggggaactctggagtatgagtaaggaaatgcttctcaccttctctgctccaaagagatatctgttacatcagggaacaagtcctctaggtcaggcacttcctcctgaccagtgcaacgggcactccaggttagaaactgtgtgtgctccctctctgtcagttacttgtctaagggctcctatccgtggtcatcagctctctggccatgagttctgtttgtgcttattgcagcagcatcttcacaacaaacaggtcagtaatcaacctgggaagggaaaagacgacagtaaatattaccccctgtagagccgggaggcatttacacctggaatggccttcttaactgatttctgcctggccacctcacccccagccaagtctgaacctgagcaataccaggcacagagaggtgtctacttgtaactccaacacttgacaaaaaacaaaactgaagctgtgattggtttaggcagcaagtggccaggtgcaacttgtttgtttttatttttgttttccccaacagtactgagatcacttgcacttttcctcatttcttaagaaaatccagtttgcttgccatgacttgtttagcgttaggtttacaaagcttgttgttgaatgttgaatatttgtccaaaggagtttgacaaaatagaagctgcttggtccctgttctgcctgctaggtcataaggatgaaggccatgtggctggggtacttatgtcaagtccagaatggggcagtgtccctctcctacctctctgcggagacgcaattgaaggtcaagtagactcagtgtagggcaggcagctgtcatgctgcaaagaagtttagaggagtctttgggttggggaggtgacaggtaggtaggacaggatctcttaagatgggaaagatactggggagaggagggctgcttggccccagggaactgcagtgaggtggaactgagctccgctcctgaatctccaaaggagcccatgctgcccggcttccctgagtcattttttccagcatcctgtcagatccctcaatgtactgatttcccccttgtgttaactataccgatattatttttttagcaattgaaatgcacttttttatttcaactcaatcatgattttaagtataaaaaatttatagattgttaaaactacttttttgtgtatttttaaccactcaatgtagcattgtatattttattcttgtgagactctggtacaggtgtgccgcctaatgatttttctgagatgctgggcctttggatgtgtacggtaaccaacttaatgctaatgttcaaagtacaaaacaaaaaaaagggg

SEQ ID NO: 4159 - DNA, 5423 bp, Homo sapien
  Unsure 66, 418, 578, 5390, 5401, 5404, 5407, 5409, 5415: Unknown base
taatattgttgctgatattttgcataatggctgcaattatttaatgtttaattgggtttgatcaantgagattcagcaattcacaagtgcattaatataaccagaactggtggcacttaaaatgataatgattaacttatattgcatgttctcttcctttcacttttttcagtttctacatttcagaccgagcttgtcagcttttttgaaaacacatcagtagaaaccaagattttaaaatgaagtgtcaagacaaaggcaaaacctgagcagttcctaaaaagatttgctgttagaaattttctttgtggcagtcatttattaaggattcaactcgtgatacaccaaaagaagagttgacttcagagatgtgttccatgctctctagcacaggaatgaataaatttataacacctgntttagcctttgttttcaaaagcacaaaggaaaagtgaaagggaaagagaaacaagtgactgagaagtcttgttaaggaatcaggttttttctacctggtaaacattctctattcttttctcaaaagattgctgtaagaaaaaatgtaagacaaaaaaaanaaaaaaaacaaacaggggcagaggcaggcagtagcaagaaagcagagcgtaacatcagctagatggtaacatgcaatgtcagctctcttgaagacatgggaaacctaagttacaccttgggttaaaattcttcaccgtattagttttgttgcttcataaaatttacctaagcaagtggtcttgcttgcctcaaatccaagcagtcttgaacacttggaggcaattaatgagtatatcttagtcaaaagaattgttggagctttttattaaagctgcagtttcagttctgcttttggggaattgtgctatgaaagcagctgccaaaataagctcatttattttcttcaatcccactcagtgctcagtcactatattctgtttccttttttttttttcaagttgcatatttggtttccccttatgattgggaaagatgaattttcagcagaaaacagtgtttgttcactttcaaagagtgatagtttctaaaacatttagagcaataaatattcatcagaggtaccaagtaagccagcagaagagttaagggttagagaaatcccttatttcatgtcttgactctaaaatgatcaaagtacttttccttgtaatgtggatttcttcttatgcggatatgcaaaaacttcagttatacgtagtaatgctagcaggtaattttagtggacattttataacaactgtcactttgttttgccacatgtagagtttgttcagctattttccagatatctccccacaaaaggaggcaaagggtaccagcttttcaatgagcattacctattacttggcaaagatgatgaagactctattaatagttcatttgataaatgttgacataaccaacaatagagattaggaagttagttttaagaaatcaatagcatatagacattaccctcatggagtttgtattctactacttgaactgattgtagctataaaagcatagttagatagctgaatagttagatcataagcaaagaaggccagaacacatctcttatcaagaaatcaatgaatagtttatctcatttttaaagcaactttatccttctttaattccttcctttcttctagtgcaaaactacttaataaggttggtgtttaggttagtgttcacaccattcctcatctggtgtgaattaccttctctttctttactatttactaccaacctagtacatgtgttgactgaattcttttcaaacaatgttgagttatcatggtgcacctaataaattaacaccacagattacagcatccttgctgattttctcagcaaagccagattagatggaaataaacaaagaaaatgatcctagagtgaatttttctagaaaatatctattatgaaccatgctgtttaaagtattagcttgaaggtgatggatccagctattcagaaaataactttcatataaccatgattttgcacagtatgaggtcttaaatgtgtggaaagagataaattttttatcattaccacaaaccccttttaaagattcaaaggtggaagaaagtgatttattttttctcttcagcatacatatataaaagacttgtcagatgtttaatttggggaggttgataatgaaacatatcaacagagtatagtagttatagtagtgtttgtgggtaaataatttcctggggtcagacatatataaacatatttgcttcaaaatgataaaggcatgaaatcagtcttaaaaattgaaatgggggtgatgggggagaaaaagaagaacaaatttgaagtgccctttcaaatctgctggatacaagtattgaagttttaagtcatcttattctgtctgaaagtgtatttttcattctacaatagacccaatcaacaagacgtataacttgagttgcatgatgttcagtttatgtaatctactgttgggatggtaagaattgatgtaggctgtggtgtaagaatgaattaaaatatagtttcactggcttttctctacatatccactatcacaatggctaggtttcctgttgctcactgttggattctggagaaaaatttaatgaaagatgatatcagaggaagaataagtggaggtagagaagaaaggagtgatagaggaggggaaaaaaacaaaacatatttttgtgttatccaaaggagctttttccttattctgtcaagcattgagatcttcttcagctttcaatgtagttgctaaatacaaataatgctactaggtagtgactaaatatagcaaacacttcatcagatattagaattaggtcacactattgaggttataatctgaaggttgtgttacatagaaaccactttagattattatcaacttggactaggctttattttataatagcatagtaagtaatatctattgtgtcatttcttcaaccattttattctaagatccatgaagcttcttgaggccaaataaaataataagtttagacaagaagtagattgtgactttttttcccttagagatactatttactatctcctatcctgataggtggaaggtttactgaattggaaattggttgactattagtttttaactaaaatgtgcaataacacattgcagtttcctcaaactagtttcctatgatcattaaactcattctcagggttaagaaaggaatgtaaatttctgcctcaatttgtacttcatcaataagtttttgaagagtgcagatttttagtcaggtcttaaaaataaactcacaaatctggatgcatttctaaattctgcaaatgtttcctggggtgacttaacaaggaataatcccacaatatacctagctacctaatacatggagctggggctcaacccactgtttttaaggatttgcgcttacttgtggctgaggaaaaataagtagttcgaggaagtagtttttaaatgtgagcttatagatagaaacagaatatcaacttaattatgaaattgttagaacctgttctcttgtatctgaatctgattgcaattactattgtactgatagactccagccattgcaagtctcagatatcttagctgtgtagtgattcttgaaattctttttaagaaaaattgagtagaaagaaataaaccctttgtaaatgaggcttggcttttgtgaaagatcatccgcaggctatgttaaaaggattttagctcactaaaagtgtaataatggaaatgtggaaaatatcgtaggtaaaggaaactacctcatgctctgaaggttttgtagaagcacaattaaacatctaaaatggctttgttacaccagagccatctggtgtgaagaactctatatttgtatgttgagagggcatggaataattgtattttgctggcaatagacacattctttattatttgcagattcctcatcaaatctgtaattatgcacagtttctgttatcaataaaacaaaagaatcctgtttgtgtggtttcatgaaatcagcattgttgaatgcatgaagtaataatgctcaaattaacatttttatgatgtgtcaaggtttctggtcaagggaagtaaatgtaggatagtatttttacaccaaaatgacacagagagaattgagcacaccagaaagaccagaaaccacaccactggatagagattcaatatgttgtctttttcaaacatttggacaagaaaaaaatgggcatttaaaaattcttccttcccctggttatggatttatctgtagtaaaacttagctttgtcgtttgagatttgcacagaatggggggagtagattacctcttcccattcattgtcataatggatctacatcactgataaacaccatacttctatatgtggttaactagctttagaataaaagacactttaaaaagtaaaaggcctagagatcttcaatgaagtgtcccttttagccaaaccaggccttgcagaaattgtcctcaaaagcaccaagggagaacaaagccaagtgcagaattacccaagggtcacacattttgtattcattttcttataatttgcccaaatgatttgaagtacagcaaaacctgaagttttgcaaagagttactgtaaactgaacttaaaaatgtcagagtgctcggtgacccacttctccagaccctgtcaacctgtgaaaatattggcctttattcagatctctcaagaagttacgtgcagagtttggaaggtctaggcaaaggttattagtcaagtgttcttacagtgtcaacgctcaactcccacaagcgtgagaaggagagacctgtcattcctgagggtgatgacatacatttactggagcttatataatttatcagataagacagcagtctccttcagggtagaaagtgtgttttctacattgatttagtacaaaacaaaaagaaaaggggatatttcaaattttataattatttttctgctaagctgattcagtgtgatttaagcatatttttcaaatcatgaatctgattccatatacatatgtgccttatattgtgataatttatttttaagtgaaatatgctatcatagcctgactttatgtatagtggcgacaacttgcaggatcgcatttctgtaaccaaacggccgacagctgaggtgtagatgcttcctatggtctgtagaataatcactgggcttgttctctagctatgtctgtatgcaatcgcgacagtgttgatcaaaacccatgatcattctctccaaaggtctttgtcactaagccactagggattctgaaaagttcgtgagctgaaacaaataaattgagttggaagattcatgttgaaaaaaaaagaaanaaaaaaaaaanggncgncnccgagnaagtagcc

SEQ ID NO: 4160 - protein, 16 aa, Homo sapien
  unsure 7, 11-13, 15: unknown amino acid
  Unsure 66, 418, 578, 5390, 5401, 5404, 5407, 5409, 5415: Unknown amino acid
MLKKKEXKKKXXXPXK

SEQ ID NO: 4161 - DNA, 3910 bp, Homo sapien
gctttctgccttctaaagtgcaacagtatatatcttgtagaactgtgggaggagagaagataatttttctaccttactccatattcttacttcaaactattttgaatagaggttcactgagccattgctgatagactgtgcatagctactagctgtcacactattgtaggttttttggagagattcatagggaagtgaatgtaaccaggaataaaggctctcactttagctctgggactatgcagtggatcttgggaacaaaataagatatctaatctattttccccattctggctagattttggttgttgtgatgctcctacttcctgtataggtttttgggatcatggtgcaggctagtaataggattcagaattgcttcccttttatatcgaccatgtaagggattctaaaggagggtaaatctcaaagtgctctgaaatcatccctctaaaatctgtcctgtggtgtgctaagatgtctgttgcctttttatgttaagctaaggaacttgaatgccttacctaataactcaactagtagtaagctcattttgtaaatatgaaaatggctgtaagaagtggcattcatgtatattcaatgttagtcaatagaccatagtggcctggatgctttaacaagccaaattccgcaattttttttccttttttccccttcatacttgtatgatctcacctgaccagtgatttcttttcctcctaaccccatgctaccaccattttctggaaatcaaagagatgtggtagtaaatcatacagtacacacgatcatctgagatcaatatgagcacaaaactcatcaagtaggtctgcctggaatgtatataaaaaatgtaaataaaaatttgtaaattagtgtgaactgtatcttgcatatgagactgtgtattgttttgcattctcttcccttttgtagaaatttttctgtaaggaaatgattcagcttgttggttttagagtaaaaatagccaacagttgtggctacacagtgagatcacaggaactggaaatagggtttgtcggctttggttaatgtcagtactcatttatttagcctctcagtgcttaataagacttttctttattttttagttagccgttaggttttgtgaggttagattcctggaagcagtgaatttatacactgttatattaatagagctccgttctttgagtcatgattccaagctaaaggaaattaaaaatgtaatttaataatttcctatttttagggttgttaatttttttctacaaaaaaaccttgaaattttagatatcccaatgtgaatctaatttccatatatacagaaattagacaaataataagtctttagttcaacttaagcatatctcaaatgacttctctaaatttaaagttgatcatgataggatcataaaagacagaaaagacttaagtaatcttgtaatgacaattatttccatttttgctgaactaaaaatatttaacttcataaatatgttactacagcttccagatttaaagaaaaaaagtttcccccactctcaattaaaagttagaaccctccacttttaaaattatacaaatatttcttttttacattacacagaagccttctgtaccattttacgaatttctgtcttcataatataagtgaaaatactgtcatttcaattttctgctttaaattgtttttaataagcattccaaagtgatacagacttaagcttttaatcaatcagtcattcagttgatagacaaagttagcgatgctttatgctaggaaacttgttgacagtaacctgtgcgactttatgcagaagacaaatgctagtaattattatgcacagaggaaaaatcattttaagtatgtggtaaagcagcttcatctttcaaaattgatttgctctggtttttctttagtccattagattccagaatgtccttttactgggaatttagttatgtattaagataacctgttttcagttctttttgaaaagaagacattatttatattgaaccaccttattttaaaatttttaacttttatataccacttgtgtgattccagtgtcatgtcttgggtttgatgtcgttggacagaaaagtgtatcaattattttaaatgaatttttccccatgtttgaggcttagtctgtaaatgtgttgctgtaacagaaaatacttgggtatgcattacttgaatacttgaaaactgaaattaataagatgtattacataatgaattagatttctctgaacagtttttacactgaaaatcttcatttctggattgcagtttgaaatggaatgaagacctgaattatttgggtagaaaaaattatgatagtgcttataagaactgtaaactgttttaaactattttgtgtttgacgcatcaaacttcaagttttttgtaagtttctctcctgaaattttctttctcttctatactttatgcacttactatactactgatgtaataaaagagcagggttaaaaatattgtatctgtattcattgtgaatcctgtagcttttctagttaacaaaaaatcgctttctaaaatactcttaatcccattgttttggttaacatcttacccatttgttgtatttcaaatgccattaatcattttagtacaacacctatgtttataaaaatttgaaaacattacatattgtatttaaaactaattagtgaagagtaagaaaaaaactagccaacagaattgtaggtgatgcattagttaaatttcaaaactcataataaaggaactttcagagattggttgaaacccagtggtatccctgtaaattagctcctgtgactggaaaagaccccaaaaaggcagtagaggagattagtgtttacttgctgtggttgtggtgtgctgctacttaattataggtagtgacacactgaaattcttatttgtccaataatctgaagtagtttcctatatttatctgtactaaattgactataaattgagtctgcaaagaggaaactttttgactgtactgtatttaggagcctttgtacagcttggtcaaatttccatgatatgaagtatttgagttttaaaatatactgttattaaaaggaaaaagacatggccattattccatgtgcttaaatgataatttccttattcagtttcagaagaaaaagaatgaaattgggtaactgtcattgcgttagctttatgttgaattgggaaattgtggcataaagcttaaattcgtgtttatcaaatgtgaaccatagtagtataatgctgctttgtatataatgtaagtgctacaaatagtctcagcactgaaaatgtattgatacctcttaaatgaatgcaacttttgatgtaggtgttttgctatgcctcagaaaatatctgtctgagaatttgttaatctgtttgataatgaagatacttcctgttttcttgtttcatattttcatgttcaaaatttaagttttacatttttactactgttaatttaaataaaatttgttctgtggataaaatgaggttggcagtgaagaaaattaaaaacagcctcattcatgtaactggttaagtaaaaatacattttcactatgtgttcataaacttttaatgaagctgtttgtctttcagttcaaatataagtgatgtttaggctttatttctgttaataaggctttttaccattgattaaatgaaggaatgtatctttttgaagagatttatattctgtaaataaaaattcgttgtaacaataaagttgagttctaactacagtgtattcataaattttattgttacttcaacttatttttgaggttttccttgtgaatatctgcaaacacaagactttccaaagttagtgtataaatgtatatgtggagtgattctttgaattct

SEQ ID NO: 4162 - protein, 42 aa, Homo sapien
FLPSKVQQYISCRTVGGEKIIFLPYSIFLLQTILNRGSLSHC

SEQ ID NO: 4163 - DNA, 2616 bp, Homo sapien
gaccgcgtgccgggtgtcatggcggcctgcaggtactgctgctcgtgcctccggctccggcccctgagcgatggtcctttccttctgccacggcgggatcgggcactcacccagttgcaagtgcgagcactatggagtagcgcagggtctcgagctgtggccgtggacttaggcaacaggaaattagaaatatcttctggaaagctggccagatttgcagatggctctgctgtagtacagtcaggtgacactgcagtaatggtcacagcggtcagtaaaacaaaaccttccccttcccagtttatgcctttggtggttgactacagacaaaaagctgctgcagcaggtagaattcccacaaactatctgagaagagaggttggtacttctgataaagaaattctaacaagtcgaataatagatcgttcaattagaccgctctttccagctggctacttctatgatacacaggttctgtgtaatctgttagcagtagatggtgtaaatgagcctgatgtcctagcaattaatggcgcttccgtagccctctcattatcagatattccttggaatggacctgttggggcagtacgaataggaataattgatggagaatatgttgttaacccaacaagaaaagaaatgtcttctagtactttaaatttagtggttgctggagcacctaaaagtcagattgtcatgttggaagcctctgcagagaacattttacagcaggacttttgccatgctatcaaagtgggagtgaaatatacccaacaaataattcagggcattcagcagttggtaaaagaaactggtgttaccaagaggacacctcagaagttatttaccccttcgccagagattgtgaaatatactcataaacttgctatggagagactctatgcagtttttacagattacgagcatgacaaagtttccagagatgaagctgttaacaaaataagattagatacggaggaacaactaaaagaaaaatttccagaagccgatccatatgaaataatagaatccttcaatgttgttgcaaaggaagtttttagaagtattgttttgaatgaatacaaaaggtgcgatggtcgggatttgacttcacttaggaatgtaagttgtgaggtagatatgtttaaaacccttcatggatcagcattatttcaaagaggacaaacacaggtgctttgtaccgttacatttgattcattagaatctggtattaagtcagatcaagttataacagctataaatgggataaaagataaaaatttcatgctgcactacgagtttcctccttatgcaactaatgaaattggcaaagtcactggtttaaatagaagagaacttgggcatggtgctcttgctgagaaagctttgtatcctgttattccccgagattttcctttcaccataagagttacatctgaagtcctagagtcaaatgggtcatcttctatggcatctgcatgtggcggaagtttagcattaatggattcaggggttccaatttcatctgctgttgcaggcgtagcaataggattggtcaccaaaaccgatcctgagaagggtgaaatagaagattatcgtttgctgacagatattttgggaattgaagattacaatggtgacatggacttcaaaatagctggcactaataaaggaataactgcattacaggctgatattaaattacctggaataccaataaaaattgtgatggaggctattcaacaagcttcagtggcaaaaaaggagatattacagatcatgaacaaaactatttcaaaacctcgagcatctagaaaagaaaatggacctgttgtagaaactgttcaggttccattatcaaaacgagcaaaatttgttggacctggtggctataacttaaaaaaacttcaggctgaaacaggtgtaactattagtcaggtggatgaagaaacgttttctgtatttgcaccaacacccagtgctatgcatgaggcaagagacttcattactgaaatctgcaaggatgatcaggagcagcaattagaatttggagcagtatataccgccacaataactgaaatcagagatactggtgtaatggtaaaattatatccaaatatgactgcggtactgcttcataacacacaacttgatcaacgaaagattaaacatcctactgccctaggattagaagttggccaagaaattcaggtgaaatactttggacgtgacccagccgatggaagaatgaggctttctcgaaaagtgcttcagtcgccagctacaaccgtggtcagaactttgaatgacagaagtagtattgtaatgggagaacctatttcacagtcatcatctaattctcagtgatttttttttttaaagagaattctagaattctattttgtctagggtgatgtgctgtagagcaacattttagtagtatcttccattgtgtagatttctatataatataaatacattttaattatttgtactaaaatgctcatttacatgtgccatttttttaattcgagtaacccatatttgtttaattgtatttacattataaatcaagaaatatttattattaaaagtaagtcatttatacatctt

SEQ ID NO: 4164 - protein, 783 aa, Homo sapien
MAACRYCCSCLRLRPLSDGPFLLPRRDRALTQLQVRALWSSAGSRAVAVDLGNRKLEISSGKLARFADGSAVVQSGDTAVMVTAVSKTKPSPSQFMPLVVDYRQKAAAAGRIPTNYLRREVGTSDKEILTSRIIDRSIRPLFPAGYFYDTQVLCNLLAVDGVNEPDVLAINGASVALSLSDIPWNGPVGAVRIGIIDGEYVVNPTRKEMSSSTLNLVVAGAPKSQIVMLEASAENILQQDFCHAIKVGVKYTQQIIQGIQQLVKETGVTKRTPQKLFTPSPEIVKYTHKLAMERLYAVFTDYEHDKVSRDEAVNKIRLDTEEQLKEKFPEADPYEIIESFNVVAKEVFRSIVLNEYKRCDGRDLTSLRNVSCEVDMFKTLHGSALFQRGQTQVLCTVTFDSLESGIKSDQVITAINGIKDKNFMLHYEFPPYATNEIGKVTGLNRRELGHGALAEKALYPVIPRDFPFTIRVTSEVLESNGSSSMASACGGSLALMDSGVPISSAVAGVAIGLVTKTDPEKGEIEDYRLLTDILGIEDYNGDMDFKIAGTNKGITALQADIKLPGIPIKIVMEAIQQASVAKKEILQIMNKTISKPRASRKENGPVVETVQVPLSKRAKFVGPGGYNLKKLQAETGVTISQVDEETFSVFAPTPSAMHEARDFITEICKDDQEQQLEFGAVYTATITEIRDTGVMVKLYPNMTAVLLHNTQLDQRKIKHPTALGLEVGQEIQVKYFGRDPADGRMRLSRKVLQSPATTVVRTLNDRSSIVMGEPISQSSSNSQ

SEQ ID NO: 4165 - DNA, 1097 bp, Homo sapien
ggcacgaggccgaagcttccggtggccggcttagttaggagctatggctaaacatcatcctgatttgatcttttgccgcaagcaggctggtgttgccatcggaagactgtgtgaaaaatgtgatggcaagtgtgtgatttgtgactcctatgtgcgtccctgcactctggtgcgcatatgtgatgagtgtaactatggatcttaccaggggcgctgtgtgatctgtggaggacctggggtctctgatgcctattattgtaaggagtgcaccatccaggagaaggacagagatggctgcccaaagattgtcaatctggggagctctaagacagacctcttctatgaacgcaaaaaatacggcttcaagaagaggtgattggtgggtggccccttcctccccccaacatcagtctgctgcagctgccagaaaacatgcctactactaccagcagaaagggagcagagcccagagcatcaccaggagtgcctgctagtgtactggcagcttgccaccccctcctctcccttcacccagacacgtggtagggatggaaaaggattcttcacagagcactctggcacaccatatcggagaaaacttgatagattagttaatggtttttcttgaattcgagaagcaaagatctgttctccatattggtatgttctccctcaaccaagatcttctaaaaagaaataatattttagtcttctgcttgaggaactgactgtgaagcgacgcccagtgaaaaacatgttcttgcagcagctctggtggcagctgtccttgaggaacctttggtgtgtggtgggaagctatcagaacaagaaatgtaggcatttcccgttttttttggggggggggtgggggggcagggctctgccctcttgaaaggcatttacttgtttaacacttgtccagctacagtggggtacagtagctggctattcacaggcatcatcatagcccactagtctcatattattttccttttgagaaattggaaactctttctgttgctattatattaataaagttggtgtttattttctggtaaaaaaaaaaaaaaaaaaaaaaaaaaaaaaaaaaaaaaaaa

SEQ ID NO: 4166 - protein, 110 aa, Homo sapien
MAKHHPDLIFCRKQAGVAIGRLCEKCDGKCVICDSYVRPCTLVRICDECNYGSYQGRCVICGGPGVSDAYYCKECTIQEKDRDGCPKIVNLGSSKTDLFYERKKYGFKKR

SEQ ID NO: 4167 - DNA, 1107 bp, Homo sapien
ctcgaagggtcggagacgaaattcccgccccagactatgaggccgagcccctcggagactctgcccgggacacggcgggaccgaccgcgagggagcggcgccggcggcctcccgtacctgcgctcctccacctccgcgtctctctcgagctccagcaggtccagttgcttggtcacgaagctctccacagctgccgaggccatcgccgccgccggcctgggcccctagaagccgacgtcccgcttctgcgccgggccggtgttacagcggaccggtgttccccgccgggcccgtgcgttacgcacgcggttcgcgtcgtttccgtttccggccgaggctgcgggaagatggcggcggccatggcagcatcttccctgacggtcaccttagggcggctggcgtccgcgtgcagccacagcatcctgagaccttcggggcccggagcagcctccctttggtctgcttctcgaaggttcaattcacagagcacttcatatctaccaggatatgttcctaaaacatccctgagttcaccaccttggccagaagttgttctgccagacccagttgaggagaccagacaccatgcagaggtcgtgaagaaggtgaatgagatgatcgtcacggggcagtatggcaggctctttgccgtggtgcactttgccagccgccagtggaaggtgacctctgaagacctgatcttaattggaaatgaactagaccttgcgtgtggagagagaattcgactggagaaggtcctgctggttggggcagacaacttcacgctgcttggcaagccactcctcggaaaggatcttgttcgagtagaagccacagtcattgaaaagacagaatcatggccaagaatcattatgagattcaggaaaaggaaaaacttcaagaagaaaagaatcgtcacgaccccgcagactgtcctccggataaacagcattgagattgctccgtgtttgttgtgattaccgagttaatacttacaaaaggataaaaataaactcctgcttcccaaggaaaaaaaatctatgtcgggtgcggagaaagaggtaatgaaatggcaggaactcgatagtcaagcttatcgataccgtc

SEQ ID NO: 4168 - protein, 324 aa, Homo sapien [sequence omitted]

SEQ ID NO: 4169 - DNA, 2737 bp, Homo sapien
ggaaagactatgttttaggtgacccgtgtggcctttttgttgaggcctttaggatacaaggcccccacctaaagacgcgaccctcccgtaggaggggggcagggcccgggggcgggagcacagcggggccccagcctcaggcggcgcgtcactgagcacaaaggagacaacagcgaggcggcagcgggcgctgatcttcgctcgccagccactcgcaattgcggttacagacctgcagctccccctcccccagccggcccgcccgcctttctgtctcctctctccctccgtactggacggccccggtccatttccgggctccggatatttggtatcgattggggccggggacgcggagcaggtggccgcggcggggcagctgggccgccagcttggtgcctcggggaccgtctcccgctgctttggtcaccagcccctgcccgcccgacccgctccgttctccggcctgcgagccctgccggccggactttgcgccgcgtccggcgctgctgctgcgctcggggccccgctcggcgccggcggtgaccgggaagcccgcgttaaaggggcaaccgggaccctggcccggtatggctgaagtcagcatcgaccagtccaagctgcctggagtcaaggaagtatgccgagattttgctgtcctggaggaccacaccctggctcacagcctgcaggaacaagagattgagcatcatttggcatcgaacgttcagcggaaccgtttggtccagcatgatctccaggtggctaagcagctccaagaggaagatctgaaagcgcaggcccagctccagaagcgctacaaagaccttgaacaacaagactgtgaaattgctcaggaaattcaggagaagctggctattgaggcagagagacgacgcattcaggagaagaaggatgaggacatagctcgccttttgcaagaaaaggagttacaggaagagaaaaagagaaagaaacactttccagagttccctgcaacccgtgcttatgcagatagttactattatgaagatggaggaatgaagccaagagtgatgaaagaagctgtatctactccatcacgaatggcccacagggatcaggaatggtatgatgctgaaattgccagaaaactgcaagaagaagaacttttggctacccaggtggacatgagagccgctcaagtagctcaagatgaagaaatcgctcgacttctaatggctgaagaaaagaaagcttacaaaaaagccaaggagcgggagaaatcatctttggacaaaagaaagcaagaccccgagtggaagccaaaaacagctaaagcagcaaattccaagtcaaaagagagtgatgaacctcaccattctaagaatgaaaggccagcacggccaccaccacctatcatgacagatggtgaagatgcggattacactcattttacaaaccagcagagttccacacggcatttctcaaaatcagagtcctctcataaaggttttcattacaaacattaaaaacctaggaatctgccttgaaaatggactcactatagcaaatattactgggtgatacagaatgaattctacacttactttttttctcctgtgtttgcattcctgggatttatcctcaagtgcatttctgaccataagtaattttaattcatttcaaatgttttggttattcatgatcacttgggcagtataagaaaatgtagcttctgaatattggccacctctatgctgcatatacttcttgggatatagtatctaagacctttgtaaactgccattttgttaggtatggagtttggtatctagggagtaggccttatttagcaattcaaattttatggagatgaatgatcaaagtgaaacaatgtttggatgcaacgcagaataaaagaatataagaaatagctttttgttgcattaatgtatgatattttgaaggacagagcctttgctttttgtattctttaagaaaagcacaaccataaagtattttaaaaaaagaaacacttggagcaattgaaatatgttattctgactagatggactgtagaggttttgcatttctcagccctcctggggagattggcctagatagcattctttaacacttcctctgcttttgcctcagtagcaaggctttcctaagctcctgggcaatggaacatttattagtatttattgacaaaaatttagttctctgaaattttaactcatatatatgaaaaactttgtattccatctcttctttttcatttacttgtagagccaaggaaatggaattgaaagatgattgcataagtaatgatgccatccttctctctggctgtagactgaggcttttctcttgcttcaagtcagagcagtatttgttgataacctctcaataatgtttggtttacatgccagtaattaaattaattcaacatgaagttgaatttgatgaagtggtcatctatccaagtatttggtttttgttttgttttgttttgttttttgagttggagtctcgccctgtcacacaggctggagtgcagtggtgcaatcttggctcactgcaacctccgccacctgggctggagcaattcccctgcctcagcctcccaagtagctggaattacaggcatgtgtcaccacacccggctaatttttgtatttttagtaaagagcgggtttcaccatgttggccaggctggtctcgaacccctgacctcaagtgatccacctgc

SEQ ID NO: 4170 - protein, 306 aa, Homo sapien
MAEVSIDQSKLPGVKEVCRDFAVLEDHTLAHSLQEQEIEHHLASNVQRNRLVQHDLQVAKQLQEEDLKAQAQLQKRYKDLEQQDCEIAQEIQEKLAIEAERRRIQEKKDEDIARLLQEKELQEEKKRKKHFPEFPATRAYADSYYYEDGGMKPRVMKEAVSTPSRMAHRDQEWYDAEIARKLQEEELLATQVDMRAAQVAQDEEIARLLMAEEKKAYKKAKEREKSSLDKRKQDPEWKPKTAKAANSKSKESDEPHHSKNERPARPPPPIMTDGEDADYTHFTNQQSSTRHFSKSESSHKGFHYKH

SEQ ID NO: 4171 - DNA, 4051 bp, Homo sapien
  Unsure 1185-1467: Unknown base
ccaggtatagagaaaaataagtctgatatgaggaaaattgcacaatttagagtagttatgccgtagagaaaatttccacaaactaggaaatgtagagagttattctatagaatactcaaaagaggaaagtatgtgatttttggaaacaggaaaatcttcaaacttctttcttcacttccctttgtgtttagttgaccctccaatgtgatcattgcctttggagtttgggagaggtacgggaagtggcctgatccctgcttccatacttcactcctccatccatccttccctcccttttcccctccagctaaatggacaattctagccaacattgagtcactcaataagtctcaacagtgggtgtgtttgctgagattgtccagcggttgagcagtttggtctcacctccctcgctagttgagaccaaaaagagacaaataactttttcatggtctttgaaacataatgcttatttcgtggtcaatggctttaaaaaaatctgtttcttgttttcttcaacaaactcactagttttcccttaaatgatattgtaaaaattaaagtaatcttgaaaatgttttgacaaaagtaaaattaaagggacatcttttcttgttttgttttttttttctatggccacacatgaccgttccttcacctttaagcaaagagagtggttcagatggtttctaagatgccaacctgacctcgcattctgtcattctacccagctcttaattcaatttgcttccattatcctaacaggcttctttcttacttagaacttggaaaggctgctgtatttaataccctccaacactaacgcagacttaagataggtactgtttattgaaaacctactgagtgaaatgtgcggttttaggaccttcataaacatctcatttaatctgtctagcatcctgtgaaacagccatgatttcacgttgataaacaaagaagacaggggtcccagggatgtgaagcatcttgcccaggcttctgctgctggtgaccagtgtagccaggactccagcccaggttttcctgactcagaagactgagctttttcctggatgttattaatagctaattgtgtccaagcaaccaagggccttgagtctgcttggttctgcttatggcctcacatcaagaaatggagctagtccatgtctgtagtcccaatgnnnnnnnnnnnnnnnnnnnnnnnnnnnnnnnnnnnnnnnnnnnnnnnnnnnnnnnnnnnnnnnnnnnnnnnnnnnnnnnnnnnnnnnnnnnnnnnnnnnnnnnnnnnnnnnnnnnnnnnnnnnnnnnnnnnnnnnnnnnnnnnnnnnnnnnnnnnnnnnnnnnnnnnnnnnnnnnnnnnnnnnnnnnnnnnnnnnnnnnnnnnnnnnnnnnnnnnnnnnnnnnnnnnnnnnnnnnnnnnnnnnnnnnnnnnnnnnnnnnnnnnnnnnnnnnnnnnnnnnnnnntcacctttttatgacattcctttttcttagcttaagaaaagaaagctgctagatgagagtcttagttttcctgcataagacctcctttatgaatagaataaaagactgtcaaagtaggctgggcttgggcccaggctaatctatgaaggaagcaagctcgtgttccttacctatccttttggtgtccattggattgtgccccgaagtggcctttacccttgagccgtccccagccatggtgctcacacataggcttttgagctccttggagctatccagatcctgctcacttttccttcctgagatcagaacaaatcacccccttactcccactccaaacaaggccttgatgataaactaatccttcctaaaatgctggtaggtaaacaagcaatgatgaagcattgaacacaggttaactcctgacttttgtaccattgtctattccattacacattaacatgactctgaatgccagatccaaacctttgcccaccatctgcttgtcgtgcaacagttgaggcagtaaccaggggagattcacttcctgtcttgtccttcccccagggatcacccccctgctgccctctagcagccaagctcagatgagttccattgttaccctaggtgtgcccatctctttggtagggaaggagaaaggtaagaatagccatcaatgaggaaggattcttggagcgaggagccactgtggtttttcctgctatttaagatgttgagaccggataactttagaaagatacctgcacaaacccataaatagtgcttttataaagtttagttcaccggaacctgagttcagtatttgacattagctttttgtccaaagagttgaagcctgctggaggtctttgctcaaataataaataccacatatttccaagtgtgttcaggtataggcactaggtactgtctgtttacttcatgttaggcacattacatgcattggctaatcaaatcctcatcaattacatatgtaataatctaaacttgcctccttgtattataaatggaaataatcctgtttatttaaacgggttttcatgtacctgtagggattaggaaactcaaatggcctttttaatacctttccctagtttgagctccctgttctctttaacagataaaacaacatatttgcttcagcctggaatctgtttttggtgctttggtgcagagacaggaaatgggcactcagagtcacactggtagttgcacactgtatctacagagggcgtgtctcatctgtactctgctgggttacaggatttcagtaggtatttgtgtccacctgagaattctgtttattacctttcatttgacagtgtctttcctttctgcagttgattttgctagagaggcaattcataaggtgaggtcctgttcatagtatgacttgctttctcaatatctccttcaatttttagtaactcttggtctatttggtgtctttaaaaaaaataacctagtaataaagacttcttttaatgtggaaatgtggtctggtagtaagttatttctttccacatgtaactgacccaatctggtttccaaatgagaagtgtgcaggccccagaggttgagaagccatatttcaactgtgaaaaaaatctgcttcctgcatctgttgaaatatagttgttcatacttgccatcccttatctttcttgtaacaatttgcacagttcttgccagaataaatgccattatctgtatgtttcagggagttccccaatttgatcatttttgtgtgtgtgtggtgtgtgtgtgagagagagagatactgcagtaaaacatttctaaaggatgaaagctcttgtatggcatagatatgaattccttcctctggtaataattaggttattcccagaagcacagtgtcattctttaaataaaagctttcctgtttaaagcttttcaaaggagcagaccaccttgaagattccccctagggttgatatgtgtctaattcattttataaaaattattcttgtcttcattttaaagctttggctatatagtcagaaatgtcctaaataacaaactattttgtatttaatttagggaagactaaagggaagaaaaatgaaaactcagtctttatgtaagctccaaggatattagggcttaaagggcttttctagttttatgagaatttgtactactgatttttatatattcctgtttttgagatgaacagatctctggggaaattgttgagttacaatggcatttcactgtgatccctctcaagctcagatcagttctataacccaatgacaacctgtctctttggtttactgtcctgtgaaatgtcagctcaagtttcccagaagtcgtgtgtttatgatgagtcagagtgcttttcctcggtgggacagttgctggccctcttaattttggtgtatgtgcttccaagtatctaaacctccagtctgatctgtatatgctatcctaactgttaattgtattattgattatgttgattatcttgcttgaaggttcatacttttcaatttgatagaaataaagtttttttctgcttatagctagcgaattcaaaaaa

SEQ ID NO: 4172 - protein, 127 aa, Homo sapien
  unsure 17-111: unknown amino acid
  Unsure 1185-1467: Unknown amino acid
MASHQEMELVHVCSPNXXXXXXXXXXXXXXXXXXXXXXXXXXXXXXXXXXXXXXXXXXXXXXXXXXXXXXXXXXXXXXXXXXXXXXXXXXXXXXXXXXXXXXXXXXXXXXXHLFMTFLFLSLRKESC

SEQ ID NO: 4173 - DNA, 2671 bp, Homo sapien
  Unsure 1734-1760: Unknown base
cacaatggattctgtggccccaaatgttaatagtgccaaagttgagagaccctggggtagagacgtgtgatgggaaggaaagaaaattacctttagagctgcgcgccgcggcggcggaagatggctgcggccgaggtggcggacactcagctgatgcttggagtcgggctgatcgtgaccatctttccaccgtagaaaaggacacaaatggagaagttctgtgggtgtggtgttatccttccacgacagccacattaaggaacctgctgctgagaaaatgctgccttacagatgaaaacaaacttctccatccctttgtctttggtcagtacagaagaacatggttttatatcacaacaattgaagttccagattcttccattttgaaaaaggtgactcatttttctattgtcctgaccgccaaagattttaacccagagaagtatgctgccttcactaggatattgtgtagaatgtacctgaaacatgggagcccagttaaaatgatggagagttatattgcagttctcacaaaggggatatgccagagtgaagaaaacggctctttccttagtaaggattttgatgcccgaaaggcctacctggctggctccatcaaagacattgtatctcagtttggaatggaaactgttatcttacacacagcactgatgctaaagaaaagaattgtggtgtatcaccccaagatagaagcggtccaggagttcaccaggactctgcctgccctggtgtggcaccgacaggactggaccatccttcactcttacgtgcacctcaacgccgatgagctggaagccctgcagatgtgcacaggttacgtcgctggatttgtagacttggaggtgagcaacagaccagacctctatgatgtgtttgtgaatctggcagagagtgagattaccattgctccccttgcaaaagaggccatggcaatgggcaaactgcacaaagaaatgggtcagctaattgttcagtctgcagaagatccagagaaatcagagagccacgttatacaggatattgctctaaaaacaagagaaatctttaccaacctagcaccattttcagaagtttcggctgatggagaaaagagagtccttaatttggaggcgctaaagcaaaaacgatttccaccagcaacagaaaacttcctttatcatctagcagcagccgaacaaatgctgaaaatctgactgtgtgacagaacgtatcactgatgactgatagaaagccctctttcactctgattacccactcactacatgaagtcctgaaaataacagagaaactgttatatctttttaatgatttatttgcaagtattgagatttgacctgaaaaacaatgaaacacatgaacacacttccgattttctcctcgctgattagcttcctgcctgctgtcagtgctggacgaagtgctataactactttatgtaacattacagaacagctagaggtcctggggtaagagaaaaaaagcacatcacaacaaatgtgaaagccttcattattacacgttccagtttgtctcgctgtgtaggcataagctaatggtttattttcagaaagctgcctgaaacgttgctttgtattcttctaggaagaactttaattcctcctgaggaactctactttctgagccaaactgctaattttctgcggaactgtctagaagatcattcaagagaccctgcagttgcactttctcgtnnnnnnnnnnnnnnnnnnnnnnnnnnngggttttccccggcctttgaacattttgcctatgagagttttgcatatattttatacttgagtagacaactttaataatccatatttatactatcgcagaagtaagcatttggcaaacgttcagccattagcactcatttaaccctgttagcaatattcttttgaaaaaagtgccagtccttatgtgataaactaagaagcccattgaatataaaagtgtataggactgaaacagtgaccttatattattgctaagggaatatgagattaacttcctacaggggccaaaaccagagaaaggcttccagcaacttcgatgaaagtagtttggccacatgtcaagccaattgtttgtattatttatgtacctttttcataactggaattgccaaataagcatggagatctaaatgatgtacttgttagtgtattcattcatattgattgtaaaggattatttttcactcagtactgatgtccttggaaatcttacctggaaacatgtttgcaaaaaacattattgggtctttcatctttttcttggtattacatatttgttcaataaaaattaaacaccctcccttttttttgagtgagggcagggagtacctgaaataagacaatgtttactaaggcaaataattgaaaattaaatctgcactttatggaaatgagaaatattaacatcttttttctcatttttttgtattactatattagctaatgatcaaagttgttaaaattataaatttatgatgcagaaataaaattggtatattttgatattcaactacttttaggtgggtgacgaattgtcccctctttctctaatactgctcattccaaagaaaatggggaaaagataccttttttcaactgtgagggcgctagggaattattaaaagacctgt

SEQ ID NO: 4174 - protein, 403 aa, Homo sapien
  Unsure 1734-1760: Unknown amino acid
QWILWPQMLIVPKLRDPGVETCDGKERKLPLELRAAAAEDGCGRGGGHSADAWSRADRDHLSTVEKDTNGEVLWVWCYPSTTATLRNLLLRKCCLTDENKLLHPFVFGQYRRTWFYITTIEVPDSSILKKVTHFSIVLTAKDFNPEKYAAFTRILCRMYLKHGSPVKMMESYIAVLTKGICQSEENGSFLSKDFDARKAYLAGSIKDIVSQFGMETVILHTALMLKKRIVVYHPKIEAVQEFTRTLPALVWHRQDWTILHSYVHLNADELEALQMCTGYVAGFVDLEVSNRPDLYDVFVNLAESEITIAPLAKEAMAMGKLHKEMGQLIVQSAEDPEKSESHVIQDIALKTREIFTNLAPFSEVSADGEKRVLNLEALKQKRFPPATENFLYHLAAAEQMLKI

SEQ ID NO: 4175 - DNA, 2273 bp, Homo sapien
ttttgatacttctgttaaaatagataataaggaaccatatcttaaagtgtggaggatctggcttggcttctgtttttgatagctctatgaaagtgacagatttgcatcatgagacttagtggaatgaattgggaaattgaagggcagcccagtggctatggattctattttctatgggactgtctacgccaggctttattttctctttgctcagataacttctgactagagtcgacggtaggattataaatggtttaaaatacgtattctcaaacctcattttcagcatataaatttttaagaatcagtgtttaaaggtacgtgaaaccatttgctagatttttgtcctagttttttttttaatttaaaaatcttaagttttttttagtaagcttaagatgtccagtagtttatttgcagacagcatttttaaaaagtgaatagatgtttaactgaagttaaatacaaatttatgtctgtgtaactcttggtaagatataacaaaacctagacatctaaattttttggaaatttttattttaaaagtttgttgggaggtaaaattgtgtgactttaccttctggttaatagttttatagttaagaagaaagtccagcgaagtttacttgatctcagttgcactccagaataggggatttagttccactttggttattttcacttctaccctaaattcatagtccctgatacttaagctttacccttggcttaccagttttcattgcagcgagtaaatggggagtagcagagcctttgttaatgtaaattgacaaaaagtatgtccttttctagcaggagcagataaactgataatggtcttagaaatgtagaaaatgattttttgtagacaggatgatctgtctagattgtagcaaatgatggtacatattcacaacaaagttgtgccactacatttaataaacagccacaaacaacaaaaggacaactggtccccgatataaatggactagctacctggacataatatccttgtgaggcatccttaaaggacaaattgcagctggtatttgggtgaatgttgttgctctgtgcctgttgaatgtccatgctacaagaagttatgagccttgttctaagtacagatgaaccttgtatttgtgtaatctcccaagggagagctatggtttacattcaattttttggtctttctgctatgaaacgtgtttattttgcctctgtcaatgtgtttgcaaccttaagtaaggaaagggaaaaaaaaaatagccctctgaactctgatcttttgccgcttctgtagattttgattgtgaagttgggagtgaggacattcaaaagcccatggtgaatgcatatgcctttagaatattgtgcctgttttaaaatgtttgagcttttaaaatactttgttaaaacatgaatccatttttgtaattgtataaatactcataactaattttgaatgctactgattgtgtaactgaatttttgtatccaaaaatacattcttgagtactacttttcctaccttgaaaatctatttcatttactaaatattgttttctttatgctaacttaactttaaaaggaatgttgccaagctgtctctcctcccccatcacaattgttagtaaatgaaatagattttcaaggtaggaaaagtagtactcaagaatgtatttttggatacaaaattcagtacacaccatcagtagcattccaaattagttatgagtatttataccattaccaaaatggattcatgttttaacacaagtattttaaaagctccaacattttaaaacaggcaccatattctaaaggcatatgcattcaccatgggcttttgaatgtcctcactcccaaacttcaccatccaaatctacagaagcggccaaagatcagagttcagagggctattttttttttccctttccttacttaaggttgcaaacacattgacagaggcaaaataaacacgtttcatagcagaaagaccaaaaattgaatgtaaaccatagctctcccttgggagattacacaaatacaaggttcatctgtacttagtacaaggctcataacttcttgtagcatggacattcaacaggcaaagaccaaaaattgaatgtaaaccatagctctcccttgggagattacacaaatacaaggttcatctgtacttagaacaggctcataacttcttgtagcatggacattcaacaggcacagagcaacaacattcacccaaataccagctgcaatttgtcatttaa

SEQ ID NO: 4176 - protein, 20 aa, Homo sapien
MDIQQAQSNNIHPNTSCNLS

SEQ ID NO: 4177 - DNA, 5385 bp, Homo sapien
  Unsure 365-388, 2373-2394, 5010-5049: Unknown base
atttggtaatgctgcacagaaattttcaattggagattccacagtaagcgttttttttctttgaagatttatgatgcacttattcaatagctgtcagccgttccacccttttgaccgtacacattctattacaatgaattttgcagttttgcacattttttaaatgtcattaactgttagggaattttacttgaatactgaatacatataatgtttatattaaaaaggacatttgtgttaaaaaggaaattagagttgcagtaaactttcaatgctgcacacaaaaaaaagacatttgatttttcagtagaaattgtcctacatgtgctttattgatttgctattgaaagaatagggttttttgnnnnnnnnnnnnnnnnnnnnnnnntaaatgtgcagtgttgaatcatttcttcatagtgctcccccgagttgggactagggcttcaatttcacttcttaaaaaaaatcatcatatatttgatatgcccagactgcatacgattttaagcggagtacaactactattgtaaagctaatgtgaagatattattaaaaaggtttttttttccagaaatttggtgtcttcaaattataccttcaccttgacatttgaatatccagccattttgtttcttaatggtataaaattccattttcaataacttattggtgctgaaattgttcactagctgtggtctgacctagttaatttacaaatacagattgaataggacctactagagcagcatttatagagtttgatggcaaatagattaggcagaacttcatctaaaatattcttagtaaataatgttgacacgttttccataccttgtcagtttcattcaacaatttttaaatttttaacaaagctcttaggatttacacatttatatttaaacattgatatatagagtattgattgattgctcataagttaaattggtaaagttagagacaactattctaacacctcaccattgaaatttatatgccaccttgtctttcataaaagctgaaaattgttacctaaaatgaaaatcaacttcatgttttgaagatagttataaatattgttctttgttacaatttcgggcaccgcatattaaaacgtaactttattgttccaatatgtaacatggagggccaggtcataaataatgacattataatgggcttttgcactgttattatttttcctttggaatgtgaaggtctgaatgagggttttgattttgaatgtttcaatgtttttgagaagccttgcttacattttatggtgtagtcattggaaatggaaaaatggcattatatatattatatatataaatatatattatacatactctccttactttatttcagttaccatccccatagaatttgacaagaattgctatgactgaaaggttttcgagtcctaattaaaactttatttatggcagtattcataattagcctgaaatgcattctgtaggtaatctctgagtttctggaatattttcttagactttttggatgtgcagcagcttacatgtctgaagttacttgaaggcatcacttttaagaaagcttacagttgggccctgtaccatcccaagtcctttgtagctcctcttgaacatgtttgccatacttttaaaagggtagttgaataaatagcatcaccattctttgctgtggcacaggttataaacttaagtggagtttaccggcagcatcaaatgtttcagctttaaaaaataaaagtagggtacaagtttaatgtttagttctagaaattttgtgcaatatgttcataacgatggctgtggttgccacaaagtgcctcgtttacctttaaatactgttaatgtgtcatgcatgcagatggaaggggtggaactgtgcactaaagtgggggctttaactgtagtatttggcagagttgccttctacctgccagttcaaaagttcaacctgttttcatatagaatatatatactaaaaaatttcagtctgttaaacagccttactctgattcagcctcttcagatactcttgtgctgtgcagcagtggctctgtgtgtaaatgctatgcactgaggatacacaaaaataccaatatgatgtgtacaggataatgcctcatcccaatcagatgtccatttgttattgtgtttgttaacaaccctttatctcttagtgttataaactccacttaaaactgattaaagtctcattcttgtcattgtgtgggtgttttattaaatgagagtttataattcaaattgcttaagtccattgaagttttaattaatgggcagccaaatgtgaatacaaagttttcagtttttttttttcctgctgtccttcaaagcctactgtttnnnnnnnnnnnnnnnnnnnnnntggcctgagagtagagtatctgtctactcatgtttaattaaggaaaaacacttatttttagggctttagtcatcacttcataaattgtataagcacattaaatagcgttctagtcctgaaaaagtccaagattcttagaaaattgtgcatatttttattatgacagatgtttgaagataattccccagaatggatttgatactttagatttcaattttgtggcttttgtctattattctgtactctgccatcagcatatggaaagcttcatttactcatcatgacttgtgccatataaaaattgatatttcggaatagtctaaaggactttttgtacttgaatttaatcatgttgtttctaatattcttaaaagcttgaagactaaagcatatcctttcaacaaagcatagtaaggtaataagaaagtgtagtttgtacaagtgttaaaaaaataaagtagacaatgttacagtgggacttattatttcaagtttacattttctccatgtaattttttaaaaagtaaatgaaaaaatgtgcaataatgtaaaatatgaagtgtatgtgtacacacattttatttttcggtatcttgggtatacgtatggttgaaaactatactggagtctaaaagtattctaatttataagaagacattttggtgatgtttgaaaaatagaaatgtgctagttttgtttttatatcatgtcctttgtacgttgtaatatgagctggcttggttcagtaaatgccatcaccatttccattgagaatttaaaactcaccagtgtttaatatgcaggcttccaaaggcttatgaaaaaaatcaagacccttaaatctagttaatttgctgctaacatgaaactctttggttcttttatttttgccagataattagacacacatctaaagcttagtcttaaatggcttaagtgtagctattgattagtgctgttgctagttcagaaagaaatgtttgtgaatggaaacaagaatattcagtccaaactgttgtaaggacagtacctgaaaaccaggaaacaggataatggaaaaagtcttttaaagatgaaatgttggagccaactttcttatagaattaattgtatgtggctatagaaagcctaatgattgttgcttatttttgagagcatattattcttttatgaccataatcttgctgtttttccatcttccaaaagatcttccttctaatatgtatatcagaatgtgggtagccagtcagacaaattcatattggttggtagctttaaaaagtttgtaatgtgaagacaggaaaggacaaaatagtttgctttggtggtagtactctggttgttaagctaggtattttgagactacttccccatcacaacaacaataaaataatcactcataatcctatcacctggagacatagccatcgttaatatgttagtgactatacaatcatgttttcttctgtatatccatgtatattctttaaaaatgaaatttatactgtacctgatctcaaagctttttagcttagtatatctgtcatgaatttgtaggatgttccattgcatcagaaaacggacagtgatttgattactttctaatgccacagatgcagattacatgtagttattgagaatcctttcgaattcagtggcttaatcatgaatgtctaaatattgttgacattaggatgatacatgtaaattaaagttacatttgtttagcatagacaagcttaacattgtagatgtttctcttcaaaaatcatcttaaacatttgcatttggaattgtgttaaatagaatgtgtgaaacactgtattagtaaacttcatcacctttctacttccttatagtttgaacttttcagtttttgtagttcccaaacagttgctcaatttagagcaaattaatttaacacctgccaaaaaaaggctgctgttggcttatcagttgtctttaaattcaaatgctcatgtgacttttatcacatcaaaaaatatttcattaatgattcacctttagctctgaaaattaccgcgtttagtaattatagtgggcttataaaaacatgcaactctttttgatagttatttgagaattttggtgaaaaatatttagctgagggcagtatagaacttataaaccaatatattgatatttttaaaacatttttacatataagtaaactgccatctttgagcataactacatttaaaaataaagctgcatatttttaaatcaagtgtttaacaagaatttatattttttattttttaaaattaaaaataatttatatttcctctgttgcatgaggattctcatctgtgcttataatggttagagattttatttgtgtggaatgaagtgaggcttgtagtcatggttctagtgtttcagtttgccaagtctgtttactgcagtgaaattcatcaaatgtttcagtgtggttttctgtagcctatcatttactggctatttttttatgtacacctttaggattttctgcctactctatccagttgtccaaatgatatcctacattttacaaatgccctttcagtttctattttctttttccattaaattgccctcatgtcctaatgtgcagtnnnnnnnnnnnnnnnnnnnnnnnnnnnnnnnnnnnnnnnnattttcaagagtgctagacttccaatttgagagattaaataatttaattcaggcaaacatttttcattggaatttcacagttcattgtaatgaaaatgttaatcctggatgacctttgacatacagtaatgaatcttggatattaatgaatttgttagtagcatcttgatgtgtgttttaatgagttattttcaaagttgtgcattaaaccaaagttggcatactggaagtgtttatatcaagttccatttggctactgatggacaaaaaatagaaatgccttcctatggagagtatttttcctttaaaaaattaaaaaggttaattattttgact

SEQ ID NO: 4178 - protein, 51 aa, Homo sapien
  Unsure 365-388, 2373-2394, 5010-5049: Unknown amino acid
MSYFQSCALNQSWHTGSVYIKFHLATDGQKIEMPSYGEYFSFKKLKRLIIL

SEQ ID NO: 4179 - DNA, 2331 bp, Homo sapien
aaaaacaagctcagcgatggcggctccagaaggcagcggtctaggcgaggacgcccggctggaccaggagaccgcccagtggctgcgctgggacaagaattccttaactttggaggcagtgaaacgactaatagcagaaggtaataaagaagaactacgaaaatgttttggggcccgaatggagtttgggacagctggcctccgagctgctatgggacctggaatttctcgtatgaatgacttgaccatcatccagactacacagggattttgcagatacctggaaaaacaattcagtgacttaaagcagaaaggcatcgtgatcagttttgacgcccgagctcatccatccagtgggggtagcagcagaaggtttgcccgacttgctgcaaccacatttatcagtcaggggattcctgtgtacctcttttctgatataacgccaaccccctttgtgcccttcacagtatcacatttgaaactttgtgctggaatcatggtaactgcatctcacaatccaaagcaggataatggttataaggtctattgggataatggagctcagatcatttctcctcacgataaagggatttctcaagctattgaagaaaatctagaaccgtggcctcaagcttgggacgattctttaattgatagcagtccacttctccacaatccgagtgcttccatcaataatgactactttgaagaccttaaaaagtactgtttccacaggagcgtgaacagggagacaaaggtgaagtttgtgcacacctctgtccatggggtgggtcatagctttgtgcagtcagctttcaaggcttttgaccttgttcctcctgaggctgttcctgaacagaaagatccggatcctgagtttccaacagtgaaatacccgaatcccgaagaggggaaaggtgtcttgactttgtcttttgctttggctgacaaaaccaaggccagaattgttttagctaacgacccggatgctgatagacttgctgtggcagaaaagcaagacagtggtgaatggagggtgttttcaggcaatgagttgggggccctcctgggctggtggctttttacatcttggaaagagaagaaccaggatcgcagtgctctcaaagacacgtacatgttgtccagcaccgtctcctccaaaatcttgcgggccattgccttaaaggaaggttttcattttgaggaaacattaactggctttaagtggatgggaaacagagccaaacagctaatagaccaggggaaaactgttttatttgcatttgaagaagctattggatacatgtgctgcccttttgttctggacaaagatggagtcagtgccgctgtcataagtgcagagttggctagcttcctagcaaccaagaatttgtctttgtctcagcaactaaaggccatttatgtggagtatggctaccatattactaaagcttcctattttatctgccatgatcaagaaaccattaagaaattatttgaaaacctcagaaactacgatggaaaaaataattatccaaaagcttgtggcaaatttgaaatttctgccattagggaccttacaactggctatgatgatagccaacctgataaaaaagctgttcttcccactagtaaaagcagccaaatgatcaccttcacctttgctaatggaggcgtggccaccatgcgcaccagtgggacagagcccaaaatcaagtactatgcagagctgtgtgccccacctgggaacagtgatcctgagcagctgaagaaggaactgaatgaactggtcagtgctattgaagaacattttttccagccacagaagtacaatctgcagccaaaagcagactaaaatagtccagccttgggtatacttgcatttacctacaattaagctgggtttaacttgttaagcaatatttttaagggccaaatgattcaaaacatcacaggtatttatgtgttttacaaagacctacattcctcattgtttcatgtttgacctttaaggtgaaaaaagaaaatggccaaacccaacaaactaacattcctactaaaaagttgagcttggacatattttgaatttttgtaagtgaagatttttaaactgactaacttaaaaaaatagattgtaattgatgtgccttaatttgcataaatcataaatgtatgtcctctctgtaattgttttaatgtgtgcttgaaatatccagaaaacctatggagttagtaaattctgggctgtcatatgtaggatagccactttttaggtatatgtacatttatatttctatcaattccttagaaagtaaaataaatgaatagatc

SEQ ID NO: 4180 - protein, 612 aa, Homo sapien
MAAPEGSGLGEDARLDQETAQWLRWDKNSLTLEAVKRLIAEGNKEELRKCFGARMEFGTAGLRAAMGPGISRMNDLTIIQTTQGFCRYLEKQFSDLKQKGIVISFDARAHPSSGGSSRRFARLAATTFISQGIPVYLFSDITPTPFVPFTVSHLKLCAGIMVTASHNPKQDNGYKVYWDNGAQIISPHDKGISQAIEENLEPWPQAWDDSLIDSSPLLHNPSASINNDYFEDLKKYCFHRSVNRETKVKFVHTSVHGVGHSFVQSAFKAFDLVPPEAVPEQKDPDPEFPTVKYPNPEEGKGVLTLSFALADKTKARIVLANDPDADRLAVAEKQDSGEWRVFSGNELGALLGWWLFTSWKEKNQDRSALKDTYMLSSTVSSKILRAIALKEGFHFEETLTGFKWMGNRAKQLIDQGKTVLFAFEEAIGYMCCPFVLDKDGVSAAVISAELASFLATKNLSLSQQLKAIYVEYGYHITKASYFICHDQETIKKLFENLRNYDGKNNYPKACGKFEISAIRDLTTGYDDSQPDKKAVLPTSKSSQMITFTFANGGVATMRTSGTEPKIKYYAELCAPPGNSDPEQLKKELNELVSAIEEHFFQPQKYNLQPKAD

SEQ ID NO: 4181 - DNA, 2055 bp, Homo sapien
ggagggagaggctgaatgttggctcggtaattgagaggagcggccgctccagagcttcctcccggggcgcccccctcagtccgtccgcgcttctcagccgccagtctcctggccgcgcagtccccgcggacggccgggccgcggagaccctcgcagaagaggcgctgccggcggcgaggactggccggcggcatccgaggcgcgcgccccaccgccacccccacccgcctgccagccggtccctccggccgccgccatgtcctcctcctcttcctcccccagggagacgtacgaggaggaccgggagtacgagagccaggccaagcgtctcaagaccgaggagggggagatcgactactcggccgaggaaggcgagaaccgccgggaagcgacgccccggggcgggggcgatggcggcggcggcggccggagcttctctcagccggaggcaggtggaagtcatcataaagtttctgtttcacccgtcgtccatgttcgaggactctgtgaatctgtggtggaagcagacctcgtggaagcgctggaaaaatttgggacaatatgctatgtgatgatgatgccatttaaacgacaggctctagtggaatttgaaaacatagatagtgccaaagaatgtgtgacatttgctgcagatgaacccgtgtacattgctggtcaacaggcttttttcaactattctacaagcaaaaggatcactcggccaggaaatactgatgatccatcaggaggcaacaaagttcttctgctctcaattcagaatccgctttatccaattacagtggatgttttatatactgtatgcaaccctgttggcaaagtgcaacgtattgttatattcaagagaaatgggatacaagcaatggttgagtttgaatcagtcctttgtgcccagaaagctaaagcagcactcaatggagctgatatatatgctggatgttgcacactaaaaattgaatatgcacggccaactcgtctaaatgttattaggaatgacaatgacagttgggactacactaaaccatatttgggaagacgagatagaggaaagggtcgccagagacaagccattttgggagaacacccttcttcgtttagacatgatggctatggatcccatggtccattattgcctttaccaagtcgttacagaatgggctctcgagatacacctgaacttgttgcttatccattaccacaggcttcttcctcttacatgcatggaggaaatccctctggttcagttgtaatggttagtggattacatcaactaaaaatgaattgttcaagagtcttcaacctgttctgcttatatggaaatattgagaaggtaaaatttatgaagaccattcctggtacagcactggtagaaatgggtgatgagtatgctgtagaaagagctgtcacacaccttaataatgtcaaattatttgggaaaagacttaatgtttgcgtgtctaaacaacattcagttgttccaagtcaaatatttgagctggaggatggtaccagcagctacaaagattttgcaatgagcaaaaataatcgctttacaagtgctggccaagcatctaagaatataatccagccaccctcctgtgttttgcattattataatgttccattgtgtgtcacagaagagaccttcacaaagttgtgtaatgaccatgaagttcttacattcatcaaatataaagtgtttgatgcaaaaccttcagccaaaacactttctgggctattagaatgggagtgcaaaactgatgcagtagaagcccttacggcactgaatcactatcagataagagtgccgaatggttccaatccctatacattgaagctttgcttttctacatcatcccatttataagaagagaagagcatgttagaatttatgttcacctttattacaatttcaaagctacacttcattaaaaaaaaatctaaaatggttgatctcatgttgccttgcttactttaagatcctgttctgtaataaacatattttgccttgagtaaaaaaaaaaaaaaaaaaaaaaa

SEQ ID NO: 4182 - protein, 542 aa, Homo sapien
MSSSSSSPRETYEEDREYESQAKRLKTEEGEIDYSAEEGENRREATPRGGGDGGGGGRSFSQPEAGGSHHKVSVSPVVHVRGLCESVVEADLVEALEKFGTICYVMMMPFKRQALVEFENIDSAKECVTFAADEPVYIAGQQAFFNYSTSKRITRPGNTDDPSGGNKVLLLSIQNPLYPITVDVLYTVCNPVGKVQRIVIFKRNGIQAMVEFESVLCAQKAKAALNGADIYAGCCTLKIEYARPTRLNVIRNDNDSWDYTKPYLGRRDRGKGRQRQAILGEHPSSFRHDGYGSHGPLLPLPSRYRMGSRDTPELVAYPLPQASSSYMHGGNPSGSVVMVSGLHQLKMNCSRVFNLFCLYGNIEKVKFMKTIPGTALVEMGDEYAVERAVTHLNNVKLFGKRLNVCVSKQHSVVPSQIFELEDGTSSYKDFAMSKNNRFTSAGQASKNIIQPPSCVLHYYNVPLCVTEETFTKLCNDHEVLTFIKYKVFDAKPSAKTLSGLLEWECKTDAVEALTALNHYQIRVPNGSNPYTLKLCFSTSSHL

SEQ ID NO: 4183 - DNA, 2021 bp, Homo sapien
agtgttccagggcggcggtgggtgtccgcttctctctgctcttcgactgcaccgcactcgcgcgtgaccctgactccccctagtcagctcagcggtgctgccatggcgtggcggcggcgcgaagccagcgtcggggctcgcggcgtgttggctctggcgttgctcgccctggccctgtgcgtgcccggggcccggggccgggctctcgagtggttctcggccgtggtaaacatcgagtacgtggacccgcagaccaacctgacggtgtggagcgtctcggagagtggccgcttcggcgacagctcgcccaaggagggcgcgcatggcctggtgggcgtcccgtgggcgcccggcggagacctcgagggctgcgcgcccgacacgcgcttcttcgtgcccgagcccggcggccgaggggccgcgccctgggtcgccctggtggctcgtgggggctgcaccttcaaggacaaggtgctggtggcggcgcggaggaacgcctcggccgtcgtcctctacaatgaggagcgctacgggaacatcaccttgcccatgtctcacgcgggaacaggaaatatagtggtcattatgattagctatccaaaaggaagagaaattttggagctggtgcaaaaaggaattccagtaacgatgaccataggggttggcacccggcatgtacaggagttcatcagcggtcagtctgtggtgtttgtggccattgccttcatcaccatgatgattatctcgttagcctggctaatattttactatatacagcgtttcctatatactggctctcagattggaagtcagagccatagaaaagaaactaagaaagttattggccagcttctacttcatactgtaaagcatggagaaaagggaattgatgttgatgctgaaaattgtgcagtgtgtattgaaaatttcaaagtaaaggatattattagaattctgccatgcaagcatatttttcatagaatatgcattgacccatggcttttggatcaccgaacatgtccaatgtgtaaacttgatgtcatcaaagccctaggatattggggagagcctggggatgtacaggagatgcctgctccagaatctcctcctggaagggatccagctgcaaatttgagtctagctttaccagatgatgacggaagtgatgagagcagtccaccatcagcctcccctgctgaatctgagccacagtgtgatcccagctttaaaggagatgcaggagaaaatacggcattgctagaagccggcaggagtgactctcggcatggaggacccatctcctagcacacgtgcccactgaagtggcaccaacagaagtttggcttgaactaaaggacattttattttttttactttagcacataatttgtatatttgaaaataatgtatattattttacctattagattctgatttgatatacaaaggactaagatattttcttcttgaagagacttttcgattagtcctcatatatttatctactaaaatagagtgtttaccatgaacagtgtgttgcttcagactattacaaagacaactggggcaggtactctaatataaaggacaggtggtgtttctaaataattggctgctatggttctgtaaaaaccagttaattctatttttcaaggtttttggcaaagcacatcgatgttagactagttgaagtggaattgtataattcaattcgataattgatctcatgggctttccctggaggaaaggttttttttgttgttttttttttaagaacttgaaacttgtaaactgagatgtctgtagcttttttgcccatctgtagtgtatgtgaagatttcaaaacctgagagcactttttctttgtttagaattatgagaaaggcactagatgactttaggatttgcatttttccctttattgcctcatttcttgtgacgccttgttggggagggaaatctgtttattttttcctacaaataaaaagctaagattctatatcgcaaaaaaaaaaaaaaaa

SEQ ID NO: 4184 - protein, 400 aa, Homo sapien
MAWRRREASVGARGVLALALLALALCVPGARGRALEWFSAVVNIEYVDPQTNLTVWSVSESGRFGDSSPKEGAHGLVGVPWAPGGDLEGCAPDTRFFVPEPGGRGAAPWVALVARGGCTFKDKVLVAARRNASAVVLYNEERYGNITLPMSHAGTGNIVVIMISYPKGREILELVQKGIPVTMTIGVGTRHVQEFISGQSVVFVAIAFITMMIISLAWLIFYYIQRFLYTGSQIGSQSHRKETKKVIGQLLLHTVKHGEKGIDVDAENCAVCIENFKVKDIIRILPCKHIFHRICIDPWLLDHRTCPMCKLDVIKALGYWGEPGDVQEMPAPESPPGRDPAANLSLALPDDDGSDESSPPSASPAESEPQCDPSFKGDAGENTALLEAGRSDSRHGGPIS

SEQ ID NO: 4185 - DNA, 2288 bp, Homo sapien
aacagagttcagaccttgccgtcgcgcgcgcgttaagtaccaggagaactacatagcccagcatgcaacagtctcaactttttcacggacactacatttcccagaaggcagttcgcaccgcagtgttttctgggatgggaaccacgccgcttcccagtctctgtgcgaggcgtgaagcgcggacctttcaacaagggctttattaattctcacgctgcggccctggaaagcgatggaggtggcggctaattgctccctacgggtgaagagacctctgttggatccccgcttcgagggttacaagctctctcttgagccgctgccttgttaccagctggagcttgacgcagctgtggcagaggtaaaacttcgagatgatcaatatacactggaacacatgcatgcttttggaatgtataattacctgcactgtgattcatggtatcaagacagtgtctactatattgatacccttggaagaattatgaatttaacagtaatgctggacactgccttaggaaaaccacgagaggtgtttcgacttcctacagatttgacagcatgtgacaaccgtctttgtgcatctatccatttctcatcttctacctgggttaccttgtcagatggaactggaagattgtatgtcattggaacaggtgaacgtggaaatagcgcttctgaaaaatgggagattatgtttaatgaagaacttggggatccttttattataattcacagtatctcactgctaaatgctgaagaacattctatagctaccctacttcttcgaatagagaaagaggaattggatatgaaaggaagtggtttctatgtttctctggagtgggtcactatcagtaagaaaaatcaagataataaaaaatatgaaattattaagcgtgatattctccgtggaaagtcagtgccacattatgctgctattgagcctgatggaaatggtctaatgattgtatcctacaagtctttcacatttgttcaggctggtcaagatcttgaagaaaatatggatgaagacgtatcagagaaaatcaaagaacctctgtattactggcaacagactgaagatgatttgacagtaaccatacggcttccagaagacagtactaaggaggacattcaaatacagtttttgcctgatcacatcaacattgtactgaaggatcaccagtttttagaaggaaaactctattcatctattgatcatgaaagcagtacatggataattaaagagagtaatagcttggagatttccttgattaagaagaatgaaggactgacctggccagagctagtaattggagataaacaaggggaacttataagagattcagcccagtgtgctgcaatagctgaacgtttgatgcatttgacctctgaagaactgaatccaaatccagataaagaaaaaccaccttgcaatgctcaagagttagaagaatgtgatattttctttgaagagagctccagtttatgcagatttgatggcaatacattaaaaactactcatgtggtgaatcttggaagcaaccagtaccttttctctgtcatagtggatcctaaagaaatgccctgcttctgtttgcgccatgatgttgatgccctactctggcaaccacactccagcaaacaagatgatatgtgggagcacatcgcaactttcaatgctttaggctatgtccaagcatcaaagagagacaaaaaattttttgcctgtgctccaaattactcgtatgcagccctttgtgagtgccttcgtcgagtattcatctatcgtcagcctgctcccatgtccactgtactttacaacagaaaggaaggcaggcaagtaggacaggttgctaagcagcaagtagcaagcctagaaaccaatgatcctattttaggatttcaggcaacaaatgagagattatttgttcttactaccaaaaacctctttttaataaaagtaaatacagagaattaattattctaacatattggcctctttgtactggaaaagtattcagtggtacctggaggtctggacagttatactgtaacctcttaagttttaatgtgctaaatatatcttgtatgattttttattttttaataacattggaaatatattcaagagattatgattctgtaaagctgtggaatgaagctgcagatttagagaacattggcttctgaaaaaaaaaagagtgaagatagtactagcaagtatacttattttttaaaacaggctagaatctcatgttttatatgaaagatgtacaattcag

SEQ ID NO: 4186 - protein, 583 aa, Homo sapien
MEVAANCSLRVKRPLLDPRFEGYKLSLEPLPCYQLELDAAVAEVKLRDDQYTLEHMHAFGMYNYLHCDSWYQDSVYYIDTLGRIMNLTVMLDTALGKPREVFRLPTDLTACDNRLCASIHFSSSTWVTLSDGTGRLYVIGTGERGNSASEKWEIMFNEELGDPFIIIHSISLLNAEEHSIATLLLRIEKEELDMKGSGFYVSLEWVTISKKNQDNKKYEIIKRDILRGKSVPHYAAIEPDGNGLMIVSYKSFTFVQAGQDLEENMDEDVSEKIKEPLYYWQQTEDDLTVTIRLPEDSTKEDIQIQFLPDHINIVLKDHQFLEGKLYSSIDHESSTWIIKESNSLEISLIKKNEGLTWPELVIGDKQGELIRDSAQCAAIAERLMHLTSEELNPNPDKEKPPCNAQELEECDIFFEESSSLCRFDGNTLKTTHVVNLGSNQYLFSVIVDPKEMPCFCLRHDVDALLWQPHSSKQDDMWEHIATFNALGYVQASKRDKKFFACAPNYSYAALCECLRRVFIYRQPAPMSTVLYNRKEGRQVGQVAKQQVASLETNDPILGFQATNERLFVLTTKNLFLIKVNTEN

SEQ ID NO: 4187 - DNA, 6055 bp, Homo sapien
gggtggcggggggttgcaagtgggaagcctgctgttcagctgcccgggctctccgcctccccccaccctgtattgaggctgggtctggggaacctgtgctcagcattccaccccctggagcttgggcttggtcttccctgcgggtccctgcgctgacattcaggcggggagccaggaggcctgggcgcctccagagcccgccgggggagccgggcgagggttctgggctctgacggcggggtcgcagggtcgcccgcctcctggacacgtctgtaggcctagggaagcctgccggcccgggaggtacagagtaggagaagccagatcccagggcggacaacgagaagtcgtcaggctaagaaatggcatttcaaaaggcagtgaaagggacgattcttgttggaggaggtgctcttgcaactgttttaggactttctcagtttgctcattacagaaggaaacaaatgaacctggcctatgttaaagcagcagactgcatttcagaaccagttaacagggagcctccttccagagaagctcagctactgactttgcaaaacacatctgaatttgatatccttgttattggaggaggagcaacaggaagtggctgtgcgctagatgctgtcaccagaggactaaaaacagcccttgtagaaagagatgatttctcatcagggaccagcagcagaagcactaaattgatccatggtggtgtgagatatctgcagaaggccatcatgaagttggatattgagcagtataggatggtaaaagaagcccttcatgagcgtgccaacctgctagaaattgctccccatttatcagctccattgcctataatgcttccagtttacaagtggtggcagttaccttactactgggtaggaatcaagctgtatgatttggttgcaggaagcaattgcctaaaaagcagttatgtcctcagcaaatcaagagcccttgaacatttcccaatgctccagaaggacaaactggtaggagcaattgtctactatgacggacaacataacgatgcacggatgaaccttgccattgctctgactgctgccaggtatggggctgccacagccaattacatggaggtagtgagcttgctcaagaagacagacccccagacagggaaagtgcatgtgagcggcgcacggtgcaaggatgtcctcacagggcaggaatttgacgtgagagccaaatgtgttatcaatgccacgggacctttcacggactctgtgcgcaaaatggatgataaagacgcagcagctatctgccagccaagtgctggtgtccatattgtgatgcctggttattacagcccagagagcatgggacttcttgacccagcgaccagtgatgggcgagttattttcttcttaccctggcaaaagatgacgatcgctggcactactgatactccaactgatgttacacaccatccaattccttcagaagaagatatcaacttcattttgaatgaagtgcgtaattacctgagttgtgatgttgaagtgagaagaggggatgtcctggcagcatggagtggaatccgtcctcttgttacagaccccaaatctgcagatactcagtctatctcccgaaatcatgttgttgatatcagtgagagtggccttattactatagcaggtggaaagtggacaacttatcggtctatggcagaagataccataaatgctgctgtcaaaactcataatttaaaagcaggaccaagtagaacagttgggcttttccttcaagggggtaaagattggagccccacactctacattaggcttgtgcaggattatggacttgaaagcgaggtggcacagcatcttgccgccacctatggtgataaggcctttgaggtggccaaaatggcaagtgtgactggcaaaaggtggcctattgttggagtacgtcttgtgtcagaatttccatatattgaagcagaggtgaaatatgggattaaggagtatgcctgcactgctgtggatatgatttcacgtcgtactcgcctggcctttctaaatgtccaggcagcagaggaagccctacccaggattgttgaactgatgggcagggaactgaattgggatgattataagaagcaggaacaacttgaaacagccaggaagtttctatattatgaaatgggctataaatctcgatcagaacagttaacagatcgctctgaaattagcctactgccttcagacattgacaggtataagaagagatttcataagtttgatgcagaccagaaaggctttattaccattgttgatgttcagcgtgtattagagagtatcaatgtccaaatggatgaaaatacactccatgaaattctaaatgaagttgatttgaataaaaatggacaggttgaactcaatgaatttttgcagctgatgagtgctattcaaaaaggaagggtatctggaagccggcttgctatactaatgaaaactgcagaagagaacctcgacagaagagttccaattccagtggaccgtagttgtggaggattgtgagtctgggcagtaaatccacagccaacaaacatagaaacgacaaatcaccatgtaacaaccagagatgactgaaaccactctgaaataatgaatgtggatagctgccttttttaacactagaaaacattccaaaactttaaggtgttggtgtatttgccagctttatttgctgtactttatttgtatttgccattcagtctagcttttaagtatatttttttctttttctcattttcaatgcacattagttttgcatctgttttgtgacctgttagatgtgacacattctctttttgtttattcccttattctaaatgagttctaaaaacataatattttggcaaaaattgaaaaaagctggagacattttgtgacatgcatacagatagcatgtgttattaaaaagagttgcctattgaaatgatcgtgtttctggagaaattaagcttatagacagcatgtgttattaaaaagagttacctattgaaatgatagtgtttctggagatttctcagccccatcttcctccagcttgtctaccttcctcatgcaaacaatattccacatttttatatctagagcatgactggctaactggagagggaaggaaaagtttagatctggttactggagcaagtctcaaagagaaactctgaaagcttccagaatcacaggtataagataaggatagcattgacatttgctgggagttacagtgatagtttcatctcagcagttcatttttttcttcagtcactgctggttttctttgactattatagttgccaggaagatccttgctcttcttactttaaaaccagcatttaagtggcaatttggatgtaataggatgagaccaaatttatctaattattacagtagtaatacatttaagagttaaaaatgtgtttttatatatccacatatgataacaaaagattcaattcccaagcctaaattttgaagcatgtggtattgtcaaatctagcttaccatcttttttgggggtacttgcaaccatagtaaaggaagatggaatagactttagttaactttaattataattatatgttaaataaggcacataaccagtttccaaggtcatcatggttgcttaaagtctttccccttctgtactccatggaaatattctcagtaaaccaaaaacaaaaatggaaaaataatcaccaacccccatcccgacacacacacacagtccaaagcaaaagtcagtgtgtattgaatttaacaagtaatgcagtttgggatgcttttgctacattttggtggcattttaactagttatctgaatatttattaatcgtacttcctcttgtaaagttaactacttacttttttgttgttgtttttttaacatcaggttctgtatctaataggagatgtaacactttatttcatggcaggtttttattgcagagacttgaagtcttagttttttaaactggcacataaaacactttttgctgttatttttatttatgtcaatactgcagagtatctttatgccttattcaagtggattctgagcctgtatgtcacaatgtaaacactggaggttcactcacctacgcactcacccaccacctctgaaagaaacagaaactgcagagaaagacagcatcttagctcattttgtttttaaatgaggttttagacgcttgccacttcctaagggaaatcctaaaacagagcaagtgatgctcccaggtatcactgtgaacttttttctttcaaagtgtgaatttttacactggctttttcatttttttaaagtaattgaagcttgtggctttacaacttagtgttttttgctatccagataacaagtttcattgtttagaacccagtgacacttaataggtagataaattgtcctttaaaatatcccagatgatatacacaatatggtacatttgtgctctctctctctgtttttctctctttctctttctagttagatcaagataacgatgacttgtaccctccctgattctgttacagtagggcccgggcagatctgtgtttgttaaacaggccttgtttgtgcatgctttgctatgaatgaagttcctttaaggacaaagaaaagcacacttttcttcttttgagcatatctgcttttactttaaatctgctaatttctaaaatgtagagtccttcaccaatcccagagactcaatttggaaatgaactgatttcaagccgttactgtcaataaagcaccccagcattttgtataagctcttaattaaacctgtacagcttctttacctgatttaagaaagggagacaagcaataggggggaataagcttcttcaaaattcattccaagcacaaaagaaattttttccctttgcatataaacttgacatcagttgattctgttggggtcggggtgggtatgcagggattgccttttattatcaagtgatttatttcaagagcctttgaggggattcaggtgaaggaacccccatctgtgctggagagttggatactcctttaaatagcccccaccacagtcataacaataatgataatgctggattatttgttaagccaaggttgtctgcctcatatccatcatgctgtttgcaatattcttgctttcaatcaatttatactgagtgtaactttaggatttctgctattaaatgcatgctctctatcctgcttcagtttctggctttgctttgtctgtttcaaaatatgtagcttcctcttttgtacaacaaaaaactcattctcacttttactaaatatactgtaggagtcatcattgatgttatttttctcttatgtatctgtaaagatttttggcatatgaatgtaatattaaagtcaatgatgctataacttgcgatgtttgcatcatgtcaacctttttgaaggagtgaaaaagccctactatgtttttaaatagcaagtgtaagctcagtgctagagtggatatacacaccgcatgttttcatatgtggcacttttatgtatcatgttgggttattgttctagactggactgttaaatactatgtttgaggctgggttgtcatttttataactgtcttggtgttttatggccattatttattacttttgatacacagaatgagctgcatgcatttatagagcaataagaggatgtatttaatgtgccttgtttttaactgaataagaactggaagcatgaatcaataaaactgattaaaatggtctatttgctagcattttgatgttacttgcagtcagataactttgattactgttgaagtttaaaaaaagtttgaaaatatttttacaaactgtgtttttgatgacacaaaagtgaaatatctacagagatagatgtaattttataagactgccagaattatttgtattaatttgttgctgtagcctttagggcatgacttctgtatttgtgcaatcctattctacaattacattcatcctattacaactcaaagaaaaacaaaaagtcgacgcgg

SEQ ID NO: 4188 - protein, 727 aa, Homo sapien
MAFQKAVKGTILVGGGALATVLGLSQFAHYRRKQMNLAYVKAADCISEPVNREPPSREAQLLTLQNTSEFDILVIGGGATGSGCALDAVTRGLKTALVERDDFSSGTSSRSTKLIHGGVRYLQKAIMKLDIEQYRMVKEALHERANLLEIAPHLSAPLPIMLPVYKWWQLPYYWVGIKLYDLVAGSNCLKSSYVLSKSRALEHFPMLQKDKLVGAIVYYDGQHNDARMNLAIALTAARYGAATANYMEVVSLLKKTDPQTGKVHVSGARCKDVLTGQEFDVRAKCVINATGPFTDSVRKMDDKDAAAICQPSAGVHIVMPGYYSPESMGLLDPATSDGRVIFFLPWQKMTIAGTTDTPTDVTHHPIPSEEDINFILNEVRNYLSCDVEVRRGDVLAAWSGIRPLVTDPKSADTQSISRNHVVDISESGLITIAGGKWTTYRSMAEDTINAAVKTHNLKAGPSRTVGLFLQGGKDWSPTLYIRLVQDYGLESEVAQHLAATYGDKAFEVAKMASVTGKRWPIVGVRLVSEFPYIEAEVKYGIKEYACTAVDMISRRTRLAFLNVQAAEEALPRIVELMGRELNWDDYKKQEQLETARKFLYYEMGYKSRSEQLTDRSEISLLPSDIDRYKKRFHKFDADQKGFITIVDVQRVLESINVQMDENTLHEILNEVDLNKNGQVELNEFLQLMSAIQKGRVSGSRLAILMKTAEENLDRRVPIPVDRSCGGL

SEQ ID NO: 4189 - DNA, 1393 bp, Homo sapien
gggagtccctggtgggaaaagtccacaatttcccattgatagctttttactgttgtgaaaaagggaagcgtcagccacacaaaagcctgcatgaccgctgcttcggagaagctctcgaccctaactgcagtcactgttacttggatcagatcaagcgcagtgactttttgggattcagtggttattctccacacttcgtagccacttcgaccaactctgagcacaaaatgcagccatcctctatgcagcaagccctgcccagtcagtggccctactggacagatccaaggccagccctggttccctgctgcagccaccgtcctgacgttcatcggagcaggccggggcctggccttcccggcacaagtggctgttctgacaggcccccagtttgtcccatctgaactgctgggaggtttccgggtggccagaggagcaaagctgccttccaagtgcctgtctgtgcctgggagaacagagcaggagcgtcgtgcggtccaccgcgcagtgcatggcgattccaagcgctgaacaactcccctggacccttgggcctgcatctgactcccagctgcagagtcagaagctgagtccaggcaactgcttggccactcccgatcgctcctccctggacacccggttaccaaagtcagcaaagaagatgcggtaatcgccgcctgatctccacatggtgaacacaacactcccaccaacacctccttgactggtcggtcttcagcaccgggggtgggcaggcaggtgttctgtgttgacgagaattgcacaggctaaacacaaacacggaaccagagtgagaacacctcactcacggcagcccaggctgctccctaccaggtgacggagcgcgccggggctgtgggtgccaggggctgagtgctagggactcgtcatgagtggggatccccacgttcctgtcactgctgtcaaacagaaggtaaacagtcatatgaatgtatttccttaggaaaacttgtaaaaacttttattaggatatctatttaatactgaactttggcctactttgtgatagactataaacaaattgaggaaatcactatttctcacttctgtattttctcaaaaataattttgttacagagttcaatatactgtgtaccattgatcttctattgtgaaagcaaagaatttcatcaaaatattttaaattatgagtgaaaattgtgtatgttaattttgcagctataatattaatcaaattttgtgtaattctaatcacaaaatgacgtgccttaagtgcccctccagctgtgggttggcagtgtccagacagggagggcccatcaccgaaatcctgaacgattactagaccaattctattaaaaacatttcaaggcaaaaaaaaaaaaaaaaa

SEQ ID NO: 4190 - protein, 133 aa, Homo sapien [sequence omitted]

SEQ ID NO: 4191 - DNA, 1610 bp, Homo sapien
atttttgaaaattaattgggaaggtactggttttaagtgtagttgccgacgcaatggcagcctttgcagtggaacctcaggggcccgcgttaggatctgaaccaatgatgctgggttcacccacatctccaaagccaggagttaatgcccagttcttacctggatttttaatgggggatttgccagctccggtgactccacaacctcgatcaattagtggcccttcagtaggagtaatggaaatgagatcacctttacttgcaggtgggtcaccaccacaaccagttgtaccagctcataaagataaaagtggcgctccaccagttagaagtatatatgatgacatttctagcccaggacttggatcaacacctttaacttcaagaagacagccaaacatttcagtaatgcagagtcctcttgttggagttacatctactcctggaacagggcaaagtatgtttagtccagcaagtatcggtcagccacgaaagacgacattatctcctgcccagttggatcctttttatactcaaggagattctttgacttcagaagatcacctcgatgactcttgggtgactgtatttgggtttcctcaagcatctgcttcctacatattactacaatttgcacagtatgggaatatcttaaaacatgtgatgtctaatacaggaaattggatgcatattcgttatcaatctaaactgcaggctcggaaagccttaagcaaagatgggaggatttttggagaatccatcatgattggtgtaaaaccatgtattgacaaaagtgttatggaaagcagtgacagatgtgctttatcatctccatctttagcctttacaccaccaatcaaaactctaggtacaccaacacaacctggaagtactcctaggatttctaccatgagacctcttgctacagcatacaaagcctctactagtgattatcaggttatttctgacagacaaacgccaaaaaaaagatgaaagtcttgtatccaaagcaatggagtacatgtttggctggtagtagaacaccaagaaggaggttgctacactaaaacagagttagcagagtgctgctggttccttcggttagttatataactgttcctgcagtattggatagctatctcatacttcttttagaaagaagcctttttcattaaggatacaacctatttgtagctcgcactttaaaagatgcttgagatacattttaaagaaaactaaaaatccctgtaaataggattttgtgctttctgtaacagtgcatgcttcagcacagaaaactcagcattgattattgtaaattaaataactgaaattgtggtgagacgtcatagtcttcatgagaacgtgggggtgaatttcatgaaggggaactatagttatttctaccgacacaaatattataattagcaatttgaattatggtcttttaatttagatagtatttaatattttaattatccttgtttgtatatgtcctgtcacagagtgtcctcttggtgtattctaaaacgagcattcttttaaaaaacctaaagtttcttgataataaacattgtcaatgataaaaaaaaaaaaaaaaaaaaaaaaaaa

SEQ ID NO: 4192 - protein, 329 aa, Homo sapien
IFKLIGKVLVLSVVADAMAAFAVEPQGPALGSEPMMLGSPTSPKPGVNAQFLPGFLMGDLPAPVTPQPRSISGPSVGVMEMRSPLLAGGSPPQPVVPAHKDKSGAPPVRSIYDDISSPGLGSTPLTSRRQPNISVMQSPLVGVTSTPGTGQSMFSPASIGQPRKTTLSPAQLDPFYTQGDSLTSEDHLDDSWVTVFGFPQASASYILLQFAQYGNILKHVMSNTGNWMHIRYQSKLQARKALSKDGRIFGESIMIGVKPCIDKSVMESSDRCALSSPSLAFTPPIKTLGTPTQPGSTPRISTMRPLATAYKASTSDYQVISDRQTPKKR

SEQ ID NO: 4193 - DNA, 5954 bp, Homo sapien; identical to SEQ ID NO: 2789
  Unsure 3543-3566, 5007-5030: Unknown base

SEQ ID NO: 4194 - protein, 1093 aa, Homo sapien
  Unsure 3543-3566, 5007-5030: Unknown amino acid
AAGRRAREGRQGQEPEGPGRGAACSCGLPRRVRLSARGPAMAGMDSGNLKTARLWRDAALRARKLRSNLRQLTLTAAGACPGAGADALESPASPQLVLPANLGDIEALNLGNNGLEEVPEGLGSALGSLRVLVLRRNRFARLPPAVAELGHHLTELDVSHNRLTALGAEVVSALRELRKLNLSHNQLPALPAQLGALAHLEELDVSFNRLAHLPDSLSCLSRLRTLDVDHNQLTAFPRQLLQLVALEELDVSSNRLRGLPEDISALRALKILWLSGAELGTLPAGFCELASLESLMLDNNGLQALPAQFSCLQRLKMLNLSSNLFEEFPAALLPLAGLEELYLSSQPAHLGAIRLSRAWAGFLTLWLDNNRIRYLPDSIVELTGLEELVLQGNQIAVLPDHFGQLSRVGLWKIKDNPLIQPPYEVCMKGIPYIAAYQKELAHSQPAVQPRLKLLLMGHKAAGKTLLRHCLTEERVEGCPGGGDKEKCYPPSPPPVSKGIEVTSWTADASRGLRFIVYDLAGDESYEVIQPFFLSPGALYVLVVNLATYEPRHFPTTVGSFLHRVGARVPHAVVCIVGTHADLCGERELEEKCLDIHRQIALQEKHDAEGLSRLAKVVDEALARDFELRSASPHAAYYGVSDKNLRRRKAHFQYLLNHRLQILSPVLPVSCRDPRHLRRLRDKLLSVAEHREIFPNLHRVLPRSWQVLEELHFQPPQAQRLWLSWWDSARLGLQAGLTEDRLQSALSYLHESGKLLYFEDSPALKEHVFHNLTRLIDILNVFFQRDPSLLLHKLLLGTSGEGKAEGESSPPMARSTPSQELLRATQLHQYVEGFLLHGLLPAHVIRLLLKPHVQAQQDLQLLLELLEKMGLCYCLNKPKGKPLNGSTAWYKFPCYVQNEVPHAEAWINGTNLAGQSFVAEQLQIEYSFPFTFPPGLFARYSVQINSHVVHRSDGKFQIFAYRGKVPVVVSYRPARGVLQPDTLSIASHASLPNIWTAWQAITPLVEELNVLLQEWPGLHYTVHILCSKCLKRGSPNPHAFPGELLSQPRPEGVAEIICPKNGSERVNVALVYPPTPTVISPCSKKNVGEKHRNQ

SEQ ID NO: 4195 - DNA, 4215 bp, Homo sapien; identical to SEQ ID NO: 3543

SEQ ID NO: 4196 - protein, 910 aa, Homo sapien; identical to SEQ ID NO: 3544

SEQ ID NO: 4197 - DNA, 4451 bp, Homo sapien
caaggagaaactatacaggaacagacaaatttctcagaggagtagaaaagaatgtgatggttgttagctgtgtttatccttcttcagagaaaaacaattccaatagtttaaatcgaatgaatggtgttatgtttcctggaaattcaccaagctatactgagaggtctaatataaatgggcctgggacacccaggccacttaatcgaccaaaggtttctttgtcagcccccatgacaacaaatgggttgcctgagagcacagacagcaaagaggcaaatttgcagcaaaatgaggagaaaaatcacagcgactcttccacctctgaatcagaagtttcctcagtgagccctttgaaaaataaacatccagatgaagatgctgtggaagctgaggggcatgaggtaaaaagactcaggtttgacaaagaaggtgaagtcagagaaacagccagtcaaacgacttccagcgaaatttcttcagttatggtaggagaaacagaagcatcatcttcatctcaggataaagacaaagatagccgttgtacccggcagcactgtacagaagaggatgaagaagaggatgaagaggaagaagaagagtcttttatgacatcaagagaaatgatcccagaaagaaaaaatcaagaaaaagaatctgatgatgccttaactgtgaatgaagagacttctgaggaaaataatcaaatggaggaatctgatgtgtctcaagctgagaaagatttgctacattctgaaggtagtgaaaacgagggccctgtaagtagtagttcttctgactgccgtgaaacagaagaattagtaggatccaattccagtaaaactggagagattctttcagaatcatccatggaaaatgatgacgaagccacagaagtcaccgatgaaccaatggaacaagactaactatttagaaacatttagatgcagtattttacatacagttctggttttaacactgtataaaacttttgtgtaataaaatggacctttagttttacaagagaagcaggttgtaaaataaagtactttatggataattcctgaaagagttgtacatgtaagaactgtgaatatcagctcctctgggtcctgcttaccttaccgctgacttttctttctttctttttttggtctgggcaaatcagtggtttgtgtatagatttttttttttttttttaatttaggattgaagtttttaaactggaaggtaattacaattttgaaaagttttttgagattatcacatttagtttatacatatgcaagaagctttttgtcttgtctctttctgatagctctagcagttttcatattttggtcatagtttcaacattttaacatgtgaattatagggtttcatgctggtttccagattttattgtttggctacgtacaatggaactttaagtcatatatacatacatacatatatatatatatatatatatatatatatatataattctaaggggggaaatgtaatatttttctgtttctataagagatgaatacagtggatactttttctattggtaatgattgagttcacctctttcagaagacattttctttctcttctgagtaattgaaataaaatctggcccttgtgaaaccctggaaatcttaagtctgttgaaataccaggttaaacacattccaagagatctgttcaaactcaaattcttttgtatacttctgaggtgcctgagaaaaagacttcattatttatgagaaaatatgctttatcttggaaattgtgttcaaatgttagcttactattttgtagaatgaatgtttatgaagctgatatgagaccatctcagaagaaccaagcaggttccttgaccttttgcttgcttttctgaacattgtgaatattacacatgtctttctaaattattctagggtatgcaaatgtcaatggtatgaaacaccactgtactggaagaattaatatattactttagtatgtacctgagctaaatgactgaagctttaggggtgcatagaaaccaccataatttgtatgacattttgaagtgaattaaatatttttgaacatgcttcttcgacagccagtgttatatttttcagatcaacacaaagcacaatgattactcgaaattcagtattttcaaatttacatatttaaagtcatgcaagctgtaacttccctgtcaaaattactggctgccaaatttatacctgtttcttcagctgtaccttttgatatttaaagtttttaaatttctgtaaagtagattttgtagaatgtaatgtgttcactgcctttgtgaagcggtatataattgtataatttctgtgtgtaaactgaatgcttgggctttcaatacagtattcatataaagcaataaatattaatgttatgaaatatttgactacatttttatcaaaatatgaaagaatccccccttttttagtttcagatacctgaactacacagatgagcttctaaaactgatgcaaacagtttctgacactgtataatatgcttttgggtgatttggggggcaaccacaagttttgcgttttgactacttaaatcatcatggctataaataccaaaacgatttggatccatttatgtttgtaggataatatactactgactgacttgactgtcaggttcacaacagctagatgatatatttatgactatgtctaatagttgaaataaaatctgaatattgatttactatacccaagaggggagaaaaattaaccattgtaaatttttaaaaattttttcaaaaatgttaaaatgaggcaaatttaagtttacaaattttgaaattttcttttgaatatttatgaaattgtcagtaaacttacctaagatcctgtgaccttttgatattttttattttaattgtagtgccatggaccatttgtaaacaaattgatttacttttgttggttgtaagttgaagatttagcattatgactttgaggtctgtggttttatttgtaaacttgcaattgctatatttgcaagggcaaatgtatttctttattaaataaagtacaataatggtgaatgtaccaaaatgacatcacttaactctatgagagatctgcattttaatctatagtttaatagttttaatatttattagatattcatatgttgatcatagatcaaacttgttgctgtttatacagataattgtagaatgctcatggaatatctttagggtaggtggaatacttctgtagttaaattgggaaaccttgttcagctggttttagatattgatggccatttggaagtaaatttccgcaggtattcataggtgcacttaacacagactttgcttaatgaaaatgtcagttctaatagtaactgattcacttctgaacagaagtgattttaggcatatttcttaacatatatcaagcaaagtcctgttaaaagatctaaatgaagaatggagacctcagtgattaaagatattttgtttctgaccttgagcagattgcttacctgttctctagactataacccaacatgtaaaaaaaatttgaagatggtgatgaggaaagtgagatatatatatatatatgtattatgtttctagcacttttcccttttaaaaagtgaaaatatccttgtacatttttgaaaaatatattttcagttctgaaaaatgtagcagaagtagtgaaaatgtcatattttaaatgttgattattagataaatttaacctgcttagggtttattgtaactacacctttcagacgtgtgttttggagtagtggaattgccagccaggccctgtggcttggaaaggcatcccagaaatcctcggccagaaggtgtggcttgttaaagcattgagattcagagtattttgttttgccggtgtagataggcatgtatttatgcatttttgcatttgtaaaatcaacttttcaaataatgtaaatgtaatatactagtttacttaaaggtacttgggcagaatctaaagctgctacaatgtttgattatgaaaaaaatgtaacatggtaaggatgaaaatgcaacttacaaaaccaaaggaattaaaaattttcggtagtgtttcaaattgtcttctgaacaggaatttaacattggttttgatgaagtgagggtcagttctcaagatttgtgctaatcataaaatgaatgaatgcaaaacaccttgtaatttcatatggaattataaaaattaggtttgctgggttttggcctaataagagtgctagtatgtattggttagaatacatcttactatttcacattttaaaaatcagtacactcttcaggattttcttttatttcaacttggagcctagattactttgccaaatgtattattttcataatgcaataaaatataaattagaataaaaaaaaaaaaaaaaaaaaaaaaaaaaaaaaaaaa

SEQ ID NO: 4198 - protein, 306 aa, Homo sapien
RRNYTGTDKFLRGVEKNVMVVSCVYPSSEKNNSNSLNRMNGVMFPGNSPSYTERSNINGPGTPRPLNRPKVSLSAPMTTNGLPESTDSKEANLQQNEEKNHSDSSTSESEVSSVSPLKNKHPDEDAVEAEGHEVKRLRFDKEGEVRETASQTTSSEISSVMVGETEASSSSQDKDKDSRCTRQHCTEEDEEEDEEEEEESFMTSREMIPERKNQEKESDDALTVNEETSEENNQMEESDVSQAEKDLLHSEGSENEGPVSSSSSDCRETEELVGSNSSKTGEILSESSMENDDEATEVTDEPMEQD

SEQ ID NO: 4199 - DNA, 2749 bp, Homo sapien
gccaaagctgtaattgaacttcttgaaaaatcaggtgtcaacctagatggaaagaagattttggtagtgggggcccatgggtctttggaagctgctctacaatgcctgttccagagaaaagggtccatgacaatgagcatccagtggaaaacacgccagcttcaaagcaagcttcacgaggctgacattgtggtcctaggctcacctaagccagaagagattccccttacttggatacaaccaggaactactgttctcaactgctcccatgacttcctgtcagggaaggttgggtgtggctctccaagaatacattttggtggactcattgaggaagatgatgtgattctccttgctgcagctctgcgaattcagaacatggtcagtagtggaaggagatggcttcgtgaacagcagcacaggcggtggagacttcactgcttgaaacttcagcctctctcccctgtgccaagtgacattgagatttcaagaggacaaactccaaaagctgtggatgtccttgccaaggagattggattgcttgcagatgaaattgaaatctatggcaaaagcaaagccaaagtacgtttgtccgtgctagaaaggttaaaggatcaagcagatggaaaatacgtcttagttgctgggatcacacccacccctcttggagaagggaagagcacagtcaccatcgggcttgtgcaggctctgaccgcacacctgaatgtcaactcctttgcctgcttgaggcagccttcccaaggaccgacgtttggagtgaaaggaggagccgcgggtggtggatatgcccaggtcatccccatggaggagttcaaccttcacttgactggagacatccacgccatcaccgctgccaataacttgctggctgccgccatcgacacgaggattcttcatgaaaacacgcaaacagataaggctctgtataatcggctggttcctttagtgaatggtgtcagagaattttcagaaattcagcttgctcggctaaaaaaactgggaataaataagactgatccgagcacactgacagaagaggaagtgagtaaatttgcccgtctcgacatcgacccatctaccatcacgtggcagagagtattggatacaaatgaccgatttctacgaaaaataaccatcgggcagggaaacacagagaagggccattaccggcaggcgcagtttgacatcgcagtggccagcgagatcatggcggtgctggccctgacggacagcctcgcagacatgaaggcacggctgggaaggatggtggtggccagtgacaaaagcgggcagcctgtgacagcagatgatttgggggtgacaggtgctttgacagttttgatgaaagatgcaataaaaccaaacctgatgcagaccctggaagggacacctgtgttcgtgcatgcgggcccttttgctaacattgctcacggcaactcttcagtgttggctgataaaattgccctgaaactggttggtgaagaaggatttgtagtgaccgaagctggctttggtgctgacatcggaatggagaaattcttcaacatcaagtgccgagcttccggcttggtgcccaacgtggttgtgttagtggcaacggtgcgagctctgaagatgcatggaggcgggccaagtgtaacggctggtgttcctcttaagaaagaatatacagaggagaacatccagctggtggcagacggctgctgtaacctccagaagcaaattcagatcactcagctctttggggttcccgttgtggtggctctgaatgtcttcaagaccgacacccgcgctgagattgacttggtgtgtgagcttgcaaagcgggctggtgcctttgatgcagtcccctgctatcactggtcggttggtggaaaaggatcggtggacttggctcgggctgtgagagaggctgcgagtaaaagaagccgattccagttcctgtatgatgttcaggttccaattgtggacaagataaggaccattgctcaggctgtctatggagccaaagatattgaactctctcctgaggcacaagccaaaatagatcgttacactcaacagggttttggaaatttgcccatctgcatggcaaagacccacctttctctatctcaccaacctgacaaaaaaggtgtgccaagggacttcatcttacctatcagtgacgtccgggccagcataggcgctgggttcatttaccctttggtcggaacgatgagcaccatgccaggactgcccacccggccctgcttttatgacatagatcttgataccgaaacagaacaagttaaaggcttgttctaagtggacaaggctctcacaggacccgatgcagactcctgaaacagactactctttgcctttttgctgcagttggagaagaaactgaatttgaaaaatgtctgttatgcaatgctggagacgtggtgaaataggccaaagatttcttcttcgttcaagatgaattctgttcacagtggagtatggtgttcggcaaaaggacctccaccaagactgaaagaaactaatttatttctgtttctgtggagtttccattatttctactgcttacactttagaatgtttattttatggggactaagggattaggagtgtgaactaaaaggtaacattttccactctcaagttttctactttgtctttgaactgaaaataaacatggatctagaaacccaaaaaaaaaaaaaaaaaaaaaaaaaaaaaa

SEQ ID NO: 4200 - protein, 733 aa, Homo sapien
MTMSIQWKTRQLQSKLHEADIVVLGSPKPEEIPLTWIQPGTTVLNCSHDFLSGKVGCGSPRIHFGGLIEEDDVILLAAALRIQNMVSSGRRWLREQQHRRWRLHCLKLQPLSPVPSDIEISRGQTPKAVDVLAKEIGLLADEIEIYGKSKAKVRLSVLERLKDQADGKYVLVAGITPTPLGEGKSTVTIGLVQALTAHLNVNSFACLRQPSQGPTFGVKGGAAGGGYAQVIPMEEFNLHLTGDIHAITAANNLLAAAIDTRILHENTQTDKALYNRLVPLVNGVREFSEIQLARLKKLGINKTDPSTLTEEEVSKFARLDIDPSTITWQRVLDTNDRFLRKITIGQGNTEKGHYRQAQFDIAVASEIMAVLALTDSLADMKARLGRMVVASDKSGQPVTADDLGVTGALTVLMKDAIKPNLMQTLEGTPVFVHAGPFANIAHGNSSVLADKIALKLVGEEGFVVTEAGFGADIGMEKFFNIKCRASGLVPNVVVLVATVRALKMHGGGPSVTAGVPLKKEYTEENIQLVADGCCNLQKQIQITQLFGVPVVVALNVFKTDTRAEIDLVCELAKRAGAFDAVPCYHWSVGGKGSVDLARAVREAASKRSRFQFLYDVQVPIVDKIRTIAQAVYGAKDIELSPEAQAKIDRYTQQGFGNLPICMAKTHLSLSHQPDKKGVPRDFILPISDVRASIGAGFIYPLVGTMSTMPGLPTRPCFYDIDLDTETEQVKGLF

SEQ ID NO: 4201 - DNA, 6123 bp, Homo sapien
cgactggctggtcccctggccgtgagccggcttctgaatgatttatgccgccttgaacttgactccagcgtgacaggagtgagaagagccgctcccgctagaggaaagctggaaaccgtactgtgctcaccacataacctctgggtgctggaaatggagtattactactgccccagcctgctgaagctcttgcgctacctctgggaccagctgaagcagtgtttctcccggcagcccactgaacccaaggacactgacaccctcgtgcacgaagccggcagccagtatgggacgtggacagagcagtgccagagtggggagagcttggccactgagtccccagatagcagtgccacatcgacaaggaaacagccccccagcagccgtttgtcttctctgtcctcccaaacggagcccacctcggcaggggaccagtatgactgctccagggaccagcggagcaccagcgtggaccactccagcactgacctggaatccaccgatgggatggaggggccgcctccaccggacgcctgccctgaaaagagagtagatgacttctccttcattgatcaaacctcagtcctcgactcaagtgccctcaagacccgggtgcagctcagcaagagaagccgccgccgggcccccatctcccactccctccggcgcagccgatttagtgagtccgagagcagatcacctttggaggatgagactgacaacacgtggatgttcaaagactcaacggaggagaaatcacccaggaaggaagagtcggatgaggaggagacggcatccaaagctgagaggacccccgtcagccatcctcagaggatgcctgcgtttccaggcatggatccggcagtgctaaaggctcagctgcacaagaggccagaggtggacagtcctggcgagacccccagctgggcaccccaacccaagagccccaagtcccccttccagcctggggtgctgggcagtcgcgtgctgccttccagcatggacaaggatgagaggtcggatgaaccctctccccagtggctaaaggaattgaaatccaagaagaggcaaagtctttatgagaaccaagtttgaccaggcagggaacactgccacatctacgtaacagaagccttaaccatcagaacccgcagacgaggccgagctgctgccgtttcttcctgcacaacgcttacgtgcctgggcccttcccattggattgagaacgctatccagtgcccctgtcctcgccaggctctccctggatccagacgggaagacccaacctccaggagcactcgctcatctccccagacagcacttcaggctgggaaaggagccaggctgcccagaaacgtccatgtgggtggttttgctttttatgtaaaaatttgcatttctacctattttagacaccttcatcagctccaagaacatcagtgtgaggctggaattgtctccccaggttctgaaaaacacctgcatttgtgaaagcacctcctcacccgaccccggggcaggtctttttttggaaggacatttccaaggaagatcaaactgttcattttctgctgtagtctcggtgcagggtattaccgctgggttgaggttttctattctttttttttggtgagttccttcttccccttgaggaatcagcagttccaatttttaaacatactctccctgattatgtgtatttctctttctagtggggctgtgtgcatcgttggcctatgttattgtatgtcatttttgtttgctttagaaggcgataaagcaataattcagctaattttctttgaaacttgataggtatatatgtgtttacgttaaaggacaggaggaaagatgtgcgaataatttgttctgaagtatccagtcacctcaggttatcttatccctatccaagctgtttagaagttataattgtcactcttgtatttatttccatggcttcttttcatttgagctctggtttcagtagggtgacctttgccccttggccttaagggttcataaactgcagcccaagtggtggtgcctttgcttatgaatcatcagacctgccctagtaatctttttctccagagtcttctttgaacatgatgtgggctgctggcatggaggagttgttccaaactggcctcagaacagatgcatgaatgaagggtactttttgcttttgctcacctcattttccttcatctttcttgatgaatccattatttgcaaatgctgtcaaaacatgctttccttctccctggccacctctcaggagttcatttgtctctctatctcagcttcctccctcatcttcctttacccctcttctctgtcttagtgggtggatgggcatggatagaaatcctctgtttctttaggttaggataaacacctgggccctggtgaggcagttgctgttcagcaccagggacagcaactgcagggctgtgaggccggagcccaccttgtgtcctgttcgatgagctttggttactgatgagcaattgccagaccatgtcacccacccagccttttacacctgggagcctcatgcatctgggtttgggagtttggccctgctgatgatagtttgttttctcttcattccctgaattagtcatcagttctccgtggccatttggggattcatgcctgcaactgcttcagttgaattcttttttaaagatccagtttatgttttataataattttgatcttatggctttcaacgtcaataggatcccctttaaaaataccctgctagtgttttgttttgttttgtttttctgagacaaggtcttactctgttgctcaagctggagtggagtggcacgatcatagctcactaacacctgggctcaagtgattctcccacctcagcctcccaagtagctgggactacaggtgtatgctaccatgaccagctaatttttaaatatttttgtagagacaagggtcttaccatgttgcccaggctggtctcgaacttctgggctcaagcaattgtccctcctcagcctcccaaagtgctcggattacagacatgagccactgcacctggcctgaaacacattcctagtcttttgatcctgacttcttatctgggctgctgtctctctttccttcaggtggaaaggaccccttggtaccatctcaagcagtaggaaaggacctgctcttacatatattgatggtcctcatgcaaaactctcaattcttaattagtcatgtctcagctcaaggatatcagacaggaatgaaacacacttgaaaatgagattgacctggagattttttttccctaatctctcataccttaattggaaaaataatcaattaattctatgttaattaggatatacaaagttcaccctccttgaaagtgactagggcaagccctgaagatcttcctcacctccttttatttttctataaccttgtctcctccagcaccacagggaagacaatcacagtgggtcaagagcttcacgtgggctctgccatgacctctgagacctgcttatgatcagtgcaatgaagttagaagtaactgatgattgggagcctttgcagatagctgggcaaatgggtgatttacttatccccattctaaatggagtgagctctctttgaggctaagcaaggaggcgttgtatgctagtttctagactttgcctggagacccctttggaaatctgtcttctttttaaactcacttaatatgccttaatcatctgtgtgtaatggagtcatccgctcctcaatctaaccctcctcccctggggctttggctgtcctcaatgagagtttcatgcagaatggaaaatcctctatatgtacaatctctctccccctcatttctcttcctcctcacctccaccacccctttgcacatcagcattttaacagctggtcttttgagaagcctgtatccttttcctcttcagtagatacccttcttcatggtcctttgcctaatcaaacagaggcctttggcctttgaaaatccatgacaaggcctcagaaatcagtgttgtggaggattactccatgccaccggagaaactctggtgaaagagaaacctcgtggtctttaggatgttgggattttgagtgaacctgacctgatagcctcaggattcagggaaaggacaatcagatggcggtgttttccagggggacgcgccaaatcatgtggtttcagacaattgtgtttgcctttgtgcctccctggaagggaggccaactaagggtatcaccaagaagccaaaagagaaataggcatgagcctgtggttttaaactttacaggctgggcaaaggatttagaaagacccttagcatgattttcctaaaagagaccttagctgctccaacctggtgctgatagctgctttgttgatctatgctttaaaatttttctttataatgcccccagatggctcctggaactagtcgtaattgcaaactgtaaaaatccctcctccccagtgtagatatttaaaccagagtaagtgaggggagacattctgtggtctctgaatgtgccttccccctcatcgtgtgttaaaacacaaaagccgaagttccatggcgtcatgattccgaggggctggagggataggacccactccacatctaaaggggatctgctttgggctcggtcccattagcgagtgggggactcttgctgtgtgctaagaggctgctaggactcacccagttggaattctgggtgggctcaggaagtttagagccacgtaaaaagctggtaggcatgagtgtgccaggtctttgccagcctgcgtctccttttgcaccccccaatccagagtttgctttcttttgactaaattggctcctgcagggggaagggcagaaagctaggccctctgctctggaaagtcggcctgaggtttccggcaagttaacccttaaaatggacacccctcagcccgccctcccctttggccttcccagaatctccttcagtggttgctctcacacctgtgccataacatcatcttccatgacttggacgggcacttccttgacaattcctattggcatcacacgggctacaaattatgctgttttctaaagaatttgaacttttttttttttcttttcttgagacacggtcttgctctgttggccaggctggaatgcagtggcacaatcatagctcactccagcctccaactcctgggctcaagcaatcctctcatctccacctccagagtagcctagatgacaggcgcacatcaccacgcccagctgatcttttaaatctgttttgtagaaacaggatctcactatattgcccaagctggtcttaaacttggtctcaagtgattctactgcctcagcctcccaaagtgctgggattacaggcctgagccaccatgcccagctgaatttgagctttttaataatctcattccacatagccttatagatcctgtaaatagggggggtcacaaaagtaatatattgtgttatggaagataattttgtactgtgctgtttcctaaatcataccaatatcctaaagtcatgcacttcccagatgatcgtgatcctccaaatgctttgtaagatggggcagggcgtggaaatatatatatatacacacacacacagagacacacacacacacaagtatagtatatattttcctaacctttcttctgggtccttcctcagatctttgagtcacgatagaaaaggagctcgagttctttgtgtaggaaagttaagcttcctgcctgcggtgttcttgcaattgccttaggaattcacaagctctaggagttctgaacggaaggcagacgagaggcactttatccagtcccagaaagaatctctaaccgtgtgactgagaagtcatctagaaaaacttatatttttaatgtaaaaacaaatggggcttaccagacctcacagagtattggacgtctacaagtgcttttatattttgtaactgtaaagaagtttcatatgcacagaagagcagttggaaatctggtcgactgcaataaaacaagatgacctttgcatgtacaaagatgttgcattcagactatgaaaatagcaaataaagctttggtgcaagttg

SEQ ID NO: 4202 - protein, 364 aa, Homo sapien
RLAGPLAVSRLLNDLCRLELDSSVTGVRRAAPARGKLETVLCSPHNLWVLEMEYYYCPSLLKLLRYLWDQLKQCFSRQPTEPKDTDTLVHEAGSQYGTWTEQCQSGESLATESPDSSATSTRKQPPSSRLSSLSSQTEPTSAGDQYDCSRDQRSTSVDHSSTDLESTDGMEGPPPPDACPEKRVDDFSFIDQTSVLDSSALKTRVQLSKRSRRRAPISHSLRRSRFSESESRSPLEDETDNTWMFKDSTEEKSPRKEESDEEETASKAERTPVSHPQRMPAFPGMDPAVLKAQLHKRPEVDSPGETPSWAPQPKSPKSPFQPGVLGSRVLPSSMDKDERSDEPSPQWLKELKSKKRQSLYENQV

SEQ ID NO: 4203 - DNA, 1697 bp, Homo sapien
ctgtttatagataatgtctgcagtttctgtttgagagagataattatgacacttagcattggaaaactaagaagaacgtaagcaggtcagctatcagaagtcttcagactggagagattcctggagggggagtggccctttaatccatcagctgaagccatctggtaggacgctcgttgcagaaatggttagttctgaaatgttgtagctcagcaacatcactgaatgtcacagaattgacaggcacggagctaaaagggcctctagccacccccacaactccgctctacctctgtctccctaacacatgacttggaacaaatacactctaggtacaaagatggctacctgaagtttatgatccctactcatggagctgcttgaggacttcacattttttaaaaagctgctttgggcacccccattcctgaggagttttgtagcttggtttctctttgccacattacgtttgtaagactaacattttataaccataagcagttaggcctttttattttgagaaatttatctgtagcttccttttatttacacttggggactatttttaagtaaccgattgaaatatttttgtttctccattgcaagtgaaatccttgttgctaatcttttgccacatgtaaaattgttcacttgttatcaagcaggtagttcaatatctgtaattcttgagttcttttcaactagcatgatgctaggtgtcactcactgttttttaattgtgggagattgatgcgtcagtgcatgaagtggggggtggtcaccagcatctaactcaaagtgtgattatagctatcttaccacattttttttttctttctcactctgtcacccaggctggagtgcagtggtgtaatctcagctcactgcagcctcgacctcctgggctcaagcgatcctcctacctcagcctcccaaatagctgggaccacaggcgcatgccaccccactaagctaatttttctattttttgcagagacagggttttgccgtgttgcctaggttgttctcaaactcctgagctcaagcctgcctcagcctcccaaagtgctgggattacatgtgtgagccaccatgcctggccgtcactaatcttcaaggttaatatttggaggacccatccagagtccaaaggtggtcttcgagggatagcacgaggtggtctgacaggactaacacttaccagcctctatgcactatataataactgggagcacatgaaaggctccttgctccaacagtcactctgaagattttgccaactcatgaatggaggacacttcagtagtcatctagatccttttataagacagtttggagttattctctctcttctacctacaattagtttgaaaaattggagattttgatttgctgtgatgaaaatcctggatggctgaccaagactggcacttgttccagccattagtgagttgaagccaaagccctttggtgactcactgagtaccatggttctgttctcctctggagatcttgcacgtatctgttttcctcccccatgaactagaaaaccacttactcccagaattcaggtcgtgcttgttagtactatatcaccaagtccattcatttaatgatccaaaactgtaatgttgcactgtattccaaataaagggtaaaaacagaaccaaaggtataactccaaaaaaaaaaaaaaa

SEQ ID NO: 4204 - protein, 60 aa, Homo sapien
MVLSESPKGFGFNSLMAGTSASLGQPSRIFITANQNLQFFKLIVGRRERITPNCLIKGSR

SEQ ID NO: 4205 - DNA, 3204 bp, Homo sapien
ggcggggctgggcgcaggcagtctcccgccgccgccgccgctgccggacgcgcagagcgaggggcggctggaccgacggctgccgggccgagcgcacagagtcgcggcgcagggggcgtccccggccgggacgcgggtcgcgtcgttgtcctccgcgagcgtccggattgcaggctgtctgtccccagaccccagagcacgtccggcaccaccatgactgggctgttgaagaggaaatttgaccagctggatgaggacaactcctcggtctcctcctcctcctcttcctctgggtgccagtctcgctcctgctccccaagctcttctgtctcccgtgcctgggactcagaggaggaaggcccctgggatcagatgcccctgcctgaccgtgacttctgcggccccagaagtttcacccccctgtctatcctgaagcgagctcgccgggagcgcccaggccgtgtagcctttgatgggatcaccgtcttctacttcccccgctgccagggcttcaccagtgtgcccagccgtggtggctgtactctgggtatggcccttcgccacagtgcttgccgtcgcttctctttggctgagtttgcgcaggagcaagcccgtgcacggcacgagaagctccgccagcgcttgaaagaggagaagttggagatgctgcagtggaagctttcggcagctggggtaccccaggcagaggcagggctgccacctgtggtggatgccattgatgacgcctctgtggaggaggacttggcagtcgctgtggcaggtggccggttggaagaagtgagcttcctacagccctacccagcccggcgacgtcgagctctgctgagggcttcaggtgtgcgaaggatcgatcgggaggagaagcgggagctgcaggcactgcgccaatcccgggaggattgtggctgtcactgcgataggatctgcgaccctgagacctgcagctgcagcctggcaggcatcaagtgccagatggaccacacagcattcccctgtggctgctgcagggagggctgtgagaaccccatgggccgtgtggaatttaatcaggcaagagttcagacccatttcatccacacactcacccgcctgcagttggaacaggaggctgagagctttagggagctggaggcccctgcccagggcagcccacccagccctggtgaggaggccctggtccctactttcccactggccaagccccccatgaacaatgagctgggagacaacagctgcagcagcgacatgactgattcttccacagcatcttcatcagcatcgggcactagtgaggctcctgactgccccacccacccaggcctgcctggccctggcttccagcctggcgttgatgatgacagcctggcacgcatcttgagtttcagtgactctgacttcggtggggaggaggaggaagaggaggaagggagtgtggggaacctggacaacctcagctgcttccatccagctgacatctttggtactagtgaccctggtggcctggccagctggacccacagctattctggctgtagcttcacatcaggcatcctggatgagaatgccaacctggatgccagctgcttcctaaatggtggccttgaagggtcaagggaaggcagccttcctggcacctcagtgccacccagcatggacgctggccggagtagctcagtggatctcagcttgtcttcttgtgactcctttgagttactccaggctctgccagattatagtctggggcctcactacacatcacagaaggtgtctgacagcctggacaacatcgaggcacctcacttccccctgcctggcctgtctccacctggggatgccagcagttgcttcctggagtccctcatgggcttctccgagccagccgccgaagccctagatccctttattgacagccagtttgaggacactgtcccagcatctctaatggagcctgtgccggtgtgaggaccaggatgtcttttcccagccccaagagacctgttgctgctttcttgtaattatggggctccccagagtctgcgtaacagtctcccactggctggctcacccacaggtgccatgtgcacactcctggttttcaaacaattctctggatttatttatttgttttaacttttctgtgctgaagagaggactagggggagggggcttcccctttcagctgcccggccccccacacccacagcttgctcttctatctccacaacgtgagcctggaagaggagaaaatgtggctcctctggagcttggcagaccacttttcggtctttgcgtgatgttccttagcccaaagacggtgagacagggctgaaatcaggtggcttctgccaccctgagccctagacccatgggtggctaaatccactggactgtgaagactataatttatttccataatttatttggagattgaggaggctttggttgcacttctttggctggtgggtaatgccaggggtggggtgggcacaggccctcaagagccccttttgccttgtagtcctacaccttgccctgcctgggctttggtgcagactaggtgtggatttgagctctgtgatctatgtctgctgcctggctcctagatggctctgcgggcaggtgctggccaaggacatcatctaggcagggggagagcctgggctgaacagctgtgaccaaaactcccttctgccccaccctgccccctccacttcctgccctctgttccatcttcccccttcccaaaggccacagcctttattccaggcccagggatgtaggagggggaaggaggaaacaggaagcccagagagggcaaagggcctacctcggggcgcgaaccatgccccagactattatctcagggctttctgggcactgcacttcagcgtggcccacctgcccatgccctgaggccagttggcgaggggtggctcctgagggtttttataccctttgtttgctaatgtttaattttgcatcataatttctacattgtccctgagtgtcagaactataatttattccatttctctctgtgtctgtgccaagaaacgcaggctctgggcctgccccttgcccaggaggccttgccagcctgtgtgcttgtgggaacaccttgtacctgagcttacaggtaccaataaagaggctttatttttaaaaaaaaaaaaaaaaaaaaaa

SEQ ID NO: 4206 - protein, 589 aa, Homo sapien
MTGLLKRKFDQLDEDNSSVSSSSSSSGCQSRSCSPSSSVSRAWDSEEEGPWDQMPLPDRDFCGPRSFTPLSILKRARRERPGRVAFDGITVFYFPRCQGFTSVPSRGGCTLGMALRHSACRRFSLAEFAQEQARARHEKLRQRLKEEKLEMLQWKLSAAGVPQAEAGLPPVVDAIDDASVEEDLAVAVAGGRLEEVSFLQPYPARRRRALLRASGVRRIDREEKRELQALRQSREDCGCHCDRICDPETCSCSLAGIKCQMDHTAFPCGCCREGCENPMGRVEFNQARVQTHFIHTLTRLQLEQEAESFRELEAPAQGSPPSPGEEALVPTFPLAKPPMNNELGDNSCSSDMTDSSTASSSASGTSEAPDCPTHPGLPGPGFQPGVDDDSLARILSFSDSDFGGEEEEEEEGSVGNLDNLSCFHPADIFGTSDPGGLASWTHSYSGCSFTSGILDENANLDASCFLNGGLEGSREGSLPGTSVPPSMDAGRSSSVDLSLSSCDSFELLQALPDYSLGPHYTSQKVSDSLDNIEAPHFPLPGLSPPGDASSCFLESLMGFSEPAAEALDPFIDSQFEDTVPASLMEPVPV

SEQ ID NO: 4207 - DNA, 5141 bp, Homo sapien
gaagcgccgccgccaccgccgcctttgctgtcccccggcctctagttccccgcaggtgggaggtgggagccatgtcgaaacggctccggagcagcgaggtgtgcgctgactgcagcgggccggatccttcctgggcatcagtaaataggggaacgtttttatgtgatgagtgctgcagtgtccatcggagtctagggcgccatatctcccaagtgaggcatctgaaacacacaccgtggcctccaacactgcttcagatggttgagaccttgtataataacggtgctaactctatatgggagcattctttgctggaccctgcgtctattatgagtggaagacgtaaagctaatccacaggataaagtacatcccaataaagcggaattcatcagagccaagtatcagatgttagcgttcgtccatcgcttgccctgccgggatgacgatagtgtgactgccaaagatcttagcaagcaactccattcgagcgtgagaacagggaatcttgaaacctgtttgagactgttatctttaggagcacaagccaacttctttcatcctgaaaaaggaaacaccccactccatgttgcctccaaagcagggcagattttacaggctgaattattggcagtatatggagcagacccaggcacacaggattctagtgggaaaactcccgttgattatgcaaggcaaggagggcaccatgagctggcagagcgcctcgtggaaatacagtatgagctaacggacagactagccttctatctctgtggcaggaaaccagatcacaaaaatggacagcactttataatacctcaaatggcagacagcagcctggatttgtctgaattggcaaaagctgctaagaagaaacttcaatctctaagtaatcatttgtttgaagaacttgccatggatgtgtacgatgaagttgacaggcgagagacggatgcagtctggcttgccacgcaaaaccacagcgccctggtaaccgagacaacggtcgtcccctttcttccggtcaatcctgagtactcatcaacacgaaatcagggcagacagaagttagctcggttcaacgcccatgagtttgccacgctggtcattgacattctcagtgacgccaagaggagacagcagggcagttctctctcgggttcaaaagacaatgtggagctcatactgaaaaccatcaataaccagcacagcgttgagagtcaagacaacgatcagcccgactatgacagcgtggcatcagacgaagacacagatttggaaaccactgcaagcaaaacaaaccggcagaagagcctagattcagatttatcagatggaccagtcactgtacaggaatttatggaggtcaaaaacgctctagtggcttctgaggccaagatacagcagctaatgaaggcatccaggctggagaagcagaacagcacacctgagagtgactacgacaacactcccaacgacatggagccagatggcatggggtcaagccgaaagggacggcaaagaagtatggtgtggccaggggatggcttggtaccagacacagcagaaccccatgtggccccaagccccactctccctagcaccgaagatgtcatcaggaagactgaacagatcaccaaaaacatacaggagctcttaagagcagcccaagaaaataaacatgacagttatattccctgctcagagaggatacacgtagctgttacagaaatggcagcattattccccaaaaaacccaagtctgatatggtgaggacttcccttcgtttactgacgtccagtgcctaccgactgcagtcagagtgcaagaagaccctcccaggggaccccggctcacccacagacgttcagctggtcacgcagcaggtcatccagtgtgcgtacgacatcgccaaggctgccaagcagctggttaccatcaccaccaaagagaacaacaactgacaagggcagggcaccgcctcctctgttttctaggctttataaagtccaatttcaaattcagacgcagaactcttcagatttctacaaaaagaaacatttaatgacggtttaaaactttttaaaagaaaactcagtattatttttgcatgttttctaaccaattttcaactatttaacccacttgccttattttgtgcctatttgctggtttagtttctgatgttcggttgtgttgtcaacaactgttgagttgatcacatacatccaaaagtatagtttcattgtctaaagtttgtgaaaacttttccatcccttaaaactccctgcctatggctgaaactataaatgaaatttttcataaaacattttcttgagagagttcagttaaaaaagaaaaaatcagcgtcatttgttccctgccaagcatcgtgcaataagtgaatttcctggcctacttcataatctctaagtttggggtatctccaagcatgtatgtagagaaaggactttgccgctttttaaaactagtgtcacagtctctcttgggaggaaacaatgaattggttcatttcttctcagtgttttaccctgttacatgttctgttatttaatgttgttatctcaagctcctatctcttgatgttttcttgtcatcttgaaggctccatggaatgagataaagcattgacccaccacaggacatctcatgaagccatgttcagggtaggagctccacgcacatcaccacccattgtcaggtgctctccctcacccctgtaagccagacagtttgttcaaaacctgcagcaaagagaagcatcagtctaacaagccagaactcattttgtgccacccatttaggtatcactaccatgaactatagggaaaagaaatcacctactccctgacactgtgttgtacccttcatccaaaagtcagcttgcttctctgaccacttacagctttctcacatgagttgcttcacatttttcatcatctttaaggacttcttataaggaaagatgtatcgtatcgcagtcatctgagttagtttctcctccatcacctcatgagtacttaaaaattagacatcaactttcaagagttccttagagagtgtgctctagctggctgcctgctaccccaaagctctgaaagagtaaggttgaagtgctggaacatgctcagattgttttttagttactcaaaagccccttcttgttctgaatgtgaaagctcttcccgttcctgcttactgcagccattctgtgtgtgtggttcagaccctggcctagggccggtgatgtggatgagtgaagggagccaggtacacggcagcagggcagaggagactatggggagcccaccgcctacacagtaggggcagtagcccccagctccacgcctgttgccatgtggaaaagtgggcctagggtggccacagctttgatttttcaagagacaagaaacctagatgttttttggtgccatctctccatttataaatgttggcaaccaatttgaacactttcagagaccatgtgcaggtgagctgtgtcctctaggctgccagctcacagcccccaccccagggccctgtaagctgtgcagtgtgagggcctggcttccccggacacacctggagcagcctctgagtcttacccgtaatggagccggccaaccctgtgtgttatgttgctgtcgctcctgtttttaaccatatgttctgtcccatagcagtcattcacacatgtgaagaagacacaagaatcaaagtacaagttgcctcaatacatgctaataactaagcttctattttcacaggactgatcgatgcacacctttatagcttgaccatatgctgtcatgaaagtagcaccccgacggtgcttgctttactaagtcaccgtgtgtggatgcttttgtcgcattttgcttcactgtgagtagcatgggaaaagggtccacgtctccaaaagactcttccacttgtttgtcccacagccctaagtgccacattgctgttggatgctcccgggatgccttctagaagggggcctcccaccttaagttcaggcgccatctgatagccttttctgcaggcttcatgtccttagctgaccctcctttatcttgcaaacccctgcccctgctgtcccagggaggacgggcttctgtagaggcttctgggaaatgagctgtctgcaggaggtgaagcagtgttttccttggaatgtttgaggacctgcaatagaagatgttgcctttatggccctagagaaagtcaaggaacatggggaccaacaaagcatttccagttgtaagaatatgtcagaagagtgctcggttagcccacggtgccaaaactccaaacaagttccccggtggaatgacgtggccattggagggctgcaggtcgtcctctctgtatgtgccccgcgcatttccttggcctcatctgagatctggtgtcagagttctctgctcctgttggcaaatcgcaccttatctgaacatttgttccagccaccttttgcacatggattccgtaccttgcactagcaatgtctaccttcagtaacgtcgttctttttcaccctgtattctcaatgatcccttcctccccatatgccacccttcccccaaagctgatagggcagaggtgcactttatgaaactggcacttgactgaacagaaggaaacagctgtacctctaagctcctttcacagaaatcgtcatctgccttggaatgcaaatagttcttatttgccaaagaacagtgaattgggcccaaagatcaaacacagcatttcatgtaatcagaattctaaacgcacaactcgggagctgtgcacggcttctcaagtgattcagttgcagaaccaagagcaaaactcgcctgtttttgtcctcaatggcacccatgagctttccaatagtatagttttctttctttccttgtcctggttgaaggtaacgtgttcctagaaaagaaaatgctgcataggaaaactgagatgccttttattccaacgtgtttgatccctgtcactcattattctgtactttttattgtacattctattcctgtaattattgtgccctttaagtgttgtaaaatcgttttggaatttgtgcctgctagttatgcaataaacaggctctacaagtg

SEQ ID NO: 4208 - protein, 631 aa, Homo sapien
MSKRLRSSEVCADCSGPDPSWASVNRGTFLCDECCSVHRSLGRHISQVRHLKHTPWPPTLLQMVETLYNNGANSIWEHSLLDPASIMSGRRKANPQDKVHPNKAEFIRAKYQMLAFVHRLPCRDDDSVTAKDLSKQLHSSVRTGNLETCLRLLSLGAQANFFHPEKGNTPLHVASKAGQILQAELLAVYGADPGTQDSSGKTPVDYARQGGHHELAERLVEIQYELTDRLAFYLCGRKPDHKNGQHFIIPQMADSSLDLSELAKAAKKKLQSLSNHLFEELAMDVYDEVDRRETDAVWLATQNHSALVTETTVVPFLPVNPEYSSTRNQGRQKLARFNAHEFATLVIDILSDAKRRQQGSSLSGSKDNVELILKTINNQHSVESQDNDQPDYDSVASDEDTDLETTASKTNRQKSLDSDLSDGPVTVQEFMEVKNALVASEAKIQQLMKASRLEKQNSTPESDYDNTPNDMEPDGMGSSRKGRQRSMVWPGDGLVPDTAEPHVAPSPTLPSTEDVIRKTEQITKNIQELLRAAQENKHDSYIPCSERIHVAVTEMAALFPKKPKSDMVRTSLRLLTSSAYRLQSECKKTLPGDPGSPTDVQLVTQQVIQCAYDIAKAAKQLVTITTKENNN

SEQ ID NO: 4209 - DNA, 4868 bp, Homo sapien
cgtggaagcggagcggcggcctcgctgtaacgcagaagcgaaatgtagcgagccgggtgtcgcggctggacgctcgccttggctgggggtgtgggggggcacgccgggggccaaggaggactgtcgaggaggagtgatgagaagagggggtgccctgcaccccccgagaccacgggccacgctgccacttgccaggcgccccccttcctcccaggcgaggggcaggtgttccacactgattctcgtgactttaaggaccagggatttgaagaggtattagctcttcccaggaagggaggaagtttctggaagagaagggaaagacggcagacgctgcgctgggaccagcagagcctgaggagctgtgggaagctgacagagcccagccaaaggagcgggaaggagccgcagccccaggctggcactgtgttctgaaagatttgaactcaagctgctttttacggaagaggggccacttcagagggcaccccagaatttggttgagctcttctactctggatgccccctgctctgaggagcctgccactgagaaccaaagaagataagaggacagatactttttcttcaagcacagagctggtgggttggagtcaggcatctgcacccctagtggctgtctggtgaggaatttcttgtttcttcccagcttgcggcttcagtgcttgatggggctgcctgttggtggatcagtttttgcagcgcctggtaggagtggagagccgtgggaagaggtcctgcggcgcccaagcctgggttcaccccaagactaagttctttcccaagttagagaagaagagagaaagcaaaaagaagagaggaaagttctcccttcccctcctccgtgcctgtcatgtcctctaagccagagccgaaggacgtccaccaactgaacgggactggcccttctgcctctccctgctcttcagatggcccagggagagagcccttggctgggacctcagagttcctggggcctgatggggctggggtagaggtggtgattgagtctcgggccaacgccaagggggttcgggaggaggacgccctgctggagaacgggagccagagcaacgaaagtgacgacgtcagcacagaccgtggccctgcgccaccttccccgctcaaggagacctccttttccatcgggctgcaagtactgtttccattcctcctggcaggctttgggactgtggctgctggcatggtgttggacatcgtgcagcactgggaagtcttccagaaggtgacagaggtcttcatcctagtgcctgcgctgctggggctcaaagggaacctggaaatgaccctggcatcaaggctttccactgcagccaacattggacacatggacacacccaaggagctctggcggatgatcactgggaacatggccctcatccaggtgcaggccacggtggtgggcttcctggcgtccaccgcagccgtcgtctttggctgggtccctgatggccacttcagtattccgcacgccttcctgctctgtgctagcagcgtggccacagccttcattgcctccctggtactgggtatgatcatgattggagtcatcattggctctcgcaagattgggatcaacccagacaacgtggccacacccattgctgccagcctgggcgacctcatcaccttggcgctgctctcaggcatcagctggggactctacctggaactgaatcactggcggtacatctacccactggtgtgtgctttctttgtggccctgctgcctgtctgggtggtgctggcccgacgaagtccagccacaagggaggtgttgtactcgggctgggagcctgttatcattgccatggccatcagcagtgtgggaggcctcatcttggacaagactgtctcagaccccaactttgctgggatggctgtcttcacgcctgtgattaatggtgttgggggcaatctggtggcagtgcaggccagccgcatctccaccttcctgcacatgaatggaatgcccggagagaactctgagcaagctcctcgccgctgtcccagtccttgtaccaccttcttcagccctgatgtgaattctcgctcagcccgggtcctcttcctcctcgtggtcccaggacacctggtgttcctctacaccatcagctgtatgcagggcgggcacaccaccctcacactcatcttcatcatcttctatatgacagctgcactgctccaggtgctgattctcctgtacatcgcagactggatggtgcactggatgtggggccggggcctggacccggacaacttctccatcccatacttgactgctctgggggacctgcttggcactgggctcctagcactcagcttccatgttctctggctcataggggaccgagacacggatgtcggggactagcttggtcactcaacattttccccatccctctgcactttctatttgaaatttttcttttgttcccctgtccctcctccaccccacactcccacctctttctaggacttcactttgataccaaattctcattattttcaatgggaatttttatacattgagccaagtttgtatagcaagaatttgggaaacacagatggcctgagataagcagtacaagtaggtttttgagacaatcaccaagtgcagtttcatggtgggtgcctccaggtgatgtggactggagcaggggagttttgtctggaatctggggacatggggtttggctttagcaacctgtcttggccctaatgagaaaccctttgtaagtgggctctggatttttggttttgttttctttttatctgttttgttttatttttggttttggttgaacagagggacagaagaataagtaacactcccaaacacagacatacttttgtagaagtggaccaacttcaaagctctggacaggagacacctgctccaggcccctgtgatcccagttctgttctcttgccctctggacctaagcgttcccactcgcagaaagagtaaggtggactgacttttcaatttgtgcacatgcctcttgttcaatggcctggtcaacatcaacaacccctccctctgatcatttccagttgattgtcatatccaggaaaaaatggaacagtgcactcttctccctgttgacccatgtccacctattggttccccaaaatccacattctccctgggcccagatgactttgtctccctgggcccagattctttgtctctcttcaaccttcatctcaaattgtctctaagcactaccttccccagagcttgccaggttgggttttgagattagggtcaggtcatgggtatgtggagaatggtttggaggttgaggacaaccacaggtgtctcattgctgccatttctcctgaggacataatcacttggtcaccttggaccctgtcacttcctaaaattactcgttctgtcatgccatagaggtcagttttcctctttcttggcttctacccacaaacattcaccaatcatttattcgttcatttagcaaatatgcagcctccgcaagatgagctctcctgcagacaagcatggtctgaaacattctttgagcaatatttattgagtgcctactatgtgttaggtactgtgccaggcactgataagccagtggtaagggaaacacagctctaacctcacctcattctccaggttacaaaggccatgtgcccctttgaatctggcagagaaagtttcctcgttgtaagtatttgcatctacttcaagccagattcttctgcctctttctcctttccagacccctactctgtgcagtgctgaccacagctagagccaccgccccattgctcaaccagtatttatttccctaaacgacccttcctcacattcccttccctccacctctccttaccaagcacccaaaagaggatttagaactagcagggtggacatcatctggttgtttctacttttctctgcctagcacaaaattgggagaaaactggagcctccatccgcagtcacacgtgtacagatctggggatttggatgtaggctttttctaacttctctctcagaagcttctacagaaacccttccatctgtagcctcaagggcccacctccaagggaaggcttaggcaatgatcctgtttctaccaacactgcaccttatcccaggaacctgccctagacctccagagaccatattttctctccctccatttctacccagacctccaggcctccttctggaatcatagaaccatagaattggaaggaattttagaggttttctagttggagttgtgtccaacagaattcattaacaccagcctgggcttgtttttcctcctccctctggacttttttcatcttttcctccacctcaaaaaatacttacacacagattcttcttgtacaggcatcaaaaccaactcctctgcccctaaggctgtgtccctgtggtctccagccacccctaccccagtcactcgccccttcctcatctctggaatttggccaggcagtcccagaagactctggagtgacctcctttgcctaaaaagcagacagataggcatgccccaggccctgagtgagcagaggaggactgtagggtgagagggaaagaaaatgaaggtgactttcatggaagtttcatttcttttccccgattgtaccaactgcatgtacttttggcctggctgcaaggagcaatattggtttactctcgtatccttaaaaagttacagaactgtgtcttaagagaattatttatagttactataactgaattgacaaatgtcaacttaactgataaattatatttggtaaaataaagaggacgtttattcaaaaaaaaaaaaaaaaaa

SEQ ID NO: 4210 - protein, 513 aa, Homo sapien [sequence omitted]

SEQ ID NO: 4211 - DNA, 4642 bp, Homo sapien
atggcaaagcaaccttctgatgtaagttctgagtgtgaccgagaaggtagacaattgcagcctgcggagaggcctccccagctcagacctggggcccctacctccctacagacagagccacaagacaggagcccagcacccatgagttgtgacaaatcaacacaaaccccaagtcctccttgccaggccttcaaccactatctcagtgcaatggcttccatgaggcaggctgaacctgcagatatgcgcccagagatatggatcgcccaagagttgcggcgtattggagacgagtttaacgcttactatgcaaggagggtatttttgaataattaccaagcagccgaagaccacccacgaatggttatcttacgactgttacgttacattgtccgcctggtgtggagaatgcattgacaggttctttgcggagccgagataccatgcagacattttgcttgttcaaaccaacaagacccagcaccgcggtctcctggtgccattattatgcagccagcggttctcttgtggagggggcaggtgacgtttcagaagacaccgagctggatgggactacctttctgttcatcaccacacagcagaatttctaatggaagtttgttgtgaatgtaaaggagggagcattctttgctttttaatatacaaaccatggttttttggagcaggattttgtgtaagaatggtgtttacatgcagtgtgttttccccctcaccttcaataaggtttttcaaaaaggaaatggaaactttttaaccaatttgtgaataacttttgtattaaaattttaagaacctacggcctattctcagaggattatgtaacccctgcagtggaaactgagccagctaacttaaaaagctgccttagtttatttttagagattacagaatttttaaacagggagacgtgtgatatactccctcccttccctactattgcctctctgacctttttaaattatttttaataccaaaagagttcttttgaaatggaactgattaaaagggcagagggtctgttgccagcctgcattgatataccagtcccatttgtaaatatttacgtacctttataaattcagttgcatctgtggcaaaatttcagactatttttgcgtctttcctcatcactttttgtgatgcaactccagtctggactcagatgcatagatttggtccagtgtattttcatgataaagtgaaattgagtcagaacaagagttaatatctgcctgtatcttgcacagttcgagcgatctgttattaactgggaagcatttggtgttggttttcattccatttcgacgagcatgttattgggaagtattctgaagaggcaatagcagtaataacaacagacttaagtgctacgcccctttgtgctgctggcttttctggttgcaggctttcccatggtcacaggatgcactgtcagcatcaggtcccagagggccaccgtgtccattacagcagagtccagctgcagcatccagctcacgccctcatgggaattggcacaggcctggggcagggcttctgatggccatttgcttggcctcctgcattttagtccaactcacagtccactagcttcactcctttaaattcactttgaaacaggcctcatcccacttccaccagcaccatagaagaataattctgggcagaagtctgttttttttcatttttccaggacagttggatattgtcaggccacttgtgaccccagccatgtagtgagggtgctctttctctgtgcctgctccttatgagtgcagtggaaggaagccacacactggtcagtcatttcagaggcagcagatgcccagggagacccaagaaagagtcaggttagggagcagtgaaagtgaggagggaagacaattctgtgaactctgtaactcttaaaatttttgaaaactccatcgttaaacaacttttaaaagaaataactaaattttcaaatgagtaagcagtgccaccaactagtgttttgcccgatagaagagccagcatgttcacgttatttaaattaggtggaaaaatctaaacatttttatcttcataatttaaaaaatatatatgtatatattgcatattcactttttcctttaggtagagatgatttcaatccaaatactcttactttaaaaaatttcctttccccaagaatctccttgggactttgacttatttttaaagctgtgttggagctcatcttgttccctgatgtgtctcgagcccattggtagggtcatacaaagcccacggttacaagcagtggtaggattgcagccgtgggcctgctggacacacacatacaccaaagatgtatttggatctgggcaccccctcccaggatccctgtactcacgtgccagtctcctgactagagcactttactctgtttcctcagccctgcagcccctgggagcacacactgggtgcagccctgggccaggcacgggaggccctgccctgtgctgcccaggggctgtgtgcaccacatgagcacatttccctctggcctggcggcctccaggctggctgtggaaacagttcctgaggaaattagagattctatgaattgtaggagtattaaagaccaggctgttggcaccagaacttaaagcgatgactggatgtctctgtactgtatgtatctggttatcaagatgcctctgtgcagaaagtatgcctcccgtgggtatacgtttttaccttttttaaaaaacatttttgtagaaaaaataattaaatcccctttttggaaacttactgcaggttttgtgccttgacaacctctccctatgtgaggtttgtaaaaagtgtcctgtgacttaacacagaaacgcaataaacacacacaaaatagtttcatgagtgattcttcagatgcccttcccaactggttagttgatcaagaattttgggggtgggggttgcggagaaatcaagtttaaaattccttctgattaaaaaaatatagtggaatacaattgtctgccgtttccccttcttaatgtatatattgtgagtatttattagattcgtaggtcatattacttatcaactgagccaaatgtctgtgtgcaattgtgtttcctttaccttgtaaaattttgtacagcataaataagtaaaaaaatcactgtttttctcaactttttcaaaatcaaggattgtaaatattgtagattctttttctgtgtgatgtgtcctactgtttcataatgctgtaacttgtagaaatattgtatatttattttctgcttatttaatgtcttaatttctgaaaagtattaacatccctgtctcccactcccctgccgtcccatgaagttaactcctgagagttgtcgggggtgactggagagctcattgcagaccacgtggtcctccagggtggctctccaccttcgggtcctggtatttccagtcaagtgggtttcaattcttgggctttgccgcccttatgatgaagtgtgtgtttgatgccagtgagaaactcagtctggcaggctacaaaattctactccaagaaatacccagcaaccttctgtttgttccaaagcaactagcttatcatgcaagcaaattttgctgactccaggctttatctttaggaaaacaaaaaaaccaaagtattatcagcaggtgggaaagatttttctattgaaaatttatccctgacaactcagcgtttagaaaagaaataaaatgtgccacttccagaggtgctgcattgcagttgttcagggctagggccaggcaggacaagtgaatgggtgggacaggtggctcctgcctaaggaccacctcaggccactaaccccttgtggacaactgtgagtagctgggttttcccccacctgctgtgcaacttcctgtgctttgaggttggactaacttgtcttcaggagctaattaactgtacagccctccccacgccccacccatacggtcactgcatttggtcagcctgcttcttcaggtcgatgccctccttctgatactccatctccttcaggggaggttggggccccactggactgggtgtcaagatgtgaaagcttatgggagctttaaggagacttcatggtggttccatgcaggtggttctgccatccctgctgatttagcctggtgcctgtgtgtgtccactcacgtacacgtggggtgggggaaacgtgtctacagatgacgctaaatcagttggggtctactctaaacagcattgtgtgtaagaagcatcctcaagctcccagttaagtaacttgactacttttatttgggaatttcagactatagaagctctcttatgttttatgtccagattctgtgaccactagttactgtatcagaactcatcaggtacccacttataaatagcactgatctggctgtatactgatccatcactaacctgttttctaggacccagcgtatgtagcatttgtattgcagtttccctggcttacttgtgttttgcactgatgaattttgacagggtaattgccactttacttgtgcaatactgctgtaaataactgcagatttttaaacaatcttttatgttaattttataaaaataaaactttcaactagttttaaacaaaac

SEQ ID NO: 4212 - protein, 138 aa, Homo sapien
MAKQPSDVSSECDREGRQLQPAERPPQLRPGAPTSLQTEPQDRSPAPMSCDKSTQTPSPPCQAFNHYLSAMASMRQAEPADMRPEIWIAQELRRIGDEFNAYYARRVFLNNYQAAEDHPRMVILRLLRYIVRLVWRMH

SEQ ID NO: 4213 - DNA, 5496 bp, Homo sapien
gtggaagccagctctccaggccacggaagtcctctgagcagcctgttaccttctgcctcagtgccagagtccatgacaattagtgaactgcgccaggccactgtggccatgatgaacaggaaggatgagctggaggaggagaacagatcactgcgaaacctgctcgacggtgagatggagcactcagccgcgctccggcaagaggtggacaccttgaaaaggaaggtggctgaacaggaggagcggcagggcatgaaggtccaggcgctggccagagagaacgaggtgctcaaagtccaactgaagaaatatgtaggagctgtccagatgctgaaaagagaaggtcaaacagctgaagtgccaaatctttggagtgttgatggagaagttacagtagctgaacagaagccgggagaaattgctgaagaactcgcaagctcctacgaaagaaagctcatcgaggtggcagagatgcatggcgagctgattgagttcaacgagcgcctgcacagggccctggtagccaaggaagccctcgtgtcccagatgaggcaggagctcatcgatctccggggaccggtgcctggagatttgagtcaaacgtccgaagaccagagtttgtcggattttgaaatatcaaaccgggcgctgatcaacgtctggatcccctcagtgtttctccggggcaaagcagcaaatgcattccacgtgtatcaggtctacatccggataaaagacgatgaatggaatatttatcgccggtatacagagttcaggagtttgcaccacaagttacaaaacaagtaccctcaagtgagggcctacaacttcccacccaaaaaggccattggaaacaaggatgccaagtttgtggaggaacggagaaagcagctccagaattacctgcgcagcgtcatgaacaaagtcatccagatggtccccgagttcgctgccagccccaagaaggagaccctcatccagctgatgcccttcttcgtcgacatcaccccgcccggagagcctgtgaacagccggcccaaagcagcttcccgcttccccaaactgtcccggggtcagccccgggagacccgcaacgtggagccccagagcggtgacctctgacctcgacaaaaccgcagccacgggccctgtgcgtggcaccagctgcgtccaccccagccactgccgctggcccctcacctcagcgtgacaaccacgtccacctggtgatcctgagagcacacgattcccaacagttacacaacaccccgattaaactaatcagtcttcgagccgcatgataccgtgacccgagagaccaaggcagcacctcgctggagagactgggacacacagtccttctgcttctggggtctaccctgggctgcaagggctgttcctccacctttctgtagttcagggctggcaggagggtgggcaccaggtcaggctgggtgcgccatggttgagaggcaaaggtgatcccctatataggaaggttcatgcagagccagcctctccactctttcccacgtggggactaaaatgactattagcctctccttttgctttttaaggttattacctggcctaacctagggatggctggcttttggggggggggggtgggcatggttcctttcactgcattttccaccaacagtcattagacacctggcactgtcacagctcacttttccagagggatattcctgtggctttggcaaggagccattagtgatgtgcaacttgagttcagagaacttcccctacctcccccatggctggcttcaggaaggaccagtgccctccatagcctgaggccacctaggccctcgccaggcttggagtggggggactcagacatctggcccagccatcagcagcaacctagtaacccggcgtcatccagcgtgtccaaagtagcattggccctacagtcatgagagacttgggtcagggaaccactgcagaaggttccagggttttcaaaccaggctccatgactatgaagttggacccagtgtggacacttaacagatcatgtgtctctccactaaaaacattttccatcccgtctgcccccgacattgaccttgataacagaactctgcatcccctaagagtcctctgttcctcccatgtcaggtggctctcagagtacagggaccttggcaggtggagaggaggatggggaccagcagctgggcagcccccagggctcctcctccagtgagctcacatcagagcacctcacagagcaatagccgtcctcagatgctcagcaaagttgtggcagtttgcatttctagggtaaactaactaggaaggatgtcgtgaaatggactatgcaagagtaagtttgtgtgtttcgccttaatctgaggcagagacacagcagaacctgaggacaaaagcaggtggaaggtgacggttagatggtaagccatgggcttgtcctggaactgcttcaactcagtggcttaaaatgagaactgcccaggtgagcatggagcatctcctaggctcgaggacatctctggagaatcatctggaaggtttatactgtgccttcccctcgtagcaaaaaggaagattgttcatggcctttaaggaaggctgagatcactcacacacagcgcccccccaccccagagaaaccgagtcagcctacatgacttccaagggaacctggggccagataagccctgccccggtgagaccaaatgagctggagcatgtatggaggtgcggaccctgcaatcagtttgcgagtgtggaggacccgagacatcctgtaaaggcaacttggtctccctcccactcacctgccaacattgctgcaatacacatggtttatctgaaattccagggccagagtgcacatcagctcacatgactggcaactctaaatagagagccctaatggactgaggcaggaaacgtctaaaagctcaatctgctgtatgtcatgaccccttaggttgggtttatgccacatcggtcattttgaagtaggtgtttgatgccagctcagagactgtctcaggagtgcctccctggcctgggtagctacccctggaggtcatctccctgttctctgttggataaaggaacctcccccatctgtgacattcccttgggcccaggcttatgacctgcaccttttctgacacctgcccccaaagcacaggatgtgaattggtctctctccagataccccacgaggaagcaccttggacattctgcacatgataataatgcaacagagtcccccattgctgagagatactaacccgtgagaaacaagtatgctctcagctggtattgaactggtgggagaaactgcctcctacttttataatactgaattattcacaaaaaacctggtctgctctccaaaatgggagcatgttcctgggagccacatggggaccatccccagctgcctgctcctggtacctcccccatgatcatgcacagaccgtagagtcgagtcatctcgcagatccagaccatctcctctcattctcactctaaaaatgctggtggcccgcccatgacagcaactccccgaagccttccctttggaatcccatagaatgttctgcaatgattgggtccatcttgctgctcagaagaatcccgtcctgctctctagtgtggtgggatgaacttcaggcaacaaacaactggcagggttcccagttcctggagttatggagcagaaacacccaggcctagcagaattgtggctgaaacctggtgcccaaattccacacccctggaaatgtgtcaactgcccgtcagcctggattcaattctgagggctaagccacgaccttatccatgagtggcgaagacacccctgagtaaaggattgcttgcacctcacatctgtcttcttctaagattactcggagattttcaaacaacatctgagaacagaagccccctcccctactcagagaggaacgagggtggcccacctctcaagggccttggattcctgggaccaccctttgctgggaggaagaatccacaccgaatccttctgtcttcatggcctgctgtgctgaaacagaacagcaggttccatctttcacatctttttttctcccccagatgaaagacgactcaggaacggtagggctgggcagaggtgtctctccttgagagacaacaaaagcttctaagggagggagcttaaaggctgctagaaacctagcccaaccatccactcctgatctgagacagaaccttctccgccactcttcctgcaatcagtgtgaaattccagcttctttgattcccacttagcagtatgctccaatcacgttgctggcaaggcattttagagtttggagctgaggttcaaagccccctgcatttctctactggcaggccctggtgaaggaagacactttcagggaagaggctcttacagtctatggtggtagccatcttcacatccagtcaccagttgcatctagggagctgctggctataaaagggatcatccagtggagttgtaaacaagggaaccatcttgcaagatctaggaagaggaaggggagggatgtggactgggtcagatcacagcccttggccctgcttcatactttggagcttattaagatcaattttgataaccatgtaatttcttagaaccatggcaggtagtattgtgctttaaaaaccagaggctcctgaaagtcgtttacaccaggtggattgataccatggctgtagctgatgcaactaacaagtactggggccagtgatcacaatccagggttggaaacaggagtgaagcccaccagcctgcctggctgatggacagcaggctctgccttctggaggcggcttatatcccaacagcctgaggcagggctctgtggcccaggccagcagtggctgcctcttttggttctgcatggtacattttgccaaccctgaggaccagttcttggggttccaggcctcggccttcctgctccacgtgctcaagcccccacatggggctgcgacaccatctggctcctcacagggaggtccagccatgttctctgggctcccagtgagccccctgccctccagctacccccagaatccatccttcattcctccaccaagctcctgtgtgagctgcagcacccacacgggggaagccctgcactccagcagcatcttccagccttggcacagaactgatggcaaaggaagggctgggttttcagcttctgggacccgaggaagaccccacctcactcctccttccccagtacatcagactggttaggaggcatcccagaaggggcagcctcatgcccaggtttcagccctaaaggtaatgattgtcttgactctgccttggcatttcgctcggaatcacggcagacttggagtgtttcttcaaggcaggcatctgcttatgagcaaggtcaaagatttttcaaaatattgtgcattaattcattaaagctactgttaaat

SEQ ID NO: 4214 - DNA, 10183 bp, Homo sapien
  Unsure 7848-7874: Unknown base
atcccacagacagcgctttgagcagaacgcacggctcaactcatgtaattactgtttatagctggccgagcctgactaggagagggcagacccgagaggaaatcagtttcccggacctttgagaggaggctgtgtgttaattaaaggctaggacgggacgggtacttctcagacatgctccaagttgttcttgagatcacagttcccatcacattttctctggagggagtgagtagataattgggattttttttttatttttggccttgtctttcttccttttttttacctctccccattttagtcatatggccttgaacccacagtgaattgaagagagaaagaaatggatatgtctgaccccaatttttggactgtgctctcaaactttactttgcctcatttgaggagtgggaacaggcttcggcgaacacaaagttgccgaacaagcaaccggaaaagcttaataggcaatgggcagtcaccagcattgcctcgaccacactcacctctctctgctcatgcaggaaatagccctcaagatagtccaagaaatttctcccccagtgcctcagcccatttttcatttgcacggaggactgatggacgccgctggtcgttggcttctctcccttcctctggctatgggacaaacacacccagctctacggtctcttcatcctgttcctcccaggagaagttgcatcagttaccataccaaccaacaccagacgagttacacttcttatcaaaacatttctgtaccaccgaaagcatcgccactgagaacagatgcaggaacacgccgatgcgcccccgttcccgaagtctgagccctggacgttctcccgcctgctgtgaccatgaaataattatgatgaaccatgtctacaaagaaaggttcccaaaggctacagctcagatggaagaacgtctaaaggaaattatcaccagctactctcctgacaacgttctacccttagcagatggagtgcttagtttcactcaccaccagattattgaactggctcgagattgcttggataaatcccaccagggcctcatcacctcacgatacttccttgaattacagcacaaattagataagttgctacaggaggctcatgatcgttcagaaagtggagaattggcatttattaaacaactagttcgaaagatcctaattgttattgcccgccctgctcggttattagagtgcctggaatttgatccggaagaattttactacctattggaagcagcagaaggccatgccaaagaaggacagggtattaaaaccgacattcccaggtacatcattagccaactgggactcaataaggatcccttggaagaaatggctcatttgggaaactacgatagtgggacagcagaaacaccagaaacagatgaatcagtgagtagctctaatgcctccctgaaacttcgaaggaaacctcgggaaagtgattttgaaacgattaaattgattagcaatggagcctatggggcagtctactttgttcggcataaagaatcccggcagaggtttgccatgaagaagattaataaacagaacctcatccttcgaaaccagatccagcaggcctttgtggagcgggatatcctgacttttgcagaaaacccctttgttgtcagcatgtattgctcctttgaaacaaggcgccacttgtgcatggtcatggaatatgtggaagggggagactgtgctactttaatgaaaaacatgggtcctctccctgttgatatggccagaatgtactttgctgagacggtcttggccttggaatatttacataattatggaattgtacacagggatttgaaaccagacaacttgttggttacctccatggggcacataaagctgacagattttggattatctaaggtgggactaatgagcatgactaccaacctttacgagggtcatattgagaaggatgctagagagttcctggataaacaggtctgtggcacacctgaatacattgcaccagaagtgattctgaggcagggttatggaaagccggtggactggtgggccatggggattatcctctatgaatttctggttggatgcgtgccattctttggggatactccagaggagctatttggacaagtcatcagtgatgagatcaactggcctgagaaggatgaggcacccccacctgatgcccaggatctgattaccttactcctcaggcagaatcccctggagaggctgggaacaggtggtgcatatgaagtcaaacagcatcgattcttccgttctttagactggaacagtttgctgagacagaaggcagaatttattccccaactggaatctgaggatgacacaagttattttgatactcggtctgagaagtatcatcatatggaaacggaggaagaagatgacacaaatgatgaagactttaatgtggaaataaggcagttttcttcatgttcacacaggttttcaaaagttttcagcagtatagatcgaatcactcagaattcagcagaagagaaggaagactctgtggacaaaaccaaaagcaccaccttgccatccacagaaacactgagctggagttcagaatattctgaaatgcaacagctatcaacatccaactcttcagatactgaaagcaacagacataaactcagttctggcctacttcccaaactggctatttcaacagagggagagcaagatgaagctgcctcctgccctggagacccccatgaggagccaggaaagccagcccttcctcctgaagagtgtgcccaggaggagcctgaggtcaccaccccagccagcaccatcagcagctccaccctgtcagttggcagtttttcagagcacttggatcagataaatggacgaagcgagtgtgtggacagtacagataattcctcaaagccatccagtgaacccgcttctcacatggctcggcagcgattagaaagcacagaaaaaaagaaaatctcggggaaagtcacaaagtccctctctgccagtgctctttccctcatgatcccaggagatatgtttgctgtttcccctctgggaagtccaatgtctccccattccctgtcctcggacccttcttcttcacgagattcctctcccagccgagattcctcagcagcttctgccagtccacatcagccgattgtgatccacagttcggggaagaactacggctttaccatccgagccatccgggtgtatgtgggagacagtgacatctatacagtgcaccatatcgtctggaatgtagaagaaggaagtccggcatgccaggcaggactgaaggctggagatcttatcactcccatcaatggagaaccagtgcatggacttgtccacacagaagttatagaactcctactgaagagtgggaataaggtgtcaatcactactaccccatttgaaaacacatcaatcaaaactggaccagccaggagaaacagctataagagccggatggtgaggcggagcaagaaatccaagaagaaagaaagtctcgaaaggaggagatctcttttcaaaaagctagccaagcagccttctcctttactccacaccagccgaagtttctcctgcttgaacagatccctgtcatcgggtgagagcctcccaggttcccccactcatagcttgtctccccggtctccaacaccaagctaccgctccacccctgacttcccatctggtactaattcctcccagagcagctcccctagttctagtgcccccaattccccagcagggtccgggcacatccggcccagcactctccacggtcttgcacccaaactcggcgggcagcggtaccggtccggaaggcgaaagtccgccggcaacatcccactgtccccgctggcccggacgccctctccaaccccgcaacccacctccccgcagcggtcaccatcccctcttctgggacactcactgggcaattccaagatcgcgcaagcctttcccagcaagatgcactccccgcccaccatcgtcagacacatcgtgaggcccaagagtgcggagccccccaggtccccgctgctcaagcgcgtgcagtccgaggagaagctgtcgccctcttacggcagtgacaagaagcacctgtgctcccgcaagcacagcctggaggtgacccaagaggaggtgcagcgggagcagtcccagcgggaggcgccgctgcagagcctggatgagaacgtgtgcgacgtgccgccgctcagccgcgcccggccagtggagcaaggctgcctgaaacgcccagtctcccggaaggtgggccgccaggagtctgtggacgacctggaccgcgacaagctgaaggccaaggtggtggtgaagaaagcagacggcttcccagagaaacaggaatcccaccagaaatcccatggacccgggagtgatttggaaaactttgctctgtttaagctggaagagagagagaagaaagtctatccgaaggctgtggaaaggtcaagtacttttgaaaacaaagcgtctatgcaggaggcgccaccgctgggcagcctgctgaaggatgctcttcacaagcaggccagcgtgcgcgccagcgagggtgcgatgtcggatggcccggtgcctgcggagcaccgccagggtggcggggacttcagacgggcccccgctcctggcaccctccaggatggtctctgccactccctcgacaggggcatctctgggaagggggaaggcacggagaagtcctcccaggccaaggagcttctccgatgtgaaaagttagacagcaagctggccaacatcgattacctccgaaagaaaatgtcacttgaggacaaagaggacaacctctgccctgtgctgaagcccaagatgacagctggctcccacgaatgcctgccagggaacccagtccgacccacgggtgggcagcaggagcccccgccggcttctgagagccgagcttttgtcagcagcacccatgcagctcagatgagtgccgtctcttttgttcccctcaaggccttaacaggccgggtggacagtggaacggagaagcctggcttggttgctcctgagtcccctgttaggaagagcccctccgagtataagctggaaggtaggtctgtctcatgcctgaagccgatcgagggcactctggacattgctctcctgtccggacctcaggcctccaagacagaactgccttccccagagtctgcacagagccccagcccaagtggtgacgtgagggcctctgtgccaccagttctccccagcagcagtgggaaaaagaacgataccaccagtgcaagagagctttctccttccagcttaaagatgaataaatcctacctgctggagccttggttcctgccccccagccgaggtctccagaattcaccagcagtttccctgcctgacccagagttcaagagggacaggaaaggtccccatcctactgccaggagccctggaacagtcatggaaagcaatccccaacagagagagggcagctcccctaaacaccaagaccacaccactgaccccaagcttctgacctgcctggggcagaacctccacagccctgacctggccaggccacgctgcccgctcccacctgaagcttccccctcaagggagaagccaggcctgagggaatcgtctgaaagaggccctcccacagccagaagcgagcgctctgctgcgagggctgacacatgcagagagccctccatggaactgtgctttccagaaactgcgaaaaccagtgacaactccaaaaatctcctctctgtgggaaggacccacccagatttctatacacagacccaggccatggagaaagcatgggcgccgggtgggaaaacgaaccacaaagatggcccaggtgaggcgaggcccccgcccagagacaactcctctctgcactcagctggaattccctgtgagaaggagctgggcaaggtgaggcgtggcgtggaacccaagcccgaagcgcttcttgccaggcggtctctgcagccacctggaattgagagtgagaagagtgaaaagctctccagtttcccatctttgcagaaagatggtgccaaggaacctgaaaggaaggagcagcctctacaaaggcatcccagcagcatccctccgccccctctgacggccaaagacctgtccagcccggctgccaggcagcattgcagttccccaagccacgcttctggcagagagccgggggccaagcccagcactgcagagcccagctcgagcccccaggaccctcccaagcctgttgctgcgcacagtgaaagcagcagccacaagccccggcctggccctgacccgggccctccaaagactaagcaccccgaccggtccctctcctctcagaaaccaagtgtcggggccacaaagggcaaagagcctgccactcagtccctcggtggctctagcagagaggggaagggccacagtaagagtgggccggatgtgtttcctgctaccccaggctcccagaacaaagccagcgatgggattggccagggagaaggtgggccctctgtcccactgcacactgacagggctcctctagacgccaagccacaacccaccagtggtgggcggcccctggaggtgctggagaagcctgtgcatttgccaaggccgggacacccagggcctagtgagccagcggaccagaaactgtccgctgttggtgaaaagcaaaccctgtctccaaagcaccccaaaccatccactgtgaaagattgccccaccctgtgcaaacagacagacaacagacagacagacaaaagcccgagtcagccggccgccaacaccgacagaagggcggaagggaagaaatgcactgaagcactttatgctccagcagagggcgacaagctcgaggccggcctttcctttgtgcatagcgagaaccggttgaaaggcgcggagcggccagccgcgggggtggggaagggcttccctgaggccagagggaaagggcccggtccccagaagccaccgacggaggcagacaagcccaatggcatgaaacggtccccctcagccactgggcagagttctttccgatccacggccctcccggaaaagtctctgagctgctcctccagcttccctgaaaccagggccggagttagagaggcctctgcagccagcagcgacacctcttctgccaaggccgccgggggcatgctggagcttccagcccccagcaacagggaccataggaaggctcagcctgccggggagggccgaacccacatgacaaagagtgactccctgccctccttccgggtctccaccctgcctctggagtcacaccaccccgacccaaacaccatgggcggggccagccaccgggacagggctctctcggtgactgccaccgtaggggaaaccaaagggaaggaccctgccccagcccagcctcccccagctaggaaacagaacgtgggcagagacgtgaccaagccatccccagccccaaacactgaccgccccatctctctttctaatgagaaggactttgtggtacggcagaggcgggggaaagagagtttgcgtagcagccctcacaaaaaggccttgtaacggggagggcccaggggcaggactgtggagacccgtcctgaacgggcgactgtgtcttgactacctttcaaaaccagcactgtgtgggaatgtccgccaggcagagctcggagcctcattgagacaggggagagagaaagacaaagaggggaccttcttccagatgccttcccagttgtaaccggtaaaactgttaccagatagtgtttgtnnnnnnnnnnnnnnnnnnnnnnnnnnnaaaattacctttacagttgagggttgttgaggaaaatgattttctttgtaaatatatagcatcgtgtttggtttgggatgtagagtctatacctggctgctgattgcgtcgtttactacagctttttttaaataagatttttgctttaccatttatcataatgtagtaatgaagcaaaatggtcaaaactgggtgtgtgtgaacagagatacacccatattcgtgtatatacacatccacctacatgttttggtctgtggtttaagagactatttcaaggttccatttttataagctaaaacattctaagttaagatggaagaaagccctaaacacagtagattctgagtttttatgtgtattttaaccagagtttctgatagtactgtatctggctacctatatttccagatctaaagcaagaactactctaagtactgcatttggaatcctcctccattaggaatggccaggacaagtggagctagccattttcattacacggccatcccaatggacactggatccctggtccaactgtctaaaaggccagttgttcctttctgtggatgtggatgtctggccttcacctgaggtagagcggggactataaacacacatcaactttctttctgtttgctttcttttccttcttttcaaactcttaaactcaggcctttatgctgtgagtgactagtccaagaagcacacattttgtagtagtcctgcaccagccctgctcttgaataaaaaggaaaattactggctgcacccaaatcttctagtacttgagtaataagcatcaggcattggaagaggttttaaatttgcttttttgaggaaaagaactgggggtggattttggcatcgtagcatatcgattaaagaataatcaggacatcagatacattttaatacatagctggggccttatgttgtagatgaagcttgctgtttttagcaagttcctgggtttcacattcatttctgctgcatctagtagctccacacatttcataacctgatctctttatttgtatgcaaaaaatactgtcttaatacagagcagcatttttgtaacaaagagactcgctggagctatttggtgcttgaatgtgaccatcctttttacttttgctaagccttatttaaattttgtataccgtggaatatgtagaatttgtcaaatcattttagtgctgaaggtttttgatttcttgtttttgtttctgttgttgcagtttctttggtggcttgttttgtattgtaagatggcacttgctgatataaatactaaggcactaagagaaaatacagataagtatttataagttgcttgggaaccatagcagaattttttgtttggttttgtaagagaaaaaaaattaccaataaataactgatctagcacccaaactctcttgggggatgtcttagtatcttcacgctataaaattgttcatctaagcacagcatcatcttatggccttatggattgtaaatcttctagtgaggctataaactccactctgaaaacaaaggcataacttaaccgactgctcagttgtccttcgttgtaaaatgaattggctttgggaaaaaggaaaaaaacaaacaaaaaaagaaaaagaaaaaagcctcctccttgcccctaatttttttttcccatatggttttagccattccccatcactatattgtgaagctgtaaaaatatatatatatactttacaagagtttactaatggatttcaaaactggtctcaacgtttataatacatatctgtgtttggcagttgtcataacccaatcctacattcagccatcgggacaagtctgtcggggaggtagttcatggtttacaagcctttgctttttaactgtccaatttcctttaaagcacaactagctatttgtttacaaatgatatttttatgtatattttgtatagtgtatcatcatttttgccaaatatgtttttcattataaatgagtaaagagtacttaaggttgcattcatgtattacatgtttgttgttgtaaacctctccaatcagctggtagaaattctcctcattgtgttctatttggtcagtctctgtgtgattgtaggatgtgctccttggtagtactcccagctgtagatttaccagcttaaaagtttgttaggatctgtgcaataaagtgtttgcagtcttattttctctaagaaattccttatggacgtcataattgttgtatattgaacaaaatatttatacttatgcagttgcataacattgaaataaaaatttagcatgaaaagataa

SEQ ID NO: 4215 - protein, 2429 aa, Homo sapien
  Unsure 7848-7874: Unknown amino acid
MDMSDPNFWTVLSNFTLPHLRSGNRLRRTQSCRTSNRKSLIGNGQSPALPRPHSPLSAHAGNSPQDSPRNFSPSASAHFSFARRTDGRRWSLASLPSSGYGTNTPSSTVSSSCSSQEKLHQLPYQPTPDELHFLSKHFCTTESIATENRCRNTPMRPRSRSLSPGRSPACCDHEIIMMNHVYKERFPKATAQMEERLKEIITSYSPDNVLPLADGVLSFTHHQIIELARDCLDKSHQGLITSRYFLELQHKLDKLLQEAHDRSESGELAFIKQLVRKILIVIARPARLLECLEFDPEEFYYLLEAAEGHAKEGQGIKTDIPRYIISQLGLNKDPLEEMAHLGNYDSGTAETPETDESVSSSNASLKLRRKPRESDFETIKLISNGAYGAVYFVRHKESRQRFAMKKINKQNLILRNQIQQAFVERDILTFAENPFVVSMYCSFETRRHLCMVMEYVEGGDCATLMKNMGPLPVDMARMYFAETVLALEYLHNYGIVHRDLKPDNLLVTSMGHIKLTDFGLSKVGLMSMTTNLYEGHIEKDAREFLDKQVCGTPEYIAPEVILRQGYGKPVDWWAMGIILYEFLVGCVPFFGDTPEELFGQVISDEINWPEKDEAPPPDAQDLITLLLRQNPLERLGTGGAYEVKQHRFFRSLDWNSLLRQKAEFIPQLESEDDTSYFDTRSEKYHHMETEEEDDTNDEDFNVEIRQFSSCSHRFSKVFSSIDRITQNSAEEKEDSVDKTKSTTLPSTETLSWSSEYSEMQQLSTSNSSDTESNRHKLSSGLLPKLAISTEGEQDEAASCPGDPHEEPGKPALPPEECAQEEPEVTTPASTISSSTLSVGSFSEHLDQINGRSECVDSTDNSSKPSSEPASHMARQRLESTEKKKISGKVTKSLSASALSLMIPGDMFAVSPLGSPMSPHSLSSDPSSSRDSSPSRDSSAASASPHQPIVIHSSGKNYGFTIRAIRVYVGDSDIYTVHHIVWNVEEGSPACQAGLKAGDLITPINGEPVHGLVHTEVIELLLKSGNKVSITTTPFENTSIKTGPARRNSYKSRMVRRSKKSKKKESLERRRSLFKKLAKQPSPLLHTSRSFSCLNRSLSSGESLPGSPTHSLSPRSPTPSYRSTPDFPSGTNSSQSSSPSSSAPNSPAGSGHIRPSTLHGLAPKLGGQRYRSGRRKSAGNIPLSPLARTPSPTPQPTSPQRSPSPLLGHSLGNSKIAQAFPSKMHSPPTIVRHIVRPKSAEPPRSPLLKRVQSEEKLSPSYGSDKKHLCSRKHSLEVTQEEVQREQSQREAPLQSLDENVCDVPPLSRARPVEQGCLKRPVSRKVGRQESVDDLDRDKLKAKVVVKKADGFPEKQESHQKSHGPGSDLENFALFKLEEREKKVYPKAVERSSTFENKASMQEAPPLGSLLKDALHKQASVRASEGAMSDGPVPAEHRQGGGDFRRAPAPGTLQDGLCHSLDRGISGKGEGTEKSSQAKELLRCEKLDSKLANIDYLRKKMSLEDKEDNLCPVLKPKMTAGSHECLPGNPVRPTGGQQEPPPASESRAFVSSTHAAQMSAVSFVPLKALTGRVDSGTEKPGLVAPESPVRKSPSEYKLEGRSVSCLKPIEGTLDIALLSGPQASKTELPSPESAQSPSPSGDVRASVPPVLPSSSGKKNDTTSARELSPSSLKMNKSYLLEPWFLPPSRGLQNSPAVSLPDPEFKRDRKGPHPTARSPGTVMESNPQQREGSSPKHQDHTTDPKLLTCLGQNLHSPDLARPRCPLPPEASPSREKPGLRESSERGPPTARSERSAARADTCREPSMELCFPETAKTSDNSKNLLSVGRTHPDFYTQTQAMEKAWAPGGKTNHKDGPGEARPPPRDNSSLHSAGIPCEKELGKVRRGVEPKPEALLARRSLQPPGIESEKSEKLSSFPSLQKDGAKEPERKEQPLQRHPSSIPPPPLTAKDLSSPAARQHCSSPSHASGREPGAKPSTAEPSSSPQDPPKPVAAHSESSSHKPRPGPDPGPPKTKHPDRSLSSQKPSVGATKGKEPATQSLGGSSREGKGHSKSGPDVFPATPGSQNKASDGIGQGEGGPSVPLHTDRAPLDAKPQPTSGGRPLEVLEKPVHLPRPGHPGPSEPADQKLSAVGEKQTLSPKHPKPSTVKDCPTLCKQTDNRQTDKSPSQPAANTDRRAEGKKCTEALYAPAEGDKLEAGLSFVHSENRLKGAERPAAGVGKGFPEARGKGPGPQKPPTEADKPNGMKRSPSATGQSSFRSTALPEKSLSCSSSFPETRAGVREASAASSDTSSAKAAGGMLELPAPSNRDHRKAQPAGEGRTHMTKSDSLPSFRVSTLPLESHHPDPNTMGGASHRDRALSVTATVGETKGKDPAPAQPPPARKQNVGRDVTKPSPAPNTDRPISLSNEKDFVVRQRRGKESLRSSPHKKAL

SEQ ID NO: 4216 - DNA, 2648 bp, Homo sapien
  Unsure 571-602: Unknown base
aagtaagaattataaatctatctcagttaaaagtaggatctttgtttttattcagatattttgaaagtttagaagcattttgtatgctactttggtatttcttaagtatagtcagcaggaaagggtaacctgttttatgcaaaatttttttaatttgtcaaatgtttttagtgtgtctactttctgaaatagtctcaatatcctgtctgtatcctaggcagataactacacaagaacaaaacgctatatagaaaagaaaatatttgaggaaatcttaaattccataagaaagtaattcttgcaagaatgttggctacatatttttttttctgtcctgaataaattacatcattaggtctgttgaagcttttgaagctaccactattctttctgggataaaggctaattactgatttatctgccctcaaaatcccagagttaattctaattgagtactaaattaacagtaagtagttaacacagagaactaaaatttaaccgcattatatcactgtatatatttctcatgatttttgctaattagagcatttacttaaccagtaataaactnnnnnnnnnnnnnnnnnnnnnnnnnnnnnnnngtgtgtgtgtgtatatacttggctctgacacaactctggtgcttaattaggatatgttctattatgtattttgaatgtttatcctgctagtgcgatgaacttttgttggaaaagcagaattagaaggaacagtttttcaatcagtttcatttggtaattacaggaaaaccttgagttgctctaatttaatttttccaattaatacatttagactttaaattgcatccgtaattctcttggctgaaaaacagtggtattttaagacagttttgttatacatgtgacttacttttgactcagcctgagaggaggaaatgtaaagagataagagatttggcccaaagcagcaagagactagtaaccttgagccaggacgaagccaagacaacgtgactcccaagtagcaggagcagaggtcggtcacctgtggcattctgtttcattcccttttaaaattatgagactttataggcagtgtaaaacatcagcaggcagcgatgtgataggatgtgcgaaaaagctggtctgataccatggctataattacagagctttagttcaattaggattttgtaaatgagcaaatgacctttttttccagtgccccttgtaatagttaatatgagtccatgcaatcttgtgatgccattctcctgaaggtgttgatttctggtacccagccagcttagctttggctgctggaagcacagtaggtactgatgattacttcctggaaatcttgacaggcttattgtactgtgtaatggggaaaagttaaagtataatgtttggtgttaataaatgactgatgtgaaaataggaacatgtgtctttaatatcaaatatggctttatttgcagtgaaatctaaattccttattctacagtagtattttcttgccctgtgttgtatattttcctaaatacatttttcctgacagtggctttaggccagttgaacacacttagactgaaagtgtttaacttaaagagatcagtccagaaaccatgataaattagaatctttatctggaattaccaaattaaaatttaaaatcatggtccagaagagaacaaacattcatggttttttttatcctactgctcatttttaggtctgtgtttacatctagtctctactatttgtgaagtatgtcattatttttttcaagttcttctttgacttaactgaaaaataatattccaaattcttaatgtaacatgaaaagagaaatacaatttttgcttaaaagacattttttaaaaagcgttcaattcagtaatcatttctgttaatacaggaagtttttttggcttgccagttatatactgtgggtattttttaaaatgtgctacccttgggttgtctcatatcaccttgcgtaatcatgtattacaaaggttgataattgtcatttctcagatgtctgtatgttacattggcagcagtaaaatgttttaatgttgttaccttttaaataattgtgttgtattaacatgcctcatattttctggggaaacttgaaatatatctaaacaaaaaaggtctgttataaataggaattggcatttcattgttaatgttttttcctcataaaaatagttacaccaaaagtgacatattgtctattacatgggcccaatcagtattaaagtactccccttactcaaaaatattaaaaaataattcatgacacttagtagcattttcattgattgtttcaaaagatcttcataatggtcaaattgtccaattcacaaaagagtgagaaagttgttttcagtactgggaatttttaaaccttagttttaagaccaaaaatatctcttattagcttgaacattttgtgattacttttccctccccggatctagtccttttaaggagtaagtctaaagaatgaggccatgaagtcactatttcctcccacctcagtttgtctcctggtacttagctggcctatcgctttgtgtggcaatacccctgggtcgcttccccactcagccttctgtatctgctgttcacaggacatgccattatgtcttt

SEQ ID NO: 4217 - protein, 45 aa, Homo sapien
  Unsure 571-602: Unknown amino acid
MKSLFPPTSVCLLVLSWPIALCGNTPGSLPHSAFCICCSQDMPLC

SEQ ID NO: 4218 - DNA, 4659 bp, Homo sapien
gaactctgcatcccctaagagtcctctgttcctcccatgtcaggtggctctcagagtacagggaccttggcaggtggagaggaggatggggagcagcagctgggcagcccccagggctcctcctccagtgagctcacatcagagcacctcacagagcaatagccgtcctcagatgctcagcaaagttgtggcagtttgcatttctagggtaaactaactaggaaggatgtcgtgaaatggactatgcaagagtaagtttgtgtgtttcgccttaatctgaggcagagacacagcagaacctgaggacaaaagcaggtggaaggtgacggttagatggtaagccatgggcttgtcctggaactgcttcaactcagtggcttaaaatgagaactgcccaggtgagcatggagcatctcctaggctcgaggacatctctggagaatcatctggaaggtttatactgtgccttcccctcgtagcaaaaagattgttcatggcctttaaggaaggctgagatcactcacacacagcgcccccccaccccagagaaaccgagtcagcctacatgacttccaagggaacctggggccagataagccctgccccggtgagaccaaatgagctggagcatgtatggaggtgcggaccctgcaatcagtttgcgagtgtggaggacccgagacatcctgtaaaggcaacttggtctccctcccactcacctgccaacattgctgcaatacacatggtttatctgaaattccagggccagagtgcacatcagctcacatgactggcaactctaaatagagagccctaatggactgaggcaggaaacgtctaaaagctcaatctgctgtatgtcatgaccccttaggttgggtttatgccacatcggtcattttgaagtaggtgtttgatgccagctcagagactgtctcaggagtgcctccctggcctgggtagctaccctggaggtcatctccctgttctctgttggataaaggaacctcccccatctgtgacattcccttgggcccaggcttatgacctgcaccttttctgacacctgcccccaaagcacaggatgtgaattggtctctctccagataccccacgaggaagcaccttggacattctgcacatgataataatgcaacagagtcccccattgctgagagatactaacccgtgagaaacaagtatgctctcagctggtattgaactggtgggagaaactgcctcctacttttataatactgaattattcacaaaaaacctggtctgctctccaaaatgagagcatgttcctgggagccacatggggaccatccccagctgcctgctcctggtacctcccccatgatcatgcacagaccgtagagtcgagtcatctcgcagatccagaccatctcctctcattctcactctaaaaatgctggtggcccgcacatgacagcaactccccgaagccttccctttggaatcccatagaatgttctgcaatgattgggtccatcttgctgctcagaagaatcccgtcctgctctctagtgtggtgggatgaacttcaggcaacaaacaactggcagggttcccagttcctggagttatggagcagaaacacccaggcctagcagaattgtggctgaaacctggtgcccaaattccacaccctggaaatgtgtcaactgcccgtcagcctggattcaattctgagggctaagccacgaccttatccatgagtggcgaagacacccctgagtaaaggattgcttgcacctcacatctgtcttcttctaagattactcggagattttcaaacaacatctgagaacagaagccccctcccctactcagagaggaacgagggtggcccacctctcaagggccttggattcctgggaccaccctttgctgggaggaagaatccacaccgaatccttctgtcttcatggcctgctgtgctgaaacagaacagcaggttccatctttcacatctttttttctcccccagatgaaagacgactcaggaacggtagggctgggcagaggtgtctctccttgagagacaacaaaagcttctaagggagggagcttaaaggctgctagaaacctagcccaaccatccactcctgatctgagacagaaccttctccgccactcttcctgcaatcagtgtgaaattccagcttctttgattcccacttagcagtatgctccaatcacgttgctggcaaggcattttagagtttggagctgaggttcaaagccccctgcatttctctactggcaggccctggtgaaggaagacactttcagggaagaggctcttacagtctatggtggtagccatcttcacatccagtcaccagttgcatctagggagctgctggctataaaagggatcatccagtggagttgtaaacaagggaaccatcttgcaagatctaggaagaggaaggggagggatgtggactgggtctgatcacagcccttggccctgcttcatactttggagcttattaagatcaattttgataaccatgtaatttcttagaaccatggcaggtagtattgtgctttaaaaaccagaggctcctgaaagtcgtttacaccaggtgcattgataccatggctgtagctgatgcaactaacaagtactggggccagtgatcacaatccagggttggaaacaggagtgaagcccaccagcctgcctggttgatggacagcaggctctgccttctggaggcggcttatatcccaacagcctgaggcagggctctgtggcccaggccggcagtggctgcctctcttggttctgcatggtacattttgccaaccctgaggaccagttcttggggttccaggcctcggccttcctgctccacgtgctcaagcccccacagggggctgcgacaccatctggctcctcacagggaggtccagccatgttctctgggctcccagtgagccccctgccctccagctacccccagaatccatccttcattcctccaccaagctcctgtgtgagctgcagcacccacacgggggaagccctgcactccagcagcatcttccagccttggcacagaactgatggcaaaggaagggctgggttttcagcttctgggacccgaggaagaccccacctcactcctccttccccagtacatcagactggttaggaggcatcccagaaggggcagcctcatgcccaggtttcagccctaaaggtaatgattgtcttgactctgccttggcatttcgctcggaatcacggcagacttggagtgtttcttcaaggcaggcatctgcttatgagcaaggtcaaagatttttcaaaatattgtgcattaattcattaaagctactgttaaatatttgctgtttttagattggcgtccgtgctaattctgcagttgtagcactgtatattttatctcatttctgtgccaagaaagttcatctttatgtttttctaatacacaatcttgatcttgtttccaaaataaagcttcagctccttggtcaatagaagtaagggtgtagccatccagggtctcccggctctaggcagaccggatcccgcagttcatcccatggttgttgaaatgtacctcgatcagtcatctctggtattcctcactctagccatgagccattgccatcttatgggcccgatttgggtactctgaattatgtcatggagtagacagttacttctaaatcccagcaaccaagttgcgtatccttccttatagctagtttctatagagaagtgaaaaagaaatctggcttccttaataagatagttgagcctatgacattaaggagcagcgctgctggccgaagattctagattcactggtggtttaagaggcccagggatttagttcttactggtgcgtaagtgttttcccatcctaaccggaaaaccactcacccaggcttcccccacttcccctcaaattttctcagctctgccgctggtctccatgaacggcaaggggaaccaccactcattcactgtcagtgtaggtaagacagaggatgcccttgcaaaaattgggactgaggacagtagcacacggaatggtggatcgtacatttgcacccagagctactaaacgctcagtgaccccagagaccattaatttcccggagtgaaggggatgggggtagagctaattggaatttttattatcaggactcatcctaagaagaatgttggcctctcttcatccctggcttagccgtcaggtagaacgcttactcacctgacaccgacttcttagagaagcgagttttttttgaatggaggagcgatggtaaccccactagggggcgcccatgatcggctcccagtgcacccccttaagggtaagcaggccacatatctagagtctgatagtctgtgtgtacataaggtctagaagtctgtggaaacgccctgaaacctgtagtattatcttaactaccctcttatgttaaggtttacataataggatttttaaacaaatgtgtttaattttttaagatctcttgtattaaaattttcttttggaataagctgtggaaattttgttacaacctggttgagatcaacctctttacaatgacacaaattgtgacattttataaattagatacttc

SEQ ID NO: 4219 - DNA, 3780 bp, Homo sapien
tactggacaaacatttcctccaaggacacagctctctgcctccatgtcaccacctttgaaggactgactgattccctcggctggtgccagtgcctgctcctgccatggggcccgcggggagcctgctgggcagcggacagatgcagatcaccctgtggggaagtctggcagctgtcgccattttcttcgtcatcaccttcctcatcttcccgtgctctagttgtgacagggaaaagaagccgcgacagcatagtggggaccatgagaacctgatgaacgtgccttcagacaaggagatgttcagccgttcagttactagcctggcaacagatgctcctgccagcagtgagcagaatggggcactcaccaatggggacattctttcagaggacagtactctgacctgcatgcagcattacgaggaagtccagacatcggcctcggatctgctggattcccaggacagcacagggaaaccaaaatgtcatcagagtcgggagctgcccagaatccctcccgagagcgcagtggataccatgctcacggcgagaagtgtggacggggaccaggggctggggatggaagggccctatgaagtgctcaaggacagctcctcccaagaaaacatggtggaggactgcttgtatgaaactgtgaaggagatcaaggaggtggctgcagctgcacacctggagaaaggccacagtggcaaggcaaaatctacttctgcctcgaaagagctcccagggccccagactgaaggcaaagctgagtttgctgaatatgcctcggtggacagaaacaaaaaatgtcgtcaaagtgttaatgtagagagtatccttggaaattcatgtgatccagaagaggaggccccaccacctgtccctgttaagcttctggacgagaatgaaaaccttcaggagaaggaagggggagaggcggaagagagtgccacagacacgaccagtgaaactaacaagagatttagctcattgtcatacaagtctcgggaagaagaccccactctcacagaagaagagatctcagctatgtactcatcagtaaataaacctggacagttagtgaataaatcggggcagtcgcttacagttccggagtccacctacacctccattcaaggggacccacagaggtcaccctcctcctgtaatgatctctatgctactgttaaagacttcgaaaaaactccaaacagcacacttccaccagcagggaggcccagcgaggagccagagcctgattatgaagcgatacagactctcaacagagaggaagaaaaggccaccctggggaccaatggccaccacggtctcgtcccaaaggagaacgactacgagagcataagtgacttgcagcaaggcagagatattaccaggctctagcaacccagaagacaaccctgggtagcctgtgatcagtgtctggagacgtttcttctgtggaagagaagaagtgacacaaacctatacttcatatgctgctttagtcacctgaagatggttggagaggccctgtcgactgttctcccagttgttcagtttctgagacagagaggtacggactaggctgcacctgagtgtgcccctgcctgccagatggacaggtacacccaagcacatctccctgctgcaccctcaccacccacaaaagatcccagctgtcagtggtctcatctcattagtgaggaaagccaagctgtatggaaaagctgcactcaccaaggaccacaatgcccccggcctaaagtactgccattcagaaaagcaggtttttcttcctctctttccttttctctgtctgctactgactttaaggctttttcccccttgaaatgtccagattcctgtggttcatcccaaggaaattttcacacaaagcttggcctttgccctcaatataggtgttttaggatggtgacaaaccatggctgctgctttctgcccagctcgccagtcctccccaaagagttgcgcatcagcacctggggatctggaccctgcgggtgaagggatggggagggacgtccctggagtctcttctgtctttgttccttcttattttggcattcgatatcagcagcctctccccaaagtacttgaagtcagttttagatgctttattttatttttctagtcaaaaacgtgtttcccccagtgtttgaaaactcgtccgaatcttttcagtattttccatgagtattgtggtacttctagacttgtttaagcccagaactcattccttcaaaacagagagccttaatctttatgttgggacacagaccacatatttggacggcagccatgcatccatcgctgaagggctgtggacatgaatgtgtatttcccatggtctccgctgcccacaccaacagtgtggcatctcataagttaactgctaccctaaggtaatctaagattaaaatgtaaacatttatttttgttatgtaagtttataagatgttttatgttcaatgcctaatttctcaaaagtgccagaaaaaaatgtatattagctattttgattttatgtacaatgatttatactctccttttgaaaagataccataaagcacataagctagatcactacaaggagctgttatcttttttctaatcaagtgtttaaaacactgatggtttttaaagactcacctttttaaatggtacttggagctcctgattcaaattacctagaccccctagagaaataaatggaatatacataaataatcattttcagtggtttatggtgggcaatattgcaatatttgaaatggtaaaaatggaaagaagaacaaaatatgatgagaggtggctgtgaattataaacctcataaaagtgtcataattccattaaggtttaattatattttttcagaaaacagtgatgaattctgtagtccagtgcttgccaatgcaaattgcctattggaatcttcttcctatattttacaaacatcagtggctgaaatagctcagagtaagagctcagcctggtttgaatttaatcatctctttagatcttataaggccagcattaggaaacttgttcacttttcattttcaaaggagcctagttgaagtgctattatgagtgtgggctatggaaagacagcttttcctacactgataaagaaaaaaaatgaggaaattatttcatccccttgtgacatctgtgactttttggatttaataatcttgctgtttttcctctttatgacaaagaatataattgggaggatgaagtgtcttaaaaattgtagagaccagctcactggaatgtttttccatccctgtattcatggcttgactttgtgactgctctacactgcatgtctgacattgcagagtgagctatgttgaggtaaactggttggttgtcattattttgcaatcagcctggtctctcccatgaagatgtcgtgtgcataagcacaatcatcactgattagaagatcacagcagaatacccttggattagagagaagttcgtaccttgcatttctctgaattctagtctctcataagcactgctttgctggatgattttcactgctttgtgttaatgactttgagcgatctctcacatgatggggttctttagtacatggtaacagccatgtcatcttacacacctagcattgtgaatgctgtagtgacatcctttataggcaccttacagctcaaaacttttgtttcatttcatgccttacttatcaaaaaggcaggaaagtaggtatgatctctaaagtaaaaaaaa

SEQ ID NO: 4220 - protein, 432 aa, Homo sapien
MGPAGSLLGSGQMQITLWGSLAAVAIFFVITFLIFPCSSCDREKKPRQHSGDHENLMNVPSDKEMFSRSVTSLATDAPASSEQNGALTNGDILSEDSTLTCMQHYEEVQTSASDLLDSQDSTGKPKCHQSRELPRIPPESAVDTMLTARSVDGDQGLGMEGPYEVLKDSSSQENMVEDCLYETVKEIKEVAAAAHLEKGHSGKAKSTSASKELPGPQTEGKAEFAEYASVDRNKKCRQSVNVESILGNSCDPEEEAPPPVPVKLLDENENLQEKEGGEAEESATDTTSETNKRFSSLSYKSREEDPTLTEEEISAMYSSVNKPGQLVNKSGQSLTVPESTYTSIQGDPQRSPSSCNDLYATVKDFEKTPNSTLPPAGRPSEEPEPDYEAIQTLNREEEKATLGTNGHHGLVPKENDYESISDLQQGRDITRL

SEQ ID NO: 4221 - DNA, 5851 bp, Homo sapien
gtcagcggcggcggcggcggcggcagcggggccgggccggggccaggcgctgggggggccagggccggagctggagccggagccggagctggaggcgggcaaaaccggagcggccgggggcggccacggtgatgagccgggcctggcggacgcggcgccatcgcagtcagaaggaagaggcccagcagaagggactcgctgagccaccccccgccccactccatgttggctgtgctctcaggctggcaccatgcccccccctgcagaggtgacggacccgtcccatgcccccgccgtcctgcgccagctcaatgaacagcggctccgtggcctcttctgtgacgtcaccctcatagccggagacaccaagttccctgctcaccgcagcgtcctggctgcttcaagtcccttcttcagagaggccctgctcacttcagccccactaccccttccaccagctactgggggcgccgcacccaaccctgccaccaccacagctgcctcttcctcctcctcctcttcctcgtcttcttcctcttcttcctcctctgcttcttcttcttcttcctcttcctcttcctctccccctccagcctctccccctgcttcttccccaccccgggtcctggagttgccaggagtcccagcagctgcgttttctgatgtcctcaacttcatctacagcgcccggctcgcactgcctggtggtggaggggacggggcagctgtagcagagattggagctttggggcgccgtctgggcatctcccgccttcagggcctgggggagggaggtgatgcctgggtacctcctaccccagcccccatggccacctcgcagcctgaagaggacagctttgggcccgggcccaggccagctggggagtgggagggtgacagggctgaggcccaggcccctgacttgcagtgctccctgccccggcggcccctcccctgcccccagtgtggaaaaagcttcatccatcccaaacggctgcagacccatgaggcccagtgccgacgaggggccagcacgcgggggtctacagggctgggagctgggggcgctggccctggtggtcctgcaggggtggacgcctcagccctgcctccaccagtgggcttccgagggggccccgagcacgtggtgaaggtggtgggcggccacgtgctgtatgtgtgcgcggcctgcgagcgttcctacgtgaccctgtccagtctgaagagacacagcaatgtacactcgtggcggaggaagtacccctgccgctattgtgagaaagtgtttgctctggcggagtaccgcacgaagcatgaagtgtggcacacgggggagcgcaggtaccagtgcatcttctgttgggagacctttgtcacttactataacctgaagacccaccagcgagccttccacggcattagcccgggcctccttgccagtgagaagacacccaatggaggctacaagcccaagctcaatacactcaagctctaccgcctgctccccatgcgggcagccaagcggccctacaagacctacagccagggagccccggaggctcccctttctccaaccctcaacacaccggcccctgtggcaatgccagccagcccgccgcctgggcctccacctgccccagagcctggccctccaccctctgtcatcacttttgcccacccagccccctctgtcattgtccatgggggcagtagcagtggtggaggggggagtgggacggccagcacaggagggtcccaagctgcctcggttatcacttacactgctcccccgaggccacccaagaaacgagaatacccacctcctccccctgagcctgcagccacacccaccagcccagccacagcagtcagcccagccaccgctgcagggccagccatggccaccaccacggaggaggccaagggccggaatccacgggctggaaggactctgacttacacagccaagccagtgggcgggattggtggaggtgggggtccccccacaggggctggccggggcccctctcagctgcaggctccacctccactgtgtcagatcactgtgcgaataggggaggaggccatcgtcaagcgccgcatctcagagactgacctgcgtcctggggagctgagcggagaggagatggaggagagtgaggaggacgaagaggaggaggacgaagaggaggaggaggaggatgaggaggaatcaaaggctggtggggaggaccagctctggaggccctactactcctacaagcctaagcgcaaggctggagctgctggaggtgccagtgtggggggcagtgggctgccccgaggccgccggccaccacgttggaggcagaagctggaacggaggagctgggaggaaaccccagcggccgagagcccagcgggacgtgcccgcacagagcggaggcaccgatgcggggactgtgcccagaccttcaccaccctgagaaagctgcggaagcaccaagaggcccacggtgggggctcccacagctcccgggccggacggaggccctccacccgctttacctgcccccactgcgccaaggtgtgcaagaccgcagctgccctgagccgccacgggcagaggcatgctgctgagcggcccgggggcaccccaacccctgtcattgcctattccaagggcagcgctggcaccaggcccggggatgtcaaggaggaagccccccaagagatgcaagtctcctcatccagcggtgaggcaggtggcgggagcactgctgctgaggaagcttccgagaccgcctcactccaggaccctatcatttcagggggtgaggagcccccagtagtggcaagcgggggcagctatgtatacccacctgtgcaggaatttccactggccttgattgggggcggccgggaacctggcggtggcaggggaaaatctgggagtgaagggccagtgggggctggtgagggggaccggatggaggggataggggctgccaaagtcactttctaccctgagccctacccgctcgtctatggcccccagctccttgccgcctacccttacaacttcagtaacttggccgctctcccggttgctctcaacatggtcctacctgatgagaagggtgcgggggcccttcccttcctaccaggggtctttggctacgcagtgaatcctcaagcagcaccccctgccccaccaacaccacctcccccaactcttcctccaccaattccccctaagggagaaggggaaagggcaggggttgagagaacccagaagggcgatgtggggtgaaccctggggctcaatccccctttcaccagatgccaccctccctgaaccccccaccactaccagctccctggcctccctgccccttgggagccccttcacactcttgtgcagggacttgggggcccctggagctcaggggtcaggctgctttgtgtgagatgtagttttcccatctcctgggaagggatctttcgaggttcccctctcagtcttcctccagggaatggcctccatgaggggcagggccagcttccatcccttctccagcccttggggcaactgagcaatatacttaacctgaatctctactcacagcccccaccagctctgaatgtctaacctgctcccctgattcgtaaacctaggggaaaccatctctctcacctaatgacccgccttgttctgaagctttctctaagcccttcccagttgcttcctagcacattccattctttgtggcccagggcctggaccagaccattgtgatacctgaccccgcccacctgggagtgtggctttgggtttcatccttccccagcgtgggtctctacgtccctgtttcccttgtatcaagacaccttcctcagcttccatgcctttggatcttccatgttcctccccatattcctggacttcggagatggcctctcccaagccaggtcaaggaggtttgggggagggttgcccctctgcccctctgttctgtggctgagcactttcccagtccagggcagggaaatattggccctatcttgacccccaaatccagtgagctccagattcttccaaggcaaaagaggtaagcagatcacacctctttctgcctctacatatggcctattctgggctagaccagatttgggggccaggagggaagaactccatatgggatggagaagggaatctactttctccctgtttttttttcctgatggtttctcccagactagaccaaatagccagaaaaatgataggggtcggatgggtgggtaagcccaggatttgcacatgaccttccatccttacctgtattcccatctccccagtgtcactcccctcaccaatcactccagatggttttgggggaaccattctactcttctggtgggctttggggtatccccaccaactttcccttcaaaatagcaccttacaccccatctttgactcagttccccacacccaaagatcccagcctagggatggggtacagggactttaaatagtccctaatccctaatttgcactagttaaccctggtcagggtccctgtatttccttccagtgggggagataaatgtttgctcctaattctctttgaaaactgggcctccctgctctgtgattggataaatatttcccatcccacccacctccccccaaaaaatagctcacaaggggagagccagtatgggggagcaaatttgacaaatgggaattagaggagtgcagttttaaaaggaaaagttgctgtcatcaaaatggcagccttttccccagctactgtttttggggccaagatggctgccctagcagcaatcactgccaagggcaagatcatggcttttggagggaggtgagtttagggagggccaggaccatcctcctacccctcataccctcccagcatatacaaaaggggaggttttagacaggctccctgaatgttaaccacagaggagtcactccttcattcctcctctgtctctttgcacttttcttggtcttggccacagcctgagtgacgaatttcctactgaatgtaccaagttccaatttttaagggggggaaaggtttcaaatggggaaaaacacacaaaaaaaaaatcactaaaaattcccacaaatcttgtttctggcactttagaaaaactgcaaaaaaatacgtaataaagaatacatatatatatatctacacacaaattatatatctatctatctatacagcggaaccacaagagagactgaggaaggcctggaggcaggggcagaggtgacgacagtgcccctatatccttaacccatactcctctgaggcaaacaggcatgggaaaatggaagggttgaggatggaccggagaattggaacttcagaataggtcaaaattccaaaaccatggacatttttttttgggagaattgagattgtagacattttttttttcttaagtatgatcaaggaaaatagcttccagaatgtggtggttctgggcaacaaatgagattgtggcgacgtggagattaaaatatatgtatttgagctggggaatttgaatattgtgagtttcagatgttggaaatttgggattttgcagttttgtcttttgaaaatgatcaagtcttgtcagttcgtgccctctttccccatgttccctgggaagacgggtggtggcagagtgagaaggccactggttctgtgccgcagcacgcaaaatttagaattctacagactagctctatacgtagtgaggacccagatttagagaaactgaccaatatttatctccgcatttgtgtgtgtgtccaactctgtaggccaataaaccaacaagacaaatg

SEQ ID NO: 4222 - protein, 1029 aa, Homo sapien
ATPRPTPCWLCSQAGTMPPPAEVTDPSHAPAVLRQLNEQRLRGLFCDVTLIAGDTKFPAHRSVLAASSPFFREALLTSAPLPLPPATGGAAPNPATTTAASSSSSSSSSSSSSSSSASSSSSSSSSSPPPASPPASSPPRVLELPGVPAAAFSDVLNFIYSARLALPGGGGDGAAVAEIGALGRRLGISRLQGLGEGGDAWVPPTPAPMATSQPEEDSFGPGPRPAGEWEGDRAEAQAPDLQCSLPRRPLPCPQCGKSFIHPKRLQTHEAQCRRGASTRGSTGLGAGGAGPGGPAGVDASALPPPVGFRGGPEHVVKVVGGHVLYVCAACERSYVTLSSLKRHSNVHSWRRKYPCRYCEKVFALAEYRTKHEVWHTGERRYQCIFCWETFVTYYNLKTHQRAFHGISPGLLASEKTPNGGYKPKLNTLKLYRLLPMRAAKRPYKTYSQGAPEAPLSPTLNTPAPVAMPASPPPGPPPAPEPGPPPSVITFAHPAPSVIVHGGSSSGGGGSGTASTGGSQAASVITYTAPPRPPKKREYPPPPPEPAATPTSPATAVSPATAAGPAMATTTEEAKGRNPRAGRTLTYTAKPVGGIGGGGGPPTGAGRGPSQLQAPPPLCQITVRIGEEAIVKRRISETDLRPGELSGEEMEESEEDEEEEDEEEEEEDEEESKAGGEDQLWRPYYSYKPKRKAGAAGGASVGGSGLPRGRRPPRWRQKLERRSWEETPAAESPAGRARTERRHRCGDCAQTFTTLRKLRKHQEAHGGGSHSSRAGRRPSTRFTCPHCAKVCKTAAALSRHGQRHAAERPGGTPTPVIAYSKGSAGTRPGDVKEEAPQEMQVSSSSGEAGGGSTAAEEASETASLQDPIISGGEEPPVVASGGSYVYPPVQEFPLALIGGGREPGGGRGKSGSEGPVGAGEGDRMEGIGAAKVTFYPEPYPLVYGPQLLAAYPYNFSNLAALPVALNMVLPDEKGAGALPFLPGVFGYAVNPQAAPPAPPTPPPPTLPPPIPPKGEGERAGVERTQKGDVG

SEQ ID NO: 4223 - DNA, 603 bp, Homo sapien
ggcgatcctactaaataaacagaatgaggaaaattgatgagagtgataccacatgttggaaagataagggagcagctaaacctctccttatccttattgcttataagaatgtaggcctgggcgtgagccactgttcccagcaggaatttcttttttatagtattggataaagtttggtgtttttacagaggagaagcaatgggtcttagctctttctctattatgttatcatcctcccttttttgtacaatatgttgtttacctgaaaggaaggtttctattcgttggttgtggacctggacaaagtccaagtctgtggaacttaaaaccttgaaggtctgtcataggactctggacaatctcacaccttagctattcccagggaaccccagggggcaactgacattgctccaagatgttctcctgatgtagcttgagatataaaggaaaggccctgcacaggtggctgtttcttgtctgttatgtcagaggaacagtcctgttcagaaaggggctcttctgagcagaaatggctaataaactttgtgctgatctgaaaaaaaatctatgtcgggtgcggagaaagaggtaatgaaatggcag

SEQ ID NO: 4224 - protein, 3 aa, Homo sapien
MKW

SEQ ID NO: 4225 - DNA, 859 bp, Homo sapien
agctatttcaaggcgcgcgcctcgtggtggactcaccgctagcccgcagcgctcggcttcctggtaattcttcacctcttttctcagctccctgcagcatgggtgctgggccctccttgctgctcgccgccctcctgctgcttctctccggcgacggcgccgtgcgctgcgacacacctgccaactgcacctatcttgacctgctgggcacctgggtcttccaggtgggctccagcggttcccagcgcgatgtcaactgctcggttatgggaccacaagaaaaaaaagtagtggtgtaccttcagaagctggatacagcatatgatgaccttggcaattctggccatttcaccatcatttacaaccaaggctttgagattgtgttgaatgactacaagtggtttgccttttttaaggatgtcactgattttatcagtcatttgttcatgcagctgggaactgtggggatatatgatttgccacatctgaggaacaaactggttattaaatagagcatctgttgagggactcttttaaaaccacagccatgaacagacgttggggctaagagacagagcagcctgcgacagtgtggacctacctgtagcagctagcaaaggcctctagcagctacagtcccttctggagtctttatttgcatgcaaaatgcaaaggagtcctggtgacctacctccaaggcagctgccctcctgaacactcccttggaaaacagtaaacatcattttggaatgtgaacaaccagagactacacaggagaaaggaaaaaaaaattctgaagatgcaaaatcttgggtggcttcaccgttcagttttttaataaaaggaacaatatacaaca

SEQ ID NO: 4226 - protein, 137 aa, Homo sapien
MGAGPSLLLAALLLLLSGDGAVRCDTPANCTYLDLLGTWVFQVGSSGSQRDVNCSVMGPQEKKVVVYLQKLDTAYDDLGNSGHFTIIYNQGFEIVLNDYKWFAFFKDVTDFISHLFMQLGTVGIYDLPHLRNKLVIK

SEQ ID NO: 4227 - DNA, 3828 bp, Homo sapien
cgactccttagagcatggcatggctcagaggtgctggtaaaactgatgggggtttttgctgtccctcccctcagcgccgacaccatgtggatccaggttcggaccatggacgggaggcagacccacacggtggactcgctgtccaggctgaccaaggtggaggagctgaggcggaagatccaggagctgttccacgtggagccaggcctgcagaggctgttctacaggggcaaacagatggaggacggccataccctcttcgactacgaggtccgcctgaatgacaccatccagctcctggtccgccagagcctcgtgctcccccacagcaccaaggagcgggactccgagctctccgacaccgactccggctgctgcctgggccagagtgagtcagacaagtcctccacccacggcgaggcggccgccgagactgacagcaggccagccgatgaggacatgtgggatgagacggaattggggctgtacaaggtcaatgagtacgtcgatgctcgggacacgaacatgggggcgtggtttgaggcgcaggtggtcagggtgacgcggaaggccccctcccgggacgagccctgcagctccacgtccaggccggcgctggaggaggacgtcatttaccacgtgaaatacgacgactacccggagaacggcgtggtccagatgaactccagggacgtccgagcgcgcgcccgcaccatcatcaagtggcaggacctggaggtgggccaggtggtcatgctcaactacaaccccgacaaccccaaggagcggggcttctggtacgacgcggagatctccaggaagcgcgagaccaggacggcgcgggaactctacgccaacgtggtgctgggggatgattctctgaacgactgtcggatcatcttcgtggacgaagtcttcaagattgagcggccgggtgaagggagccccatggttgacaaccccatgagacggaagagcgggccgtcctgcaagcactgcaaggacgacgtgaacagactctgccgggtctgcgcctgccacctgtgcgggggccggcaggaccccgacaagcagctcatgtgcgatgagtgcgacatggccttccacatctactgcctggacccgcccctcagcagtgttcccagcgaggacgagtggtactgccctgagtgccggaatgatgccagcgaggtggtactggcgggagagcggctgagagagagcaagaagaaggcgaagatggcctcggccacatcgtcctcacagcgggactggggcaagggcatggcctgtgtgggccgcaccaaggaatgtaccatcgtcccgtccaaccactacggacccatcccggggatccccgtgggcaccatgtggcggttccgagtccaggtcagcgagtcgggtgtccatcggccccacgtggctggcatacacggccggagcaacgacggagcgtactccctagtcctggcggggggctatgaggatgacgtggaccatgggaattttttcacatacacgggtagtggtggtcgagatctttccggcaacaagaggaccgcggaacagtcttgtgatcagaaactcaccaacaccaacagggcgctggctctcaactgctttgctcccatcaatgaccaagaaggggccgaggccaaggactggcggtcggggaagccggtcagggtggtgcgcaatgtcaagggtggcaagaatagcaagtacgcccccgctgagggcaaccgctacgatggcatctacaaggttgtgaaatactggcccgagaaggggaagtccgggtttctcgtgtggcgctaccttctgcggagggacgatgatgagcctggcccttggacgaaggaggggaaggaccggatcaagaagctggggctgaccatgcagtatccagaaggctacctggaagccctggccaaccgagagcgagagaaggagaacagcaagagggaggaggaggagcagcaggaggggggcttcgcgtcccccaggacgggcaagggcaagtggaagcggaagtcggcaggaggtggcccgagcagggccgggtccccgcgccggacatccaagaaaaccaaggtggagccctacagtctcacggcccagcagagcagcctcatcagagaggacaagagcaacgccaagctgtggaatgaggtcctggcgtcactcaaggaccggccggcgagcggcagcccgttccagttgttcctgagtaaagtggaggagacgttccagtgtatctgctgtcaggagctggtgttccggcccatcacgaccgtgtgccagcacaacgtgtgcaaggactgcctggacagatcctttcgggcacaggtgttcagctgccctgcctgccgctacgacctgggccgcagctatgccatgcaggtgaaccagcctctgcagaccgtcctcaaccagctcttccccggctacggcaatggccggtgatctccaagcacttctcgacaggcgttttgctgaaaacgtgtcggagggctcgttcatcggcactgattttgttcttagtgggcttaacttaaacaggtagtgtttcctccgttccctaaaaaggtttgtcttcctttttttttatttttatttttcaaatctatacattttcaggaatttatgtattctggctaaaagttggacttctcagtattgtgtttagttctttgaaaacataaaagcctgcaatttctcgacaaaacaacacaagattttttaaagatggaatcagaaactacgtggtgtggaggctgttgatgtttctggtgtcaagttctcagaagttgctgccaccaactctttaagaaggcgacaggatcagtccttctctagggttctggcccccaaggtcagagcaagcatcttcctgacagcattttgtcatctaaagtccagtgacatggttccccgtggtggcccgtggcagcccgtggcatggcgtggctcagctgtctgttgaagttgttgcaaggaaaagaggaaacatctcgggcctagttcaaacctttgcctcaaagccatcccccaccagactgcttagcgtctgagatccgcgtgaaaagtcctctgcccacgagagcagggagttggggccacgcagaaatggcctcaaggggactctgctccacgtggggccaggcgtgtgactgacgctgtccgacgaaggcggccacggacggacgccagcacacgaagtcacgtgcaagtgcctttgattcgttccttctttctaaagacgacagtctttgttgttagcactgaattattgaaaatgtcaaccagattctagaaactgcggtcatccagttcttcctgacaccggatgggtgcttgggaaccgtttgagccttatagatcatttacattcaatttttttaactcagcaagtgagaacttacaagagggtttttttttaatttttttttctcttaatgaacacattttctaaatgaattttttttgtagttactgtatatgtaccaagaaagatataacgttagggtttggttgtttttgtttttgtattttttttcttttgaaagggtttgttaatttttctaattttaccaaagtttgcagcctatacctcaataaaacagggatattttaaatcacatacctgcagacaaactggagcaatgttatttttaaagggtttttttcacctccttattcttagattattaatgtattagggaagaatgagacaattttgtgtaggctttttctaaagtccagtactttgtccagattttagattctcagaataaatgtttttcacagattgaaaaaaaaaaaaaa

SEQ ID NO: 4228 - protein, 793 aa, Homo sapien
MWIQVRTMDGRQTHTVDSLSRLTKVEELRRKIQELFHVEPGLQRLFYRGKQMEDGHTLFDYEVRLNDTIQLLVRQSLVLPHSTKERDSELSDTDSGCCLGQSESDKSSTHGEAAAETDSRPADEDMWDETELGLYKVNEYVDARDTNMGAWFEAQVVRVTRKAPSRDEPCSSTSRPALEEDVIYHVKYDDYPENGVVQMNSRDVRARARTIIKWQDLEVGQVVMLNYNPDNPKERGFWYDAEISRKRETRTARELYANVVLGDDSLNDCRIIFVDEVFKIERPGEGSPMVDNPMRRKSGPSCKHCKDDVNRLCRVCACHLCGGRQDPDKQLMCDECDMAFHIYCLDPPLSSVPSEDEWYCPECRNDASEVVLAGERLRESKKKAKMASATSSSQRDWGKGMACVGRTKECTIVPSNHYGPIPGIPVGTMWRFRVQVSESGVHRPHVAGIHGRSNDGAYSLVLAGGYEDDVDHGNFFTYTGSGGRDLSGNKRTAEQSCDQKLTNTNRALALNCFAPINDQEGAEAKDWRSGKPVRVVRNVKGGKNSKYAPAEGNRYDGIYKVVKYWPEKGKSGFLVWRYLLRRDDDEPGPWTKEGKDRIKKLGLTMQYPEGYLEALANREREKENSKREEEEQQEGGFASPRTGKGKWKRKSAGGGPSRAGSPRRTSKKTKVEPYSLTAQQSSLIREDKSNAKLWNEVLASLKDRPASGSPFQLFLSKVEETFQCICCQELVFRPITTVCQHNVCKDCLDRSFRAQVFSCPACRYDLGRSYAMQVNQPLQTVLNQLFPGYGNGR

SEQ ID NO: 4229 - DNA, 860 bp, Homo sapien
ggcacgaggagaagatggtgctgcggcggctgctggccgccctgctgcacagcccgcagctggtggaacgtctgtcagagtcgcggcctatccgacgtgcggcgcagctcacggccttcgcactgctgcaggcccagctgcggggccaggacgcggcccgccgcctgcaggacctcgcggctgggcccgtgggctccctgtgccgccgcgctgagcgatttagagacgccttcacccaggagctacgccgcggcctccgaggccgctcggggccaccaccaggtagccagaggggccctggcgcaaacatttaatcctgggctgtgcggggccgaggctgcttgcttttccttccgggctctacagtggcatcaatgtggaggggtcattccgggcactgcgcgcggcttcgaatcccgactgggattgttggcctgcagacatcccacgcataagagcctaggccagaccgcccgctccgttgaagtcttgtgattggacaagacacagtgtggagaaagacccctaagcctaacagagatgaaggtaggctgggtccagacacggcacctacggagagccacggaccgaagccagagagcctttcctctgcaagtgggactgaaactcttgacagatgctgctcaatctgactggtatagcaggacagttaattccagggacgatatggatgaaaagacaaccctacagctgccaaattcctttgattaaatgtgtgagctggttgataggcatgagtgtgatacttctcaggcaagatgtgttaagaataccggggactgtaggcctatggtaataataaacacgtattttatgaaatgaaaaaaaaaaaaaaaaaa

SEQ ID NO: 4230 - protein, 99 aa, Homo sapien
MVLRRLLAALLHSPQLVERLSESRPIRRAAQLTAFALLQAQLRGQDAARRLQDLAAGPVGSLCRRAERFRDAFTQELRRGLRGRSGPPPGSQRGPGANI

SEQ ID NO: 4231 - DNA, 7195 bp, Homo sapien
cttcctcattggcgccgtgcagagaggcggaatgttcaactcctaactgcggcggaaacgtgggagccgcgcgggccgctgtcgtcccaacccccgccgccctcgtcgcgcgcggggcctccgcgcccccggctgctgctcacgccccgcccgggagccagattttgtggaagtataatactttgtcattatgagatgtcgtctctcggtgcctcctttgtgcaaattaaatttgatgacttgcagttttttgaaaactgcggtggaggaagttttgggagtgtttatcgagccaaatggatatcacaggacaaggaggtggctgtaaagaagctcctcaaaatagagaaagaggcagaaatactcagtgtcctcagtcacagaaacatcatccagttttatggagtaattcttgaacctcccaactatggcattgtcacagaatatgcttctctgggatcactctatgattacattaacagtaacagaagtgaggagatggatatggatcacattatgacctgggccactgatgtagccaaaggaatgcattatttacatatggaggctcctgtcaaggtgattcacagagacctcaagtcaagaaacgttgttatagctgctgatggagtattgaagatctgtgactttggtgcctctcggttccataaccatacaacacacatgtccttggttggaactttcccatggatggctccagaagttatccagagtctccctgtgtcagaaacttgtgacacatattcctatggtgtggttctctgggagatgctaacaagggaggtcccctttaaaggtttggaaggattacaagtagcttggcttgtagtggaaaaaaacgagagattaaccattccaagcagttgccccagaagttttgctgaactgttacatcagtgttgggaagctgatgccaagaaacggccatcattcaagcaaatcatttcaatcctggagtccatgtcaaatgacacgagccttcctgacaagtgtaactcattcctacacaacaaggcggagtggaggtgcgaaattgaggcaactcttgagaggctaaagaaactagagcgtgatctcagctttaaggagcaggagcttaaagaacgagaaagacgtttaaagatgtgggagcaaaagctgacagagcagtccaacaccccgcttctcttgcctcttgctgcaagaatgtctgaggagtcttactttgaatctaaaacagaggagtcaaacagtgcagagatgtcatgtcagatcacagcaacaagtaacggggagggccatggcatgaacccaagtctgcaggccatgatgctgatgggctttggggatatcttctcaatgaacaaagcaggagctgtgatgcattctgggatgcagataaacatgcaagccaagcagaattcttccaaaaccacatctaagagaagggggaagaaagtcaacatggctctggggttcagtgattttgacttgtcagaaggtgacgatgatgatgatgatgacggtgaggaggaggataatgacatggataatagtgaatgaaagcagaaagcaaagtaataaaatcacaaatgtttggaaaacacaaaagtaacttgtttatctcagtctgtacaaaaacagtaaggaggcagaaagccaagcactgcatttttaggccaatcacatttacatgaccgtaatttcttatcaattctacttttatttttgcttacagaaaaacggggggagaattaagccaaagaagtatatttatgaatcagcaaatgtggtgcctgattatagaaatttgtgatccctatatacaatataggatttttaaagttgagacattctggctttttcttttaatgaatactttttagtttgtattggactttatttcctttattcaaatcatttttaaaaactaacattttgaacaaacattcttaactcctaattgttcttagacacgtagtaattctgtgacatactttttttttcttatagcaatacactgtaatatcagaaatggttggcctgagcaacctagtaagacttcgtctctactaataattaaaaaactagctggcatggtagcacacacctgtagtcccagatacttgggaggccaaggcaggaggattgcttgagacctagcaatcagtcagggctgcagtgagccatgaggcaccactgcactctagcctgggcaagagaacaagatcctgtctcaaaaaacaaaaaaaagaaagaattgatagtacaaaatccaacaacaatactgagatgatctaagaaggttataacaaaatgctcttcagaaatacctaagtgctgagaatttttagtactaaagagcacagctgctcaaagtaaagcctgagcagtgttctcagtaatgtatttgaaggaaaaataccctgatttgaaaccaacagcagatgttgcaaactttcataccactgctggccatggaagcctcttaacaacacactgtcatttaaggctgtgcttgtgctttatacaaagagaaagaggtggtcttaaggggatgcttccaggggggtgagttcatgcctctcctgtattttccagcaagtggggtatgtgtggtggtttgttttttagaggggcataataatccaggattctaagcatatgctcagctattttaaagaggaaattaaatattataaaagaaatagtaaagataagttatcctcacttaggcaaaagcacaggtcctttccatatcaagtttagcctaccagggttgttttttgttttaaccctgcttaataatgttggtgttttagaagtagatacaggcactgctctgaaaacctggctagccaaggatattctcagaatgttatcacctgtttgtcaaagcttgtttaaattataaaacacttttaattatatatatgaggcaaaagaactaagacttttttcaaactaaattagaaaggagtgtcattatttgactgttaaaccaaaatatttttggtgggtctttttatggaagtttaaagaaaggacatcatcatagatatgatctaacagtatttctaactatatttgatcattaaaagcctcttggaatttgaagcgtgacgtgtttctaatgccccttgagaggtgaaaaataccacataatgatcagtatgctgtgccagcttcatttggggagaaataactagtagaaagttctgggtgtgaggtgtacagcagtctaggtggcatagtgatgaagaaagggatcagagtctgactgtcactcagaatcctgggctcagttgcttgacaaccttgggaaaattgttttatctttgtgcgtctgtttgctgatcttcagcgtgggaataataacagtacctacttgaaaggatcattgtgcggattaaaagaaataatatatgtaaagcactttaacacagcaccaggcccacggaaagtggctaatgttagctactatgaatggtgccagtgaagacactgaaaaataagtgatttcagtaaccttctggaaagctatcagtttcaaataatattttctctgtagtatgagatgaaattaaaagtggatagctttcaggaaagataaagagaacatgcttagaatgtaagctaaacagattttttctgttgctctttgaaaactatgagccctggccagcttaacctggtctgaggtgagactaaacacaaaaacagtagataaatctctccctaaaagatggattcccccacatacccatgctactagtttctctgtctattcacacatatgtacaaatacatgaacacagcctgtctgtgctcagacatagagaagtactacctgacttgagtcaatgcacccaagaagaaaagcttggagtagagcagaagggagggcttgggactcctgtctttccagcatgccctggggtgcagtggtcagccacctgaagagagagccaatagcatggggtttacaaggcaaagatagtcattcattcaacacatattcatagagctccttctctgtgccagacactgttctggaagatagctagatgaaaatctttgcactcacagagcttacatgccagtgagtgaagatcgatgataaataaagcaaatgcatcatatgttcacatttgataagtatatgccaaaaaatgaagccgggaaggaggacaaggcccatgggtgggtgttgaggtttttaaagtgtggtcaggaaaggccccactgataaggtaacatttgagcaagtctgaaaaaggcaaggggatctttggggctaacttcgggatccctgcactttatgtaagaatgtaaacctggagtctcatttaagaatgatcagcaatacgtttagaacatatgaactgaatgaaatggacattttttcttaatttatgtataaatccatatgattatacataaagttctgatgcattaataaaagcagccaaatagggccaaagagaaaaataacaggactctgtactggacctaactttatcattaattaggtaatattttcctcatttctttactgctgccattttcctcaccagtattccagagatggtcatagctcattactctaccaccaagaacctaaaaggaattagaatacagcagaattggcctcagtgaagagcttaaaattgttctcctcgtagaactggactattgatcattaccacgtgacgttggctctattactttctgttcccaatgtccttctagtggtttgaaaatgttaaaacatccctaaaatctaaatcatataatcagaattctatagtgtcccactctatctgtaaagatcatttggaagactttagactctattaattttaaaaggaatatttattagccatatgcagaatttctaatgatgatattgtacagcttctaattcacttttcagatcagtgtttgaaatggcaattatcagtgttggatttagttccaactacttgatttacaaaaatgtacatttagaggttaaaagaaacagtgagaaatgtaaacattcaaaatgataattgaatctctcagttgtgggaataattatcagagacatgcaactgaaaatgtctcacctttcatctttttttcttaattcataaagttatcttgtagaatttgatgagaccctccctagtcattctcaactggggcggtgctgtcaccgaatggtgtttgagagtgttggggctagggcacatttttggttgtcacagcaactggggtggcatttgctgcccagtgccaggaatagtaacattatgaatgccagggacagtgtgctcagtaaagtcttccatccaaaaggggcagggcacggtggctcacgcctgtaatcccagcactttgggaggccaaggtgggcggatcacctgatgtcaggggttcgagaccagcctggccaacatggtgaaaccctgttgctactaaaaatacaaaaattggctgggtgtggtgtcacatgccagtaaccccagctactagggaggctgaggcaggagaatcacttgaacccgggaggcagaggttgcagtgagctgagattgcaccactacactccagcctggatgacagagtgagacttcatctcaaaaaaaaaaaaaaacaaaaaaaaacaacccggtagcattgtcccttccccactgacaaacttatcaaatccagaagctttagagtttcgtctctaattatttttctcctgaacaaaattacccaagtcaaaacaaaatgtatttttagaattacggcagcatacgacctgaattttgtgagtttcgtggctttatcttaaatcaccatttccctaaaaatggtttctttctccttagaaatgctggtggcaacttgatgaaacagccaaatgcaccagggcaggtcactttcccattacactgattccacaattaaaaaaaaaaaagaaaaaaaactcattgagatagctacagttctataggttaatttaaagcctcctttttctactcatttttgaaagcaaaattacattttactattttacataaccagtgaaaagacgttgaaagcctacagctcactgtttttggtgctctggaaatgttgagggtgggtttttaaccagtgatttttaacgtgcagtgaatttgttagacttttaaacaccagctaaggtagtcaaacttgatccccattaaaaatcaaggaattaggggtcgggggagggtttaggagtgatccagaatgacctcccagaattactgtgcgtacaactttatttttcagagttttcattggaatggtaagagttttatgaaagacagttttaaaacttattctgagttaaatattaatactttaaaaaattattgtactagacttattgcagccttttgaaagtagcagagtttcatcataccacatatataacagagcataaattttctataatcaggcaccttttgctgcttttgagtaagactgttttcctgtttaagtgttaagcatcgccagacataaaaatctattctctcctctcgattgtagcatagcctgacagctctagatacagcatttctatgatgaaaaatgagtatccatcaggaaatctagaagactagccgtgttttctcagactccacctttgtttgcactctgttgcctgtgaggagctttctggcatgtgattatttacttcaaaactagagttccaagcacctacattaattattttatattgtgtgcagaatagtatatcttttaatgtcagatatgatacactgcacatattgcttttgcactcttaaaatttttgtactaaataatagaaaatatttatattctttgagtgtgagctttgaatagatggcattatcactttattgtttttttaacaaaaactttttctcaattattctattgcaatgttattctgagcaagtcctatgccaaatatcttgtataatgtttgtatggaagattaaattttactcttgtgtggtaagactatttcagttactgattttatagttggaatttgatattccagcacaaagtccacagtgtattcagaaatccaagttggtgtcatacatttcattttgatgtgaacttttctttgctttcctttgttctaagactccattttgcaataaacgttttgacagtaaaaaaaaaaaaaaaaaaa

SEQ ID NO: 4232 - protein, 455 aa, Homo sapien
MSSLGASFVQIKFDDLQFFENCGGGSFGSVYRAKWISQDKEVAVKKLLKIEKEAEILSVLSHRNIIQFYGVILEPPNYGIVTEYASLGSLYDYINSNRSEEMDMDHIMTWATDVAKGMHYLHMEAPVKVIHRDLKSRNVVIAADGVLKICDFGASRFHNHTTHMSLVGTFPWMAPEVIQSLPVSETCDTYSYGVVLWEMLTREVPFKGLEGLQVAWLVVEKNERLTIPSSCPRSFAELLHQCWEADAKKRPSFKQIISILESMSNDTSLPDKCNSFLHNKAEWRCEIEATLERLKKLERDLSFKEQELKERERRLKMWEQKLTEQSNTPLLLPLAARMSEESYFESKTEESNSAEMSCQITATSNGEGHGMNPSLQAMMLMGFGDIFSMNKAGAVMHSGMQINMQAKQNSSKTTSKRRGKKVNMALGFSDFDLSEGDDDDDDDGEEEDNDMDNSE

SEQ ID NO: 4233 - DNA, 7195 bp, Homo sapien; identical to SEQ ID NO: 4231

SEQ ID NO: 4234 - protein, 455 aa, Homo sapien; identical to SEQ ID NO: 4232

SEQ ID NO: 4235 - DNA, 2046 bp, Homo sapien
agtttaaaaatttgtgttggacttcatgcgggccacaggttggacaagcttgccctagggcattgtgtgctttccgtaacttctcagttgtatttcgttatccatgactctccagtgttttttctgttggaccacacccgtcacagttcacagttccaaagagaaatttcccagcctattctaaatcttgttaatgacgaagagtccaatgtatctcattatttgtagccaattttagactcttttcaatacctcccccccattttaattagtattgatcatattcagtctttcattttactcttcatctgtagcgtgacctcaaggtaaagatgaaactatttcatgaaaaggggaggagtatggctgtgcattagctctactccctctctggtaagtactggggagagaacagccctgccagtactgggtttgatagattctaaatattaatcacacatcctgcctacagttagccattttagtttctgggagttctttcatgtacattttcttccattaattgaattaggtataattgagatggcaataaatatgcccgtattagaaagaggaaacaaagctacatccggcttatgattttgttgagtcacttctcccgaggcagcctttccaatgcctggtcccttcccctgagagcaggtggactgctggtggtggctttctttcctgcagagaggcactttagacccatacctgctgtgagctgaattgatgttctcatcctgtgaaccttctcccactttaacctaatttatctttacttgtttaaagataaggaaacccaagatgtactttatttgcaaactcaaagcaaatggcgagccacctgtgacccagtaaccagaaaagaaaccatgccatttgtataagtagagacacttcttgttgaggtaggcaaggctcttgtgagcgatttttttcccctagtgagacctaacaaaagacaagctatatcatttctgcctgaaattatctgcttgaaaagatcaaaatatcaggatacttagctcttcacaaatatgaagtcattatcacatttcactgagccagaaatcactgttaacagcacacacaaaagactacactggttgaacagcaaagagaaacccgggtctccagaatcacagtttagtccttctatattactgcaagtgacctgttttttctgaaggctccccgcaaatgaagtcctggaatggaaaaaatccataagtccataaattaacttgataaatattttagaacagacaaaagaaaatattgagtgatgtagttctaatcctcctaatatggaacctggcaagactgaatcattttactgtgaaatatataaacacaatagaatgagccaacatgatggtttctctccagtaagagtttttcttttggaaatgaggttaacctagccccaaatctagcaattctcataaaatccgattttagaattagcctcccagattaatctgaatgattgacttattttttcttaggcaagtcagtaagccacccactagacagccatatccagcaaaataagagaagtttccagatgccaaatgataagccaccatcaacccagcggggaagccttctggttggtttggctgtatgagattcaggaaggccagaatacccaaaattattcacacgacgttaacttattggtactggctaagcaatacatgtatttcctaaaggaggagatggtcttttggttgatttatggacacacttgtttcatctgactgtaaatatattgcatgctttattctgatggtgcactatttcatccagcaagcttttcatctgagaatgtttaatgttgaccttattcttagagcaagtagatctaaatatttttcagctgagttattagggagtcattattctgtggtacaatgctgcaaaaagcatcatgtggaagaatgggaactatgcttactttatgaagtgatgtataacacaatgaaatctgttttacaactactgtgctgcatttaattatcttccatttttgctgtt

SEQ ID NO: 4236 - protein, 75 aa, Homo sapien
SLKICVGLHAGHRLDKLALGHCVLSVTSQLYFVIHDSPVFFLLDHTRHSSQFQREISQPILNLVNDEESNVSHYL

SEQ ID NO: 4237 - DNA, 1113 bp, Homo sapien
agcgccgccgcggtctgcggaatgtcaactattcaacatggaggcggaggtcgataagctggaactgatgttccagaaagctgagtctgatctggattacattcaatacaggctggaatatgaaatcaagactaatcatcctgattcagcaagtgagaaaaatccagttacactcttaaaggaattgtcagtgataaagtctcgatatcaaactttgtatgcccgctttaaaccagttgctgttgagcagaaagagagtaagagccgcatttgtgctactgtgaaaaagactatgaatatgatacaaaaactacagaagcaaacagacctggagctgtcaccactgactaaagaagagaaaactgcggcagagcaattcaaatttcacatgccagatttatgaagaaatggacttggaaaggaaattctaacagagaagagcttaattccggagaaatttaggaagatgtcttgttaacccttgatgtctagagattgggggctggtgaagggggtttggcttcaatgactggataatgatatctttcatgagagagattataagaagaagggcagataatatatgaataaagttcagccaaaaggatcaaatgagaataaaacgatttaaatatatgtacacacgcatgcacacacacacttagtcttgtaatttcaggccagaaattctcaacactattttgcatctgttttctttttctaagtcatgataatatagatgttctggtctatcataaaagaatgtttatgtacatttcagtcattcggtatgtggctttgtaaattaaagtataggcaaaacatttgtgttatacatgatatataatttcattttgtaaatgttgattgcacatgtggtcacattattgttgagactgcttttatgtgacctgtagtctcccacagaacctaaagtaataagctggcttttctgtgatagccacgtttgcgtatttctttccctatttcccttgcctgctaatgttgaacagcatgaacttgctttctgatgctgttttagactgtccctgttgtatctcaataatatctttgttttcctacaaaaaaaaaaaaaaaaagaaaaaaaaaaaa

SEQ ID NO: 4238 - protein, 121 aa, Homo sapien
MEAEVDKLELMFQKAESDLDYIQYRLEYEIKTNHPDSASEKNPVTLLKELSVIKSRYQTLYARFKPVAVEQKESKSRICATVKKTMNMIQKLQKQTDLELSPLTKEEKTAAEQFKFHMPDL

SEQ ID NO: 4239 - DNA, 829 bp, Homo sapien
gcggcgcagcgcgcggcgcagcgcgcggcgtcagtcttggctggcagacctgtactccgtactccgtacttcgtagtcgcagcggcgcggtcttcggcagtctagtcatccaccgccatcctgggccccacgtgttgcctgaccattcctgagcccaggtgggagccgtggctgaggtgacggtctcaaagtggaagagcttactgtcacagcaactcctttgcaagatgccccggccaggaatagttgctgaacaccccaggcctgctgaggtccctccttgagtctcatgttcaagcagtctttgtccatgaaactgggaggcgaccgtgttagctgccagttcctgacagccacctctcaccagtggcttcactctgtgtccctgacccagcacatggcacaagagtgcctgccatccgtcagtgtttctacagcagcaatccctagatgctggagctagaggggacctgacctgagagaagataccttcagtggctgccaggctgttccttggaacctgtgcagggatgaggcctgcctgtgttaatacacctagtgaggagtggagctgaatttgaatgcaagccttggcaccttaattgagcaagtttgaaacctcgcttgttgcccttctggaaggagtcaggaatttccagttctgggcctgggctgtgggtctggcagacagacctctggccctaggtttgggtgccaggttctctgcttccagaatgagaagctttgctgtgcaccaggacctgggcccttttggtatctcctgaatgacacacaagggatatttaataaatatgcatttaaatatgtg

SEQ ID NO: 4240 - protein, 50 aa, Homo sapien
MKLGGDRVSCQFLTATSHQWLHSVSLTQHMAQECLPSVSVSTAAIPRCWS

SEQ ID NO: 4241 - DNA, 918 bp, Homo sapien
gagtagctcaccgttacccaagtatgcttcatctcccaaaccaaacaacagctacatgttcaaacgggagcccccagagggatgtgagcgagtgaaggtctttgaggaaatggcgtctcgtcagcctatctcggcccctctcttttcatgtcctgacaaaaacaaggttaatttcatcccaaccggatcagctttctgtcctgtaaaacttctaggccccctcttacctgcttctgaccttatgctcaagaactctcctaactctggccagagctcagctttggcaactctgaccgttgagcagctctcatcccgggtttcctttacgtctctttctgatgacaccagcacagcgggctccatggaggcctctgtccagcagccatcccagcagcagcagctcctgcaggaactgcagggtgaggaccacatctctgctcagaactatgtgatcatctaaaaaagggggagctggcctccaccctatgttccatggattcggaacaagatttcagacatctgcatgagtgacaaactttctgaacaccaccaccaccaataatacttatcagcatcataaagtatctcttaaacactgatcttggcagggacggaactcctattcagcagtttttgtggaaagcagtaatgcttgcaaaacgtgtgtgtcattcagcattttaagtggagactatgcatttcatagtatatttgacagattagtactgtgtcctgtgttttgttccagattcttcagtataaataagctctatatcaaaaagttgcctgtctaaatagaaaatgtcttgctgtgttttgtcctatggaaaatactgtaattcaggattatgtttacaattgatccaggtgtttgtttctaacttctgtaatacatacaatgcaaaaaaaaaaaaaaaa

SEQ ID NO: 4242 - protein, 152 aa, Homo sapien
SSSPLPKYASSPKPNNSYMFKREPPEGCERVKVFEEMASRQPISAPLFSCPDKNKVNFIPTGSAFCPVKLLGPLLPASDLMLKNSPNSGQSSALATLTVEQLSSRVSFTSLSDDTSTAGSMEASVQQPSQQQQLLQELQGEDHISAQNYVII

SEQ ID NO: 4243 - DNA, 1781 bp, Homo sapien
agcgggtttttcgcgccatgtcgtttgctgagagcgggtggcggtcggctctgcggcgccgcggtcccggcaccccgggccctgtggctcggccatcgtattcctcctttactcagggggacagctggggtgaaggcgaagtcgacgaggaggagggatgcgaccaagtggcccgcgacctgcgggcggagttctcggctggggcgtggtcagagcccagaaagcgctcggtgctcccgccggacgggaacgggtcgcccgttctgcccgataagcgcaatggtatctttcccgcggccgcgggcagcagagcccagcctcggcggtggccggtccaggtcctctctattctctgctcgctgctcttcgccattcttctcgccttcctcctcgccatcgcctacttgatcgttaaagagttgcatgctgagaatttgaaaaatgaagatgatgtagacactggactattaggattctggactctacttataatatccctaactgctggattctcctgttgcagcttttcttggacagtgacttactttgattcttttgaaccaggaatgtttcctcctactcctctttcacctgccaggttcaagaaactgactggacattctttccacatgggctatagcatggcgattttgaatggcatcgtagctgctcttactgtagcatggtgcctcatgtaaacccacactggagcgatattgttggcaaaacttaatcatgattgttttgtaataacaagaaggagcatcactgtctactcagaagactgagaaacctgctgttcattatgtagttcagatatttatcacaatcatcctcattatggaagaccttttaaagcattgttttagaatgtctgagtattaagatacagattaattgggaatatctgagtattaagtactttcttcagagtataagatgtttacctcatctttttacttttgtgtgtgtagttctttcaagttgtaggaaacattttaatggaatttaaactcaaacttgaatacaggacaatgcttgccttttcatgtatgtactacattttttgctaagaaatactgatatttctgtttagttgagctagaaatacttcttatttatacatttaggaaagcaaataatgcctactactccgacttttatagaagctacttttaaatcagaatatttaatttttgatattcatataattaatagaagttgcatttatattttttatggggcatagttccttatgtgtttttttaatgtattttcatactacatactgaatttgtatgtttttaaaattgttacatctagacaactgtaaacattatttttttagctagtgcaaacctagtacctgccatttttactaatttttgtctttaaaaaaagcaaaaaagcacattgacctaagttgaaaattaagtaagtttatttttaacaaaaaatgcctgaaaaaagctaaattatttaagtcattaagatattgagaaaaaatttgaaatttttactatttctgtttccacaattccaaatatttatcttggtgtatatattgttactttaacagaacttgcattattttgtttttaataaatataaacatgaaatttttgtatgtgagaatgattgaactagtttgttcttaatctcaaaaatttagttaccaaagtagaaaaggtattttgatactagatattaaaaactacatatagttaatataattttataatttttgtaattaaatgtgcttctgcaaaaaaaaaaaaaaa

SEQ ID NO: 4244 - protein, 226 aa, Homo sapien
MSFAESGWRSALRRRGPGTPGPVARPSYSSFTQGDSWGEGEVDEEEGCDQVARDLRAEFSAGAWSEPRKRSVLPPDGNGSPVLPDKRNGIFPAAAGSRAQPRRWPVQVLSILCSLLFAILLAFLLAIAYLIVKELHAENLKNEDDVDTGLLGFWTLLIISLTAGFSCCSFSWTVTYFDSFEPGMFPPTPLSPARFKKLTGHSFHMGYSMAILNGIVAALTVAWCLM

SEQ ID NO: 4245 - DNA, 2364 bp, Homo sapien
ttatatgaacttttgctattgaatgtttatttgtaggctatttatatcacttcataaagaacagttctttgagaaaagaataaaggaatgtattcatttccagaaaaagagggttggggaaagtttgccatgtaggttagtcagaagaaagcaattctattatgcataaaaataaccttaaatatgtaagagagtatctcctctacttaaaagttattatagtagtcacaggcatacagaccacaggaattctatggtcttaacatattttaaaattacatttattttaatgttcttaaagtttatgaagaggagtttaaagcaattcccataattaaatatttactcggcaactaaaaactatttaacacttgtggttaattatacacataaacaaatggcgacagagtagcctcactaccacaattacttcatggttacacctttgctttctaataataggggctccagttgctaaatatatttgtttacttacagtttaagttgagctgattgttgaattctgttattgttcctgaattcaatgagtatataatttgtagagatgttgaatagtttggatcttagtttttaaggctgaaaaatctggctggatttagtttttaaaaatttgcatcatcaagattccgtcccaaaaagaaaaagcagtttttgccatcagcaaggatatctccaccactttaatggacaggcctcatttttggcagctatgctgtttgagatgtagactgaatatccaaggttcctccctagctcaagtttttacttgtgattacacacaccacattgaattccgtcttcagaggcaaagatttgggcttcatatctcaacagcaaaagggcctgttcagcaattcccttcattttagactcatatgacctcagcgattgcatgatagtagtaaactagtctcctggaaataatggatgtaggtgcttctagaatatgttacagaatttcagacttaacctattaatagataaatggatcttgacttaaggtgacaaaatgaaacttttattattgcttaaaaatgctgtgccaatattgtataactagctcctctaatacttttggtattttggatttaataataagaccttaagcattttaaatgtgaacatgttcagggaagtatgctttgatgtaaatgtctcagatctaagttgtaacacaattgaatacttgtggcttattcttggtttaacttaggaaaactggttaaacaatcccccatttgggcctgtcatcattttaatagtgacgatgttctttctgaaatcttcagggtcggagtcaggctgaatttttttaaaaattaaatattatgttcaaattctttcctttttgccattgtgaaaaagcaaaattttaaatgatttctcctgttagaatttttaaaaatacccacaggttggaccatctttcttatgggttgcacaatgaatttatattttaaattagattaagtagaatgtgaagtacatttcagatttactagttttctttccattgttcattttgggttgcctcagattcagtgtatattttaaaatattggttacataataggtactcaatgaaatggtttatagtagaatatctaagctagcactttattttaaaaagtaacttattaattaatcacacattgatggtacaccttgtatttagcaaatgtttgcatgttgataaaatctcctatgtcttctttcttaaatccagttgctgattttgtaaaatacagttgtgataaagcagcattacgggggggaaaaagctatattccaactggtgttaaatgtattcaacaaaatcttacatcatacagtatttatttcttaattaatagaacttcagtgatatacttggtagatatctcaagccttttgtcttttacacaatggtgctctatcctattgttttcttttcaaagaagcatctgaacacttgcatttctattttcctatccaaaggcatccacatctaagtgtgtttttaaagttgattaaaattatttttctgttaaagcattctgaaagtgtttgtctttacctagaatgatttgtacacactcgtggtcaactgaacatgaatgtcagtagtagtctaattatgggaagggtaaacgtgttagattaaggctcttaaagctctaaaccatataaactatggacttgtatcatgatttaactgttcttagatctttcttacacagtgattcattcctctatttgtacagtggctttatgaaatgttgtgaattgatactgtaatcaataaagtgcttttaacctcgaaaaaaaatctatgtcgggtgcggagaaagaggtaatgaaatg

SEQ ID NO: 4246 - protein, 11 aa, Homo sapien
LYELLLLNVYL

SEQ ID NO: 4247 - DNA, 3452 bp, Homo sapien
  Unsure 3059-3081: Unknown base
gaagtttctgcgccgagtcctccgtcgggaaaactctaccaacttccccaggggaagggaagacaacagtgtcccagcttcccgagcttagaccgcctcaccccgtagggggtggggcagtgggggtctgccaccttcaccctccccgcccgagttacgtacgccccacaaacctgaggccgccaggggtagggtggagggggcgggggtaagcagcctgtagtgttagcggtggctgggaccgaatgcgcgcgcgcggtgctcgaggcggaggggaggaggcggggaaggcgaaaggaggggttcggaggagagggttcgatctccgtacgcaccaggtggagagcgcgcgcctggggaaggaggcgtgtcgagtagcgggagggaagttgtagtacgggtggggagaaccacactaaagggagatgggggtgagcagttaaggaaccgcgagagcgccaggtagagagctgcccttaatgggggaacctggagaagagtgtgagcgtagtggggaagaagggagaagacaaataggttcgggaatgtgtctccgagggcgcgagcgggcgctaggacccggcgtcgaaaagatgaggctttggggctgtcggggcgcgcgctcccgttggtgacgcgggggtggcggaggtctccggccgggacgaagccccgcagggagtggatactcgacagccttcggcctccgctcgcttctccctgcgcgctttcctgctcccctttccggctacagccctggggtcgagctctggtcgaagcgcattccgcctctcctttggccctgcggcttcctttgcaacccgccgcccacccttgctctccgtggtttacccctgggctctgaggcctggtggtagcggccactgccgcggattggctgttgcggacccggggcggggcaggtgggagaggctcgttctccgcgggtttcgttgtgtttcgcgccatgtcgtttgctgagagcgggtggcggtcggctctgcggcgccgcggtcccggcaccccgggccctgtggctcggccatcgtattcctcctttactcagggggacagctggggtgaaggcgaagtcgacgaggaggagggatgcgaccaagtggcccgcgacctgcgggcggagttctcggctggggcgtggtcagagcccagaaagcgctcggtgctcccgccggacgggaacgggtcgcccgttctgcccgataagcgcaatggtatctttcccgcggccgcgggcagcagagcccagcctcggcggtggccggtccaggtcctctctattctctgctcgctgctcttcgccattcttctcgccttcctcctcgccatcgcctacttgatcgttaaagagttgcatgctgagaatttgaaaaatgaagatgatgtagacactggactattaggattctggactctacttataatatccctaactgctggattctcctgttgcagcttttcttggacagtgacttactttgattcttttgaaccaggaatgtttcctcctactcctctttcacctgccaggttcaagaaactgactggacattctttccacatgggctatagcatggcgattttgaatggcatcgtagctgctcttactgtagcatggtgcctcatgtaaacccacactggagcgatattgttggcaaaacttaatcatgattgttttgtaataacaagaaggagcatcactgtctactcagaagactgagaaacctgctgttcattatgtagttcagatatttatcacaatcatcctcattatggaagaccttttaaagcattgttttagaatgtctgagtattaagatacagattaattgggaatatctgagtattaagtactttcttcagagtataagatgtttacctcatctttttacttttgtgtgtgtagttctttcaagttgtaggaaacattttaatggaatttaaactcaaaaacttgaatacaggacaatgcttgccttttcatgtatgtactacattttttgctaagaaatactgatatttctgtttagttgagctagaaatacttcttatttatacatttaggaaagcaaataatgcctactactccgacttttatagaagctacttttaaatcagaatatttaatttttgatattcatataattaatagaagttgcatttatattttttatggggcatagttccttatgtgtttttttaatgtattttcatactacatactgaatttgtatgtttttaaaattgttacatctagacaactgtaaacattatttttttagctagtgcaaacctagtacctgccatttttactaatttttgtctttaaaaaaagcaaaaaagcacattgacctaagttgaaaattaagtaagtttatttttaacaaaaaatgcctgaaaaaagctaaattatttaagtcattaagatattgagaaaaaatttgaaatttttactatttctgtttccacaattccaaatatttatcttggtgtatatattgttactttaacagaacttgcattattttgtttttaataaatataaacatgaaatttttgtatgtgagaatgattgaactagtttgttcttaatctcaaaaatttagttaccaaagtagaaaaggtattttgatactagatattaaaaactacatatagttaatataattttataatttttgtaattaaatgtgcttctgtaattgtgatattttgttttctaagtaattaagccttaatttttcccctatgttactaaagacttttaatgtttagaaagttacctcagttttagaaagatggactacttacaaagctgttttccctggccataggaaaacttacaataagaaaccattaagtagtcaaactgcttattcaggctaagtgggaaatgaatttgtgcagtgtgttcccttaattatctactgaatgttgttaccgactaaacaaggtttctaaaagtctcgcatttcttttactattcaaaactctttgcgttggaaatgactaatactgctccaatttaaattatctgaaannnnnnnnnnnnnnnnnnnnnnnaaatatcaatcccatggcttaagtattcctaccagagtggtggttgccatcagtctattttcactccctgccttccttcctgcacgcttaaactcttcaccctttgactccaaagagccctttcattgcaaagatgtacacaagtaacagaatcaatttatcttctctccaccactctgtattcccacgcaccaccaatgtgagtaactcgctccagattgtttgtgtctaatgactaggaaagttattaacagtagaccctagatagagatatgtacaccctagacagtcatgtgccatataacaacgttttggtcacaacgaactgtacttatgatagtgaatccccccgtaagattatactgctgcat

SEQ ID NO: 4248 - protein, 226 aa, Homo sapien; identical to SEQ ID NO: 4244
  Unsure 3059-3081: Unknown amino acid

SEQ ID NO: 4249 - DNA, 5730 bp, Homo sapien
  Unsure 305, 313: Unknown base
aacttctattttttcttgataattctgtaggcaaaaaaattggggaaggcaaattacaatcattcttcttctgtaatactttgggacaatttttaaacaactcagacccatgtttaaaaacgagttttgtgtgattaacccttgtatagtatccagttactgtcttctcttgaagtggtggttctttgagaagtagaattattttgtaacttttcttctcccagaaacagaagaatcaaatactattctgttaggattctatctagacctgtgactcttagtataataacccttttattattatnattatttnttttttttcagtaatctataaagtagagttgcttagttttgagcaatttagggcttttcttattggccagtaggttattcattttgctgctaaatataattttttggttaattttaacattatagtgctggccgctgggttctatgattacctaaaaatctagtttttttcctccataggtagatgtgtgtgtatgcatacccccacacacacacgtacatatatgttgtcatagagaggtatttcaacccttatttcaaataacagtagaagatacgaacatgaatttatatttggtaaaaatgtcattcatccacttggtttcccattggaaatagttttataagaagggttccccctgtgctctctccacttaacaatttcattatatacgtagaaaaagcagccgacttaagggcttgatgttttttcaggccttgtggattcaggtttccagtttcccagtgcccttaatggatgttatgaatgcataagcacattttcttttaaagaaagaagttagatttatagtgttatttcttacttgctatatttctttgcactaaaaaagagctatgtgtttgttttataggacactttagtaccgtattgcctacaataactcagtttgctccttaaattccaaactctgggaagttgataaataacttccatgatcacttgtaaaagttacatgcacatctgaaaaaaaatcacaaatctctatgacagtaggttatgttttgagcttgttaccttgcagtattcttctctgttccataggtgaaaacaaagggtgacagaggttatcaggcaggaaatgcctaaatacatacatctctgcatggtacaatttctcatattcatgtattccataaacagtgttttttctctgtttaagcagactgttgtttcttctgagtcagtgatatgtgatcttcgttggtttcattttgtgaagctcagtctgtctctgtaacatactttaggatttgcaccttgtgctccccaggaattatgttagtgtccttttctatgctgtcttcaaggatggacagaggcctaaaccacaacaacaacaaaaattagaaaaaaaaatacttagatttcggtaatcatccataggaactcatagcatcagtctcttttctctgtgaataatatctttgtgtaagttgtcataaaaaatcaacgttagaagatgacaattagaattcttcttaggtattgagggtaagaagttgtaaagaaagaaaattcgtgtttcaactaaaagattggattgcatatacctttgaagtggttttgtaaaaaaagttcagttactaaactgagtgtgccctgtaatccttttgagtgcactgaagatgctttgaaaatactttgttggtcttcacattgtgcatcatgtcctgcaacttgtaaatatgtgcatgttgtttatgtttgtctgcctgtctcttattgcactaaattctgcaaggtgaataatttttttataccatttatttggaaaaagttcctcctccaactcttcttcactgaccttttaattagttggtaaacttagaaaaccaggtaggatttttgaagccctgagtttaaaagaagaatcgtggctatttgacatcatccttacattcccctgacttaaaaagctaacaagaagcacgagatcttccacctcattttagaaagcttttctacagaactatatgcttgcttatagctacctatctacagtttgaacagggagaaagggagatatgtatgtctggttacatcttccttcactcttgaattggctgggacagcaagcaacaacagtttgaggtccagtgacctacgtaaaatgagtgtcgtttgtgtcaggggacacatgtaactgtgcaacatggtattttctacagggagggctaggaagggtggttttggaacctaacctactttgtgtcttcattgtcagaactaaggttggaaatgccctttaaaggacttggtgaggcatatgctaggacaatagagctgctttagaaagaaattgagacatgttttgtcaggacagataaaagtttaatgcaggcttttgaacagatgttttaaaacaaatttgaccttaccaactatttttttcttctagccaaatcattgtacaggagtttcatatatgataaaaagtgttttgttattgtttttgctttcttggcaggggagaacccctaccattgtgagcagttactgtcactctggctgaatggacaaatagctgtgtaaatagcttctcataaaacgcttctactgatagctgtttgactttttcttcccgttatgaatgggaggaacatttgtaaacttcctttctgggtagctaccaaaaaacgtactggcttatggtcccatgtgaccttgtctccgttaagcccagaatctgagtgcctttagcaagtgttagcatttcacagagagaagagagacagaattattgctattaatcaccattcataaataggagcttggaataacaaaggtctgtgtgaattctgttctacgtcttttttttcccttttttaaataaatgtcaatttgatatcaagtaaaactattgtcattattgatcagaaaccatacattctgaaaatgaatccagttttcccaagctggcagaagtcagagatcatttttcaccttgatctgtgttgcgtttgtacttagtgaatggcagtgtggttgattggaagagcttgacactgatgtttggaaaaattctttattctagtggtcattttcaaacttgtcttctgtagagaggggaaaaattatgtatttgcagctaaagcgaagagactggcacaataattattaattgtgttagttcatttctatattaaatgaagcatcttcacaaatcaggtttgaagccattaaaagcaaaattttccctagtttaattaatttaaaattctaaattgcctgactacttagaatcttagaaacgccctgctagactgattttattatagaaatgttaacatgttcctcaacattttctcaagaaaattttcagacatatatcaaagttgaaaaaactttgcagtataaccactgctagattctgccatcaacatttgactatacttgtattgccatgtatctgttcatattctctatccctcttttcatccatcgatccatcagattttttttttaaagaacattccaaagtaaattttaggcaatacactgccctaaattcttagcatgggtgtcattaattaaggtttagtattcgtttaaatatctattttgaaagtggtgtatgaagttgataatctgagccaattaacatacttttttttttttcctcctgtggacttttgtcttccagtttctctttttgtgtgtacttagggtgagggaggacaattcctttcaaacacaagtttattttagaattggtcatttttaagtgcttgtcataaattttaaagtttcaatataatttttcttttccccacttctgataatgtatttttgccaaactatgcagcttcttcaaaaaactgtaaattactgattggggtttatgaaatcagcgaatacctcatttcaatctgttgctgcttttctccctcttgtcacttctcctttcactactttcagctgctctaccagaaggtagaggggagtaaagggtcaaacccctatataattagctgttttaaacaactctaggagagcagattaagtagcttagtaagttgaaactattaatttttctaaagaatttgatttgaattccttgagaattgtaattatccacacttcctccagctataattagcagaattaaaaatgattgtactgtacaatgagttgttgaaattgtaagccttagtaaccatctttagctttattgtagtcatgtttagaaaaaattatttttacatatgcctttatttttatgcccactttttgtggataagattctttagataaaatctaaagaattttaagtgactttctccaggtcatgaagattcaatgggtagaattgaatcagaattgaaatgttccagattcatattcttgtgtgtgtttgataaaattcatggcttccaaagtaactgaacacttcctttgggcccttggagggaaaatccatatttttactaattacacttttttttttagacatctggcagttctttgaacttaaacatattctcatggccatagttccaaattaagcccgacgcagttgctaaaaatcttgctgcactgttgaatactaataatgcaacatttattggatgtttttgcattttgatgaccttcatgattcatttataagtctttgtaagtgcttaagtgaccccctcactagtgaaaataataaatgttctatatcatttattattatttgtgtattctctacatgatatatttttttaaggaagagtaactccacatgtcagaatgagtgatattatcctagggcaaagcgcaaatagggcagtttgtttctactctgcaaatatggcatgtataggaacaaaactcttttggagtggctggtcattgttttgccctcttttggtacctgagtacctttctggggttttgtaaatcgtgtgtcatttgtaagaatttcacgttaactctgcgttacttggtgttcacctgtggtatccttgactgaccataatgatttagtttgggtatgatgtgtctgctttgaaatgccttactggagtatgtcagatcctgctttaaagcattccatatatctgctgggacaataagttgcttctccttggaaatatgctctagattcagaagcaaaaccgattttgctttcaccattaaggttgcattttaatgcagttattgttttaaattagagaataaaatgtaaaaccaagggaggctttagaaccctttattgaatggcatggcaaacttttaaaactgcttttgctatttcactagaactatctttgataaaggatatagctaaaaaatgtcagcccaaactgtgtgtaattagggttgtttattaaaattttctctaaatgtcatacagaggcttaagatctgtgtatgctgttgggtcggagtgccagtcactgctttggaagtctgtgttctggggctgcagaatgacaaacgtgtcatgggattaaaaccaatcaactgtgaattgtgaaattgaaactactctttcggttttattttctttagcatattgagtatagaaatctgaaacttatttaaaatttatactgcttttgttgatggctcattttggctgtgtatcctcacttatgtactgatttctgataaaggcttgacattattataacacgcattttgtgttccagtttaataaaacggtttctgagtcttgtctgaaaaaa

SEQ ID NO: 4250 - protein, 43 aa, Homo sapien
  Unsure 305, 313: Unknown amino acid
LLFFLDNSVGKKIGEGKLQSFFFCNTLGQFLNNSDPCLKTSFV

SEQ ID NO: 4251 - DNA, 6512 bp, Homo sapien
agcgacgcaaggtcggctgcggcggcggcccgagggcgcccgtgtgcccagtgcgcggcggggacggccgcgagctcgctggagggctccccagaataatccagaagtcgattccatcatggcagaactcaaggtggaggcgccggccagcgtagactggcagaaacgctgcctgaccctggaaactcagcttttccggttccgcctacaggccagcaagataagggagctgctggctgacaagatgcaggagctggagcagaggctgctggaggcagagcagagagcagagaacgctgagacccaggtgggtgtcatggaagagaaggtaaaactatccaatctgaagaatgtggactctgaggggagcctgcaccggaaataccaagaattgctgaaagccataaagggcaaagatgagctcatcagccagctagaggctcagctggagaagcagaagcagatgagggcagaggaagcaaaaactgttcaagaaaaagctgcaaagatcaaggaatgggtgacactcaagttggcaaagcttgagatggagaatcagcatctgaaaagccataatcagcgcctggtggagcaggtgggatcccttcaagatgcgctagaagctattcagatagctccttcacggaagctgctggtgcccccctacggagctgcagagcaggattctgtcccttcagagccgggaatccagcctatgggccaggacagtggctcccaggcccagggtctgaaggcagctgtgcttgcaccttccccaggtgccctgcagagcaaggactctgtttctgaagcagcaagccccttggaggattctagttccagcacggtccattctggggaaacagtagaggccaagccccttcaacctcatctgggaagagagagccctccccaccagccatgcatgaagcttcttaccttcagatgtagttcagcttcctggggtgagggtctggttactgctcagagagggatgctccctgggacaaagacctctgccagggaaggtggtcctggcagcagtctgaccctaccaaaggtgcgggctcctggcaccccgcgggacagcatccagttggccaaaaggcaccacagccagccccaggtgggccatgggcactttggccgtgtggtaaacattgagactgaggccttctcagccctccacccctctggccttcctgagctggagtcccgagctaggtcccgggaggaaccagagaagatggagatggaggagccacccccagcagggaagaatgaggaaagagagagcccaaaggcccttggagctgagctggaggaagtggagctgggtaacaagccacctacacccccgctgcaccagttttcatcctgggagagccggatctatgctgtggccacatcgggcatgcggctctcagatatgtctcccagaagtaatactgcatgctgcgcttcaagccctcctgcccttgtttcccctgggtctttctctggcctggtctacaagaatgtcactgtgcctgtctacacagcactgaaggggagagctacacagatcagcaacatgccctttatggacgagtcctctgggtctgacgatgactgcagctctcaggcgagtttccgaatctcggtcccctcctctgagtccaggaagaccagcggactaggcagcccccgggccatcaagagaggcgtctccatgtcctcactgagctccgagggtgactacgccatccccccggacgcctgctcactggacagtgactactcagagcctgagcacaaactgcagcgcacctcatcctactccaccgacgggctgggcctgggcggggagtcactggagaagtcgggctacctgctgaaaatggggagccaggtgaagacgtggaagaggcgctggtttgtcctgagacagggacagattatgtactacaagtccccgagtgatgtcatccggaaacctcaaggccaagtggatctgaactcccgctgccaaattgttcgaggggagggttcacagacgtttcagctcatctctgagaagaaaacctactacctgacggccgattcacccagcctgctggaggagtggatccgagtactccagagcctgctgaaggtgcaggccaccgggcctccagctctgcttcggggtggcaccaagcccaccgtgaagggctggctgaccaaggtaaagcatggccactccaaggtggtctggtgcgctcttgttgggaaaatcttctactactatcggagccatgaggacaagcgacccctgggctgcctgcctgtgcgggatgcgcacatagaggaagtagatcgatcctgtgactcagacgaggactatgaggctggaggaaccagacggttgctttcctcccactgcaccctggtgatccaccccacagagcacagccccacctacctcctcattggcaccaagcatgaaaaggatacgtggctctaccacctcacagtggctgcaggtggcagcagtgccaaggtgggcactgcctatgagcagctcattggaaaactgatggatggtgaaggagatccagattcgccgctctggaggcaccccatgctgtgctacagcaaagacggcctatacgcctccctcaccaccctgccctctgaggccttgcagacggaggccctcaagctcttcaagtcctgccagctcttcatcaacgtgccggtggaagctgcctcggtggactaccatgtgtccctggcccagaccgcactgcaggtctgcctggttcaccccgagctgcagagtgagatctactgccaactcatgaagcagaccagctgccgcccacctcagaagtactccctcatgcagtgctggcagctcctcgctctgtgtgctccacttttcctgcctcagcatcacttcctctggtatgtcaagcagcagctccaacgccatgcagatcccagaagtgaaactggccagtatgccacctactgccagcgggcagtggagcggaccctgcggaccggggagcgggaagccaggccatcgcgcatggaagtggtgtccatcctgctgcgtaaccccttccaccactccttgcccttcagcatccccgtgcactttaccaacgggacttaccatgtggttggttttgacggctcttccacggttgatgagttcctccagcggctgaaccaggagataggcatgagaaagccatcccactctggctttgccctcttcacggacgatccctcgggcagggacctggagcactgcctgcagggaagtgtcaagatctgtgatgccatctccaagtgggaacaagccatgaaggagctgcaccccggaaagtctgagggtgggacacgcgtcgtgaagctgatgtacaagaacaggctgtactttcgcagtcaagtcaaaggggagacggaccgagaacggctgctccttgcctctcaaaccagtagagagatagtggcagggaggtttcctatcaacaaggaattggctcttgagatggctgccctgatggcccaggtagaatatggggacttggagaagcctgccctgccaggccctggaggcacatcccctgccaaggctcagcatcttctccagcaggtcctagacaggttccaccccaggcgctatagacatggggcccccgctgaacagctgaggcacctggcagatatgttgaccacaaaatgggcaacattgcaaggatgctcccctcctgagtgcatccgcatctacctgaccgtggccaggaaatggcctttctttggtgctaaactttttgctgctcagcctgcccagctgtcttccaaggagaacgctctggtgtggattgctgtgaatgaggatggcgtcagcatcctggaccacaacactatgcaagtgcacatcacttacccctactcttcagtgacaacgtttggtggctgcagggatgacttcatgcttgtgattagatctatcccagacaagagctctggaaaaagccacattgagaagttgatcttccggatggctgctcccaagattgcagaagccaccttcatcatggccagctatatgaaccattgcactacaactgtgaacccccccaccaacccacccggagcctgccagctgtgggaactggatggacgacagttcttttcttctgtttcctgtgctaccaaggggccaacgttgctgtgaatatttctcctacccgattccccaccaccactagtgcctctggatttagagatatatatcctagggtatgatactactgtgacgggtctaacagcccccggctactcttgttctgtgaaatgtgtattttagtctctgtgaagcctttactctctaggtgccttataatgtttcagggctcaactttttaaaatccagacccagtgttaaaaccatttattccttttttcataagaataatgactccagatgctacctgattctagacatagacagggatgatccactgttactgagggcatcagtgctataagttaaggctttctgcactggtactctcaaggaagctaattttctttctggggggggcgggggacacagtgtcactatgtcacccagtccacagggttcaagcaattctcctgcctcagccttcggagtagctgggattacaggtgtgcgccaccatgcccggctaatttttgtatttttagtagagacggggtttcaccatgttggccaggctggtctcgaactcctgacctcaggtgatctgcccactttggcctcccaaagtgctgggattacaggcatgagccatcgcccagcccagaagctaattttttaatattgtatatggtcttatttatacttgaagttttgtgaacgtcgctaaacaggataggactaaaatttccaattctcctacactctgtcagaagcctagaactcactaaactgggctgcctttcccaaatgggaaaggtgctgacagagttggagaaaaaagaatagactcatttttccccattattggtatgtaggcattggtacagccccttctggggcagtctttgcaggataacatgctatacctgctaagattcaagctgttttcctcacactggactttaggccaaacccagtaccacgcaatgtgcaagcaagggcaggaggtaggtccaatctgacccctccctgtctcattttaatgactggacagcgctcggtgaaggctgtgttcactgtagtgggccatcatttgtttccttcttcttgtaaaagaccaagcaaatgcactctgctttttgctgctgtaagaccaccaaaaatgagtcagaaacacagaagactatttcaggcatgtgggcctggatatgctccttgagacttctggcaaacttctgctgggaattagtttgagggtgagggtacatatgtgacatttgccctagcctaagagtagcaggtaaaaaaaagtttctttcatcctttgccttactgataataccataatccccctcaattcagaccttctgattgagtgcagaggagactagacagtctcctctagacaggttgtagacacaccctcccctaacaaaaacaaaacgaaagagttcatactctgattttccaacatctaggaaactgagttttatttcctagctctaaggcagccttactatatgtcagtaaagtgctgaaaactgtatatttagcagtagcacccaaaaccaagcctttaaccccaacaatgtgtgtatcttttgcacagcaaaaactgcgaggccagaactagtttatctgaacacctcagctgctgtaagcttctcctctctcaccccgtaaactgacaagcatgatgaaaaaagaagcacatccaagtttctgcctcttttaaatgtacttgactttgcaaggcaagtagttttacagccatttctgttcacacttttcaccccacaacttggggatctagctgagacatttctacctcgaacaagtcacatgtaccacaggttcctgaataattcctgcagggctggtgacagacataacagctctggttttataatatcttgggtatctctaaggccaataaggataacattatctacccagagagtttagaagaaaagtaggagtccaaaggaagagtaaacaagaatggagctgtgttcacactgaatttggggtcaatctatttcccccaccctctctcctccccaacccttcaggaaccctttagtttattaatcttatacagaagaaactaacttagaaacaaaggattcaatatttgcttatttattctttgttaacatgagagtcccatgtctgaaaaccaaagtccaatttctgtctggccttttgtctcatccttcttggcaaaagtagcttttgaactgatataaaaaaaaatgctgagtaacagaaaagtattaatgtgcttgacaccatgactgaaatactatgatcttgtttgtcaataaaaagcagctatctgtgaaccagg

SEQ ID NO: 4252 - protein, 1403 aa, Homo sapien
ATQGRLRRRPEGARVPSARRGRPRARWRAPQNNPEVDSIMAELKVEAPASVDWQKRCLTLETQLFRFRLQASKIRELLADKMQELEQRLLEAEQRAENAETQVGVMEEKVKLSNLKNVDSEGSLHRKYQELLKAIKGKDELISQLEAQLEKQKQMRAEEAKTVQEKAAKIKEWVTLKLAKLEMENQHLKSHNQRLVEQVGSLQDALEAIQIAPSRKLLVPPYGAAEQDSVPSEPGIQPMGQDSGSQAQGLKAAVLAPSPGALQSKDSVSEAASPLEDSSSSTVHSGETVEAKPLQPHLGRESPPHQPCMKLLTFRCSSASWGEGLVTAQRGMLPGTKTSAREGGPGSSLTLPKVRAPGTPRDSIQLAKRHHSQPQVGHGHFGRVVNIETEAFSALHPSGLPELESRARSREEPEKMEMEEPPPAGKNEERESPKALGAELEEVELGNKPPTPPLHQFSSWESRIYAVATSGMRLSDMSPRSNTACCASSPPALVSPGSFSGLVYKNVTVPVYTALKGRATQISNMPFMDESSGSDDDCSSQASFRISVPSSESRKTSGLGSPRAIKRGVSMSSLSSEGDYAIPPDACSLDSDYSEPEHKLQRTSSYSTDGLGLGGESLEKSGYLLKMGSQVKTWKRRWFVLRQGQIMYYKSPSDVIRKPQGQVDLNSRCQIVRGEGSQTFQLISEKKTYYLTADSPSLLEEWIRVLQSLLKVQATGPPALLRGGTKPTVKGWLTKVKHGHSKVVWCALVGKIFYYYRSHEDKRPLGCLPVRDAHIEEVDRSCDSDEDYEAGGTRRLLSSHCTLVIHPTEHSPTYLLIGTKHEKDTWLYHLTVAAGGSSAKVGTAYEQLIGKLMDGEGDPDSPLWRHPMLCYSKDGLYASLTTLPSEALQTEALKLFKSCQLFINVPVEAASVDYHVSLAQTALQVCLVHPELQSEIYCQLMKQTSCRPPQKYSLMQCWQLLALCAPLFLPQHHFLWYVKQQLQRHADPRSETGQYATYCQRAVERTLRTGEREARPSRMEVVSILLRNPFHHSLPFSIPVHFTNGTYHVVGFDGSSTVDEFLQRLNQEIGMRKPSHSGFALFTDDPSGRDLEHCLQGSVKICDAISKWEQAMKELHPGKSEGGTRVVKLMYKNRLYFRSQVKGETDRERLLLASQTSREIVAGRFPINKELALEMAALMAQVEYGDLEKPALPGPGGTSPAKAQHLLQQVLDRFHPRRYRHGAPAEQLRHLADMLTTKWATLQGCSPPECIRIYLTVARKWPFFGAKLFAAQPAQLSSKENALVWIAVNEDGVSILDHNTMQVHITYPYSSVTTFGGCRDDFMLVIRSIPDKSSGKSHIEKLIFRMAAPKIAEATFIMASYMNHCTTTVNPPTNPPGACQLWELDGRQFFSSVSCATKGPTLL

SEQ ID NO: 4253 - DNA, 1566 bp, Homo sapien
ggcacgagggactcagcgaagggtgggcgccgccgaggcctcctgccgctggcgggtttccgcggagtgccgcccggctccgctctgccgccggcgcggctcatgggcagagtcggccgggcgggccggcattaaactgaagaaaagatgtccctgtacgatgacctaggagtggagaccagtgactcaaaaacagaaggctggtccaaaaacttcaaacttctgcagtctcagcttcaggtgaagaaggcagctctcactcaggcaaagagccaaaggacgaaacaaagtacagtcctcgccccagtcattgacctgaagcgaggtggctcctcagatgaccggcaaattgtggacactccaccgcatgtagcagctgggctgaaggatcctgttcccagtgggttttctgcaggggaagttctgattcccttagctgacgaatatgaccctatgtttcctaatgattatgagaaagtagtgaagcgccaaagagaggaacgacagagacagcgggagctggaaagacaaaaggaaatagaagaaagggaaaaaaggcgtaaagacagacatgaagcaagtgggtttgcaaggagaccagatccagattctgatgaagatgaagattatgagcgagagaggaggaaaagaagtatgggcggagctgccattgccccacccacttctctggtagagaaagacaaagagttaccccgagattttccttatgaagaggactcaagacctcgatcacagtcttccaaagcagccattcctcccccagtgtacgaggaacaagacagaccgagatctccaaccggacctagcaactccttcctcgctaacatggggggcacggtggcgcacaagatcatgcagaagtacggcttccgggagggccagggtctggggaagcatgagcagggcctgagcactgccttgtcagtggagaagaccagcaagcgtggcggcaagatcatcgtgggcgacgccacagagaaagatgcatccaagaagtcagattcaaatccgctgactgaaatacttaagtgtcctactaaagtggtcttactaaggaacatggttggtgcgggagaggtggatgaagacttggaagttgaaaccaaggaagaatgtgaaaaatatggcaaagttggaaaatgtgtgatatttgaaattcctggtgcccctgatgatgaagcagtacggatatttttagaatttgagagagttgaatcagcaattaaagcggttgttgacttgaatgggaggtattttggtggacgggtggtaaaagcatgtttctacaatttggacaaattcagggtcttggatttggcagaacaagtttgattttaagaactagagcacgagtcatctccggtgatccttaaatgaactgcaggctgagaaaagaaggaaaaaggtcacagcctccatggctgttgcataccaagactcttggaaggacttctaagatatatgttgattgatcccttttttattttgtggttttttaatatagtataaaaatccttttaaaaaaacaaaaaaaaaaaaaaaaaa

SEQ ID NO: 4254 - protein, 401 aa, Homo sapien
MSLYDDLGVETSDSKTEGWSKNFKLLQSQLQVKKAALTQAKSQRTKQSTVLAPVIDLKRGGSSDDRQIVDTPPHVAAGLKDPVPSGFSAGEVLIPLADEYDPMFPNDYEKVVKRQREERQRQRELERQKEIEEREKRRKDRHEASGFARRPDPDSDEDEDYERERRKRSMGGAAIAPPTSLVEKDKELPRDFPYEEDSRPRSQSSKAAIPPPVYEEQDRPRSPTGPSNSFLANMGGTVAHKIMQKYGFREGQGLGKHEQGLSTALSVEKTSKRGGKIIVGDATEKDASKKSDSNPLTEILKCPTKVVLLRNMVGAGEVDEDLEVETKEECEKYGKVGKCVIFEIPGAPDDEAVRIFLEFERVESAIKAVVDLNGRYFGGRVVKACFYNLDKFRVLDLAEQV

SEQ ID NO: 4255 - DNA, 4481 bp, Homo sapien
gtcatgtaagtggtatgtctttgacagaaacatggttacgtggttcatgagtgtatattcactggaagatagtcaagactaaagacacattagagcaaattgacccctttaacatgtgattattgtccaattaaagacagttgatttaagtagcatgaggtattattttatttgtattcgatctgtgttacctgggatccagtatcaaatatatccacattctttatcagcaagcattcatggccattcagaagaaataaattaggtaacttgataataaggctaagtgggagagtacctgttcaatagctcatatatcgagtaccctgtcatacaggaacaagttaaaggacacaattgaggttaggctagcttctacaaattgcaatatgcagtttttgaaagattttctaacaaaaagccaataaatgtagccatctccttgttgtttgcaatggcagagcatcctagagttcctcagctaacctctcattatgtgtcttaaatgcaaaagagccattaattatgccagtatttgaatcaaagaggtcattctctgtctatagtgttcccatccatgtgttccaaatgggagcatagcatgaagtgatgcacatatttcaccacggtatcatgtacttcatggccagtgttttatctcagcagggaactacgccaagttgaaagatggggttgggtaaagtagattaggtgaagtagaacataaaattgaatagtacccaattaaagttcctcagtaagaaaaaaaaatgtgtttttgtaggcaaaaagaacatttctaaagtctcaaggaatagcttcctaaagtgttgagtaaagaggctaaataagatgagactagtttaatatagagagaaaaatacctttatggagtaaaagtgtacgtgatgatcatgggttgtcagtgatttgtgaactgagagcagcaacaacattattttttaaaaatcttaaatcctctcttaatggatggttaacaaatgctcaaagtccattactctttttattggctcttgcaggttttgtgttttatcatcagtgcttttagaaatgcaggccttaacttactgaactgaactttctgaaaacgtaatgtagcagtatcaatatacttttgggcataaaaatagtttcctaggtaaggggtgtgagatattcaaagaatacatgtggctaacaagtgtaatgagaaagttcatgtgtcacatgaaaatgatcatgtttgtgttgctacagcttttgtgggaaatttagtttaaaggcagctcttggtgtaccttagtatattttaatccacaattataccattgatactgagaggtgatacccgatgatcttctctataatattcttagagtaaaacaaaatctcaaaagtattaatagctcttctacccttgaaggtgactggtcctgggacagttagaatctttcaggtttacctctgttcagcagatacttcagtaggatacatagcttttcttccagtgaaacaaagttcatatcatccattgtttttcaagcacgtgacaccagcctcaaagtaaatgacatgaccagtggttgaacagtctaattttcaaatttaatatagagcatataacttctgatttgatagtatttattttaaaaaattatgttttcatcattcatttgaaaatgaaaaagccccaaagtgagaactttgggggagggcctagaacatggatagatctcttagtggtctttccaaaagtacatgtacttgaaatattttcattatcatactattctttgaaaaaaaagatgcttactgtatacttgttttcaagcatcctctaaaatcaaaggttttgatcacaatatgcagatttctcttgatagatacttaaataggctatttctctcctcttcttgggcaatgccttgttttctcctctgaatatttgcatttgaaaggattgcttcctgttctgctcattgatcaaaggtagggccaattaaggattctaaccctaacccagcaccacaaagcccccctggagcatcttcccggctggcaggaccatgccatctctgtggagaaggtgctggggagggaagtccttccagtgccacatggagtgaggccctgcccatgctggggactttggggaggaatttggtattctggtggccttgctcagctctcattgagatcttttcctatcagaatgttagtgaatatacttcgcagctctttgttcagcaataaggaatattctttcaattcctgctcttcaagccaatttactacacccagttgtctttccagaagttcatcccagcggtaatatgttggtgtttgttcttctttggatttcacatctgttttctggtagaagtgagcactgttcacttgtgcagtcgtcttattttccttcttcctagatgactcagctctttgtaaatgttgtgctcaacttctaggggccagttctagactttggagatgcagtgtctcccaggtgtgcacggacacctggtccgtggaaacaggtgtgatgggcacaggctgctgcccttctgtctggtcgggggattcctcttcttcaagctgctcagctaacccagaagaggggagagagtactccggtggttcccagagcccctcccgttgtgccgcttcgacctgacacctgctcgatgctgacttaggcttcctgccaccaagcaggaaactagaaagagaacatttcagtgtaaggtctgttcccgacagcatggattagcttccgtgttctgaagttgttcttttcatggtgtctgacaccgagggcgttgttcgtccatcaggcgggattggatggagtcttggtgttttgccttctcagggaccaaaaatgtatcattgactccttaacagtgaccttcctcccaaggacatatccgtgttcatttttcataggttttactcatattcataggtagattctgttaatgtgagttggaaagaaaagaccaatttgtacaccagtcacaccacaagacagtttatcatataaaatacctcaattttttgtattcctcatttccacctcacaattgtactggtgatgaattttaagggtctgtcctttagcttataggtgatgtttcacatctggccagattcttatacctccattgtatacttgaaaaggttcagaattacaggaacagcagtgagaatttggcccactaccacgactcatttgtttcattcacattcctcacgtgcaacaacataattatattttaagaaaatgtaactttgttacatcaaaatatgttgtctagtaaaaagttgatattcagtagaacaaggatcatgtaaataaacatctatttcacatgtacccaaaagcatttaaaaagcagaatccagggcccagagcatgagccagggaggaggatgtttttcttcttttctctatttttccctaaattgtgcaaacataggtgagtctcttaacctttctgtgcctcagtttttctacctctaaaggggtgggatggttcttcaaattgtttctaaaacaccggcactttcagcagtgttctggtggcctgagatgagagcaccgtgttcagaagtgcctgggagtggcacagtggaaactccgcttgcacggaccatggagtctgctcaggaccatgctgtaggacacacagcctcatgcgctgagaaagcaaaggaagtgctgggtgtaaagtttgcatgattccatgaagctttagttttcctttttttgttttaaaagaaagggttttatatgttctattgtaaaatatggaaattaaacagggacttcagaaagccgcacagaaagatcaccttccgatggtgtgatgtgctcctgacattcggccgaggtctgtattctgaaaaagatttaatggcctgtgaaacacgtggattctgttgcactggatttgtaataaatgacgctgaacttcctgcttccaagcagctcaaccctgatgctgaactgacaccaggcgaatgtcagggctcccaaaccactagtgccaaagggtcatgttgaaaagttcagaatatttatttgtcagaatataataattgccccccaccttagtatttttgcactttacagaaatttagatactgtttttcagtggcttgagcgttttgccttttcaaaggataactattattttcttgaaaatggaatataatcatgagaggaagaagatgtaaaaaatgtcaaatgttgattggttgtgtaaaagttttgtcatagacatgtattggggagcttccaattagcatacatagacacatgtgtcagtggccaagacctgcttatattttgctttatagatgtagtcatagcatgttgttattgcctcatgtaaataaaaaggctattaagttttccagtaatatttattaatctgtatgtgttttaaaataaaataacttatttctagctgaaaaaa

SEQ ID NO: 4256 - protein, 26 aa, Homo sapien
SCKWYVFDRNMVTWFMSVYSLEDSQD

SEQ ID NO: 4257 - DNA, 6414 bp, Homo sapien
ctcggaattcgttatcgaggttggcggccgggctgccaggagcagttccgccgggtttcactgtccgtgacttccttcggggcacctcaggcagcaaaccaagatggagtatgagtggaaacctgacgagcaagggcttcagcaaatcctgcagctgttgaaggagtcccagtccccagacaccaccatccagagaaccgtgcaacaaaaactggaacaacttaatcagtatccagactttaacaactacttgatttttgttcttacaaaattaaaatctgaagatgaacccacaagatcattgagtggtcttatcttgaagaataatgtgaaagcacactttcagaacttcccaaatggtgtaacagactttattaaaagtgaatgtttaaataatattggtgactcctctcctctgattagagccactgttggtattttgatcacaactatagcctccaagggagaattgcagaattggcctgacctcttaccaaaactctgtagcctgttggattctgaagattataatacctgtgagggagcatttggtgcccttcagaagatttgtgaagattctgctgagattttagacagtgatgttttagatcgtcctctcaacatcatgattcccaaatttttacagttcttcaagcatagtagtccaaaaataaggtctcacgctgttgcatgtgtcaatcagtttatcatcagtaggactcaagctctaatgttgcacattgattcttttattgagaatctctttgcattagctggtgatgaagaaccagaggtacggaaaaatgtgtgccgagcacttgtgatgttgctcgaagttcgaatggatcgcctgcttcctcacatgcataatatagttgagtacatgctacagaggactcaagatcaagatgaaaatgtggctttagaagcctgtgaattttggctaactttagctgaacagccaatatgcaaagatgtactcgtaaggcatcttcctaagttgattcctgtgttagtgaatggcatgaagtactcagacatagatattatcctacttaagggtgatgttgaagaagacgaaacgattcctgatagtgaacaggatatacggccacgttttcaccgatcgaggacggtggctcagcagcatgatgaagatggaattgaagaggaagatgatgatgatgatgaaattgatgatgatgatacaatttctgactggaatctaagaaaatgttctgctgctgccctggatgttcttgcaaatgtgtatcgtgatgaactgctgccacatattttgccccttttgaaagaattactttttcatcatgaatgggttgttaaagaatcaggcattttggttttaggagcaattgctgaaggttgcatgcagggcatgattccatacttgcctgagcttattcctcaccttattcagtgcctctctgataaaaaggctcttgtgcgttccataacatgctggactcttagccgctatgcacactgggtggtcagccagccgccagacacgtacctgaagccattaatgacagaattgctaaagcgcatcctggatagcaacaagagagtacaagaagctgcctgcagtgcctttgctaccctagaagaggaggcttgtacagaacttgttccttaccttgcttatatacttgataccctggtctttgcatttagtaaataccagcataagaacctgctcattctttacgatgccataggaacattagcagattcagtaggacatcatttaaacaaaccagaatatattcagatgctaatgcctccactgatccagaaatggaacatgttaaaggatgaagataaagatctcttccctttacttgagtgcctatcttcagttgccacagcactgcagtctggattccttccgtactgtgaacctgtgtatcagcgttgtgtaaacctagtacagaagactcttgcacaagccatgctaaacaatgctcaaccagatcaatatgaagctccagataaagattttatgatagtggctcttgatttactgagtggcctggctgaaggacttggaggcaacattgaacagctggtagcccgaagtaacatcctgacactaatgtatcagtgcatgcaggataaaatgccagaagttcgacagagttcttttgccctgttaggtgacctcacaaaagcttgctttcagcatgttaagccttgtatagctgatttcatgccaatattgggaaccaacctaaatccagaattcatttcagtctgcaacaatgccacatgggcaattggagaaatctccattcaaatgggtatagagatgcagccttatattcctatggtgttgcaccagcttgtagaaatcattaacagacccaacacaccaaagacgttgttagagaatacagcaataacaattggtcgtcttggttacgtttgtcctcaagaggtggcccccatgctacagcagtttataagaccctggtgcacctctctgagaaacataagagacaatgaggaaaaggattcagcattccgtggaatttgtaccatgatcagtgtgaatcccagtggcgtaatccaagattttatatttttttgtgatgccgttgcatcatggattaacccaaaagatgatctcagagacatgttctgtaagatccttcatggatttaaaaatcaagttggcgatgaaaattggaggcgtttctctgaccagtttcctcttcccttaaaagagcgtcttgcagctttttatggtgtttaatctaatacacttaagctgcagtcccaaaattaggggtccttcagtcttggagactataagggagcctctgcacccagggaaaatgttaccctttacaggggggaagggtaaaccagtagggaatacagtacaatcccaaccctactgggaggggcgggagggaggtgttgccgtcactgtattaagtcgatgttgggaaacgttttaacatctggagcctttgtgggtggaaatatgtctccagttacaactccgcagtggatgtgaagaagcaaaaaaaaaaaaatctattcagtctactcacaaaacagtacattgtggaatattatggggaattgtaccaaaacaagaaccatataaatgatgcctagggacaagaaagaggaacaattctatagcgcacaataaaggaaacctaagaatgggagttacaaatagtaaagaagctttttttttttttaatttaaagtttttttatgtaagttttcccacatgatggggccttgttttgcatgttgatgaagaactacacaaagaaaactaatatagttaaaagtcagcttgccttcccgtagtagaagcaggttcttggaagttacaatttaaggtaccccaaaaaagttggaaataaaacaaaacaaacataaacaatgaagcaccctgtgaaatgccaaatgagtcactccttttaccttttttggggtgggcagggagggaggaataaatggggttgggcatatcaaactaaagatgacatcttaattttgcattgaacattaatgtagcggatataatttgatgattatacttcattagatttaatttctaggccaagatgttactttttaaagtgcagtttaaggttcaggcatgcattctggctcatagtggttgaaagtaatttaaattagtgggaaagtagcatgcttgcatcacatagagtgagattggtattcatttacctatgttgcgccagtttgtgttgcagtttaccaattcaatatagccctgcatttaaagttcctttttaagatttgtggattttatttttattaagaacatagatatataaagtactgtagtttacaggtaggccttgaaatatcttttttaggatctgttaggaataagattgatattgtattgtgtgtaacctgcacaatgtggaaagctgatatacctgtgcaaaatctttgcctctgtgctgtcagtgtgatgtgctttctgcatggttatatactactagtgattttatcaaaacttctaaaatttaaattacgtggtaaaagatctgtaaaaggctgcataaatgttagttggcacataaagacaattgtagaagttgaaaaatgattgctatatttcaatgtttattcccactcaacatactgccttctaagcttccctttttttgttcaaagcatgatcttaaagatatgtttaagttaatggatgtaatgcagggttcctacactgtattttggcgcatgttggtggccctctgtgccctagatatatgcacacagggtgcaagttaaaagctacagagtgaaagttggtttggatcctcttcatttcatttgtttagcttttctgttatttttctctacttacatgtattcctgtgaataaatccttgttaagttaaccctttacttttccttccatgtgtattttcttatatactgtgaatgtgaaaacctaactggtacacttgatcttgtgttcatatgaaagtgcaagtctttattaatttggattgcctgaacagtgtatcccatgatgatgaaggaaaatggagagatttttctttttaactctgctggtcagagatgaagccacgcctttccatttttcaatgctgcatatttaatctgcaacaaaaatgttaagccataacagcctttttatattttagtttgtcacctttgcattgcagaataaatactgaataaccatttttataagcagttgctcctctttgcatggttctattctctaaaagtgttgaatgatacagccattgcactgaagtttgagctgtgtgcgtgtgaatttatactgtttcaaaaatttcaaatgcatggtagcatgtagaaaggttttgttactatgtgtgtgtgtgtgtcatgtaaagtagagtctgttttttaacgttctttcacctttcctctactttggctttgcaaatttcagtctgtagagcctgaaattaaattattttatagtgcctgatatttttaatattataagttggattcaaagggtatacagcattttgttttctagtaccattgcttcactgggagctcaaaatttgcctccctgttagtctttaataactgagtagagtagctgttttattcttagattatagtgatattctgtagtgcttcaaatacttagaattctaatatgagagatagtttaatattctggaatagagagtattttaaattgaaatgaccaaattcgatttaaaacaaacacataacaatcttcagtaaagttatttgaacctgtggttgacaattctgtattgactaaaggcaatattgtcacctgtctcattaaaaattagtttccagttaggcagatgaataacactattaaaaatgcacccagttttgtagtcacttgactttttttttttatttaaatgaaatttaatttgaaaatagaaaataaaattaggtaaatatgactggcaacctgaatttgagttgggattctttgtgtatttttcccccttgaggttatggtttcttcctaatttatatttcagatacatagtgtagaacaggaatttgcagaagccatttaagttatcttttgaggtaagctctgatttagcatttattctgataaaatctaatacatcatgggatatatataaagcaacttaattctggtggtgtagtcttaatagtttggaatgttgactgaatgtctataaaaattgtgagtttgtcttttgtttacattccagtgtttctgcctctgggcatgcttaaagcacggcttacttcatctgctccttacacactaaaagtgctgttagtgtgctcaactacagaaatagccgctgctaagtgatgtagattttctacttgaatatttttatgttgtaggaacctcaggaggtcagtgtttactgttttatatatgccttctttttcctgtttgagcttctctctttgaaggattctaacagaacaaagctgctgatcaacctaagttggaaacagaaagtgtaattaatataacttaaatgcatgtttggcagttcacttgttttgagacacctgaagaggcatttctcccagccccttcagaacaacctggttacagagttactacacctggagacagaggccgattttagtatgttttcagagactagtacaactgggagtgctctctggagattatgttgctgaagactttctggctgttttccttttgaaacacactagaaagctcttctggagatacttatgggagaaggactccatccccaccacccacccccaacctagacctatagccagccagccactgtcctcctgcgtcttcactacagcccaactcaagaggaaacatgagatagtaaagaccacactaatagccaagaatct

SEQ ID NO: 4258 - protein, 890 aa, Homo sapien
MEYEWKPDEQGLQQILQLLKESQSPDTTIQRTVQQKLEQLNQYPDFNNYLIFVLTKLKSEDEPTRSLSGLILKNNVKAHFQNFPNGVTDFIKSECLNNIGDSSPLIRATVGILITTIASKGELQNWPDLLPKLCSLLDSEDYNTCEGAFGALQKICEDSAEILDSDVLDRPLNIMIPKFLQFFKHSSPKIRSHAVACVNQFIISRTQALMLHIDSFIENLFALAGDEEPEVRKNVCRALVMLLEVRMDRLLPHMHNIVEYMLQRTQDQDENVALEACEFWLTLAEQPICKDVLVRHLPKLIPVLVNGMKYSDIDIILLKGDVEEDETIPDSEQDIRPRFHRSRTVAQQHDEDGIEEEDDDDDEIDDDDTISDWNLRKCSAAALDVLANVYRDELLPHILPLLKELLFHHEWVVKESGILVLGAIAEGCMQGMIPYLPELIPHLIQCLSDKKALVRSITCWTLSRYAHWVVSQPPDTYLKPLMTELLKRILDSNKRVQEAACSAFATLEEEACTELVPYLAYILDTLVFAFSKYQHKNLLILYDAIGTLADSVGHHLNKPEYIQMLMPPLIQKWNMLKDEDKDLFPLLECLSSVATALQSGFLPYCEPVYQRCVNLVQKTLAQAMLNNAQPDQYEAPDKDFMIVALDLLSGLAEGLGGNIEQLVARSNILTLMYQCMQDKMPEVRQSSFALLGDLTKACFQHVKPCIADFMPILGTNLNPEFISVCNNATWAIGEISIQMGIEMQPYIPMVLHQLVEIINRPNTPKTLLENTAITIGRLGYVCPQEVAPMLQQFIRPWCTSLRNIRDNEEKDSAFRGICTMISVNPSGVIQDFIFFCDAVASWINPKDDLRDMFCKILHGFKNQVGDENWRRFSDQFPLPLKERLAAFYGV

SEQ ID NO: 4259 - DNA, 2073 bp, Homo sapien
ctcgtccgctcgcgctgcccaccgcggctccagcagctccaggcgcggttccccggcccgcgccgctcccggccccccggctcgggcgcctcccgccgcagcgcaggctcccccgccggccgggctcctgcgcggcgcggctcggctcatgcccccgggcgcggggcacacaggccggccggcagccgctgggaaataggcccccgggggcggtggcggcggcggggccatggcgcggagaccccgggcgccggccgcctccggggaggagttctccttcgtcagcccgctggtgaaatacctgctcttcttcttcaacatgctcttctgggtgatttccatggtgatggtggctgtgggtgtctacgctcggctaatgaagcatgcagaagcagccctagcctgcctggcagtggaccctgccatcctgctgatcgtggtgggtgtcctcatgttcctgctcaccttctgtggctgcattgggtccctccgcgagaacatctgcctcctgcagacgttctccctctgcctcaccgctgtgttcctgctgcagctggccgctgggatcctgggcttcgtcttctcagacaaggctcgagggaaagtgagtgagatcatcaacaatgccattgtgcactaccgagatgacttggatctgcagaacctcattgattttggccagaaaaagtttagctgctgtggagggatttcctacaaggactggtctcagaacatgtatttcaactgctcagaagacaaccccagtcgagagcgctgctctgtgccttactcctgttgcttgcctactcctgaccaggcagtgatcaacactatgtgtggccaaggtatgcaggcctttgactacttggaagctagcaaagtcatctacaccaatggctgtattgacaagttggtcaactggatacacagcaacctattcttacttggtggtgtggctctaggcctggccatcccccagctggtgggaattctgctgtcccagatcctagtgaatcagatcaaagatcagatcaagctacagctctacaaccagcagcaccgggctgacccatggtactgagaatccatcctgcacctcctcaccatggaaactggcaagcctcataaacgaacagcagtgggtgctgaaagcagcaccaaatggagatttggattccagccccccagtgacagcccagtgggaagaagcaaactccagatgggcagaaggcagggtgcacaggtggctccagtctcaggaggatgcgcctcctctcccccatcccagtcctcagcattgtgccagagtgatacccttaagtgtttgggtttatgttttcagttttgtttgggaaacagcagttgcacagagagttgggggtactgctgctgccttttcaccgaggcactgccaccaccagctctagcagggatgctcctgagcttggcggacatacttagatcctaacgtgccagtgagacctggctgtggagagtagcactggcagccctgcctggactccacttggcatgataccagctccagaagggaagggagtggagcaggcagtgaggagagagcctgggggtcggctggggacagccgtatgtgctaggtaggagtggagggagatatgtttaccaaatgcctgtcctgccatcctcccaggtagtcagagtgagctacatcctgccccgccttcatttccatggaaacatggcagctaggacacggggtacaacagcagccaaattcttccccacctcccttacttcgaaaaaaagtttggaaccctggtccctatactctgcagtcagaagtgggactgagccatacatgcccttgaattcctccctgtctggccctccctctccagcaagcagggttttctttaacttggcagtgtgcagaggagaagtggtaacacccccaccccattcccctgcatcggagctcagtattcctacagggtaagaggtaggaatcttgctgggacgaggggagccagaagtggcaataaaagcgtgttgacctggaaaaaaaaaaaaaaaaaaaaaaaaaaaaaaaaaaaa

SEQ ID NO: 4260 - protein, 283 aa, Homo sapien
MARRPRAPAASGEEFSFVSPLVKYLLFFFNMLFWVISMVMVAVGVYARLMKHAEAALACLAVDPAILLIVVGVLMFLLTFCGCIGSLRENICLLQTFSLCLTAVFLLQLAAGILGFVFSDKARGKVSEIINNAIVHYRDDLDLQNLIDFGQKKFSCCGGISYKDWSQNMYFNCSEDNPSRERCSVPYSCCLPTPDQAVINTMCGQGMQAFDYLEASKVIYTNGCIDKLVNWIHSNLFLLGGVALGLAIPQLVGILLSQILVNQIKDQIKLQLYNQQHRADPWY

SEQ ID NO: 4261 - DNA, 1366 bp, Homo sapien
gcgtctcgcagcagccgcccggaccgggcatggtgttgggcgccgggcccgcctcgcctgtctcggggagcccagggtaaaggcagcagtaatgctaacgctagcaagtaaactgaagcgtgacgatggtctcaaagggtcccggacggcagccacagcgtccgactcgactcggagggtttctgtgagagacaaattgcttgttaaagaggttgcagaacttgaagctaatttaccttgtacatgtaaagtgcattttcctgatccaaacaagcttcattgttttcagctaacagtaaccccagatgagggttactaccagggtggaaaatttcagtttgaaactgaagttcccgatgcgtacaacatggtgcctcccaaagtgaaatgcctgaccaagatctggcaccccaacatcacagagacaggggaaatatgtctgagtttattgagagaacattcaattgatggcactggctgggctcccacaagaacattaaaggatgtcgtttggggattaaactctttgtttactgatcttttgaattttgatgatccactgaatattgaagctgcagaacatcatttgcgggacaaggaggacttccggaataaagtggatgactacatcaaacgttatgccagatgataaaaggggacgattgcaggcccatggactgtgttacagtttgtctctaacatgaaacagcaagaggtagccccctctcccgtcctcatgctccctctcagtcccctggattgccccagtcctgtgaccatgttgccctgaagaagaccatcttcatgactgctcattgtagatggagaattcaacataaatacagcaagaaaatgtgtttgggcttctgaagagttgtctgcttaccttaacatgtttacttttttgaacttgtactgtataggctgttggtgaaattcttaagaagttgtaatgaactcaaaattgaggccagagcttgctttcccttttcccaaacaaaattggttttctgcacaagcgatgctaatgatgtgttcagtgtaactcgcagattggcaataagatacccgctacaaactgtgattggatgcaaaatctcttagcttctttcacgaatgttggccctgcctagatgttgtgaagcctcccagaatgcatagagtcattcactgtagatctcttattgaaatgcgtattttatttaatgtaagtatattttggaacagatttgtaatttgtacaattcaatgctttaattattttttctattctcatttagtttgtattttcattgtatagagcagacagaaagatgttgggtcaagcaactattgaagagaaatacaaagaaaaaaaaaaaaaaaa

SEQ ID NO: 4262 - protein, 185 aa, Homo sapien
MLTLASKLKRDDGLKGSRTAATASDSTRRVSVRDKLLVKEVAELEANLPCTCKVHFPDPNKLHCFQLTVTPDEGYYQGGKFQFETEVPDAYNMVPPKVKCLTKIWHPNITETGEICLSLLREHSIDGTGWAPTRTLKDVVWGLNSLFTDLLNFDDPLNIEAAEHHLRDKEDFRNKVDDYIKRYAR

SEQ ID NO: 4263 - DNA, 2338 bp, Homo sapien
ctgaactcgggtgttatctgtcctgagagaacattcatgattctaaaatataaaattcgagttgcaaatgtcatgtgcctggaagctgagggaagttttagacacctgcccagtttccctctcctgcccactgtggtacagcacgacattctagtttctcctgatgcttcgtcaaagacatttagtgcagttatgtcctgttccttggttgggccacaatggagagaatagtacttgagaaggatttctctgtaagaataccatggcagagagacccctctgccccctgctttgcattgctaacagttattagcattttatatttctttaatgcaacctaataggaaattattattcgagacagactcctctgggaaatgcataacccaggaggcactgattccttgctgagaatcctgagtggtctgtcattttacctaagatcacatccttcaaacattgtgtatgttggagcagcgaaagaactgttcaccccttatgaataactgacattcaggaagcccaactccatcatgcagatgtctatctttaattgctagctcagaagcagacagagcttcctgggacctggctaaagtaactgatagatggaactcttctttggggactattactttgcaaatggggtcagagcctcatctatgcagagaatgtcaccatatgtggtttcatgtaatctgtaattatttgttccaacagcctttaacatgactattgtttgagaaacatggcaacttttaattcccctttgatgcttctagctttctttagtattttaagaactcatacagtactaggtatgttggtccctctgagaaaaacatgtggactctcaccagtccgttgtgctcaggactgagcagcagcgtgtgtgcggggcagctgtggaggtgaatactgattgtcccccttttcctccacagggatatctgcattacctccacctcctccacctccaccaccaccagcagctcccttgcctcctgcgagcaccgaggtacctgcccagctctcgtctcaggctgtgaatggcatgagccgaggggccttgctcagctccatccagaatttccaaaaaggaactttgaggaaagccaaaacctgtgatcacagtgctccgaagatcggctgaagcttcctgtttacacttggagggaaaagttcttttttattcctactcacccctaccccccaaactaccctcttcctgggaaagtaattgctgagccagtacagccacaaacagtactattttgcagatgctcatgtaagcagcttttcgagagaaataattctttaagcagaataaagttaggctggcattgctcccttaagatcttgctcctttattaaccctgtaaagggagtcttgtttatcctctaatggccaggcttttgggacagcagcatattgaaatattttcaccaactaaaggaaatagacagaaaaacaatgacaatattcaatcacagcagtaaatggcctttgtgttgcaatcccttctaccccatcagacagctcctagaaacattcctcttacagttcatttctctaaagcattttctgattcttagataactccaatttttgctacctttatcttagacattaacactatagcccaaagcatagttactttgctaaatcagaaagcaactgagttctttgttttctcctcaaatagaatggggaacgttcacaacattctcttaagttctaacaggaataccattgtggttatagaactcagggctgctaaagcaactactctagacccatagttctttttagttagatgtattgaaacagacaaaaatattaacatcagaaaaagctcttgccaattagaggatcttcttaatcctcagcaattaagtttggggtttgaggggggcaggtcattgttacaacagaagtaaatttggcatctatagaaatcaattatgatttttgaaagatttatctaaatatatcaatatagcatctctttaatgttagtcatttattagaaagatcctttatcctgatttgcttaaacctttcaataaattgcactttaaaggattataaataatccatttaaaaattcaagtacacacatcagtgttggttactatgcagagaatgtcattgtgtatagtttcatgtaatctgttatgtcagctgtatttttaaatggattatttataatcctttaaagtgcaatttattgaaaggtttaagcaaatcaggataaaggatctttctaataaatgactaacattaaagagatgctatattgatatatttagataaatctttcaaaaatcataattg

SEQ ID NO: 4264 - protein, 76 aa, Homo sapien [sequence omitted]

SEQ ID NO: 4265 - DNA, 492 bp, Homo sapien
ggcacgagggtacatcattgggaatggagggaaataaatgactggatggtcgctgctttttaagtttcaaattgacattccagacaagcggtgcctgagcccgtgcctgtcttcagatcttcacagcacagttcctgggaaggtggagccaccagcctctccttgaataactgggagatgaaacaggaagctctatgacacacttgatcgaatatgacagacaccgaaaatcacgactcagccccctccagcacctctacctgttgcccgccgatcacagccggaatgcagctgaaagattccctggggcctggttccaaccgcccactgtggactctgaggcctctgcatttgcgggtggtctgcctgtgatattttggtcatgggctggtctggtcggtttcccatttgtctggccagtctctatgtgtcttaatcccttgtccttcattaaaagcaaaactaaagaaaaaaaaaaaaaaaaaaaaaaaa

SEQ ID NO: 4266 - protein, 52 aa, Homo sapien
MTDTENHDSAPSSTSTCCPPITAGMQLKDSLGPGSNRPLWTLRPLHLRVVCL

SEQ ID NO: 4267 - DNA, 4574 bp, Homo sapien
ccaaaacaaaacttttctttacttaagccgtcccagaggaagtcctgctgcagaaaagatgatagaattggtcacccaatcaatagctgtgaagacttccttattcctgctgaacttccttccttggatatcttcatggataagcctgtgtctgtggacagagtggggcccaagtgctgaggctcgaaagacaggttttacaatcagccaattaaacatcttaccagttgctgtaccccttgccaaggggatgagctgaggagcttcttttctttaggtccaacatcaaaatgagtccatctgagctagggctttttgcaaaggtgattaaaaatcaaggctggagttccagccaaatagggaggagaggtaccacaagttcatcttaaacttgcttccgggctgggtagttaaaacaggaagatcccaaggggatcttacgaggcaaatatcagcaggtaactgtggaagaaaggaaatctcaggacctaatgagttcgttgtaaaatattcctgggaatagatgggggatctactcccagttttttactttttacagaatattgttgctttcctacaacaatgtacatatatttgcagttgtatatgctttttttttttccaaataaacttgtcaccctgcatgcccttggcaaataagtgaagcagaaataggaacacagtccacattcaagttgaggaacagtgtatctttaagagctgacctttgggtgacctggaaagggggaaagatggctaagcatggagagaaacgaggcaagagacaagctatgatacaacaccgcttcagcccctgccctcaatagcacacaacccacatatcagctttctgaagagaaggaacctactgtttagtgctcctcactttgcaatgtttgtgctacgccagaatttctccagtttttttcattatcatccccctgagaaaaaaattacattgaatttaaattttccctaataagagaaattaaatatgaaagaataggattttgttgggtaagattgagctttggaaggtcacgaaccattattctatctaaggtgtgtgttttgttttgtttttttttgtttttttttggcaatccctctccccctgaaccaatttcacattgggaatgcaggacctagactgctgaataaaaagctacttcttctataattgtcaggttctctccaatttctcagcttcctcaaagacatggggtggagttgggtgtgccatcactgagagagctctggaacttttgactcttagtgacatttttagatttaggggttcatggccttccacatgttgccaccaactggtgatctctgccccttcatgctgatcaagaaagtagaaactcctcgtcgccttcaggtttgcagtcgcagaaacattgcctgctgtggactgtcagcacaaaactgggacactggtgtcatttagactgtcagcagtgcacatgattgtacgatagactccaggcaaccatgtgcatctgtgcaagatgacctctgccccaagagaagggttacggtctaattaaatgtttaccaagatggtaccagtgggctctccccgtgtcctttggtgttattggagctggtgtatgacagactcaaggaaattttttaaggaaaatgaagaagaaatcaacctttatggttctctttcattggaagaggagaataaggaaagaaatggcaggtagagagggagggggaaaggaatagaaatggcatgtctttgatgctgtggcttgtgtggggacaatgggaagagcacagcaggcacaacatatctgtgttagtgccacgtggtatctgttaagtatggccagagcctcacatataagtgaagagagttaagacaattcttgctctttgaacaataatagtctatagaatttctattggcaaaccatcccagacaacctgacctatcaaacaaaagcaaataatccctgtctcagaactgctggtctaaaagctagaaggggcatgataatggaaattgctagaaaagagagaatgctctactctctttcctgtgcctacctacccccatcctaaaccctgtaaaacagaatttcaaaatagatgtcaaatatgaagtaattcagacttccaaagaaggaaagagttctgcccagggcagtatgagcaaatccacagggatgttaagatttggtccaactcaaaggtttatgggcagtgagcctagagtctcttgagagtaaacccttgcatttgggacaaggagaatatgtgaagttcaggagtgctcacactagagcaagatccagaaaaaaaaaaatccaatggcattttaaactagattgcattatcactcaatgctgttactttgagcagacaaatcagttgaatgggagggcaaatggcagaaatgaacaaaagctattaggtgaaagcatccccaatgtatcagttgtgagatgatttttgtttaatgatgatcaggtttacattgaagtggcttggaagacgtatttcagagggactgggtttgtactgcaaaactctgaacactagagcaggttctactagcacttgggcagtaaggtagcgggtgtgtattatgctattgccatagttctcgtctttgtggattcacataccctttcccatgaggagcttgctactaacagcctcctgtttctgttgtttttatatgggagaagagaaagagcttggaatttcaattgtctaaacaattggtatgatttacaagaaggcaaaccattcaggagatgttcaacagtgtatcattcttagcattcaatacaatgtttattataaaatatacacctgagtttatgtttttctgccaggctgaagggcaataatgtcttgctatgcaaacactctattttatgtgtgaatttttttaactgtaattttatgtgtgaatttttttaactaaactctatcatcattttctatgttgacatctttttttttttttaatctgtttccaactctgagtctgtgaactatctcttctgactggatgctggcctaaaatcctattagtgcttaaacagacctcaaaacactctgaacctgtaggccaatacagagatgttgttctttgatatatcttgggtccttgatggcttcaacaaacaaggtcataatttgtttaaattcagtgttttctgtagataccttcttctcagtttcattaagaagagtaaccatctttggttttccaaagaatggaaactcctaccctagactttagacttagagcgtctgcctttcacgatgagtaagagatccagaatgtttaggggatgtgcgtcagcccacctggtacagtggcaaagctgaatgcgaacttgaggcctcctgaggcctgaccttctatgcccccagccctccaccccaagcaccttttggtgtggctggaaacacatgacattggatgtgatttttctcaagcccttcactgtggaaggcatgggagactgcccagcattgggcatgtggctgttaacgtttccatttcaagtccctgattcttactggagaagttaaggagccacttaatgttttcacagacctctgattctgttgtgaatgtggcattccagtgagtacaacctgcttgctataaagaaagcagcatattttgacaattttatttcttccttgggtacttacatttttattacaaaaatggccgttataaaaaaagacagaagggctgggcagtggcttgctccctagaaactgagattccgaagcaggtgtttcctctcccctagactcagaggtacatttaatccatcttctccatttcctccttcaggaccagctatgagattcagtgcatttctagcccagcggatgttcattctccactaaacttcatcttttactaagcaaagggggattattccatgaggcagccaggagcaaggggccatgatattcatgactttgtctgctgggcatttttcaaagtgtccttgaattcactcagcaaacaaagctttctggagaatctctcaaaacttaggccctgctccatttggccaaaaatgatggctgctccaaaactctgaacttcttaaaactccatctgctacattatttctggagtttaaacatgactttttctgtctttgagtatagatgtgtttgtttaattaacgaagcacaagtctgttaagcagaaggctccaagctgtattctatacttgggaatccttggtgccatctttattctaccaagtgccaatcaccatggctaaagtgggcgtatattacagcctgtgtcctaagcttagaagctttaatgtacttttttaaatgaaaagtattagagggggttgaacattgtaactaaagcataaagttagaccaattacatgcagagatgtttatttaatattgtgtgagctgagtccttctgtataaattatttgcacacttttcttgcatgatgaactgattttttatagttgtttgtaccagacggtggcatatttttgtaaaaaacttttgacactgaattgcaataaatgtttttccaacaacac

SEQ ID NO: 4268 - protein, 85 aa, Homo sapien [sequence omitted]

SEQ ID NO: 4269 - DNA, 1530 bp, Homo sapien
agcactcccggagcctgcaacgcttgagatcctctccgcgcccgccaccccgcagggtgccccgcgccgttcccgccgccccgccgcccccgtcgcgggcccctgcaccccgagcatccgccccgggtggcacgtccccgagcccaccaggccggccccgtctccccatccgtctagtccgctcgcggtgccatgccattcctcgggcaggactggcggtcccccgggcagaactgggtgaagacggccgacggctggaagcgcttcctggatgagaagagcggcagtttcgtgagcgacctcagcagttactgcaacaaggaggtatacaataaggagaatcttttcaacagcctgaactatgatgttgcagccaagaagagaaagaaggacatgctgaatagcaaaaccaaaactcagtatttccaccaagaaaaatggatctatgttcacaaaggaagtactaaagagcgccatggatattgcaccctgggggaagctttcaacagactggacttctcaactgccattctggattccagaagatttaactacgtggtccggctgttggagctgatagcaaagtcacagctcacatccctgagtggcatcgcccaaaagaacttcatgaatattttggaaaaagtggtactgaaagtccttgaagaccagcaaaacattagactaataagggaactactccagaccctctacacatccttatgtacactggtccaaagagtcggcaagtctgtgctggtcgggaacattaacatgtgggtgtatcggatggagacgattctccactggcagcagcagctgaacaacattcagatcaccaggcctgccttcaaaggcctcaccttcactgacctgcctttgtgcctacaactgaacatcatgcagaggctgagcgacgggcgggacctggtcagcctgggccaggctgcccccgacctgcacgtgctcagcgaagaccggctgctgtggaagaaactctgccagtaccacttctccgagcggcagatccgcaaacgattaattctgtcagacaaagggcagctggattggaagaagatgtatttcaaacttgtccgatgttacccaaggaaagagcagtatggagatacccttcagctctgcaaacactgtcacatcctttcctggaagggcactgaccatccgtgcactgccaataacccagagagctgctccgtttcactttcaccccaggactttatcaacttgttcaagttctgaatcccagcacatgacaacacttcagaagggtccccctgctgactggagagctgggaatatggcatttggacacttcatttgtaaatagtgtacattttaaacattggctcgaaacttcagagataagtcatggagaggacattggaggggagaaatgcagttgctgactgggaatttaagaatgtgaacttctcactagaattggtatggaaaagcaaaatactgtaaataaactttttttctaacaatttgccaaaaaaaaaaaaaaaa

SEQ ID NO: 4270 - protein, 355 aa, Homo sapien
MPFLGQDWRSPGQNWVKTADGWKRFLDEKSGSFVSDLSSYCNKEVYNKENLFNSLNYDVAAKKRKKDMLNSKTKTQYFHQEKWIYVHKGSTKERHGYCTLGEAFNRLDFSTAILDSRRFNYVVRLLELIAKSQLTSLSGIAQKNFMNILEKVVLKVLEDQQNIRLIRELLQTLYTSLCTLVQRVGKSVLVGNINMWVYRMETILHWQQQLNNIQITRPAFKGLTFTDLPLCLQLNIMQRLSDGRDLVSLGQAAPDLHVLSEDRLLWKKLCQYHFSERQIRKRLILSDKGQLDWKKMYFKLVRCYPRKEQYGDTLQLCKHCHILSWKGTDHPCTANNPESCSVSLSPQDFINLFKF

SEQ ID NO: 4271 - DNA, 1803 bp, Homo sapien
ggaagggatgtcttaaaagaggagaagctttaaattagacgatcggagaaggctgagggaattgctatgaaggggcgggagctgaagtgtagaggactcctttagacagcagaaagggaaagccgttgagaagttcccttcaaactccacctgcctcctctccaattcaaactccactcccttctccaaaagttaaaaggaaagccaagtttgccacgctcccctgttcctactcaataaatacttcttctactccgccaccgggaaaacagaaaaaaaaaactaatttccttcccaatattaggacttagaaaagctctaggtcccgcaacttgaattttagcctaggggaatcaaaatagtaggagcattactcttgtttcctttttcaaaatcccacacctcatccttcctgcgacgccatgtctaccaacatttgtagtttcaaggacagcgcagtggacttcactggaagatgctatttcaccaaaatctgcaaatgtaaactgaaggacatcgcatgtttaaaatgtgggaacattgtaggttatcatgtgattgttccatgtagttcctgtcttccttcctgcaacaacggacacttctggatgtttcacagccaggcagtttatgatattaacagactagactccacaggtgtaaacatcctactttggggcaacttgccagagatagaagagagtacagatgaagatgtgttaaatatctcagcagaggagtgtattagataaatggaattatgatatatatgatatacaaacttttttctatttaaaaatatattaatggatcaactttaaaattgttagttgccagtgatcttttttggaaaacaaaaatggggcatttgttgatttatttattttccgtctctaattagttacctcagtttgattgaagccagtggagttgtgcttttcctctacttctacttcctctcccccacctttttctgcccagtgtaggtgtattcttaaattcagacgggaagattctttcacatatcactcagttacctcccaatctgggggagtttttcttacaacttgataccagataccattaattttacattcctgaataaaggcctagtacccacgcatatttcaaccatgcatatatcaagttcaactgagttttaataggggattaaaaaaacaagctgttaggtttccatgggcactggttctcataggttctattggtgataactgctttaacatggagcaagagtttgtgaatcaggaaatagaataaattaaaatttaaaatatatagaggaatcctcttgattgctcagcatgatgttagataaatgagtttgtcagaaaatatcagtatacgctgtttaccaatgttatttatttacattcttctaaagccattatggatattgtattatgagagctaaacctaaataagttatcctgttccctaggaccttctctgtaaatagtgaattttagacgagtagtctgtcctaaatcttaaatagaaaaaaaactaaagcgatttgcttaagccattgtacattataaagagctgttttgttttgctttgctttgctttgttttgtttttttaaagctgcattcagagccacaaaggaataggaaagtagggtagtgttggattctggttttatgtaactctaaaataaatgtatctctttaatatctcagttgtagggattttgtcaataccaaagcagactgagttgtggttttgtaaataaagttttttctaaaaatgaaaaaaaaaaaaaaaaaaaaaaaaaaaaaaa

SEQ ID NO: 4272 - protein, 109 aa, Homo sapien
MSTNICSFKDSAVDFTGRCYFTKICKCKLKDIACLKCGNIVGYHVIVPCSSCLPSCNNGHFWMFHSQAVYDINRLDSTGVNILLWGNLPEIEESTDEDVLNISAEECIR

SEQ ID NO: 4273 - DNA, 1368 bp, Homo sapien
gcattcactgagtgtgcttctacatctaatcacctcagtttgcagaatgcatatgggggtgagagcaagagccagtgttatctgttgggcaccataagcacagtgcatacgggcccacagtgctctttgggggacccatgaaaatgatctttaatcttcttattaaaatcaaaagacgaaaaaatttggctgggattatcaggtgcgagccactgcgcctggctggttttcatgaatcttgatagacatctataacgttattattttcagtggtgtgcagcatttttgcttcatgagtatgacctaggtatagagatctgataacttgaattcagaatattaagaaaatgaagtaactgattttctaaaaaaaaataaaaaaaaatttctacattataactcacagcattgttccattgcaggttttgcaatgtttgggggtaaagacagtagaaatattattcagtaaacaataatgtgtgaacttttaagatggataatagggcatggactgagtgctgctatcttgaaatgtgcacaggtacacttaccttttttttttttttttttttaagtttttcccattcaggaaaacaacattgtgatctgtactacaggaaccaaatgtcatgcgtcatacatgtgggtataaagtacataaaatatatctaactattcataatgtggggtgggtaatactgtctgtgaaataatgtaagaagcttttcacttaaaaaaaatgcattactttcacttaacactagacaccaggtcgaaaattttcaaggttatagtacttatttcaacaattcttagagatgctagctagtgttgaagctaaaaatagctttatttatgctgaattgtgatttttttatgccaaattttttttagttctaatcattgatgatagcttggaaataaataattatgccatggcatttgacagttcattattcctataagaattaaattgagtttagagagaatggtggtgttgagctgattattaacagttactgaaatcaaatatttatttgttacattattccatttgtattttaggtttccttttacattctttttatatgcattctgacattacatattttttaagactatggaaataatttaaagatttaagctctggtggatgattatctgctaagtaagtctgaaaatgtaatattttgataatactgtaatatacctgtcacacaaatgcttttctaatgttttaaccttgagtattgcagttgctgctttgtacagaggttactgcaataaaggaagtggattcattaaaaaaatctatgtcgggtgcggagaaagaggtaatgaaatggcaggaattcgatatcagcttat

SEQ ID NO: 4274 - protein, 46 aa, Homo sapien
AFTECASTSNHLSLQNAYGGESKSQCYLLGTISTVHTGPQCSLGDP

SEQ ID NO: 4275 - DNA, 2653 bp, Homo sapien
  Unsure 367-438, 548-601: Unknown base
gggagttgcagggggagagatggaaaggctagcagctgaaaaaaaataggtaaataaccagtgtattccatgtagctgttaatctagtttgttgcttccatcagctgcaggagtattccatagtatgcatccaccatagtaaatttatccattcacctggttgcctcaaattcttggctacctggagaaattaaaacccttgaagctagggttctgagtacaagatcagttccaccaattagatttcttcatttgagatttgggaggtaaaggctgtctttctgctgtttgggttgttgctgctggaaagcaagtttatgtacatatggggctttctgcaacagctttccagctttgaaaacctgcnnnnnnnnnnnnnnnnnnnnnnnnnnnnnnnnnnnnnnnnnnnnnnnnnnnnnnnnnnnnnnnnnnnnnnnncattcaacaggtaaaataaatctactctgtaatagtataagtttgactacaataaactgtggttaagaagaaaaattggccgggcatggtggctcatgcctgcctgtaannnnnnnnnnnnnnnnnnnnnnnnnnnnnnnnnnnnnnnnnnnnnnnnnnnnnnccagagtaatggtttcttgactttctgtagcccttgttccttagtctgctgtgatatttatgttgacctttatcattttctattctgaacccctcttagcatttaatgtgaaatctaagaaattagaagtagaatggcttttattgttttgacacctttgaaattattattaataatttttccagagcaaaaaagcaaacacgctcaataagactaaacaaaacaaaatataaatgtacatcatttaatgtcccagtggctctattctacctgtaagaaaatgatacaaaaccacctaagatattttgaagcctgacaaatcagcttcatggaaaaaggtaaaaaatgcatttttcaaccgaaagggcagatccaatagaagacccgctccttaaataaacataaaatgtaaaaagttggaaaattaagagtaatgttccatctggaaactgaacttttgtccttgaacttgtgttggcaccaagcctcatacacagtgagctcaataactgttgggacaaaggaaggaaggacaaaatgtgtaacttcccagcatctgggagatgctgtctcttgcctcactgagtgttccttttctttgctctcatgtcattccctgagaacaatgaattctgggacaggctaaacatcatgatgaagtttcttaaacagactttcttagtggaaatccatttagatctgggtgtgctctatggggagtgctgacgtcaaagagcaaatgtctataaggggcccttttaaaatgaacattttcctcattgagcaagctgggattctctaatgtagaaatcaagccatctttataatttcacttcagatgtttatgtttttgtttttttttgtctccaatgatggtaaaaataaaaactacgcattacttaaaggagtttccctcacatgtaaacactgttaggaagtctggattaagttgaaagtcctgttttaactttttttctctcatataccaaacactctgtatttctcttaaagaagccctttaagagaaagccctaattttatatctgacagtaaagtttgctgcaagtgtatgagttcaaacacatcccttgttttctgtccctaggggaaaagtcatgtagttttagcttggctccagtgttaatattatattcagtagcagccttagaagagtggtctaagacttgaacctggagcaattttatagcacagaatcctacgaagataggactgtgaacatttgttttctttttcgtgtgtgtcaaactaactggtttttgctttaccaataaaatgtcctcggcagagtaaattttaaacgtgaaaattatagatcttgatattgaatccatcagtgattcaagagatacacctatttgcctaaaacaacctaagatgtattggttatggaatcatgtgttggataggttcttaagacctgtttcctcaaatcttgacacagttttcaagggtggcttattgacttgcacggttgggcagataatccagatttacctaagattgggtaaaaaagtcatctgtgactttgctggcagggcatttgctaagtggagtacaggatctaaaagggttttcttagaaagggcaatattgtccaatgaagtaagcagaaggactctgggttagaagcatctgcacaaaaactggtgagacctactctccactgctctgcagctggatggctgatggcaggctgagcagtggggaagcaggttttaacaacagggagtccttccaggtcactgtatattgagaagaaacataaaactattgtctgttacattccgaggtcagccttcttcttaacgttttataatatgcaaatgccagcttctggaaagcaagtatcatcatgtaccaaatgctttatacaccatcacattcatgaattttttagcatggtcagaacttgtgtaaatatgtctcttagatgattttggggagatgtgatttatttttcatattttcaaaatgcatttcatttcaaataaagttatctattgagacaaccgaaaaaaaaaaaaaaagcgg

SEQ ID NO: 4276 - protein, 33 aa, Homo sapien
  Unsure 367-438, 548-601: Unknown amino acid
MILGRCDLFFIFSKCISFQIKLSIETTEKKKKS

SEQ ID NO: 4277 - DNA, 717 bp, Homo sapien
gcacgagggctacggccctggaacggggccatggagaagctgcggcgagtcctgagcggccaggacgacgaggagcagggcctgactgcgcaggtcctggatgcctcatcccttagtttcaacaccagattgaaatggtttgccatctgcttcgtatgtggcgttttcttttctattcttggaactggattgctgtggcttccgggcggcataaagctttttgcagtgttttataccctcggcaatcttgctgcgttagccagtacatgctttttaatgggacctgtgaagcaactgaagaaaatgtttgaagcaacaagattgcttgcaacaattgttatgcttttgtgtttcatatttaccctgtgtgctgctctttggtggcataagaagggactggctgtgttattctgcatattgcagttcttgtcaatgacctggtatagcctgtcatacatcccatatgcaagggatgcagttattaaatgctgttcttctctcctaagttgaaaatcagaaacttgtggaaaagagcacttgaatgttggtactctatgtttggtgaagtttgcttttccccataaaacactccaggaacaactgacgtgacagttgaagaccgttttgtactaagtctcattttgtatactggtaaaaactacatgcttgattaaaccattaaatgcttgtaactttaaaaaaaaaaaaaaaaaaaaa

SEQ ID NO: 4278 - protein, 159 aa, Homo sapien
MEKLRRVLSGQDDEEQGLTAQVLDASSLSFNTRLKWFAICFVCGVFFSILGTGLLWLPGGIKLFAVFYTLGNLAALASTCFLMGPVKQLKKMFEATRLLATIVMLLCFIFTLCAALWWHKKGLAVLFCILQFLSMTWYSLSYIPYARDAVIKCCSSLLS

SEQ ID NO: 4279 - DNA, 838 bp, Homo sapien
gcttccttgtcgtgtggcctcagtccttcgccgtccctcgccgtccttcgccatcgcacgccaccgcaccccatctctcgaaatctgcagacatcttgatttttcccacgctgtctgtcaggtctccgccgccactcgacgccagggcgccgggccttgtgggctgtgctgcacctcggacggcttcgcaccagccagcgccctctctctcctgcagcactctgatctgcaccccctgaggggcttccactgtccgcggggtgagaatgcccctgggagtgtcacatgactgccgccccatgtgtgtgagaggcgtcctctgggagagcatggatcctgaggtcccaggattgtcagctgacctctgtcctgtgtgcccagtggccccaggtgacgtgtcttcaagaagaggctgagctgcggtgcttgtaaggtctcagccttagatccaaggacagtccaaggaagtcctaagaccatggagttggtgatctgggatctgggtttgctgatatttctcaccgtgaatctcttggtggtgtttgtgggcacgagaggggcagagaatggagagtgaggctaccacatgaagcgtcaccagagctgctccctgctgcctgctcagagcaccccggatccactgttcaatctgcacaagattcggggtccagacatgggagacttcagctgcctcagaggaccgtggacagggaaggccagcctcgcatccctctgtccatgcctggaatgactttaataaccaagagttttatttttgaatttgtagctgtcgttcactttttacccacccattcaataaaccttacagaattgctcc

SEQ ID NO: 4280 - protein, 95 aa, Homo sapien
LPCRVASVLRRPSPSFAIARHRTPSLEICRHLDFSHAVCQVSAATRRQGAGPCGLCCTSDGFAPASALSLLQHSDLHPLRGFHCPRGENAPGSVT

SEQ ID NO: 4281 - DNA, 4102 bp, Homo sapien
  Unsure 2273-2546: Unknown base
cgcacctgcacccggcggagccggaggagggcgacagcaacgtggcgcggactacgccgcctcccgggcgcccccctgcgcccagctccgaggaggaggacggagaggcagtggcacactgatgggcgagctgagcgcagagctgcgaagggggaactgtttgcagtagcagccgctgctccctttctccctctcttcctccctcttttgccactgtctgggccccatctgggattcctgggccctttggaaaagagttggtgaaatgcgcagccggctgtggacgggggaggaggaaggggacagagggagcaggtaggaaacactttagttgggggtggggggcgtctccctctggccccctgtctgtcttcctctccgcggtggagcaaactgtggacttgcctggcacttaaaccttggtagatctgggtttataatcggccattcttaagcacgtggggttgggggaaagttcggagtacccattcctgccgttgcttcctatcctgggcttggaagaatcctggtagaaaggccagagtgggtttgtggagtcgccactgcgggaccagcacgaaagctgcttgtctgctttggcggagctgagctgtgtatgggatccaggaggctggggtgatttattttatgggattcctggagcgcagggctggtgaatccatgacaaggtccgggagcagcagaccaaaaccacagcagcctcctattaagtgtaacaaatagttaagcaaactcgggctacaaacaaagactttgctacctccctcctccacaacccccaagtaattagccttctggagctggctcttagctgaggctcctgctacctcctgctccacccgccccttcctaggttacaagtaaatcattgtcaagggccagccaggggaaggtttcaattaaggttctgttctgctgcctttgtttctcccctgctgttgtaggcacttacagctgcgttgttatgaaaggagggaatagccctttgtgtctttgatctaattaaacctgcttggctgtgtttatccgcagggcaggtcacagatagggttggctgtgccactccataaagtatctattgtggaagcagccaaaaagggctgctgtggcaggaattggttaatttctccttccacttcccttcctgaatagtgaagggagcccttttaaaacaaggctttggtggtaatcctgtgatttttttttctcccccatcccctcactggcccatccctctcaccctcacttttgttctgctggtgggtaaaatcttaggctgaacacatatttcaatggtaagatacttattttgctatccacacttgatgcaattgaattcaaggtgcaaagtcttgtactgaagcagtctccttgttgcttggagaacacctccttcagagccctttgttaaataagaggggcgacgttgatcatagatgccacctggttagcaccgaatctgactttggtgacagtcctaaagcacagttggtgattgtgagatctgttagcggcaggctgagcagatactacttggttttgcttggtatgagatactactgtttgcttagtatgagattttttccagcctgtctcttaaactcctgtgacatcttcaatgatatgtgccctcagttgcagcatagcttctctgctgcctattgccattgctgtctcaaaagttgagtgaattttgaggcgtcttttttttttttcctctcttgggagtcgttgtaaactactgtgtacaagtcattttgtgatatgattctgaacagttggaatagaatcatagttaagtggtacagccatggctatcgtcaggcctgttgcctggagatctctaagttaaggcaacaagacttaaagaattttctaatacacttgtttcacacatggacgttgaggccatagtctttaaaagcttggacctttgtagcacctcaacatgaaagggcattagctatgtttcctgtttttacagtgatcaccaaacagatcttgccactttgattgttaaaaatgaaccacattctagccctggtctgggactttggagggagatgaatttcttgttggaaatgtaaatctagtgtccatatttaatactctcacagctttgtgtttattctctttgctcatggaatagcagaacaagataaacatgggttaagacatttaggagaacctgctgtatctaacccagttggattttctttcatgcttaacacagtagtgaaaatagaacgtannnnnnnnnnnnnnnnnnnnnnnnnnnnnnnnnnnnnnnnnnnnnnnnnnnnnnnnnnnnnnnnnnnnnnnnnnnnnnnnnnnnnnnnnnnnnnnnnnnnnnnnnnnnnnnnnnnnnnnnnnnnnnnnnnnnnnnnnnnnnnnnnnnnnnnnnnnnnnnnnnnnnnnnnnnnnnnnnnnnnnnnnnnnnnnnnnnnnnnnnnnnnnnnnnnnnnnnnnnnnnnnnnnnnnnnnnnnnnnnnnnnnnnnnnnnnnnnnnnnnnnnnnnnnnnnnnacagtagtaataaccaccgtgtagacaagtgggagggaagaatagaatggcactgtccagctctgggctagccagatcaactcccccacccgtcttcttcctctgtcccagaatggaaaatgatgtatggtcagtcacgctgaagtatagcagcgactgtgttaagagagagcagtgactctctcttctagagaagaggttttcaataacagggcttggaaatgaactagaataggaaatagatcttttcagatgctgctttcccatgtaatacaagcgtttctacagggtaccagaggtgtgaaatatgtgacacttaagaacagtgatttttattgggaattttcttagggttattacacttaaagcaacaaccaactagtaacagctccaggaaaggggaatgaatcaactcttggttctttcctgaagacggcagtgttgtggataagtgagtttttaatgccctggcagtggctacatttgacactttagaaaaaataaacatatttaataatttttgtttctccttaggaataagactgtagaactgttttgtactgtgaattacggatgctctttgaaggaaagaaatatcgattctaatgttcttcagaagttctggcagggataagcaggacatcgactggaacgtatgctaaatgaaagcagacaaatttctattttcttacctgagcaaatattttattgaaactgcttatgtatgtcaaaggagcccacaacttcagctacacaactttttgtattgaaagaactcatactttttgtagcttttatttcacatttaatttaaagtgacttttagcactaaaatgcctagaagattttactccagacctataaggaaatgtttagtttttatgaaaaatgacaagtcgatggttaaacttctcatgtctttggtgctttggccctaatagcactggacaacaccacgaccacatggaaacatatttttggaagcaaaactttaattttatataacgtatgctatggagagctaagacaatttaaggactacttgttttctattttttttcttaataaaatggaatccactgtgttgaagactcttgatatcatgtgcttgtctaaccattttttgttttataaattagaataaaatatagttgtgataatggtcatcgaatggatttgtttggaaagctacatcttatttgtgaaatgttttttaaatcagagtaactatcaactgattcagctttttgttgttttgttcttggctataatacttgtgactcatgaagaattatgttgacaaacaggataaattccacatgcattttatttcccagtgagttgtataaactttatttttgttgaaggttgtatgttaaatcaatgttacattcttatatcacttcttgagaaggaagttccgatttgaaattgtatcatttccttcaaaatgaagggcagtgcttagttaaataaaagattgatgatatcttttaagccatttcctcttcactatgtcttattaaaataaaacctgtcaagttcttttcaaaaga

SEQ ID NO: 4282 - DNA, 1078 bp, Homo sapien
gttgcaggtagcggtagcgatggacactctggatcgagtagtaaagcccaaaacgaaaagagccaagagattccttgagaagagagaaccgaaactcaatgaaaatattaaaaatgccatgctgattaaagggggaaatgcaaatgcaacagtgacaaaagtacttaaagatgtgtatgcactgaaaaaaccatacggtgtactatataaaaagaaaaatattacaagaccttttgaggatcagacatcactggaattcttttcaaagaagtcagattgttctttattcatgtttggctcccataataagaagcggccaaataatctagtaataggtcgtatgtatgactaccatgtgctggatatgattgaattaggtattgagaattttgtctctctaaaagacattaagaacagtaaatgtcctgagggaacaaaacccatgctgatatttgctggcgatgatttcgatgtaacagaagattatagaagactaaaaagtcttcttattgatttcttcagaggccccacagtatcaaatatccgcctggctggattagagtatgttctgcacttcactgcactgaatgggaagatttactttcgaagctataagttgctgttgaagaaatctggttgcagaacaccacggattgaattggaagagatgggaccctcattggatctggttctgaggaggacacacctggcatcggatgacctttataaattatctatgaaaatgccaaaagctctcaagccaaagaagaagaaaaatatttcccatgatacttttggtacaacttatggaaggattcatatgcagaagcaagacctaagcaaactacaaaccaggaaaatgaaggggttgaagaagcgacctgcagaaaggataacagaagaccacgagaaaaagtcaaaaagaattaaaaaaaattgatggaacttaaaaaaaaaaaaaaaaaaaaaaaaaaaaaaaaaaaaaaaaaaaaaaaaaaaaaaaaaaaaaaaaaaaaaaaaaaaaaaaaaaaaaaaaaaaaaaaaaaaaaaaaaaaaaaaaaaaaaaaaaaaaaaaaaa

SEQ ID NO: 4283 - protein, 306 aa, Homo sapien
MDTLDRVVKPKTKRAKRFLEKREPKLNENIKNAMLIKGGNANATVTKVLKDVYALKKPYGVLYKKKNITRPFEDQTSLEFFSKKSDCSLFMFGSHNKKRPNNLVIGRMYDYHVLDMIELGIENFVSLKDIKNSKCPEGTKPMLIFAGDDFDVTEDYRRLKSLLIDFFRGPTVSNIRLAGLEYVLHFTALNGKIYFRSYKLLLKKSGCRTPRIELEEMGPSLDLVLRRTHLASDDLYKLSMKMPKALKPKKKKNISHDTFGTTYGRIHMQKQDLSKLQTRKMKGLKKRPAERITEDHEKKSKRIKKN

SEQ ID NO: 4284 - DNA, 5095 bp, Homo sapien
acttgggcgcgactggctttattgtaggtccccatgagctggtgggggctgtaggggtaaccaggcagggcgtctggcgctgttggggctgcgtttttccggagtccccctatgcgaggccgtgcccctcttcgcccggctcctggtgctccccagccgccggcccgctcccggaagctgcagcagctggtaacaaagagcctgccgggccgcctgctgccggggccgaggtatccaggagtcgggcggagcggctggggatgagcgcgagccggaccatgcgtccgggttcgcggcggtgagggtcgcggccggcggccgaggcgcaggtgcgggtcgagagaccggcgcctccctccccgccgcccgtggactctgagcgcaggtgtttctactctgccggccgctccacctgggaaagcgccttcaagagctacctctggcggcacctggccctcagctgcagggaaaccgcactcaaacctgccgccgagcccgggtttttctgcaaaactcagaggacctggctcttgcccgaggtgccctgaaccattgtgtgaataagctggggaagcctgactggagtgttttttctttttaataaaaagagtttttctgaatctcaatttttagaaattttttttgcgaagtttgcaatactctctacctcttcgcatcctctcttgctcgtggagtctttttcctcctcagctataaatattttttactatcggcggagcagaccagggatgaacgtcttttaattgcaagtataactgttaaaaccacgtcgggatagtagtcaagatggataaaaagtcctttgaaatggtgctggatgaaattagaaaggtggttgatttgctgagatatttttcctgggccgagccccagttgaaggcaatgaaagcattacagcataaaatggtggctgtccagccaacagaagtggtcaatatactcaactgtttcactttcagtaaagacaaactagttgctcttgaactgttagcctcgaacattattgatgcacagaattctcgtcctattgaagatttattcagggtaaatatgtctgagaagaaacggtgcaagagaatacttgaacagctttcaaggggggctgcaaagctcctcatgctatgatatcttcttgtggaacaatcccaggaaatccatatcccaaaggaagacctagccgcataaatggaattttcccaggaactcctttgaaaaaagatggtgaagaatgtactaacgaaggcaaaggaatagctgcacgaattcttgggccatccaaaccacctccttcaacatataatccacataaacctgttccttatccgatacctccatgccgaccacatgcaactattgcaccaagtgcttataacaatgcaggtctggtaccattagcgaatgtcatagctccacctccacctccatatactcctaatcctgtaggaacagagaatgaagacctttcgaatccgtcaaaacctatacagaatcaaacattttccaccccagcaagtcaactcttttctcctcatggttctaatccttcaacacctgctgcaactcctgttcctactgcatccccagtcaaggcaattaatcatccatcagcatcagcagctgccaccgtttctggaatgaacctgctgaatactgtccttcctgtgttcccagggcaggtctcctcagccgttcacacacctcagccatcaataccaaacccaacagttatcagaaccccttcattgcccactgcacctgttacatccatccacagtacaaccaccactcctgttccttccattttttctggcctagtgtcactgccaggtccttctgccactcctaccgcagccactcctaccccaggacctacaccacggtccactcttggttccagtgaagcatttgcttctacttctgcacctttcactagcctccccttttccaccagctcttctgctgcttctaccagcaacccaaattctgcttcattgtcatcagtttttgcagggctccctttgcccttaccaccaacatcccaaggcctatccaacccgactcctgtaattgctggtggctctactcccagcgttgccggtccacttggtgtgaacagtcctcttttgtctgcgttaaaaggttttctgacatccaatgacaccaatttaatcaactcctctgctttatcctctgctgtcacaagtgggctggcttcactatcttctcttactcttcagaactctgactcttctgcttcagcccctaacaagtgctatgccccatcagccatccctaccccacagaggacttccactccagggttggccctgttcccaggcctgccgtctcccgtggctaactcaacttccactcccctgacattgcctgtacagtctcctttagccactgctgcatcagcttccacgtcagtgccagttagctgtggctcctcagcctcccttttgcgtggcccccacccaggtacctcagatctgcatatttcatctacccctgctgcaacaactcttcctgttatgatcaaaactgagcccacaagtcctactccctcggccttcaaaggtccatctcattctgggaatccctctcatggcactttaggtttgtcagggacattgggccgtgcatatacttcaacatccgtgcccatcagtttatctgcttgccttaatcctgcattgtcaggtctctccagcttgagtactcctttaaatggttcaaatcctctttcctctatttcccttccaccacatggttcctccactcccattgcaccagtattcactgctcttccttcttttacttctttgaccaacaattttcctttaactggcaacccatctcttaatccgtcagtatctctcccagggtcattaatagccacctcatctaccgctgccacctccacatctctccctcatcctagctcaacggcagctgttctctcagggctttctgcttcagcaccagtctcagcagcacctttccccctcaacctgtccactgctgttccctcacttttctctgttactcaaggacctctgtcatcttcaaatccctcctatccaggcttttctgtctctaataccccaagcgttacccctgctcttccctcattcccggggctgcaggcgccctctacagtcgcagctgtcacaccactacctgtggctgccacagccccatccccagctccagtcctcccaggattcgcctcagcattcagttccaatttcaactccgctcttgttgcacaagccggtttatcatctggacttcaagctgcaggcagttctgtttttccaggccttttgtccctcccgggtatccctgggtttcctcagaatccttcacaatcatccttgcaagaattacagcataatgcggctgcgcagtcagcattgttacagcaggtccattcagcttcggctctggaaagctatccagctcagcctgatgggtttcctagttatccttcagcgccaggaacaccattttctttgcaaccaagcctgtcccagagtgggtggcagtgaatacttttaacttttattctccttcagagcaacatcagaattgcctgagaactgcaatgaacaatctgacaaatgtgaagctggccaaaagtcggaaaatgagaatgagggtaatcctggagaaattgtgacaacaatttgaaaattgtggttgcattttaaagtgtgaacactcccctatgtaaatatgctgacaataaattgtatggagaatggtatttaaaaagtgtttggagacttttcacctgtcctataaaattttgaattgtgtatgtgatctacatagaaagaatattaaagagtaggttgaactctttatagccgaatacagccttaaatatgcttgtatagcatccactggcagaagtaatagttgtgcctcagacttgggggttgcatgtggccctgggggagttactacccttggtatgcatgagcggttcctattagcatcagtgggaactcagtactctgtatgtatccacaaaagggaacttgagacccacagttattcttaatttctgatattaacaaccgtacatactgctgaatttaactcaaaatatttcaggtaagtgaaagtggtgcttaatgtagactatagaatgactttcaggtgttttcaactgaaagtatatatccagaactgcatccttatagaaatacaagtaagacttaggataatttgccttcaaaacagttttcctaatctcagcagtatccagtgagtgaagaacacttgactgactcttgggccacctctgttacttactgtactatggaagctcctggtgaatgtttacaattatgggatgtagtatttctatttgtactttaagtcaaatgcttatatgaaatatgtgacaacaaatagagaagactggctctgttagtaattatgcagtatgtactctatttaaggatctgtggtagtataacatgagtgaatgtcattaattttgaagtaataactgccacatgtgggaagtaggggagtaaggagaatgaattccaatctgtgattaaaagtgtaaactatagactctactgtagtacatttcaggatctagaagttttacttttataaagatggtgtccggaagatgttgctaatgtattttacttcaacatagggaacaaactttttaagtatattaataaacctgtatggttagtttttaacagttttttaaaataaactatggatatgacaaatattctgtgttttactaagtgcttggataggctttctaattttgtatacgtgctagagttaattattgaacatttttatccaaatttagttgtaactctgtttatactactgattgctcattcgtttaaatgatattttaatgtaaaagtcataaccaacatatgaacagacagatttatgtctttaaacacagaatgtaagctatagtttaatctgataccagttgctggaagttgccatttgtttttcttaaatctatacccataaaacttcttttaagattaaaaaaaaaaaaaaaaaaaaa

SEQ ID NO: 4285 - protein, 810 aa, Homo sapien
MISSCGTIPGNPYPKGRPSRINGIFPGTPLKKDGEECTNEGKGIAARILGPSKPPPSTYNPHKPVPYPIPPCRPHATIAPSAYNNAGLVPLANVIAPPPPPYTPNPVGTENEDLSNPSKPIQNQTFSTPASQLFSPHGSNPSTPAATPVPTASPVKAINHPSASAAATVSGMNLLNTVLPVFPGQVSSAVHTPQPSIPNPTVIRTPSLPTAPVTSIHSTTTTPVPSIFSGLVSLPGPSATPTAATPTPGPTPRSTLGSSEAFASTSAPFTSLPFSTSSSAASTSNPNSASLSSVFAGLPLPLPPTSQGLSNPTPVIAGGSTPSVAGPLGVNSPLLSALKGFLTSNDTNLINSSALSSAVTSGLASLSSLTLQNSDSSASAPNKCYAPSAIPTPQRTSTPGLALFPGLPSPVANSTSTPLTLPVQSPLATAASASTSVPVSCGSSASLLRGPHPGTSDLHISSTPAATTLPVMIKTEPTSPTPSAFKGPSHSGNPSHGTLGLSGTLGRAYTSTSVPISLSACLNPALSGLSSLSTPLNGSNPLSSISLPPHGSSTPIAPVFTALPSFTSLTNNFPLTGNPSLNPSVSLPGSLIATSSTAATSTSLPHPSSTAAVLSGLSASAPVSAAPFPLNLSTAVPSLFSVTQGPLSSSNPSYPGFSVSNTPSVTPALPSFPGLQAPSTVAAVTPLPVAATAPSPAPVLPGFASAFSSNFNSALVAQAGLSSGLQAAGSSVFPGLLSLPGIPGFPQNPSQSSLQELQHNAAAQSALLQQVHSASALESYPAQPDGFPSYPSAPGTPFSLQPSLSQSGWQ

SEQ ID NO: 4286 - DNA, 1146 bp, Homo sapien
gtgcgtacgtgcgtcgtctctatggtggcggcggatttggagggaccctacgaaccaggagtcaggcgagccgatctggggctgcaggatgttccgctgggagcgctccattcccctgcgaggctcggccgccgccctgtgcaacaacctcagtgtgctgcagctgccggctcgcaacctcacgtattttggcgtggttcatggaccaagcgcccagcttctcagcgctgctcctgagggtgtgcccttggcccagcgccagctccacgctaaggagggtgctggagtgagtcccccacttatcactcaggtccactggtgtgtcctccccttccgagtgctgctggtactcacctcacatcgaggaatacagatgtacgagtccaatggctacaccatggtctactggcatgcactggactctggagatgcctccccagtacaggctgtgtttgcccggggaattgctgccagtggccacttcatctgtgtgggaacgtggtcaggccgggtgctggtgtttgacatcccagcaaagggtcccaacattgtactgagcgaggagctggctgggcaccagatgccaatcacagacattgccaccgagcctgcccagggacaggattgtgtggctgacatggtgacggcagatgactcaggcttgctgtgtgtctggcggtcagggccagaattcacattattgacccgcattccaggatttggagttccgtgcccctctgtgcagctgtggcaggggatcatagcagcaggctatgggaacggacaagtgcatctatatgaggccactacaggaaatctacatgtccagatcaatgcccatgcccgggccatctgcgccctggacctggcttctgaggtgggcaagctactctctgcaggtgaggacacctttgtgcatatctggaagctgagcagaaacccagagagtggctacattgaggtggaacactgtcatggtgagtgtgtcgccgacacccagctgtgtggtgctcgattttgtgattcctcaggcaactcctttgctgtgactggctatgaccttgcggagatccggagattcagcagtgtgtgagaagagcagccttcctttgtccctgtggtattcataaagtacccgctccaccc

SEQ ID NO: 4287 - protein, 334 aa, Homo sapien
MFRWERSIPLRGSAAALCNNLSVLQLPARNLTYFGVVHGPSAQLLSAAPEGVPLAQRQLHAKEGAGVSPPLITQVHWCVLPFRVLLVLTSHRGIQMYESNGYTMVYWHALDSGDASPVQAVFARGIAASGHFICVGTWSGRVLVFDIPAKGPNIVLSEELAGHQMPITDIATEPAQGQDCVADMVTADDSGLLCVWRSGPEFTLLTRIPGFGVPCPSVQLWQGIIAAGYGNGQVHLYEATTGNLHVQINAHARAICALDLASEVGKLLSAGEDTFVHIWKLSRNPESGYIEVEHCHGECVADTQLCGARFCDSSGNSFAVTGYDLAEIRRFSSV

SEQ ID NO: 4288 - DNA, 5587 bp, Homo sapien
caacaacaaaaggacttggactggccggcctgggcgcacgacccgagggctggagtcggccccgcgcctgccgtctgggtacctgaacgaggtgcagcgcagccggccccaccgcagctacctcagcagtcccgccccgcccgcgtccttccccgccgagccggcctcgctcccttccccgcgcaccccgcacggcccgggcccacgtacaatgactcttcttgcttttcacctaagttgaataagcaccctgtgcactttaatctcctgtcggtaccattgggccaactaaagacaaggttttgaaatctcagctataaaagacatccagccaaactctcagtcttgccttaacaatgttccagaggctgaataaaatgtttgtgggtgaagtcagttcttcctccaaccaagaaccagaattcaatgagaaagaagatgatgaatggattcttgttgacttcatagatacttgcactggtttctcagcagaagaagaagaagaagaggaggacatcagtgaagagtcacctactgagcacccttcagtcttttcctgtttaccggcatctcttgagtgcttggctgatacaagtgattcctgctttctccagtttgagtcatgtccaatggaggagagctggtttatcaccccacccccatgttttactgcaggtggattaaccactatcaaggtggaaacaagtcctatggaaaaccttctcattgaacatcccagcatgtctgtctatgctgtgcataactcctgccctggtctcagtgaggccacccgtgggactgatgaattacatagcccaagtagtcccagagtggaagctcaaaatgaaatggggcagcatattcattgttatgttgcagctcttgctgctcatacaacttttctggaacaacccaagagctttcgcccttcccagtggataaaagaacacagtgaaagacagcctcttaacagaaatagccttcgtcgccaaaatcttaccagggattgccaccctcggcaagtcaagcacaatggctgggttgttcatcagccctgcccgcgtcagtacaattactaatagtttcaagttttgttggttggtttctcttggtttgtgcttacatgtatggatgtgtgtatatgtacagtgaaaatgttgtctctttacaaccaattgataaccaatcacatagttttatcagtgtatttagacactatcttgaaaatcagatttatatgctgtgtatcacataatgccttgcctttaacatttactttttttgtacactttttcagattatttctggaaacatatcaatataattacagtgtttgggggtgtctttaaatatattaggttatacattagtcagcattttaaagacatttcttcccaagtacgagaataggcatctttcattttcattttattttgtattacttaatcttttaagcaagcaaaaatttattctcagggtcagctgtacactttattgaccagtacttgataatctctctgtatatgatgaatacatttttacacactaacattagcattaacaggtgatagttgccatggatataatggaattatggctggactttcttttgaaagaaaacttgatgtattctgtgtgtatggtttttccccagattagtcatacagttcatttggaattcaggtacattaagctttagtgaagagtgcatgcagtaattccaatgtgactgcatgacgtggtacagacattacaggtgttgtagacagaggcacttgtctcgtgcagagggattaaattagacctgtgagattatatttggaaaaattcatgtctgtaactaacccattagtgcagtatttaatttgttactattccttcccgccaattctgtccactcctcacctcgcatcagctataaatttggaagtacttgtccaggcactcaagtgacttcatatttctctctgcccatgggaaaagagataggctttatatttccacagagtgaaaaatcctctgtcatggagcctgtcctgccaagtggcaagagtgtggggactgtctggtgatgatgtctttcatggcatctgagtgaagagtgacaggttggctcaacttttttctttttttttttttaattgccttgtattgtaagtattcttccctgcagtccaagtgacttttcattttttgttttaacttcaggcaaaatctttaaccactctggcctctgtttcccccaccaacggggagcagtgacatttacctccctcacagagtcactgtgaggattctatactgatttgaagtggagctgttcagaactgaaccttgtaggaaattccaagggcctttctactgaatctggtgatggggtggggccgtggcactttctctgccacagctgttcttcacagtgttggtgctaatgaggccagggtgcagggttcgattcacacgtaggccagttaacttagagaaaatctatttccttacctctagccagtcacttcctttttccgcagttgtgatgggttttgctgagccatccactctgactgatttcctctgaagtaaacatatttacaatccaaagcaattctactgacagaagtgttgccttcataatcaaacagcttgtttttccatctcctctgcaaccctaattaaatgagtacaggtctacaaaatgttttcaaggagaaaagcagcatatccttaagtgaagtattatatttttcaataaccctgtagtggcttgatgcagggaaccctgggggactttcagcgaagagctgtgctcttttctgactagattagagcgtttggagtggaagacgtcaaatgtgtagtgagatggaggttttacattgttcttctactggctgtgatgaagtgccagaatgtctctttagaacaagagttagattccccctttctccttattgccccttccgttttgacttcccctttatttatttgttgtctaattaggggccaagtctgtaaagttttgtcaaagtgagttagaagttgttttctcttactatttgtgtttaccagagttgggagataagatagtttccatgaaggtgtgtatgttttatacgatgtttgttatagggccatgcattggtaacttgaaaatagaccagcttaatgtcttcaggatgtaaaactctgaatacacggcgtctctttttcatacattgcatgtaagttgttagtacctcacaagctacagaagttcagccatgagattttgtttggcaacatgaacagatttgtgtataactgcaatggcctttttttccagatttccttattgactttttgtttgccttacctggggctagttttttatgctttgtacctagaaaacaaaaaattacattcgttgggctttttttcaaggttgggattaccacaccacctggaatatcatactgtggtttctgcctaaaattggcacatgtaagtattgaagaaaatggttatataattcagttgaaactcttggttattagatgttaggcatctcctgtatgtaagacacaaggccaaccacaacacagaacgatgttgacctgttaagtattctctgaaacatggccaaaatgcattttatgagcttttttttttgctattgtaaatattagtggtttacaatgcgctttagacatatttctttaaaatgcaagcagtgagaaataagacctctctgaattagtagctctaaactgttaacatagaatgttacttggaaaaagtctggaatatgtggtgtacacaagcagtgcttcgtgaatgagtttcttagcttttatagtgcgccatgtttctcaaagtttgtttttgttgacaaaacattttataatatatatcttatgtttattttttttctcaactaattgtgtactgcactgtaaggtgaaaattagccatccattatttatcttctgtggcaatgcatttatatggttgattgggtggggaattttttgcagaaagatgcaaagtgattgggttttcgacttcctatcgcagggagcttttaagaaatattaatttcctatacatttttccaatccccatgcaaactgttcctgtttacataccttctctgttgtatcagtactttgagtgagaagacagtttatttaaaacttgagcaggctgttcagcattgtttctgcttctgaaatctgtatagtacactggtttgtaatcattatgtcttcattgaaatccttgctacttctcttcctcctcaatgaaatacattatatattatctttatgtactcttaagaaaaacgagcaaggaagagtatcttcattattctcattttctctgagttggaaacaaaaacatgaaggactccaactagaagacagatatttacatttaaatagattagtgggaaaactttaagagtttccacatattagttttcattttttgagtcaagagactgctccttgtactgggagacactagtagtatatgtttgtaatgttactttaaaattatctttttattttataaggcccataaatactggttaaactctgttaaaagtgggccttctatcttggatggtttcactgccatcagccatgctgatatattagaaatggcatccctatctacttactttaatgcttaaaattatacataaaatgctttatttagaaaacctacatgatacagtggtgtcagccttgccatgtatcagtttcacttgaaatttgagaccaattaaatttcaactgtttagggtggagaaagaggtactggaaaacatgcagatgaggatatcttttatgtgcaacagtatcctttgcatgggaggagagttactcttgaaaggcaggcagcttaagtggacaatgttttgtatatagttgagaattttacgacacttttaaaaattgtgtaattgttaaatgtccagttttgctctgttttgcctgaagttttagtatttgttttctaggtggacctctgaaaaccaaaccagtacctggggaggttagatgtgtgtttcaggcttggagtgtatgagtggttttgcttgtattttcctccagagattttgaactttaataattgcgtgtgtgttttttttttttttaagtggctttgtttttttttctcaagtaaaattgtgaacatatttcctttataggggcagggcatgagttagggagactgaagagtattgtagactgtacatgtgccttcttaatgtgtttctcgacacattttttttcagtaacttgaaaattcaaaagggacatttggttaggttactgtacatcaatctatgcataaatggcagcttgttttcttgagccacggtctaaattttgtttttatagaaattttttatactgattggttcatagatggtcagttttgtacacagactgaacaatacagcactttgccaaaaatgagtgtagcattgtttaaacattgtgtgttaacacctgttctttgtaattgggttgtggtgcattttgcactacctggagttacagttttcaatctgtcagtaaataaagtgtcctttaacttc

SEQ ID NO: 4289 - protein, 240 aa, Homo sapien
MFQRLNKMFVGEVSSSSNQEPEFNEKEDDEWILVDFIDTCTGFSAEEEEEEEDISEESPTEHPSVFSCLPASLECLADTSDSCFLQFESCPMEESWFITPPPCFTAGGLTTIKVETSPMENLLIEHPSMSVYAVHNSCPGLSEATRGTDELHSPSSPRVEAQNEMGQHIHCYVAALAAHTTFLEQPKSFRPSQWIKEHSERQPLNRNSLRRQNLTRDCHPRQVKHNGWVVHQPCPRQYNY

SEQ ID NO: 4290 - DNA, 966 bp, Homo sapien
gagcagaagtctgtaaatgtccctgtgatggacctctttctagcatgttgcagttttatttttaataaatttgtaagtgaaatgaacgtaaaggtaattgtgtacgttttagacatgacaatgaaaatttaaaatgtagcttccatacttgtgcataattccaaagtattttattttttatcaatcagtgttaaatagctttttgtacaggcttcaatccatttttcgaagtgtgctgttttttaatgaaagtaactataatcttttcacatcccatggaactgccgtttacacattgcaactttttaaacttaacttttttggagggagaaaaatccccgcttgctaaatgatactaaaccgttgtttgggctcttataattaggtcctgagattttataaaaatttagtctgtagctttttaggttcttcactagagttggttgtacataaaaataataaagaatataaagtatcccaaaattcttttaaagtctggatttttccgctaatatgtactttagagaatattttgttcatgcatacttccacgttaaattgaaaatgtcttcagcttctcttggtaaatgtgaaccatttgttttttattgtgcttgggggagagggtattttaatataatttttgcctaaatcaagaagtcccctctgaatgttaatttttaaatgtcaaaatatgatgaacgatatatcttgaaagtgagattgcaatatgcttaaacttaagtggtatttcaaaaacgagaaaattctggaatttgtcatttgaagctccataagagaaattgataggacttcgtttttgatcagtctgaatagataccaatgtcattgtgtgggaattttttttaacttgtttatgtattattttgatccatttttctgtggcatttggtgcaataaaacttttgaatttatcttgaacattttcctgatgctgcatgcgat

SEQ ID NO: 4291 - protein, 43 aa, Homo sapien [sequence omitted]

SEQ ID NO: 4292 - DNA, 7029 bp, Homo sapien
atggcggcggcggcggggaatcgcgcctcgtcgtcgggattcccgggcgccagggctacgagccctgaggcaggcggcggcggaggagccctcaaggcgagcagcgcgcgcgcggctgccgcgggactgctgcgggaggcgggcagcgggggccgcgagcgggcggactggcggcggcggcagctgcgcaaagtgcggagtgtggagctggaccagctgcctgagcagccgctcttccttgccgcctcaccgccggcctcctcgacttccccgtcgccggagcccgcggacgcagcggggagtgggaccggcttccagcctgtggcggtgccgccgccccacggagccgccagccggcgcggcgcccaccttaccgagtcggtggcggcgccggacagcggcgcctcgagtcccgcagcggccgagcccggggagaagcgggcgcccgccgccgagccgtctcctgcagcggcccccgccggtcgtgagatggagaataaagaaactctcaaagggttgcacaagatggatgatcgtccagaggaacgaatgatcagggagaaactgaaggcaacctgtatgccagcctggaagcacgaatggttggaaaggagaaataggcgagggcctgtggtggtaaaaccaatcccagttaaaggagatggatctgaaatgaatcacttagcagctgagtctccaggagaggtccaggcaagtgcggcttcaccagcttccaaaggccgacgcagtccttctcctggcaactccccatcaggtcgcacagtgaaatcagaatctccaggagtaaggagaaaaagagtttccccagtgccttttcagagtggcagaatcacaccaccccgaagagccccttcaccagatggcttctcaccatatagccctgaggaaacaaaccgccgtgttaacaaagtgatgcgggccagactgtacttactgcagcagatagggcctaactctttcctgattggaggagacagcccagacaataaataccgggtgtttattgggcctcagaactgcagctgtgcacgtggaacattctgtattcatctgctatttgtgatgctccgggtgtttcaactagaaccttcagacccaatgttatggagaaaaactttaaagaattttgaggttgagagtttgttccagaaatatcacagtaagcgtagctcaaggatcaaagctccatctcgtaacaccatccagaagtttgtttcacgcatgtcaaattctcatacattgtcatcatctagtacttctacatctagttcagaaaacagcataaaggatgaagaggaacagatgtgtcctatttgcttgttgggcatgcttgatgaagaaagtcttacagtgtgtgaagacggctgcaggaacaagctgcaccaccactgcatgtcaatttgggcagaagagtgtagaagaaatagagaacctttaatatgtcccctttgtagatctaagtggagatctcatgatttctacagccacgagttgtcaagtcctgtggattccccttcttccctcagagctgcacagcagcaaaccgtacagcagcagcctttggctggatcacgaaggaatcaagagagcaattttaaccttactcattatggaactcagcaaatccctcctgcttacaaagatttagctgagccatggattcaggtgtttggaatggaactcgttggctgcttattttctagaaactggaatgtgagagagatggccctcaggcgtctttcccatgatgtcagtggggccctgctgttggcaaatggggagagcactggaaattctgggggcagcagtggaagcagcccgagtgggggagccaccagtgggtcttcccagaccagtatctcaggagatgtggtggaggcatgctgcagcgttctgtcaatggtctgtgctgaccctgtctacaaagtgtacgttgctgctttaaaaacattgagagccatgctggtatatactccttgccacagtttagcggaaagaatcaaacttcagagacttctccagccagttgtagacaccatcctagtcaaatgtgcagatgccaatagccgcacaagtcagctgtccatatcaacactgttggaactgtgcaaaggccaagcaggagagttggcagttggcagagaaatactaaaagctggatccattggtattggtggtgttgattatgtcttaaattgtattcttggaaaccaaactgaatcaaacaattggcaagaacttcttggccgcctttgtcttatagatagactgttgttggaatttcctgctgaattttatcctcatattgtcagtactgatgtttcacaagctgagcctgttgaaatcaggtataagaagctgctgtccctcttaacctttgctttgcagtccattaataattcccactcaatggttggcaaactttccagaaggatctacttgagttctgcaagaatggttactacagtaccccatgtgttttcaaaactgttagaaatgctgagtgtttccagttccactcacttcaccaggatgcgtcgccgtttgatggctattgcagatgaggtggaaattgccgaagccatccagttgggcgtagaagacactttggatggtcaacaggacagcttcttgcaggcatctgttcccaacaactatctggaaaccacagagaacagttcccctgagtgcacaatccatttagagaaaactggaaaaggattatgtgctacaaaattgagtgccagttcagaggacatttctgagagactggccagcatttcagtaggaccttctagttcaactactaactactactacaacaacagagcaaccaaagccaatggttcaaacaaaaggcagaccccacagtcagtgtttgaactcctctcctttatctcatcattcccaattaatgtttccagccttgtcaaccccttcttcttctaccccatctgtaccagctggcactgcaacagatgtctctaagcatagacttcagggattcattccctgcagaataccttctgcatctcctcaaacacagcgcaagttttctctacaattccacagaaactgtcctgaaaacaaagactcagataaactttccccagtctttactcagtcaagacccttgccctccagtaacatacacaggccaaagccatctcgacctaccccaggtaatacaagtaaacagggagatccctcaaaaaatagcatgacacttgatctgaacagtagttccaaatgtgatgacagctttggctgtagcagcaatagtagtaatgctgttatacccagtgacgagacagtgttcaccccagtagaggagaaatgcagattagatgtcaatacagagctcaactccagtattgaggaccttcttgaagcatctatgccttcaagtgatacaacagtaacttttaagtcagaagttgctgtcctgtctcctgaaaaggctgaaaatgatgatacctacaaagatgatgtgaatcataatcaaaagtgcaaagagaagatggaagctgaagaagaagaagctttagcaattgccatggcaatgtcagcgtctcaggatgccctccccatagttcctcagctgcaggttgaaaatggagaagatatcatcattattcaacaggatacaccagagactctaccaggacataccaaagcaaaacaaccgtatagagaagacactgaatggctgaaaggtcaacagataggccttggagcattttcttcttgttatcaggctcaagatgtgggaactggaactttaatggctgttaaacaggtgacttatgtcagaaacacatcttctgagcaagaagaagtagtagaagcactaagagaagagataagaatgatgagccatctgaatcatccaaacatcattaggatgttgggagccacgtgtgagaagagcaattacaatctcttcattgaatggatggcagggggatcggtggctcatttgctgagtaaatatggagccttcaaagaatcagtagttattaactacactgaacagttactccgtggcctttcgtatctccatgaaaaccaaatcattcacagagatgtcaaaggtgccaatttgctaattgacagcactggtcagagactaagaattgcagattttggagctgcagccaggttggcatcaaaaggaactggtgcaggagagtttcagggacaattactggggacaattgcatttatggcacctgaggtactaagaggtcaacagtatggaaggagctgtgatgtatggagtgttggctgtgctattatagaaatggcttgtgcaaaaccaccatggaatgcagaaaaacactccaatcatcttgctttgatatttaagattgctagtgcaactactgctccatcgatcccttcacatttgtctcctggtttacgagatgtggctcttcgttgtttagaacttcaacctcaggacagacctccatcaagagagctactgaagcatccagtctttcgtactacatggtagccaattatgcagatcaactacagtagaaacaggatgctcaacaagagaaaaaaaacttgtggggaaccacattgatattctactggccatgatgccactgaacagctatgaacgaggccagtggggaacccttacctaagtatgtgattgacaaatcatgatctgtacctaagctcagtatgcaaaagcccaaactagtgcagaaactgtaaactgtgcctttcaaagaactggccctaggtgaacaggaaaacaatgaagtttgcatgactaaattgcagaagcataattttatttttttggagcactttttcagcaatattagcggctgaggggctcaggatctattttaatatttcaattattcttccatttcatatagtgatcacaagcagggggttctgcaattccgttcaaattttttgtcactggctataaaatcagtatctgcctcttttaggtcagagtatgctatgagtagcaatacatacatatatttttaaaagttgatacttctttatgacccacagttgacctttattttcttaaataccagggcagttgtggctcattgtgcattttactgttggcccattcatttcgtttttggaaattatggttttgtattttcatgtttatttacattcatttttgtttattcagggaaagctgatctttttttcaaaccagaaaaaaaaaatgaactagatatgaagtagagttcattaaatatcttgctattgtcagagtttttaaaatatagacttaattttgtttttttaaattggaatacaataaagtactacctacatttgagtcagtcaccactcttattgtgcaggttaagtacaagttaactaaaaataaactgtcctctctggtgcaactcacaaccaagatcaagattaccttaaaatttatttgaattttttagatgttttggttgtcaaactgtaggaaacttcacaacatttaagtcttactctgtatgtaacaatccatcattcaccttcactactggtaataacatagagctgccattttccttttaccatgcatcatctctttacagtaggcctggcagatcattttttaaaaagattattcaactaccaatcagtaatgtttttaaacagtacatttgctttgaacttggaaaatgtgttcagaaagaaaaatggaattgaatttcatttatacactaattccttggattttgcacagttacctaacggttttagtctggagttaaattcagatgcatggaatcctgaaggaaaatggtagctttttaatctttttgtgtgtgtgtgagtcttttaaatcaagtactgattaactattaagtacaactttgagattttagttttaactcttcagaagccagtgtgaaatagaattggttattctcaaagactcaggataaactaaataagctatatatagagtacatttaaaatgtacaacacaaattggaagtaaaataagttacaagataagtttacagggatatattgcttacaatttttaaaaggcagtttgttttttatgtgaatatgtttcttagtgaaattttacattcctttgttttggaagattggcgatatttgaagagttaaaaatagtacagaaatgtgaagtttggtatctctaaatgtgttgtacttgactttcttttttatttttttttattttttttgactacttagaattttcacaattctaataagattgtttccaagtctctcatgtgcaagctttaaaggatgcactcttgccattttatgtactggaagatcattggtcagatgaatactgtgtctgacaaaaatgtaaactgtataaactgaggaacctcagctaatcagtattactttgtagatcaccatgcccaccacatttcaaactcaaactatctgtagatttcaaaatccattgtgtttgagtttgtttgcagttccctcagcttgctggtaattgtggtgttttgttttttgttttgttttcaatgcaaatgtgatgtaatattcttattttctttggatcaaagctggactggaaattgtatcgtgtaattatttttgtgttcttaatgttatttggtactcaagttgtaaataacgtctactactgtttattccagtttctactacctcaggtgtcctatagatttttcttctaccaaagttcactttcacaatgaaattatatttgctgtgtgactatgattcctaagatttccagggcttaagggctaacttctattagcaccttactgtgtaagcaaatgttacaaaaaaagacaagaaaaaaatctctgggttaagaaaatttggcttaaatgtatcctttgttattttaaatatattgagatattttaattaaaatttttaccccattgaaccgattttatagtatttgtacctattttggtgtttttgtctttatagtaaataaaagtttttgaacaaaaaaaaaagtcgacgcgg

SEQ ID NO: 4293 - protein, 1512 aa, Homo sapien
MAAAAGNRASSSGFPGARATSPEAGGGGGALKASSARAAAAGLLREAGSGGRERADWRRRQLRKVRSVELDQLPEQPLFLAASPPASSTSPSPEPADAAGSGTGFQPVAVPPPHGAASRRGAHLTESVAAPDSGASSPAAAEPGEKRAPAAEPSPAAAPAGREMENKETLKGLHKMDDRPEERMIREKLKATCMPAWKHEWLERRNRRGPVVVKPIPVKGDGSEMNHLAAESPGEVQASAASPASKGRRSPSPGNSPSGRTVKSESPGVRRKRVSPVPFQSGRITPPRRAPSPDGFSPYSPEETNRRVNKVMRARLYLLQQIGPNSFLIGGDSPDNKYRVFIGPQNCSCARGTFCIHLLFVMLRVFQLEPSDPMLWRKTLKNFEVESLFQKYHSKRSSRIKAPSRNTIQKFVSRMSNSHTLSSSSTSTSSSENSIKDEEEQMCPICLLGMLDEESLTVCEDGCRNKLHHHCMSIWAEECRRNREPLICPLCRSKWRSHDFYSHELSSPVDSPSSLRAAQQQTVQQQPLAGSRRNQESNFNLTHYGTQQIPPAYKDLAEPWIQVFGMELVGCLFSRNWNVREMALRRLSHDVSGALLLANGESTGNSGGSSGSSPSGGATSGSSQTSISGDVVEACCSVLSMVCADPVYKVYVAALKTLRAMLVYTPCHSLAERIKLQRLLQPVVDTILVKCADANSRTSQLSISTLLELCKGQAGELAVGREILKAGSIGIGGVDYVLNCILGNQTESNNWQELLGRLCLIDRLLLEFPAEFYPHIVSTDVSQAEPVEIRYKKLLSLLTFALQSINNSHSMVGKLSRRIYLSSARMVTTVPHVFSKLLEMLSVSSSTHFTRMRRRLMAIADEVEIAEAIQLGVEDTLDGQQDSFLQASVPNNYLETTENSSPECTIHLEKTGKGLCATKLSASSEDISERLASISVGPSSSTTNYYYNNRATKANGSNKRQTPQSVFELLSFISSFPINVSSLVNPFFFYPICTSWHCNRCLKHRLQGFIPCRIPSASPQTQRKFSLQFHRNCPENKDSDKLSPVFTQSRPLPSSNIHRPKPSRPTPGNTSKQGDPSKNSMTLDLNSSSKCDDSFGCSSNSSNAVIPSDETVFTPVEEKCRLDVNTELNSSIEDLLEASMPSSDTTVTFKSEVAVLSPEKAENDDTYKDDVNHNQKCKEKMEAEEEEALAIAMAMSASQDALPIVPQLQVENGEDIIIIQQDTPETLPGHTKAKQPYREDTEWLKGQQIGLGAFSSCYQAQDVGTGTLMAVKQVTYVRNTSSEQEEVVEALREEIRMMSHLNHPNIIRMLGATCEKSNYNLFIEWMAGGSVAHLLSKYGAFKESVVINYTEQLLRGLSYLHENQIIHRDVKGANLLIDSTGQRLRIADFGAAARLASKGTGAGEFQGQLLGTIAFMAPEVLRGQQYGRSCDVWSVGCAIIEMACAKPPWNAEKHSNHLALIFKIASATTAPSIPSHLSPGLRDVALRCLELQPQDRPPSRELLKHPVFRTTW

SEQ ID NO: 4294 - DNA, 5949 bp, Homo sapien
gtccccaggcgtggctacagttggtgaagaatctttccatgccgctggagctcatctgctccgatgagcacatgcaaggcagcgggagcctggcccaggctgtcatcagggaagtcagagcccagtggagtcggattttctccaccgcactcttcgtggagcacgtgctcctaggaaccgagagccgcgtccccgagttacaggggctggtgaccgagcacgtcttcttactagacaagtgtcttcgagagaactctgacgtgaagacgcacgggccttttgaggccgtgatgcgcactctctgtgaatgcaaggagacagccagcaagaccctcagcaggtttgggattcagccgtgctccatctgcctgggagatgcaaaggaccccgtctgtctgccctgcgaccacgtgcactgcctgcgctgcctcagggcctggtttgcctcagagcagatgatatgcccctactgtttaactgccttgccagacgaattctctccagctgtttcccaagcgcacagggaagccattgaaaagcatgcccgcttccggcagatgtgcaacagtttcttcgtagacctggtgtccaccatttgcttcaaggacaacgctccgcctgagaaggaagtgattgagagcctgctctctctcctcttcgtccaaaaggggcgcttaagagatgctgcccagagacactgtgaacacacaaaatctctctctccattcaatgatgttgtggataagactcctgtcatccgctcagtgatactgaaactgcttttgaagtacagctttcatgatgtaaaagattatattcaggaatatttgaccctgttaaaaaagaaagcattcataactgaagataaaactgaactgtacatgctcttcatcaactgcctggaggattcaatacttgagaagaccagtgcttactccagaaatgatgaactgaaccacctagaagaggaaggtcgtttccttaaggcatattctccagcaagccggggccgagagcctgccaacgaggcctcggttgaatacctgcaagaggtggcccggatccgcctctgcctcgacagagctgcagatttcctctcggagcctgagggaggcccagagatggccaaggagaagcagtgctacctgcagcaagtcaagcagttctgtatccgggtggagaacgactggcaccgggtgtacctggtgcggaagctcagcagccagcgggggatggagttcgtgcagggcctctccaagcccggccgcccgcaccagtgggtgtttcccaaggacgttgtcaagcagcaggggctgcggcaggaccacccaggccagatggataggtacctggtgtacggcgatgaatacaaggctctccgtgatgctgtggccaaagctgtcctcgagtgcaagccactgggcattaagactgctctgaaggcctgcaagaccccccaaagccagcagtcagcctacttcctgttaacactgtttagagaggtggctattttgtacagatcccacaatgcaagcctccaccccacgccagagcaatgtgaagctgtgagcaaattcattggcgaatgcaagatcctttcacctcctgatatcagccgttttgcaacatcgctcgtggacaattctgtgccattgttgagggcggggcctagtgacagcaaccttgatggaacggtgacagaaatggccattcatgctgcagccgtccttctgtgtggacagaatgaactcttggagcccctaaagaatctggccttctccccagccaccatggcgcatgcttttcttccaaccatgcctgaagacttgctggctcaagctcggaggtggaagggtctggagcgagtccactggtacacttgtcccaacggccatccttgctccgtgggagagtgtggcaggccgatggaacagagcatctgcattgactgccatgcgccgattggaggcattgaccacaaacctcgggacggctttcatctggtcaaagacaaggcagacagaacgcagaccggccatgtgctgggcaacccgcagcggagagacgtggtgacatgtgaccgagggctgcccccagtggtcttcctccttatccggctactcactcacttggctctgcttctgggagcgtcccagagttcccaggctctgataaacatcattaagcctccagtgagggatccaaaaggctttctgcagcagcacatcctgaaggacctggagcagttggccaagatgctgggacacagtgccgacgagaccatcggcgtggtccacctcgtcctgcgcaggcttctccaagagcagcaccagctctctagcagaaggcttttaaattttgacacagaattgtcaactaaagaaatgaggaacaactgggaaaaggaaatcgcagctgtgatttctcctgaactggagcatctagataaaacccttcccaccatgaataatctcatcagccaagataagcgtatcagctctaaccctgtggccaaaataatatatggtgacccagtgaccttcctgccccacctgccccggaaaagtgtggtccattgctctaagatttggagctgcaggaaaagaattacagttgagtacctccagcacattgtggaacagaaaaatggcaaagaaagagtgcccatcctctggcatttcctgcagaaggaagcagagctgaggctggtaaagttcctgcctgagattttggccttgcaaagggatctagtgaagcagttccagaacgtccagcaagttgaatacagctccatcagaggcttcctcagcaagcacagctcagatgggttgaggcagctgcttcacaacaggatcacagtctttctgtccacatggaacaaactgaggagatcgcttgagacgaacggtgagatcaacctacccaaagactactgcagcactgacttggatctggacactgagtttgagatcctcttgccacgccgacggggcctgggcctctgtgctaccgctctcgtcagctacttgattcgcctacacaatgaaattgtctacgccgtggaaaaactctccaaggaaaacaacagctattccgtggatgccgccgaggtcactgaactgcatgtcatcagttatgaagtggagcgggacctgactccactgattctctccaactgccagtaccaggtggaggagggcagagagaccgtgcaggagttcgatctggagaagattcagcggcagatcgtcagccgcttcctccagggcaagccccggctgagcctcaagggaatacccactctggtgtacagacacgactggaactatgaacatctctttatggacatcaagaacaaaatggcacaggactccctccccagctcggtcattagtgccatcagtggacagctgcagtcctacagcgatgcctgtgaagtgctgtctgtcgtagaagtcactctggggtttctgagcacagctggtggggatccaaacatgcagctgaatgtgtatactcaagacatcctgcaaatgggtgatcagacgattcacgtgttaaaggccttaaacagatgccagttaaaacacaccattgccctctggcagttcctgtctgctcataagtctgaacagctgctgcggctgcacaaagagccatttggggaaatcagttcaaggtacaaagcggatctgagcccggaaaatgctaagctcctcagcacattcctaaatcagactggcctagacgccttcctgctagagctgcacgaaatgataatcttgaaactaaagaacccccaaacccaaaccgaggagcgcttccgccctcagtggagcctgagagacactctcgtaagttacatgcaaactaaagaaagtgaaattcttcctgaaatggcatctcagttcccagaagagatactgctcgccagctgtgtctcagtgtggaaaacagctgctgtgctgaaatggaatcgagaaatgagatagaattatttcctcagctatctttggatgactttggagagaagactcctctctcctcgtctgcggcgtggacttgatcatggactggtgcctttgcattcagaaggagagctgtcagcgtagcaccgaattcaagaccaaggcgtgctacctgagctgacagctttttgaaagccgagctgtttctgaaccatgtacatacatgttctgaaactttctcatcattttatgagtactgttcattgagagatgacaatgaagattagatgaaattggaaataaaccaacattgtttacattccaggagacttgtagctcagccacacacgcagtaatgacctgtgcccgttcgcctctggcactgcccacccctcttttttttttcttctaattctgtactcacaaaagagaatctcattttcttctttcttccattcccttaaattctgagtactgtacatatatttctgggttcccacgatgatgtgaaaaactaccagactgttttttgtcttctcacaaagacaagaaaaatcagggcattttgtgagtgccttaagatcaaactaacaagatctgaccctctcccctcacagtgagccactgccccacttcagagggtaagagccaaaagcctcattgtgaaaggcactggacttggaccagggacaccatcagggccttggttttctcacgcataaaatggagagtggattaatcgccaaagattcttctgatctgacattttgaaattgtgagagaaactagatgactgtaaacttggtcacaggcctggttctggcagttctttgcggacttttttctagcattatgccaaataaacatgcagtctcagtgtgctctcgcatgtatgaatatctagtcctttctgtggttctcagccaagacataaaaactaggactcagagcacatacaaaaccagttatgtttcggaaagagggaaaagagtccccgagcccggatcttgtgctgcttttctcactgacgtgttgccttttttctttacaaaatctgctttgatacttaggacctctctggactaatttctcttcctagacagctcagcacagctattgatatgttagaggcagtatccttaatattcattctaaatgagttaacgacttaacttgaaattgggcctaaggagtgagaactacaaaaatacaaaatgcttgtccaggactcagccatgcacaccttgagcagcgccggcaggaggcacggaaggaactgtgctccgttctcctcactgtcatggtgccaccagtgtctgatgaagggcagagtgacccagactgcaggcagtaactgacttcacacagtccctggcatttagtcatctgtgattgttttatcactctggactgtgcagagccacctgccaccgagatctgcattccgactgcctatgaacgggtgtgggggccgggggctggcttgctgaagtcttcaacttgcactcggagctcctttgatacctcagagctggctgtcaggtggcagctcacacccagactcactggccacacctcagcagggggggagtcgagtgtcagtctctttctgtgaaggctttttttttcctttggcctgggaatttttcccatttttatgaaggggttttaaattgtttcattttgtgtgctgtgcttcaaagccttaactgtcaaatcttgcattatcttgtttgtacagaaatatactggcctagcagaggcaaaaaaaaaaaaaatgaattttattttacttgtcacacctgtcttaataaactggagttttgctgctaaaaaaaaaaaaaaaaaaaaaaaaaaaaaaaaaaaaaaaaaaaaaaaaaaaaaaaaaaaaaaaaaaaaaaaaaaaaaaaaaaaaaaaaaaaaaaaaaaaaaaaaaaaaaaaaaaaaaaaaaaaaaaaaaaaaaaaaaaaaaaaaaaaaaa

SEQ ID NO: 4295 - protein, 1329 aa, Homo sapien
PQAWLQLVKNLSMPLELICSDEHMQGSGSLAQAVIREVRAQWSRIFSTALFVEHVLLGTESRVPELQGLVTEHVFLLDKCLRENSDVKTHGPFEAVMRTLCECKETASKTLSRFGIQPCSICLGDAKDPVCLPCDHVHCLRCLRAWFASEQMICPYCLTALPDEFSPAVSQAHREAIEKHARFRQMCNSFFVDLVSTICFKDNAPPEKEVIESLLSLLFVQKGRLRDAAQRHCEHTKSLSPFNDVVDKTPVIRSVILKLLLKYSFHDVKDYIQEYLTLLKKKAFITEDKTELYMLFINCLEDSILEKTSAYSRNDELNHLEEEGRFLKAYSPASRGREPANEASVEYLQEVARIRLCLDRAADFLSEPEGGPEMAKEKQCYLQQVKQFCIRVENDWHRVYLVRKLSSQRGMEFVQGLSKPGRPHQWVFPKDVVKQQGLRQDHPGQMDRYLVYGDEYKALRDAVAKAVLECKPLGIKTALKACKTPQSQQSAYFLLTLFREVAILYRSHNASLHPTPEQCEAVSKFIGECKILSPPDISRFATSLVDNSVPLLRAGPSDSNLDGTVTEMAIHAAAVLLCGQNELLEPLKNLAFSPATMAHAFLPTMPEDLLAQARRWKGLERVHWYTCPNGHPCSVGECGRPMEQSICIDCHAPIGGIDHKPRDGFHLVKDKADRTQTGHVLGNPQRRDVVTCDRGLPPVVFLLIRLLTHLALLLGASQSSQALINIIKPPVRDPKGFLQQHILKDLEQLAKMLGHSADETIGVVHLVLRRLLQEQHQLSSRRLLNFDTELSTKEMRNNWEKEIAAVISPELEHLDKTLPTMNNLISQDKRISSNPVAKIIYGDPVTFLPHLPRKSVVHCSKIWSCRKRITVEYLQHIVEQKNGKERVPILWHFLQKEAELRLVKFLPEILALQRDLVKQFQNVQQVEYSSIRGFLSKHSSDGLRQLLHNRITVFLSTWNKLRRSLETNGEINLPKDYCSTDLDLDTEFEILLPRRRGLGLCATALVSYLIRLHNEIVYAVEKLSKENNSYSVDAAEVTELHVISYEVERDLTPLILSNCQYQVEEGRETVQEFDLEKIQRQIVSRFLQGKPRLSLKGIPTLVYRHDWNYEHLFMDIKNKMAQDSLPSSVISAISGQLQSYSDACEVLSVVEVTLGFLSTAGGDPNMQLNVYTQDILQMGDQTIHVLKALNRCQLKHTIALWQFLSAHKSEQLLRLHKEPFGEISSRYKADLSPENAKLLSTFLNQTGLDAFLLELHEMIILKLKNPQTQTEERFRPQWSLRDTLVSYMQTKESEILPEMASQFPEEILLASCVSVWKTAAVLKWNREMR

SEQ ID NO: 4296 - DNA, 3577 bp, Homo sapien
gaccattgtgaggacaatgttaatttaaaataataacaataatagcaagaagaagtcctgccccatgacaagaaaatctgctcccacctcagggcttttaaattttgacacagaattgtcaactaaagaaatgaggaacaactgggaaaaggaaatcgcagctgtgatttctcctgaactggagcatctagataaaacccttcccaccatgaataatctcatcagccaagataagcgtatcagctctaaccctgtggccaaaataatatatggtgacccagtgaccttcctgccccacctgccccggaaaagtgtggtccattgctctaagatttggagctgcaggaaaagaattacagttgagtacctccagcacattgtggaacagaaaaatggcaaagaaagagtgcccatcctctggcatttcctgcagaaggaagcagagctgaggctggtaaagttcctgcctgagattttggccttgcaaagggatctagtgaagcagttccagaacgtccagcaagttgaatacagctccatcagaggcttcctcagcaagcacagctcagatgggttgaggcagctgcttcacaacaggatcacagtctttctgtccacatggaacaaactgaggagatcgcttgagacgaacggtgagatcaacctacccaaagactactgcagcactgacttggatctggacactgagtttgagatcctcttgccacgccgacggggcctgggcctctgtgctaccgctctcgtcagctacttgattcgcctacacaatgaaattgtctacgccgtggaaaaactctccaaggaaaacaacagctattccgtggatgccgccgaggtcactgaactgcatgtcatcagttatgaagtggagcgggacctgactccactgattctctccaactgccagtaccaggtggaggagggcagagagaccgtgcaggagttcgatctggagaagattcagcggcagatcgtcagccgcttcctccagggcaagccccggctgagcctcaagggaatacccactctggtgtacagacacgactggaactatgaacatctctttatggacatcaagaacaaaatggcacaggactccctccccagctcggtcattagtgccatcagtggacagctgcagtcctacagcgatgcctgtgaagtgctgtctgtcgtagaagtcactctggggtttctgagcacagctggtggggatccaaacatgcagctgaatgtgtatactcaagacatcctgcaaatgggtgatcagacgattcacgtgttaaaggccttaaacagatgccagttaaaacacaccattgccctctggcagttcctgtctgctcataagtctgaacagctgctgcggctgcacaaagagccatttggggaaatcagttcaaggtacaaagcggatctgagcccggaaaatgctaagctcctcagcacattcctaaatcagactggcctagacgccttcctgctagagctgcacgaaatgataatcttgaaactaaagaacccccaaacccaaaccgaggagcgcttccgccctcagtggagcctgagagacactctcgtaagttacatgcaaactaaagaaagtgaaattcttcctgaaatggcatctcagttcccagaagagatactgctcgccagctgtgtctcagtgtggaaaacagctgctgtgctgaaatggaatcgagaaatgagatagaattatttcctcagctatctttggatgactttggagagaagactcctctctcctcgtctgcggcgtggacttgatcatggactggtgcctttgcattcagaaggagagctgtcagcgtagcaccgaattcaagaccaaggcgtgctacctgagctgacagctttttgaaagccgagctgtttctgaaccatgtacatacatgttctgaaactttctcatcattttatgagtactgttcattgagagatgacaatgaagattagatgaaattggaaataaaccaacattgtttacattccaggagacttgtagctcagccacacacgcagtaatgacctgtgcccgttcgcctctggcactgcccacccctctttttttttttcttctaattctgtactcacaaaagagaatctcattttcttctttcttccattcccttaaattctgagtactgtacatatatttctgggttcccacgatgatgtgaaaaactaccagactgttttttgtcttctcacaaagacaagaaaaatcagggcattttgtgagtgccttaagatcaaactaacaagatctgaccctctcccctcacagtgagccactgccccacttcagagggtaagagccaaaagcctcattgtgaaaggcactggacttggaccagggacaccatcagggccttggttttctcacgcataaaatggagagtggattaatcgccaaagattcttctgatctgacattttgaaattgtgagagaaactagatgactgtaaacttggtcacaggcctggttctggcagttctttgcggacttttttctagcattatgccaaataaacatgcagtctcagtgtgctctcgcatgtatgaatatctagtcctttctgtggttctcagccaagacataaaaactaggactcagagcacatacaaaaccagttatgtttcggaaagagggaaaagagtccccgagcccggatcttgtgctgcttttctcactgacgtgttgccttttttctttacaaaatctgctttgatacttaggacctctctggactaatttctcttcctagacagctcagcacagctattgatatgttagaggcagtatccttaatattcattctaaatgagttaacgacttaacttgaaattgggcctaaggagtgagaactacaaaaatacaaaatgcttgtccaggactcagccatgcacaccttgagcagcgccggcaggaggcacggaaggaactgtgctccgttctcctcactgtcatggtgccaccagtgtctgatgaagggcagagtgacccagactgcaggcagtaactgacttcacacagtccctggcatttagtcatctgtgattgttttatcactctggactgtgcagagccacctgccaccgagatctgcattccgactgcctatgaacgggtgtgggggccgggggctggcttgctgaagtcttcaacttgcactcggagctcctttgatacctcagagctggctgtcaggtggcagctcacacccagactcactggccacacctcagcagggggggagtcgagtgtcagtctctttctgtgaaggcttttttttcctttggcctgggaatttttcccatttttatgaaggggttttaaattgtttcattttgtgtgctgtgcttcaaagccttaactgtcaaatcttgcattatcttgtttgtacagaaatatactggcctagcagaggcaaaaaaaaaaaaatgaattttattttacttgtcacacctgtcttaataaactggagttttgctgctaaaaaaaaaaaaaaaaaaaaaaaaaaaaaaaaa

SEQ ID NO: 4297 - protein, 509 aa, Homo sapien
MNNLISQDKRISSNPVAKIIYGDPVTFLPHLPRKSVVHCSKIWSCRKRITVEYLQHIVEQKNGKERVPILWHFLQKEAELRLVKFLPEILALQRDLVKQFQNVQQVEYSSIRGFLSKHSSDGLRQLLHNRITVFLSTWNKLRRSLETNGEINLPKDYCSTDLDLDTEFEILLPRRRGLGLCATALVSYLIRLHNEIVYAVEKLSKENNSYSVDAAEVTELHVISYEVERDLTPLILSNCQYQVEEGRETVQEFDLEKIQRQIVSRFLQGKPRLSLKGIPTLVYRHDWNYEHLFMDIKNKMAQDSLPSSVISAISGQLQSYSDACEVLSVVEVTLGFLSTAGGDPNMQLNVYTQDILQMGDQTIHVLKALNRCQLKHTIALWQFLSAHKSEQLLRLHKEPFGEISSRYKADLSPENAKLLSTFLNQTGLDAFLLELHEMIILKLKNPQTQTEERFRPQWSLRDTLVSYMQTKESEILPEMASQFPEEILLASCVSVWKTAAVLKWNREMR

SEQ ID NO: 4298 - DNA, 5349 bp, Homo sapien
gttaaaagtagcagggcccagatatgccttgggactccagtgtgagcctcgtccttgtttccagctggaaggaaggcaccctcttgcccaagacaggacactgtgctgcctggggccagcacctgctgaatcctcgagcccagagcttcttcctgacactcaggcctttcaaagcctgactctcagggccactgctgcacagggtgacaaccgggcatggcacgcagtgtggctggtgcagaggaggcttaaggctggcctgggagagattcttggtctagctcccagcacggagccttgcttgtgtcccagggcggcactaaccagaaccagaaaaggaaatctttggccctcggggagaattatgccaattatctgtctggttcctgtctttgaaaatgcccagatgttggtttacaaatcaggaagctgtcttggggcaatctctgttccctctttgatgcagagagcctttctctgtaaacactggagagcagggcttcactgtctggctcccctcccgcctcttgcaggaaggactagatgctgctgatcagctgatcatggctgagccgggtagagcttggggctctcctaagaggtcacccactgggagggagcttcacagctgttcttttgacccaggaaggagctctttcaggactgtggcacccagagccgtggccctcctgccatgccattgttcccacttccctgcccttgggagtcttggagacagctgactagctgccctgaggggtccaccgctctcaccttctcactggtggctgctgccattctcctgggctctgcacagaaagctttggtccttctgaaagccactctgccccttcctgcagcaccagatccccctgagccggtactgctgcctccacctgggccaagactagtcttggtgttcacccttcttcgtgcttcagaaagtagggatatctggggacatgactgtgtttccctggggtcctttcagaagagacttaggaagctcctgctcaggaatctggccctctgaaagagccccttcaaagcagcctgggcagcaggtaacgtggtttcccttgcggccccctcctcccagctgcatagactcgtggtttgaagtgaacagatcttgtccggaacaccctgcggactgacctgcgggcttgcttgctgactcctctcaaaggtgagcccgcgtttgggggtgctccgggctcaaggcttggggtcaggtcactttgggggcctgcagtttagggagccgggctgcccttatgccactgagaagaaagcaggagcagagggaaggagcacctcatcagtgagcagttagtcatccggaaatgattttccctgggaaggacaagagatacaaaccaacatggacagttatgaagaacaggctcagaagagttaggatcagttggggaagagaccagtacaatctacattcctaaagaaagttcaggaatatcccctgggaatgtgcacgggcaggaaaaggagcctgagcggtgggtttgtgcctggcttggcctcatcctcgctcacctctgagtctccgcctcttctatggtaacggggataatctcactccctgttgccataaggacattgcacttactaaacagccatgggcagtgcattgttccctgcaaagtgctggtcagcgatcatttgaccactgcttcttcccatgccgcttccagatgaatctgaggcctccaggccagactcgatccctctatcccacagcactgggtgctgactccacacatccccctggcttaccgctgggtctggcctccccatttctcccccaggggtaccccacttgctgccaaccatccacccctgacccccatctcacctgtcccctccaagttctgggctggcattttcctttttctggcaaacaagtagacaaaacccccataaaaaccaaaagcccaactccatctcacagccaaaggttttgggacctttttcttcccccctccctttctctctctcttgctttcgttttcttttgttaggtttattttatttattccaagtaaactcccagaacagctgatgatgtcagacaaatcagggacatttgctctttttacctccacctcaaaaactgatgacaaggggagaagaaagagccaggggggagagtgaggcaggggagtagaacctgcccaggcacatggctgcaaattccccgtgtgctgtttggcttctggggtcctgtgtagacgccccagccccgcctgccctcttgggatgcagctgccctgggatgagcagacagccctcggcccgatggagcacgacttatttattacggtccacacagggacagagcgcccctgctccagggaggaggctcaccggaccctggggcagagctgagcttgggacaccagcgggaacagggcaccccttctgcactgacttccagatcatggttctcccttcctccctgaggacaccaaattggatgagagcaagtttgagagaagaatgaatcaactgctatccttcccctcacccctcagcccaggagggaaagggcattttctttttcatctttgaaaggcattgtgggtctgtctttaaagtgtttacaaaaaaaaattatataaaaaaaaagtctagtgtcgactggtgttttccctcgtgatgtttacagcttgctgtttgctgcccagccataacccactcagtgacagacgaacacagctaaggcctcgctgccagccttctgacggcgggcgagcacacggtctcttcccctgccccaactggccctctccaccaccaacttctctactttgggtttgtttggttttttccctctatttttctggctggttttttgctcttttctccccttgagaccctaatatcttgacttcattgccaaaaaacaacccattgagaactttcttcctactgatcccatctcttttcccttctttcctcctggttccggtcagttcagaggatttaacaatcacaagtgtcctgcaaaaatgcctgaacattattcttaggccctcgtggattttttttttcagaaaacttaaacaaaaaaagacttactaagaaatatgtacagctacccctgttttcaggcactatgtttgagaacattttagccattgatgttcacacgtggcatcagcccatgcaagataggtttctgtatttatatattaaaatacaaaaaaaaacttataaaatgtttaaaaaaatgttcaaagcttgggagaaaagctttcttcattagtcaaggtgttttgatatggtattaaaatgtctaataaaagatggcactgcgtgattttattttaatgaagtgttatacaatcaagaaatgggggcaagggcctgccccccactccctcacctacctccttagcattccttcaggctgctactcggggctccaggtgtgtgaattggtcctcagatagtcaggcctgggtggagggagtggcaagtcaggcgtgcctcctacaagcttcctaacctcttaagcatcatggaaccagtcagccctctgtggagtcattgtgccggacctctgaaaagatctgcaggggccaagatgttgcagccaccggaggctgcaaggatgtgggttcttccaggtgtgggcccagcccccctccttccagcctttgctccccatcccacgttccactcgccctgcctgttgttcagtttgcgtctcagtgctgactcacgggcatgcttcattgaggcccaggaagaggccctggtttggggctgtgccagctcagagcccttgaaccagaaccaactgctcaggctcacaaaagttggcaaaatgcgggctgggcaggcagctcggggcagggagcagcagtgcaggcctggcctgtgtccccgtgcccagcgggctcccggagcagcattccagagcctcctgcagagccagcgaaggaaagctctagagggagacgactccaccgcctctctgctctgacccttctcaggcccgcctgatgtgctggaccatccccctgctgccacggcccctggctccgcagtcaccctccatcagatgcttccagaagcacctactctgtgcaagggcattcacaacaggccagtgggcaaacgtgagccagggccagcggagaaacactaaagaagactcggtggttcagagcctgggtctcagcgcgggacccgtctggggtgaagaccttggggctgttgtgagtcggtggcaggaacgtgggctctagactgtgcattcaggctctcctacttggcagaatgatcttggggaaacgacttcatctgaacttcagatatttcacatgtgaagcggggacaaaaccatgcagctcagaggtccctgtgggggctgggggagctgccctgcaggtcttggcacatgcacagcaggctccccatagctttgtcaccacaaagggcactgttctattcacagcacctcctgcttctgcctggcaactgtgtctccctgtgctatatttaattccaccagcaaagctggcgaggcagggcccagccctgaaggagatctccttgcctgacccctggacctggaaatggaggcttcatgtgcccgccttggcggcttaagcctgctgctttggcagtgccatgggtgagccgagcagctgtgaggtgggtggggcagggctgtagcccacgccgggtgctattccaggctctaggggctggtgctcatccccacccccagcgacttccgtcctacctggcatgctgcagccctctgccggctgtggtgtcctctgaatttggacccaggttgcctgctcttgttgtgggggtgggattggggctgtctgtgtttcccaggtggagctcatgtttgtgatcctctatctggacagctctccagaatcctgtgttgcccctgttctgcctttctgggatgggagagaaggtgagggagccggcgagccggttctaccctctctgctaagggcctagcacgctttgatgaggttcctggacgtgagaccctcacaaagaccaaccattcctctaatagccatttaacggtactgcagttcatgggaaaatgtcctcattcttaggagatagatgctggattatataggtgaatgccttcaagaaatgtgtaatttaattccaaatagttccccccaaaatacacaaagcaaataaggccaaaatgttcattgttgaatctgcagtggctggtatttcagtgaacagtgtacttgttctttcaacttttctgtatgtttggaatttttcttaataaaagattgtgggaaatggtcaaaaaaaaaaaaaaaaaaa

SEQ ID NO: 4299 - protein, 183 aa, Homo sapien
LKVAGPRYALGLQCEPRPCFQLEGRHPLAQDRTLCCLGPAPAESSSPELLPDTQAFQSLTLRATAAQGDNRAWHAVWLVQRRLKAGLGEILGLAPSTEPCLCPRAALTRTRKGNLWPSGRIMPIICLVPVFENAQMLVYKSGSCLGAISVPSLMQRAFLCKHWRAGLHCLAPLPPLAGRTRCC

SEQ ID NO: 4300 - DNA, 1668 bp, Homo sapien
gcaggatttgaccgagtctttatcggggcttccgttacatcttattctaactcaggtttacggacacaatgctggaaaaccaattcctgctctacccacccctcaacttgttaaaaaaaaacaggatctaacaccgaggaatgtcacatcttcgccattcccacttcctttctgccctaggcattcgatatgtgccaccaggggccatcaggactagggctctgcacccatggcagcagacaggtgtgaagctcagagtccctcctaacagcctccctccagcgtcttcttggcgcgttttacaaggcgcttttttgcacacatctcccatcctttctgaggttggtgccagtcccgctttacaaacatgcagggacaagcccaggacggccgaggtttcgcgggctcgtcgatggctcggtgattttgtcagccggcgtctaaagcacgcggcaggcgctcaaaccttgaaccaacgggaaagcaaaggaaagccggggcccgctggctcttggaggggaagggctgggaaggggggaaggggcccgcgcccacctaccgcagcggcgaagccagctccgcagggcctcggaactcccgcgcgcagaagtccattactcaggcggccgcccggggccgtggaggcctgcacgcacctgccgtacgccgcggcctcggccccgcaggcggccagccgctcggggaaggcgcggaggcggcttcgcacgcggccccacaccgctccgttagccgacatgagcggctattcccagccccctagaggccgccatcttaggtccgttacatcttattctaactcaggtttacggacacaatgctggaaaaccaattcctgctctacccacgcctcaacttgttaagaaaaaacaggatctaacaccgaggaatgtcacatcttcgccattcccacttcctttctgccctaggcattcgatatgtgccaccaggggccatcaggactagggctctgcacccatggcagcagacaggtgtgaagctcagagtccctcctaacagcctccagggggctgggaatagccgctcatgtcggctaacggagcggtgtggggccgcgtgcgaagccgcctccgcgccttccccgagcggctggccgcctgcggggccgaggccgcggcgtacggcaggtgcgtgcaggcctccacggccccgggcggccgcctgagtaaggacttctgcgcgcgggagttcgaggccctgcggagctgcttcgccgctgcggccaagaagacgctggagggaggctgttaggagggactctgagcttcacacctgtctgctgccatgggtgcagagccctagtcctgatggcccctggtggcacatatcgaatgcctagggcagaaaggaagtgggaatggcgaagatgtgacattcctcggtgttagatcctgttttttcttaacaagttgaggcgtgggtagagcaggaattggttttccagcattgtgtccgtaaacctgagttagaataagatgtaacggaagccacgataaagactcggtcaaatcctgcaaaataaaatatctctttatcccctatttcttatatcatatcatcctcctcctctctcccctcctttcaacatataaaattaactggcccgcgtttaccaacgtggcaactggt

SEQ ID NO: 4301 - protein, 246 aa, Homo sapien [sequence omitted]

SEQ ID NO: 4302 - DNA, 5088 bp, Homo sapien
agcggagttcctggagaaagatggcgacagccgagaagcagaaacacgacgggcgggtgaagatcggccactacattctgggtgacacgctgggggtcggcaccttcggcaaagtgaaggttggcaaacatgaattgactgggcataaagtagctgtgaagatactcaatcgacagaagattcggagccttgatgtggtaggaaaaatccgcagagaaattcagaacctcaagcttttcaggcatcctcatataattaaactgtaccaggtcatcagtacaccatctgatattttcatggtgatggaatatgtctcaggaggagagctatttgattatatctgtaagaatggaaggctggatgaaaaagaaagtcggcgtctgttccaacagatcctttctggtgtggattattgtcacaggcatatggtggtccatagagatttgaaacctgaaaatgtcctgcttgatgcacacatgaatgcaaagatagctgattttggtctttcaaacatgatgtcagatggtgaatttttaagaacaagttgtggctcacccaactatgctgcaccagaagtaatttcaggaagattgtatgcaggcccagaggtagatatatggagcagtggggttattctctatgctttattatgtggaacccttccatttgatgatgaccatgtgccaactctttttaagaagatatgtgatgggatcttctatacccctcaatatttaaatccttctgtgattagccttttgaaacatatgctgcaggtggatcccatgaagagggccacaatcaaagatatcagggaacatgaatggtttaaacaggaccttccaaaatatctctttcctgaggatccatcatatagttcaaccatgattgatgatgaagccttaaaagaagtatgtgaaaagtttgagtgctcagaagaggaagttctcagctgtctttacaacagaaatcaccaggatcctttggcagttgcctaccatctcataatagataacaggagaataatgaatgaagccaaagatttctatttggcgacaagcccacctgattcttttcttgatgatcatcacctgactcggccccatcctgaaagagtaccattcttggttgctgaaacaccaagggcacgccatacccttgatgaattaaatccacagaaatccaaacaccaaggtgtaaggaaagcaaaatggcatttaggaattagaagtcaaagtcgaccaaatgatattatggcagaagtatgtagagcaatcaaacaattggattatgaatggaaggttgtaaacccatattatttgcgtgtacgaaggaagaatcctgtgacaagcacttactccaaaatgagtctacagttataccaagtggatagtagaacttatctactggatttccgtagtattgatgatgaaattacagaagccaaatcagggactgctactccacagagatcgggatcagttagcaactatcgatcttgccaaaggagtgattcagatgctgaggctcaaggaaaatcctcagaagtttctcttacctcatctgtgacctcacttgactcttctcctgttgacctaactccaagacctggaagtcacacaatagaattttttgagatgtgtgcaaatctaattaaaattcttgcacaataaacagaaaactttgcttatttcttttgcagcaataagcatgcataataagtcacagccaaatgcttccatttgtaatcaagttatacataattataaccgagggctggcgttttggaatgcaatttgcacagggattggaacatgatttatagttaaaagcctaatatgcagaaatgaattaagatcattttgttgttcattgtgcagtatgtatatagcataatatacacagtgaattataggtctcaggcttacttgatttttggctattttatatttagtgtacacagggctttgaaatattaatttacataaaggccttcatatattattacgtgttatatattacgtgttataaatttattcaataaatatttgcctagaattcccaagacctttataggtgattttgttttctgggctccttaacttcataaatagctagtatcttccagcagtagtaacagtctggataacttcttccatatccctccctctttgtttttttgagacagtgtcactttgtcacccaggctggagtgcaatggtgtggtctcggctcactgcaacctccacctcccgggttcgagtgattctcccgcctcagcttcctgagtagctggaactacaggcgtgtgccaccacacccggctaatttttcgtatttttagtgtagacggggtttcactatgttgcccaggctggtctcgaactcctgaccgcgtgatccaccacctcagcttcccaaagtggtgggattacaggcgtgagccaccgcacccggcctccatatcccccttttaaaattctgtagtgtatggtaagtcatatcagatatcagacctaatttaaatttcattttagctttacaagtccaaaaacacagaatttatatattcagatactctagcactaattttagtcttaaaatattcccacgatattctgtacacaaaatgttctttttgttacaagagctgagttgcatatactgtagataaatcatattatttttgccaatttcacaaattcctctggcccatcatgtcagtcattattgagtatatgcacacattgctacttatttgattatgtatcttttaaattgattcagtgcatagaaaactatctcttacaaactttaagtgctctgatatgacttcccccccaaattttattatgaacatttttaaaaacagaaaaattgaaaaactgtttggtaagcacatgtatatctaccatttagattcagcagttgttaatgttttgtcatttgttttctctatacctatatatgtatagatacagctagttatgcatatatatgcatatatgtgtttgtttgtgtatgtatatatgcttttttccccctgaaccatttggatgttacagacatacttatcaccgtgaaaatacttcaagtatctcctacagataatgacattctcctaaaaatccgtaataccattgtaaaagtaataattccccaatatcatctaatcaagccatatttaaatttctgaagttaactccaaatttctttatagctgattatttcaaactaggatccaattaaagtttacatatgacacttggttataactctttagttggatataacattattattattttgataaaatatggaacaaatcaattctattaataagtggtcacatttgttttgggcttaaattactttttaaagatactggattttcctaagatttctgatttacactgatatttttttttgtcattcttaattgcatcacacaatagatgtaaatgaagatgtagtcacctcagataaaattggtatcgtgtatgataatattgtatcatttatatttgccttatgttaactttaagaaattgatttttttgtattaatcattttcccattgcaacagagctatattttttctattttaagaatcatattttaggattatttttggcaaatacagtgagcacttatgtaaccagatgataatgaactcaaatgtcatgatagcttgcataaatggtgactctagtagatttgactcaagcacttctagaatcatgcactgaattcaaaggaaaaatcttgctgctttttgtccagggcttgttctattcaacttctaatttgaaagctgtacaaagtaatagaagttccatttaaatatgagttcaaaactgtatttactttttatgtggccctctctttaggggattctaattttacttagggtctctaagtgcagcataatgttcctgatgttaacagaagactgtatttttaaagttacaaatttgtatatggaattaagtaatggcgctatatacgctgttgtggggaggggggaagaaaaggaggaaccaattaaataggaccttttaaaaattgttaattttgtaaactttgcttctcttataagttattgtgattcattttagttactgtgttttattttgaaaatatttaaatattgcacttctataaatagtatgataaatgcacagacaattgcagtaaattcttttttaagctaggatatttgaaatgacaacctttggttaagtgtgtcaaggttgcaacagaattttcacaatttttttgttgtttgcaaattgttactaatattgaagaggtaagggaggcaatgcaaatgatttttaatctttttttattatcttttcagcagtttatattttttgtgactttatgcaaccatatttttactttgtcttgacaactgaaagatgtataaggttttttgccagaaatgtactgtatacatagttttaagtataacagattttactgatatgtaaaaattttgccattaaaataaatgatttctcactgagaggaacttttctaccaggttggggcatatgggagcttaatatatcatatctaatttaaaataatttcactgaaataaactccattgcttttacctaatttttttcttgagatgcttttgtagtttttcagagttttagatgattttatacaaaatcctctgcctagcactgctctttttgatgttgtagtgacaccatttacattgaattaatgcttggtagcctggggctagatgtggaactccatggatctgtgttctgactggcacctttggaatgaaagaaaagtgtgtgctgtccaaattttttccccttaattctttccctcatcttctcacccataatagaaattttatttccattgtgagttctgacaagaatgaaattccacatacaacataactgtaaattgttggtaggtagaagttaatatttgtggttcatgtatattttgaccagagtatatttaagtatataatttcagcttccttgatttagaaatatgatataataaagaaaaactccatttatcatctgttaaaaaaaaaaaaaaaaa

SEQ ID NO: 4303 - protein, 550 aa, Homo sapien
MATAEKQKHDGRVKIGHYILGDTLGVGTFGKVKVGKHELTGHKVAVKILNRQKIRSLDVVGKIRREIQNLKLFRHPHIIKLYQVISTPSDIFMVMEYVSGGELFDYICKNGRLDEKESRRLFQQILSGVDYCHRHMVVHRDLKPENVLLDAHMNAKIADFGLSNMMSDGEFLRTSCGSPNYAAPEVISGRLYAGPEVDIWSSGVILYALLCGTLPFDDDHVPTLFKKICDGIFYTPQYLNPSVISLLKHMLQVDPMKRATIKDIREHEWFKQDLPKYLFPEDPSYSSTMIDDEALKEVCEKFECSEEEVLSCLYNRNHQDPLAVAYHLIIDNRRIMNEAKDFYLATSPPDSFLDDHHLTRPHPERVPFLVAETPRARHTLDELNPQKSKHQGVRKAKWHLGIRSQSRPNDIMAEVCRAIKQLDYEWKVVNPYYLRVRRKNPVTSTYSKMSLQLYQVDSRTYLLDFRSIDDEITEAKSGTATPQRSGSVSNYRSCQRSDSDAEAQGKSSEVSLTSSVTSLDSSPVDLTPRPGSHTIEFFEMCANLIKILAQ

SEQ ID NO: 4304 - DNA, 3941 bp, Homo sapien
gcaggatgtgatggaaatgaaaaaaacaaaggttcgcctaatgaaacaaatgaaagaagaacaagagaaagccagactgactgagtctagaagaaacagagagattgctcagttgaaaaaggatcaacgtaaaagagatcatcaacttagacttctggaagcccaaaaaagaaaccaagaagtggttctacgtcgcaaaactgaagaggttacggctcttcgtcggcaagtaagacccatgtcagataaagtggctgggaaagttactcggaagctgagttcatctgatgcacctgctcaggacacaggttccagtgcagctgctgtcgaaacagatgcatcaaggacaggagcccagcagaaaatgagaattcctgtggcgagagtccaggccttaccaacgccggcaacaaatggaaacaggaaaaaatatcagaggaaaggattgactggccgagtgtttatttccaagacagctcgcatgaagtggcagctccttgagcgcagggtcacagacatcatcatgcagaagatgaccatttccaacatggaggcagatatgaatagactcctcaagcaacgggaggaactcacaaaaagacgagagaaactttcaaaaagaagggagaagatagtcaaggagaatggagagggagataaaaatgtggctaatatcaatgaagagatggagtcactgactgctaatatcgattacatcaatgacagtatttctgattgtcaggccaacataatgcagatggaagaagcaaaggaagaaggtgagacattggatgttactgcagtcattaatgcctgcacccttacagaagcccgatacctgctagatcacttcctgtcaatgggcatcaataagggtcttcaggctgcccagaaagaggctcaaattaaagtactggaaggtcgactcaaacaaacagaaataaccagtgctacccaaaaccagctcttattccatatgttgaaagagaaggcagaattaaatcctgagctagatgctttactaggccatgctttacaagatctagatagcgtaccattagaaaatgtagaggatagtactgatgaggatgctcctttaaacagcccaggatcagaaggaagcacgctgtcttcagatctcatgaagctttgtggtgaagtgaaacctaagaacaaggcccgaaggagaaccaccactcagatggaattgctgtatgcagatagcagtgaactagcttcagacactagtacaggagatgcctccttgcctggccctctcacacctgttgcagaagggcaagagattggaatgaatacagagacaagtggtacttctgctagggaaaaagagctctctcccccacctggcttaccttctaagataggcagcatttccaggcagtcatctctatcagaaaaaaaaattccagagccttctcctgtaacaaggagaaaggcatatgagaaagcagaaaaatcaaaggccaaggaacaaaagcactcagattctggaacttcagaggctagtctttcacctccttcttccccaccaagccggccccgtaatgaactgaatgtttttaatcgtcttactgtttctcagggaaacacatcagttcagcaggataagtctgatgaaagtgactcctctctctcggaggtacacagatcctccagaaggggcataatcaacccatttcctgcttcaaaaggaatcagagcttttccacttcagtgtattcacatagctgaagggcatacaaaagctgtgctctgtgtggattctactgatgatctcctcttcactggatcaaaagatcgtacttgtaaagtatggaatctggtgactgggcaggaaataatgtcactggggggtcatcccaacaatgtcgtgtctgtaaaatactgtaattataccagtttggtcttcactgtatcaacatcttatattaaggtgtgggatatcagagattcagcaaagtgcattcgaacactaacgtcttcaggtcaagttactcttggagatgcttgttctgcaagtaccagtcgaacagtagctattccttctggagagaaccagatcaatcaaattgccctaaacccaactggcaccttcctctatgctgcttctggaaatgctgtcaggatgtgggatcttaaaaggtttcagtctacaggaaagttaacaggacacctaggccctgttatgtgccttactgtggatcagatttccagtggacaagatctaatcatcactggctccaaggatcattacatcaaaatgtttgatgttacagaaggagctcttgggactgtgagtcccacccacaattttgaaccccctcattatgatggcatagaagcactaaccattcaaggggataacctatttagtgggtctagagataatggaatcaagaaatgggacttaactcaaaaagaccttcttcagcaagttccaaatgcacataaggattgggtctgtgccttgggagtggtgccagaccacccagttttgctcagtggctgcagagggggcattttgaaagtctggaacatggatacttttatgccagtgggagagatgaagggtcatgatagtcctatcaatgccatatgtgttaattccacccacatttttactgcagctgatgatcgaactgtgagaatttggaaggctcgcaatttgcaagatggtcagatctctgacacaggagatctgggggaagatattgccagtaattaaacatgaatgaagataggttgtaaactgaatgctgtgataatactctgtattctttatggaaaatgttgtcctgtacttactaggcaaaacgtatgaatcggattaactggaaaatatatctgaattcaactgctgactataaatggtattctaataaaattgtgtactatcctgtgtgcttagttttaagatcaaccaatagatatatatcctacaattgatatattgctttattcacacttttattgtggctgaatttttgtgcctatctataaaacacactttcaaattatttgaattaccaagacgtctgcttttgtgacagtcagaaaacacacctggaatacgatgcagcccaccattaactcattcatgtagtttattcaagtgatttatgtatttaaactaaatattgaaaatgttagtcaaattgtggtttgcttgtcaggtatttatatcagtctgtagtggattcccaaatttcaaagctcttttaatgtaatggacaaaaataagatatgagaatattattgatgaattttcataaggtggaattgatcttaatctactaacagagaagggtagacagtttgtgttaaatgttggcatttacttgtattgaccaaagttttgcagctctactatattctgtgctcaggactaaaatgctgttaatttttttttttttttccagtgctgtgcatatattctgtgatgggaaacattgttgatgtcctaacagaaatatattttgatctattttcctatggagttgtttctattatgaccatttaattttgtttttatttaatagtagtatttccttcccttttatctaattttttatatgctgctaaatatattttaaatatactatgtttgcgaaccttggtagctatgatgagagctattatcatctgtggtgggaaaagctatgtaaataggtagattgtatagagagactatcttgtgttgtgcctgtatgaatttttaaaagttgttgactggattttgcaaaaggatgtataatatttctgtctgctcagaatattaatttgtaaattctgcaagtttaatttttatgtagatggtataacatttgaaaatattgtcttatgtgattttttcccctgaaaatatttgcttgtaaatgaaaacttagctagggcttaaataaacatgttgctatgaaatt

SEQ ID NO: 4305 - protein, 914 aa, Homo sapien
QDVMEMKKTKVRLMKQMKEEQEKARLTESRRNREIAQLKKDQRKRDHQLRLLEAQKRNQEVVLRRKTEEVTALRRQVRPMSDKVAGKVTRKLSSSDAPAQDTGSSAAAVETDASRTGAQQKMRIPVARVQALPTPATNGNRKKYQRKGLTGRVFISKTARMKWQLLERRVTDIIMQKMTISNMEADMNRLLKQREELTKRREKLSKRREKIVKENGEGDKNVANINEEMESLTANIDYINDSISDCQANIMQMEEAKEEGETLDVTAVINACTLTEARYLLDHFLSMGINKGLQAAQKEAQIKVLEGRLKQTEITSATQNQLLFHMLKEKAELNPELDALLGHALQDLDSVPLENVEDSTDEDAPLNSPGSEGSTLSSDLMKLCGEVKPKNKARRRTTTQMELLYADSSELASDTSTGDASLPGPLTPVAEGQEIGMNTETSGTSAREKELSPPPGLPSKIGSISRQSSLSEKKIPEPSPVTRRKAYEKAEKSKAKEQKHSDSGTSEASLSPPSSPPSRPRNELNVFNRLTVSQGNTSVQQDKSDESDSSLSEVHRSSRRGIINPFPASKGIRAFPLQCIHIAEGHTKAVLCVDSTDDLLFTGSKDRTCKVWNLVTGQEIMSLGGHPNNVVSVKYCNYTSLVFTVSTSYIKVWDIRDSAKCIRTLTSSGQVTLGDACSASTSRTVAIPSGENQINQIALNPTGTFLYAASGNAVRMWDLKRFQSTGKLTGHLGPVMCLTVDQISSGQDLIITGSKDHYIKMFDVTEGALGTVSPTHNFEPPHYDGIEALTIQGDNLFSGSRDNGIKKWDLTQKDLLQQVPNAHKDWVCALGVVPDHPVLLSGCRGGILKVWNMDTFMPVGEMKGHDSPINAICVNSTHIFTAADDRTVRIWKARNLQDGQISDTGDLGEDIASN

SEQ ID NO: 4306 - DNA, 3676 bp, Homo sapien
  Unsure 1907-2072: Unknown base
tgggaatataaatgtcaagttacatctgacttgagctcagcagaataaacaaaactgtgaatcattaagaggatgcttgtgaagacatgcttacttttatctttgcttgggtgagtttgaaaggcaaaggaagataaccaaaccagttccctgttggttgggggccattcttaacgtgtactgaactgaacaagcagcaaaataggtggaaggtgatttgaatcactccaaagtcaggcttggagtcccaagtctgacctggaaaatggactctagctctgcctcttatcccacacatgtgtgtgtctgtgtgaacatgtgtgtgtgttggtggtttgttttgttttgttttcctcttatgtacttgggaagcagttgctgagggtcttgcggagctctgtttcctccagtgtagcatagcagcaggtgcaggggtccaaagctatggtggcaaaatgaagaatgaaaggaataaattgcacactatcatttcaacatgtaacccagtgaatcaaactgaaggtaggatgtctatatacccttcatttcaggggcccctagagaatataccttagctttccctcttccggcatcctggaaagtggatacctgtggccttcctttcactttgaaagcttacaccctcattttgactacaactaatactaaaagcttggcatcttgcttgagattagtgtttgctatgccaaacaccttctcctctttctattgaaagcaaaacataggaaaataatttgaaatacttttaaggcatcttaaaaacatgactttttcatcttatggaaaagcagaccaattttgcttttttttcccaacttgttctccagactgtgccaataaaatgtgttcatagcaggaaaatttggaaaatacagaaaagcactatgaagaaaacaaaatgtacccaaaatcccatcactcagataacatcactgttaatgttttgatatgtatttccagtcttttctattgtgttaatttttcattttgtttttgaataaataactttcaggaaagaaattgagccttttctgccacctctgaagcctgattactgtgtgaagcaggccatgaaggccatcctcactgaccagcccatgatctgcactccccgcctcatgtacatcgtgaccttcatgaagagcatcctaccatttgaagcagttgtgtgcatgtatcggttcctaggagcggacaagtgtatgtacccctttattgctcaaagaaagcaagccacaaacaataatgaagcaaaaaatggaatctaagaatctttttgtatggaatattacttctatcagaagatgatcaagatgtttcagtccagtgcacatcagcattgctgacattttatggattctaaacttgtgttgtttcttttttaaatcaactttttaaaaaaataaagtgtaaattaaccgactagagtacttggaaaatgtgatcagtacaagtgaacttaggttgttgccaacagggtccttttaggcagaacccagaaaccagtcaaatctgtagagaagcagtgtgacatcttcaggttaccattattttttaatgagcaggaagtctagaaatgataactagactgtatgtttcatgtgtgtgatttttcagaattcccagagtttactcattcttgttattaaactctagccagttgacatcttcgcaatttcaaggactgatagtgctgtattttctcacgttttctaagtttccgttttgcaaggcctaggtgactttttcatggtgtttgtatgtttagctcttttgaaaaggaattttgaaatctccatcaactgaagtaaatgatgtctgagtgttacagtaaaggtgaccaagtctctttcttaaagtcacaatgactaaagtattagttgaannnnnnnnnnnnnnnnnnnnnnnnnnnnnnnnnnnnnnnnnnnnnnnnnnnnnnnnnnnnnnnnnnnnnnnnnnnnnnnnnnnnnnnnnnnnnnnnnnnnnnnnnnnnnnnnnnnnnnnnnnnnnnnnnnnnnnnnnnnnnnnnnnnnnnnnnnnnnnnnnnnnnnttgaatttttaattttatctctgatatacttcattaggtctccagacacttaatgaagtatatcagagataaaattatcctaaaagatcatacattttctacctatgaattttgctgcatacagaaagtgccctttcctcaggaagttgctgtgtttcatttctttggatggactcttatctagaatacatagcagctctgcaaagaaacagtttttaaaaatgggaacttctacattgaaaagtccccatttttgtgccaactatgattagtgagaggaagaaatcttattctatggcatatgtatggaagggtgtaaagattcttttgaaaggtttattcacattgtagaacagcaaatgacatttttacagtatttttttgtaaagcaaactattttgtgccttgaatttggtatatgtgtattagtgaaacattgtaaaggtgaacttctacctctgtatctaaatgtataccatccacttgtaaatgactataaactattatgtgattgcttttttttttagaatgtcttgtttaaatagtggccaatgtttaaggctgttaaaataagccaacttttactaattggggagttttataaatgactgattaaatttaaagaattaacttacatgcaattgtgtgattattagttatcagcagtgttgtaaggaaaattattgtgtttttttttatgatcattatcccactttaggtaaagaaaaatattggaatggaatagtgttgggaaacagacattaacaacctagggtgcctgcactcaaatagccgatgttactgtccctagattagagacttgattaagggcttgtttgtaccaaaagtggggaaacaatgccatgacctgtgttttagtttggctgcaccacagatcaaatctgcactgtgtctacatataggaaaggtcctggtgtgtgctaatgttcccaatgcaggacttgaggaagagctctgttatatgtttccatttctctttatcaaagataaccaaaccttatggcccttataacaatggaggcactggctgcctcttaattttcaatcatggacctaaagaagtactctgaagggtctcaacaatgccaggtggggacagatatactcagagattatccaggtctgcctcccagcgagcctggagtacaccagaccctcctagagaaatctgttataatttaacaacccacttatccaccttaaaactgaggaaagtcgtctttacatctaattttattcttgtgtgttataacttaaacctatttctatttttgtttgttattgcccttataagggtgtccatctccaagttcaataaactaattcatttaacttttttgtagaagtctttcattcccatgtcccagcccagttcaatcacttctgtggctcttccttgaatgttgtccatattctccctcccatctttagctgtggagtttggaaagggatacagttaatgcaggtttagaactatggaattcctacaagttgcatttcttcatcccaatgtcacgttcttattaatgctacattgctgattgtgtgcattattgtttctaaacatgaaatctcttctagac

SEQ ID NO: 4307 - protein, 5 aa, Homo sapien
  Unsure 1907-2072: Unknown amino acid
MKSLL

SEQ ID NO: 4308 - DNA, 3774 bp, Homo sapien
  Unsure 3720, 3724, 3744, 3769: Unknown base
ctgatataactgcaaattaacagtaaatctctgcctaccatcctgaaagaatattcacgatatgtggtgtttttcttattctagcccagttttttctgtgaattcagatggatacggataagttgtgagaccttggggaatcattcttctctgggcctgcttcctcctctgttgtctagtctaacatccccttccaccctaggtttctatggctattctttttctacttattagaaacttgcgaatcatgctggttacagcaatttattataagctaagtaatgtaaaatatgtctaaagttgaagtactttaggcttatttccttgtctttggtgaaatacatctcaggatgcttaatttttaaattttatctttaattctaggctataccccagctttggcctgtgctcccaataaggatgtggctgattgcctggctctcattttggccaccatgatgcctgtctcatcaagtagtcctttatcatccttaacattcaatgccattaaccgttataccaacacctcaaaaacagtcagctttgaagctttgcccatcatgaggaatgaacctagctcctattgcagtttcaataacattggaggggaacaggagtacttatacactgacgtggatgagctcaacgactccgattctgagacctactgagaggctgaggaggagggagttctcacagtaaagcttcaaactgtgctttttcaggaaaaaggcactttgatattcacgtagaaattcaacctaagaggaaagatcccacagtgagccaatgttaagagatctgatggcattaggaggaagagttttaaaggcaagttttacaaaaggaacttctagaatcttgaaatagacctgactgaggaaaacacattgatgtcagaattctttgtggaattgtttaatttggttttgcagtgccaggaacaattggggacactgtgcactctaacctgcttacacaagcaacactattgtaacagaagaaataaagacactagatttaaattttatcaataaaattacaactaaatttaaaggcaataaaagtttggtacagtaggcattatgtgcacagcaaattgcaaaaggaccaaataactgaaaggtttttttaataaaatgccattttgtggaaactggagtagattaaatgaaacattacctaaaccaaactgcaatatttctggaaatgaagctgagatttggttttaaatgttgagtttttttgggttttgttttttttttaagaaaacatctgaaagccttccaatgctgtattaaaccatgagagaaagcagatgtatttttacatttttttcttttacagaactatttcaaatttccaatttttatactattagaattaaaaaccagctgactgggtgcaatacgggtgaaaatacttgtgacatagacattgagatggattggggtcaggctgttgccctgttttgaatggtttgggtttaaaatagtactatttttgtttgaaaatgtaaagaatttcctagaaaaaaattcatgaaatcaaaaagtagactatttcaccctattgcagctaagtggtcctggggcatggagtcttcaacctctctatgaatggcacaccttagtcacttatgttacttttgtgtccccaccatgggttgggggattttttgtttattctgatctatgagttttgaaaaagtgaataatcaaaaggaaaataattccttgttgttcataaattaagcatcactaaagtctcttgaaaggcatttctgtattgggcaagatttaaaatactaaagccttaggtcctattcatatttaaagtagcatgtttgtaacctgttactatttggagagagaagcagttgcctgccaaattgaagactacctttcaaatagcaaaagagagagagaaggctgatatttcggcttttaaataaagatttgtgtggttctgcttttactgtaactgtcactttcccagtgaaaatgatttcatatacattgagggtcttacaggtatgggtaaagttctataaattgcaacaaaatgatacccaatttcattttatcctttttgtattgtgaaactggaaactttatgacattgtaaattatcagctggtttttctgaatataaagtgtgaaaacacagaacagtattttgatctatttgataattttgtgggttttttgaagaattaatgagcatgtacatagaaatagtgactgcttgaatactgtatttacttgcactctttcagtacatcaagattcctgtatattttagagtataataaaacacagatgtgagttgtatttaatgaataatgtatttgtatctgtgcatattatctacaaatctataaagtttctagggcattgactactagattttaagcattttttctaaaatatttacagaaattataaatctaatcccccatcttttctttataatataaagaagtcataatgaacccttcctaattattagtagtaggaaggtgaatatgcattttaatgacagtggactacattttctattgtaccttttgaaaaaaaaaaaaatcaagcagattctaaaagtatacatatgtgtgctttctctttccttttaggaattctcttctgaattccctgagggaattttctagaatctcagaattgaaagagacctgaggttcatccagtctctaacctcttaacaaatgcaggagtcccttctacaagggtgatctttccaccttgaacacttccaagtgactctacctcaccaagcagtccattcagttgttgagcagctctaactgttagaaaggtcttccttagatggagttgaagcctccctcccggtaacttctgtctttgggcctgggtctgtcctccaagagaaccctgagaatgttggaaggatgaatctcgcacattctgccatgtcttctcttttacaggctgtttgacttctctgctgaagtgatttccagaaggactcatttgacacactattagatttaccacatctaatgaaatccaaggtgtagctataaagtgacaagctgtttttaatttatcacatacaccagaacttctatcctgcatcacttatatgtaaatgatgctgttaccaaaaacattaaggtagttcttgcgaatgccaccccactaagaaaactatttcattacttttgtaatccatctgtgagagtctgccccccagcttaaccacttcctttggtctgcacccaatgaagggaaaccccaaagtactgtctcaaatggtatttgaactacgccagtattgttggaataagtacattaattacttgaatgaatgaacacagcaccgtagaaatttcctttatggttacaccttgtatgtctaaagcattcaggccctgttctgtagtgtttcttatcctcacacagagtagaaaagcctgtttgctttatttaacttatacataaaagatgacatctgaaatatctgatgtgtattataataccagcttctgctctagaactactttgggtgaaatggtggtaatagcaaatgacctcctttaacaagacactcatctcaaacaatgccatttagttcaggagatctctaagtgtagctgtaaattttggggttaatttggcttatattggaccttttaaaagaaataaagttttttaatgcaataaatcaagtgtctgtctntttnacatgcaaacttcttttccnataaactgtctagcattgaattganaagtt

SEQ ID NO: 4309 - protein, 5 aa, Homo sapien
  Unsure 3720, 3724, 3744, 3769: Unknown amino acid
DITAN

SEQ ID NO: 4310 - DNA, 2165 bp, Homo sapien
ctattttgtttgtagtattgtggaacagtcttgttatggagtgccagcttagaggttgttgcaaacttgtctagaagtgagagcatggttttttttagccctttgagagtctacatctaatgaacattcttgctcacccataaataacgtcaagcctcaatgtcaccgtcacgttgggatactctttctcatctggcatcctagacaggacaaggttggttacctttccttccatgaaccatgaacctgtgacggcatcattcatcctgacttcaccaagctccgcctgtgggtgaggccagagctcccactggcaatttttagaagagccagaggctccctgcttcctctagaaataacagttcagggtgaagcatggagggtttcagttcccagacaacggaaccatttagagacaacacagttggacatttccactttttccttgattcctggaagtccagtgggttctgcagctgaaaaagccctgggtcccagcagcagagagacaggacagaggggatgcttgggcggggagggacggtaacctgcagaacagattccatttttatagaacgagtacacgtttgctaaaacagtcctgctttcccagactggattcccaccacagggacagtcggaactcaggactagctccagcgacatctttcctccgaattcaagccttctatcacaatgtcaaaacagctatttataaagccattttcattgtacttgataacagcacgagtcccaaaacttttagaaataaaataggacattggcttgattgaaaagagggactttttaaaaattgttctttcgtcagaagccttttggatgacttacaatagctctgatgaagataccaccccagcgtcagtccaataggtcagtgagtttcaacaggcatccatccctcccatgaagggattctggtgatgggaagtttctgtaatgacaggaaagcattgaccctcattgattgtcaactttggtattagccatgaaagacaggatgctcattgggtgttctgtagagtgaggaatgctgcctattccctcccagaacgtctgacccaggggtgtgtgttgaggagccctgggggaaatggaccaagttttcccacagagcagtattaggctgaagagcaggtgactggtaggccccagctcccatcattccctcccaaagccattttgttcagttgctcatccacgctggattccagagagttttccaatttgggaagccatgagaaaggtttttaaatcttgggaagatggagagagggacataggatagttgactccaacatgacaggaagaggctggagattgggaattggccatcaaccaagcctgtagtagtaaagccatggtcccgcattggaattacttggggaacttatacagttctgatacccaggctctcctagaccagttcaaccaattctaggtgggggactcaggcatcagtgtgtttcgtagctccccgggtgttttccctgtgcagccgagcttgggaaactgccatgctttttggatgtcaaggcgctgttggaggctgggtgtgacagcacagagccaggttgtcttgtggaaaccacagccacgggtttgccactggctcagcatggcctcactgccagtcccagcctggctgagggacaagatggtttctcttgggagttcctgagtggagcacccttccaggctttttgaaagccagctgatctgtggagccttgttaagggactcaatacggtgtttggatattgatgtttttccttgagactgtcttgtccatcaataaagatggaggatgtctcctctttgaaccccgcttccccaccagtactctctctcccttagagtttatgagttattcaaggaggagacttcttaaagacagcaacgcaattcttgtaacttgtgtaaatagccccatctttcagagtgataccatttctacatttgataatgcctgtattcctgtaggatgtatatagtttaggggattttttttttgtttggttttgttttttagaagtcaatatgtctggttttatttattgcttgaaaaagatcatttgaaaaaaataaatacattttcaattccagaaaggatctatgtcgggtgcggagaaagaggtaatgaaatg

SEQ ID NO: 4311 - protein, 9 aa, Homo sapien
MSGAEKEVM

SEQ ID NO: 4312 - DNA, 4969 bp, Homo sapien
  Unsure 962-1140, 2856-2915: Unknown base
gatgaagtatcaatcatcagttcccagccagtctgcttggacacactggggtgccacaagtgggttgcaggttggttgcagacgggcagagatgggttctggttggctttcaaaatggaccacgggctggggcctagcgctggggcaaggttccagctggctgcctctagcctggaggagcttcatctagttacccaatgtgctgaaccaacagcatgaaatagcatcatttcctgtgctgtgttacaaagtgcaaacgtttggaaacactgatacagtacaattatttccatcactccatgttgttataatttttagttacttttcttgattgaaaagtcaatcacattgccaaaaatgatttttatgtcagttaaaggccagttgaaatttttttattaggatgttttaaatttacttttcactttcttgaatttttttcttctcaaatttccttggcccagtgcccatgagcaaatttcattcaaaaacaggaataaccttttgtcataaaattttggcaccagcttggtatactaaattactgcaaagataactgagtaccagaagtaaaaatctctgcaggtgggcttaggagtactcttgggtccctggttcctcagttgccaactctggtttcatgaagaaagaccatgctctgaaaatctagggaggagaaagttattgcagcacctggtgtgatttgttacaacttctttaaagacagcctgcctggctagctttttcctgttttcatgcagtttgccctcccagcattggtccacctgttgttcccaagaaactcattctgttcccaagactccttttagccaaatctttcctatcattccaggacttttttgtgcttctctccccatgaatctacccgtgcctagggtgtgtgccaggcacgtggcaggtggccagtcagcatctggatgtgagaccaattattccagccnnnnnnnnnnnnnnnnnnnnnnnnnnnnnnnnnnnnnnnnnnnnnnnnnnnnnnnnnnnnnnnnnnnnnnnnnnnnnnnnnnnnnnnnnnnnnnnnnnnnnnnnnnnnnnnnnnnnnnnnnnnnnnnnnnnnnnnnnnnnnnnnnnnnnnnnnnnnnnnnnnnnnnnnnnnnnnnnnnntccagccccctttctctctcttaactccctctccctgctgtcgttgccatactcttgcatacacaatcggttgtctagtttttgattgtttgtgtgtatggtgtgtgctgtctctctgaccagatttcaggttcctgaggcgagcctgcagctcatactgctcatctgtcctctcctatggtgggtgctcagggcctctcactgttagttactccctcctttctgcccagttctgcactcaactagtagaagcagccatcctttccccaagcaggaaattgtagtggtcgcccttaagagcagtgtgagggcagaagattaagggaggggaagagtccctggaactggaagaaggtaaatactttgccttgagagggcgccgaatcattttaccaaaatagtaaatggaaaaagtgtcaaaggttgggactagttttaaaaacacatatagccagtagacacatgggggctgtttaaataaaaacatttttttacccggttctgccataacacacactagtgacattccaagtactcagtggccatgtggagctagtggccaccacacttgacaccacggatgcagaacttttccatcactgcagaaagctctgttgaacagtactgtgtccagagtgctaattatgaacagcttagaaaccacaattaatacattctcatgaggttaaaagcagacatgggaatagaacataatgcaaatgatgatgaatattttgggtgagaagagaaagctgaggacccatttctaggattctaagatgtaagatttcttaagttctttatcttagtctcatgcattctccacatcacgcgctgtaccatactgtgtagtcagaacagacagtgtgattgaaaagctttggaaaaagttaacacaaaggattatttagcacataggctgtagatacgtatgtgtgtatttgttcaacaattggagatggttgaatacccttgaacaaagtgtgtatcttctcaaatcagtggttgcactagtcaataattagaaggtgttgttatttttaaaactataagcaaaattatgaaggcctttaaaaaatctatcataataatgaaaaagaggttgtctcccaacagtgctgtccctcaaagaaaagactggttatgtggaaacagcacgtttggagagattattctagtgaataacagtgtatatttgtggtaggcaaatttctaagaatgacccctactgacacccccaccaatgaccttgtataatatcctcccactttgagcatgggtggaacctgtttgatccatgattatatcatgttatgtagcaaaaggaagactgtctgggggtggctaatcaaatcttgtgactcctttaaaagcagagagttttctcgggctggtggcagaagtcaagagacaaagcagaaggacctcaggcaccattgctgttttaaggtagagggggctgcatgagaaggaatgcacatggctttgaggagctgagagaggccttggctaacagcaaaggagctgggaactgcagtcctacagccacgggaactgaattcagcccataagctcattcataggcttggaaaggcattcatctccagtctccagataagacccagcctggccaacactttgaatccagccttgtgagaccctaagccgagaactcacttaagcctgcttggacttctgacctacacaactatgagnnnnnnnnnnnnnnnnnnnnnnnnnnnnnnnnnnnnnnnnnnnnnnnnnnnnnnnnnnnngaaatgaatacagtattttaaaagaggtaaagaggaaatcttcatacttgattccctgtagtatgctggatatttcttggtaaatgcatgaataaagtctttagtagcaagtcatgtacctggacctcgttggggatgttctcgccagagatctcaattagtcttcattggacgtttgttggcaaagttgcagcatcttactgagtagcgtttggtaaaggaactgctagaatgagactataggaataggactgaaacagtgtgtaagggatcttttttatttctagaagaggtgttactttatactgatttagactgctctgagcctgtcagaagtaaattcaagaatgattaacagtggtattttagatacattaagagcaaaaataacctttgccttgtagagatcagataatctgtgtatcgagggatttaattttttttaaccaaaacttagtttctctttttatcatctagcacagatcaaatcctgtatgggccagccaaatgtttgtagtttgagaatgttttgcaaatacctctctgcttccaagccattaatagctaatgaagttttattttggtttgtccattaatttttctgcttatttttactgtattgccatgtccttgatacgagacaagtagaactaaaagagagaaaatgagaggttaagactgtcagaagatgagaaatgtgagtcataaccataccttagtgttttaagggaactttatccagtccaatccctttatagaaaaggaacttttccaagttatgttgcagtatttatagtgtgtaaaattttgtttgactttggtagttgtgcattttaaattatgaatcttatatgctacgataactagtatgcttactttctttaatgcatgtgatcatacaatgctaaaaaggtattttttaaagacccaaccaaactgaggattttgttatacatatctgtatcaacacctatatataaactcttcttcttacctgaaacactccttcacccggtttgggcactaactagatcattttcaaaggaacaaacaggaaggagcaagctggcactccagggtgcatctgagctgagaatttagaagacctcattcaagaaagtaaactgagcattgatgggaaagcactttgcgcgaagtaacattcccactgttaatgttgcagtcaaaattgtggaaaaaaaaaagtggtgctaaaattgttctgaaatgaagattgtttgttgtggggaatattttaatactcttggactttagggaggctattttatgtgtcacttgctcctagttgtttcattgtattagtaattagcaaactgtcctggaaccaagggtttggtacttttgcctgattagcattccattatttatttgaaatgctcagtgtttgctcaaatttggtgaaaatatcttttgaagacatattctctgagccttaaaaatggctgctatcgacagtactgtaagatgcactgccagtagatttgatacttttcatttcagtgtaggcagtaatgttttctaagaaagatttagaaatcagcaaagtgtaacaattgtgtttcatttatggaatggaaaaactgaagtgtcccattcagaacactttggaaaggttgtctgcattaggggatgtttctggaagcatcccttagagaagctgcctgaggaatctccttgccaggttgtaccagatttttttttttcttaaatgtattgtatatattttccttaaaatgtcttcattggctgaatgattcctatccgtagtaatattttaggtacttgttggatttttaaaggaagattatttattttcagatttgctgctataattgaaaacctagtaactggtcctgttgattgtgccttcatcactgtttctctgtgccacgaccgttcatgtgtatttgaaataaagaagtttaaaaagccatgttgaattcaagattccttctaataaaaataggtgaaacttaatgagtagtattttattattaactttgttgacactgagacaatactagttatccatt

SEQ ID NO: 4313 - protein, 95 aa, Homo sapien
  unsure 29-88: unknown amino acid
  Unsure 962-1140, 2856-2915: Unknown amino acid
MNLPVPRVCARHVAGGQSASGCETNYSSXXXXXXXXXXXXXXXXXXXXXXXXXXXXXXXXXXXXXXXXXXXXXXXXXXXXXXXXXXXXSSPLSLS

SEQ ID NO: 4314 - DNA, 3081 bp, Homo sapien
ctcgcagcaggaaccaggctccaggcgccggcgccggggccgcggggaggaggcgacttcgctccctgcggcgggcgcggcccgggcgcccgagcctcctcggccttggagagcagcggcggcggcggcaccccgggcgcggcaatactgaacactgcgcagcttgcagaggtctcctggcagccctcattaggaattctgtctggccccgatcagaatactggagacgagaccacgagattgatgagtttgccttgggagtcggtaagaaggtgaagccaggggcgaacatgggtcagaaggtcactggagggatcaagactgtggacatgagggaccccacgtacaggcccctgaagcaggagctccagggtctggattactgcaagcccacccggctggatctgctactggacatgccccctgtgtcctatgatgtccagctgctgcattcatggaacaacaacgaccgatcgctcaatgtctttgtgaaggaggacgacaagctcatctttcaccggcatccggtggcccagagcacggacgctatcaggggcaaagtcgggtatacccgtgggctgcacgtgtggcagatcacgtgggccatgagacagcggggcacacacgccgtggtgggggtggcgacggcagacgcccccctgcactctgtcgggtacacaaccctcgtggggaataaccacgagtcctggggctgggacttggggcgcaaccggctctaccacgatggcaagaaccagccaagcaaaacatacccagcctttctggaaccagatgagacattcattgtccctgactccttcctggtagccctggacatggacgacgggactctgagcttcattgtggatggacagtacatgggagtggcttttcggggactcaagggcaaaaaactgtatcctgtagtgagtgccgtctggggccactgtgagatccgaatgcgctacttgaacggactcgatcccgagccgctgccgctcatggatttgtgccgtcgctcggtgcgcctggccctggggagggagcgcctgggggagatccacacgctgccgctgccggcttccctcaaggcctacctcctctaccagtgacgttcgccatcataccgccagcgcgacagccacctggtgccaactcactgagccgcctgccgctggggccgccgcaccctgcaccttggaccggcatccgtagccatggacagaggtccctggtcttccctcatcctccgtggctgcctccatgggacaaggaccgattccaacacaggctcctctttcccccttcccgacatcagcagaaggcagcatccctgcatgccgtccgtatacaacccctctttgaaaaaagacacagagaataaactcctacgaaagccctacattgagctccaatctgctcggggtgggacgggtgcttcccacacctctgggagaaggctgcagccacctgggggtcccagggtggtgggggtggcaggtggtaccacagctctgagagcagataccaggggtactaagaggtgcttagacaagggctggtgcccggcccagggtgcccagcggggccatgccatggcagataaagctcaggacgtcaaaaactcaccatggaccccaaggcagaaaccaagaactgtctgcaggcaaataagcacccagcacccatcctggctgccggtgccccgtaccctgtatttattcttttaacaataacaaaagccatttatttattccatctagaaaggaaaccctgtttcagtcccctctctctggctgttctgttactttccttccacctgtgccctccctgggatatgtatgcctcgcccgccctccctgggcacatgtgcacacgtgcccaggcacaagtatgtctctgggtcccttgccctgcagtttccagggggctctgctccaagttccctagcgggcccctcagggagaaatagcctcacgtgcaatctgggtgtcttcgggggcccgtctggaagggctgcagcaattcccctgtgtctccaggtaaccagctaactcttgggctcaggcacccttgcacagggttgcatttctttagtcttctgtgggtcttttgatgtgggtttgattttgcttttgcttttctagctgagatttcccaagtgcatcctcagaagctctgggtgtgccagaggacccccagaactaagaagggagggcgagtgggtctccattccccgagaagccaggggcagggtgggatggggaagaccaggagcagagtcgagcctcacagaagccagcgcgggtctctgctcagcaccccagccggggctctggacccagggtaacagccccagttcatcccaacccctctcagagcctcaagaggggtagctcggctgccggaagagaggggtgccctatccctggcaacccctccacgtagcgtaccccagcacctgccaccgcctttgccatttctttgagcttgaagttaactctcttagagtctaactttggttcatttctgcacaggtacaatagatgactttatttgtttaaaatgtttaatatatatacatacatatatatatatttgtctgtaagaattatgttttaaacagctgctgtagagtacctttttttaagtaaatcttacagtggagtatattttttaaagcacaaaattggtgccaagactgggtgagaaatgtacattacccccttattattttgacggttttttttttcggggcaggggaccttacctgtaagacttttaaagattttcctccctcctgtttcaggtgggtcacattctgatgaatgtttcccttgtacagatcccagcttatggccttgacccagccgtcctcacagatgccgggtgaccctctagctctctctgcatctcccaccccccgacaccctgggaccctcgaccccacccttctttcctaccagcccagagccttgtggcttgtacagttttgaaactcccgttctattttatgatggttgataatagtcagtaacctaataaaggaacgtttgttaaaatatcaaaaaaaaaaaaaaa

SEQ ID NO: 4315 - protein, 273 aa, Homo sapien
MGQKVTGGIKTVDMRDPTYRPLKQELQGLDYCKPTRLDLLLDMPPVSYDVQLLHSWNNNDRSLNVFVKEDDKLIFHRHPVAQSTDAIRGKVGYTRGLHVWQITWAMRQRGTHAVVGVATADAPLHSVGYTTLVGNNHESWGWDLGRNRLYHDGKNQPSKTYPAFLEPDETFIVPDSFLVALDMDDGTLSFIVDGQYMGVAFRGLKGKKLYPVVSAVWGHCEIRMRYLNGLDPEPLPLMDLCRRSVRLALGRERLGEIHTLPLPASLKAYLLYQ

SEQ ID NO: 4316 - DNA, 6253 bp, Homo sapien
  Unsure 2259-2541, 4832-5117: Unknown base
aaaaaatgttttgtagagacagtctccctgggcaatgtagtgagaccccctgtctctaaaaaatataaataaaaataaaggcatgttcctgaaagactgtcaccttggaaagtgacaggccctggcattagcatgttgacacacccttttcttcttactcagcaaaatacttcgttttggtttcttcttgtgttgctattgagaaatttgtctgatcatatccttctgcctttgtcccccaagaaatgccctactttatccttttctttttgtagttgaggagggctagagaatcacaattaaaagtaaggaaatagcagggttttgaggatccttgtcccagccccaaagctgaggaaataagaataaatgcttaatatagccttaattctagagcgcaccagccatgaggctgcttttcttgttgtttttgatttttaaaacatacagctgtctggccaggagcatctaccatttctagattattcagagtaatgaggggaatggatggattgctccagtccacagatgagccacataatatgcaaatcatatacccattcatagcatttgttaacattgcttccctgctcagctgctgattgaattctgtgtgcttatataaattatgtcaaaaattatactgcataattgaggtgacagctgttgctgcagtgacatgacagactggaacaatgaagcttttggtttaagtcagccaggaaaatccttctgaatggtaatgtgattgggcaagagctcataaaccatacctcaagtgggtgggagttttatctctatattccttctctctctgaaggaattaaaggcctagatcaagtgctggataattgacaattgcttgtacttaatctgatcggtatctaaaagaaggaaaggatggtcaggaaacatttatcataaatgtagccaaggatatcaattagggtagacaagaataggacaaaaataggccagagctcctgaggaggtgatatgggtctcttgatttgcagaaaatgacagcctatccaagtggcccagtgtatgcctcccagtagcagtgggcatgtaaactgcagcgaccttatttttaaaaccaaaaacctagtatgtggacaaagaacatgacaatatttggtactgagattggttctgagaaacctggggcatgtggctgctgtggttataggtaatatttaagacattcataaaaatctgatattcttttaccgaaataaccccagtatcatctactacttaccatctgttaatagactttactctgtcttttttgtcttcggtttattgtactgagtgccgccaaaacaacttttgttctcttcctgcctacctgcagctggttctataggaatgtagggagccagaggccagtattgatttcagcccttagcacaaaggaaatcagatgcctgcttccagcatttgttagtgttgagtagatgttcttgccctagaagaattacagcctcaaacagaaacctgtttcatggagctttctcccctcagaagagttaatagttaagagctaagcactcttaaacacctaagtctcaaatgctaaaaatttatttttcttgtgtttagtcctctttcaagacatctttctaagcctttcagtaatcaacattaaaagatctccctttcttcagagttatagcacagctttgcccagtagaggctaccaaggacagcttagcagccctttgattgctgggctgggcagatggccttcaagttaagatcaaatgccgggaaaatcagcctacatgggagcacccattttaaacctggagagaaccatgatgttttcttcttcaaataacaatctagttttttttcccccagtactaaaattgtattgtctttcagacaatataatttttatttaaaattggaacatactatcttcatgctttctaagctaaatcttcatttagatttcactcctcagtagatcccagagaagaagctatataggatccagattcaaatttaacagtgtcttctacttttttagttatgttttctatcaactcctgctgccttttcaaatacggatatttttcaggagactcttctacttgtccactgactgtattttttcctttttgatccgtagccctggttaaatggctgacatccttccgtggatgattcttggaggtagtctcagaattccaaagtgattgtctgtcttcttcttgtcttgatcctaatgcagacattcacctctannnnnnnnnnnnnnnnnnnnnnnnnnnnnnnnnnnnnnnnnnnnnnnnnnnnnnnnnnnnnnnnnnnnnnnnnnnnnnnnnnnnnnnnnnnnnnnnnnnnnnnnnnnnnnnnnnnnnnnnnnnnnnnnnnnnnnnnnnnnnnnnnnnnnnnnnnnnnnnnnnnnnnnnnnnnnnnnnnnnnnnnnnnnnnnnnnnnnnnnnnnnnnnnnnnnnnnnnnnnnnnnnnnnnnnnnnnnnnnnnnnnnnnnnnnnnnnnnnnnnnnnnnnnnnnnnnnnnnnnnnngtgcctggccacctctattaaattttgtggacaaaaataaaattgtcattatttgtttgctctcatggagcactttcagtaatacaattttttttaaattccagttgccctctttgttgctctgtcctctgtaatacctgactttgctaaagacttgaggggtggtttcagaggagggtcaggtgatgggaaggcaggatgagaaaagccctggacttgcatgtttgagaaggcttccaaccacatcttcactcagactcttggaattcctgtccccaaaacaagcttctgttttttgctcacaatgctatatttctaaatttttcctgaattactgagaagcagtcattagctttgttaagtttggtttggggacattgttggtatcaaaaatcgaagtcttattcatttgatgtaggccatgaatcatcaataactggttgctggaaagcttgactaccatccactggggtgctattttgagaaggatttttgggtatctttatagtctgcaattagttgatgattgctttctagtttatcaactgcatttatatttgcttttctgttcatggaaaatcctttatttgctggggtttttgtttgttgtttgtttttcccacttacagcaagtaaaagtggtctgaggttatccttgtttttcttcgcggtttgccatgtgtgaaagtagatttcctgctattgatatattctcattatagacagaatagtggagaacagtgttgccatggacaaaatccagttttggtccactctggggagcatttggacctgtggtgcttctaacaattaaaagtctagatggtccttgactgtcccccagccatactgcatactactttgtgcattctactttgtgtcattaatgaaagattggttctgtccctgtaacttaggcatttattattcttaactcttcattcctgttctgtagccacccagcagtccattttccctatgttcaggccaaaccacagggcattggggaaggtttttgggattttcttattgagattttgttgaatctgtagtttaccccagctttcctaaggtacagtgaggggttggagggatctgtgtttggcccggggagcaattgtctctaccttaaggttcagttttgagggcataaaatactactttgcaatgtcatgagaacaccattagatctgaaatgtggaaatggtttctcacaatttaaaggaaaaacccactttgcacccatgatcccatcattttggttgagattttagaataaaaaatatagtgttgagatccgtacttttgtaatcagaccaccaagcatgcctgtggcaaggcagagaggaaaggtctggagccagtgtattgcagtttcatgctacctttacctgctaatcataaaaattatgttttcaaaagtagatgatactagccttacacccaaaaacatgttctgaattagatgccccctcacccaatttttattaagctttctaaattccagccacattgctgtacatcaacattggtttcattcaacagacatttttttggcctgaagatacaaggttcagaaagaggccatccctgccctcaaataactttcatactggtgtatgatgaactgaccattaatagtttaagtgcttacaagctatgtttctgttcaaaaaaaaaatagtttggtataataaatgctataaaccaatacacatttctgacttgggggcagagacagactggctgatgttgtatagtttgtagccctggagtaagaagttgacattaatttcggcctatatgtggaaaagacctataacattgggtgaactgagccagctggccatagaacacaagaacatattccaggaaataaatatagctggagggttggaaatgctgttattactgagagagaaaacaggtgagttgggattgagaactcctgattttcatccctggtttagattcttggccaaagtagtggtagagttaatctttgcttgtggaaagcattaactatgttgcagattcagttgtgttacattattgtgggttctataacaacatattcctcatggacactttaccagagttgctcacacctttttcaatttctcatcccttttggaggaatgaacatgagacttaactgcctttaagcctaaaacggacatgctttccaatgacaagagattttctaaagagaagtcttggagcacatctgttaatacctgagcatctactctgagcagtgcagttttattcaatactggagagagggtgannnnnnnnnnnnnnnnnnnnnnnnnnnnnnnnnnnnnnnnnnnnnnnnnnnnnnnnnnnnnnnnnnnnnnnnnnnnnnnnnnnnnnnnnnnnnnnnnnnnnnnnnnnnnnnnnnnnnnnnnnnnnnnnnnnnnnnnnnnnnnnnnnnnnnnnnnnnnnnnnnnnnnnnnnnnnnnnnnnnnnnnnnnnnnnnnnnnnnnnnnnnnnnnnnnnnnnnnnnnnnnnnnnnnnnnnnnnnnnnnnnnnnnnnnnnnnnnnnnnnnnnnnnnnnnnnnnnnnnnnnnnnncgggccgagagggtgatttctaagcagagaattgtatcagttatgtggaaacctttgccagaaatacatataccttgtatattaaatctgagtctcagatttaatcatcgaagcgtagctgggttaagaaacagtctgatcgtaaggatgttgtcgattctgacccatggatgaccacaagaaaaagatatttatttctgcctggataattgagagttgactaactttggaagtcagaattcccaggaattagagtaactgctctggaaagttaaagtgtgaagttttttagatagtttcataaaaacaattctggtttctttttgcttgtgctgactttcttggattttaatctacctcatcttgtctttttagagttacttcaacttgtcactttaacattgtgcttgactttggttgttttctaagatggaatttttcctgttcattgacagcttgttctcttgccttttcattctgatcctcatttcatctaacatcatctcatattgctcctctgtcaagagaaatgttttaaaatagtttaaagtcttgttttatgggaagaaagtgatcctccaatgctatttgtttctgaggtcagtaagagaaggagttaaaacaaggcagtggggaagggaatgaatcctgcactggaggcaaaagctgacaaggaaagagccattaattaagacaatttcaaagtcaactgattgtgatcattaatgtcacaatagatcaaaacctaattatcacagcctaggtaagagccatcagtattaatcggaaaatctaataggaaactattatcaagaaattaggccaaattgaatgcagtgaactttttatcttggcattctctatttttttgtgatgtcccctggcattggcaggtgtgaccctaacagtcgattcaaggccaagtggtcagtttgtcagccttttttaagggatttctttttatttttaggaattccaaacagagttaacctaaactgtcattgccaaaagatcagtcttaaactttcttagcacctgtacctgtttaatgtgatcagctatcagtgaggaaaaaaaaaaaaatctattcaggtctgggaagggtcccggtacctagagtatccatatggaacctt

SEQ ID NO: 4317 - protein, 113 aa, Homo sapien
  unsure 7-101: unknown amino acid
  Unsure 2259-2541, 4832-5117: Unknown amino acid
MQTFTSXXXXXXXXXXXXXXXXXXXXXXXXXXXXXXXXXXXXXXXXXXXXXXXXXXXXXXXXXXXXXXXXXXXXXXXXXXXXXXXXXXXXXXXXXXXXXXXCLATSIKFCGQK

SEQ ID NO: 4318 - DNA, 3772 bp, Homo sapien; identical to SEQ ID NO: 2904

SEQ ID NO: 4319 - protein, 640 aa, Homo sapien; identical to SEQ ID NO: 2905

SEQ ID NO: 4320 - DNA, 2686 bp, Homo sapien
gcgcgagaggacgtgctctgccagccagtgggaaggcaggccgcgcgcgcgggagcgcgggaggatcggcggctcgcggtcactggtccctggctcggttccccgcaccccggggctcacacttacccgcgcggaggagcagcggccgggtgtccacccccatcctgcgcccagtctcctcgattcccctcgctctgagccgggagagccgaacagctgaagagagttcactgactccccagccccaggtgggccttgtgcacatcatgaccagttttgaagatgctgacacagaagagacagtaacttgtctccagatgacggtttaccatcctggccagttgcagtgtggaatatttcagtcaataagttttaacagagagaaactcccttccagcgaagtggtgaaatttggccgaaattccaacatctgtcattatacttttcaggacaaacaggtttcccgagttcagttttctctgcagctgtttaaaaaaattcaacagctcagttctctcctttgaaataaaaaatatgagtaaaaagaccaatctgatcgtggacagcagagagctgggctacctaaataaaatggacctgccatacaggtgcatggtcagattcggagagtatcagtttctgatggagaaggaagatggcgagtcattggaattttttgagactcaatttattttatctccaagatcactcttgcaagaaaacaactggccaccacacaggcccataccggagtatggcacttattcgctctgctcctcccaaagcagttctccgacagaaatggatgaaaatgagtcatgaacacagaaagtctaagaggagaaatatgatggatgaagagctctgtagatgctgtatagacactaaataagagttgattagggtagtatattatagtcatctgttatgctgtgaaatttggaattcagtattatcattttgaagtctgtaaattgtgttagtcattaacttagtcacctgttgtattctggatctacacaaaattattttaactgctcttattaatctgtgaggattaatatacaaaaagtatcctttgagatgaagtcgtgttctcaaaataaggttatattattttctttttctgcttgattttcatcttgtgttttgctttgtttttgtaaggaaccatctcttggtttggtcacatcagttcacaacagccatttgttttcaaggtcaaggctccaggcaggttgttactggtgtttgcagcctgtcagtacttgcagtactggaataggttctaggctagtgtctgcgcgtcactgtggttttagcatgggaggacttatttgagaaatactaccttacttttctatgatttctttttacagagttatagtgtgtttactcctaagatgacagttctctttgtctatattcagcatctaagacaaatatttaaacattttaaagaaccactgtgttaagtttaggattatttacttaccaaattagaagtttgacttttatgtgttatacacaatcttaaaatttcacgaattcacctttttaatagtatccatgtacataataaaatcaaagtttaattagccattttctttgaatttttttctaaataagggaaataactgttcttgggccactttacagagataaatgtatgtgaatgtttatgataaacgcttaaatatttctaaaatattaacttcaaaaaagtctttttcagttcttaaataaaaatttatttatttaagatacttattcgacttatcttaactaaggtagctatgaatgttaagtagatgaggtaaccattcagttaagttaaattgtagcattgccaggtagtgaggctcactgtacaattttccaggtaaatgaaatttcctgtagtaagaggtccgtatttttgtaacagccttttaaaaatgcttttgggaaccctccagcctcttaccaaaagaggctttaaacctcatcttgattcagactgtcagtctattcctgggcagtagtatgtgatgtccagcaccctaaccccgactccccagccctgggactattccagtagagtgaaatatttgtccctgtacaaagtggcctgaatgactgttggagttcctgtgtctggttttcctgtttattccctgtgatgcccagagtaatggcccatccaaagatgtccagatgtccatgtgctagtctccagaacttgtaactgtgttgttatgtggcaaaggggaatgaaggctgcagatggaagtaaaatagattatgctggattatctgggtgtgcccaattgatcaccggatccgtaaaagtggaagagaggcagatcaggatgtcagcgtgatgaggtgtgagacagacttgacttgctgttgctgggaggaaggggaggtcatgagccaaggaatgtggacagtctcttgaagctggaaagtgtgcattggacatctggaagccagaaaagacaaagaaatatccagaaaggaacaaagtcttgtggacaccttgattttggtccagtgagaatatgtttgacttgttaacctacaaaactttatgatgataaatttgtgttggtcgtaagccactaaatcacagtaatttgttatagcagcagatagaaaactaatatactccctttaatataaaaaaaaaaaaaaaaaaaaa

SEQ ID NO: 4321 - DNA, 4035 bp, Homo sapien
gggatcagggcggggccctgagcgccgccatgcttttgtacggcaggatcgcaaagcacgccgggaccggttggtttggttttgaagacgtggatggcgggaattctcgcttctggcctgggtgttttagctcacttggaaaggctagagacccaagtgagcagatcccgtaaacggtctgaagagctgcagagcgtgcaggcccaggaaggtgctcttggaaccaagattcataaactaaggcgtctgcgagatgagctgagggctgtggtgcggcaccggcgagccagcgtgaaagcatgtattgccaatgtagaacccaaccaaacagtggagatcaatgagcaagaagcattggaagagaaattggaaaatgtgaaagccattctgcaggcatatcattttacaggcctcagtggtaaactgaccagccgaggagtttgtgtctgcatcagtactgcttttgaggggaacctattggattcctattttgtggaccttgtcatacagaaaccactccggatacatcaccattcagtcccagtcttcattcccctggaagagatagctgcaaaatatttacagaccaacatccagcacttcctgttcagtctctgcgagtacctgaatgcttactctgggaggaagtaccaggcagaccggcttcagagtgactttgcagccctcctgactgggcccttgcagagaaacccactgtgtaacttgctgtcatttacttacaaactggatccagggggtcagtccttcccgttctgtgttagattgctgtataaggacctcacagcaactcttcccactgacgtcaccgtgacatgtcaaggagtggaagtattatccacttcatgggaggagcaacgagtatctcatgaaactctgttctgtacgaagcccttgcatcaagtgtttgcctcatttacaagaaaaggagaaaagttggatatgagtctggtctcctaatagattgttttcactgcactgggagcacatcagagaaataaatcccccctcccctgccaggtgaaaggaaatattgcactttctgttctcatgactaaggggacaggagttccagaagaacctttcaagatgatcaggaacaccaggacgagggccgtctcacctcactcggaccacatggagacctcccttcaaaatgggagccatgtcctgccccaccaagccctgtctgaagtggagcttccccgcctgtgctccctccacagtcccggaaagcccagcggcaaaggcagctttgtcccagctctgccaccctcctgctcacagtggtcagggcccctcaggggcaaggacggcagggattggaacgagggctctggaaggactgttcagccctatgcctaagacccctatgctggggacactacaggcacacagaggaatagcagggccaccctcagagctcacacatccacgaacaaatgaaggctgaggaggtttctaaacctaaagtccatgagtgtgcacttcaatccaggaaggtcgggacttccttcagtttcaaaaaataaattctcccttccggtttggactgttgcaggctcgaggccattcaggagttgtccaccacctggtggggcagtgtgacagaggggccattggggaaggtggctagcttatcccgccccttcaagaagaaggtcagcagctcccccttccccttcacaaagatggggcctcgcctcacaaagcggaagccgtactctcggaggatgacttgggtttcttctaccacctggagagggagggggagcaagaacgtggcgttacggggggagcctagactgagggcgggtgggggctttgggtggttggagccgagcactgatccatgggtcccaagcagtatgggacactccccaaacctcccagggccaagcccttccacccgtggcgagcagcgggtgggaaggagaaccctggagtgactggctgggggcctcctctcatccagagacttctctcctaggatggccatggtcacctgggtggcagcactgttacctggaaactgccactgcctgctcttctgtccctttgcccctttcgtggagcttttctgccagacgccactgagacagatcacaaggtattagaaggttcatacccaaaggtaggccatatgcatctagaacttcagcccagattttgtggatgggtggaagtgtttcttcctgtgctgaggctagctattgcagagattcttttccacttgccccacgtctctgcctctggacttaccgttcagggccagggtgggaggcaggggcacgtgggaaagcactgttccggttttgttctcatgccgagtctgagcacgtgccagctgtgccactggacatacctgaatgttgcccatgacccccgtggactccatcctgctggctacattgactgtattgccccagatgtcgtagtgtggtttccgggctccgatgaccccagccagaaccccgcctttgttcatgcctagggtagaggcataaagttcagcacagccacaggccacaccttgttatgggcctcagaagccatctcctctccagacctgtaccacaaagctcctaatgtaacacatcattgtcctcattcaacttggctgtatgctattggagggtggaaatcacatctcctgtttatccgtgtgcttgttaggtgtcagccgccaccccccccccatatgcagatttactcggcatggtagtggccagcttctaacacagctggtatttcaagtctcctgggacctcactcaggaatgataccccctcagtagaagcagcaggtgatcttaactcctttcaaagagcaggcctgtctgggaagccatgtcctcagcaggcacagcaacccctctggaaatggatcacaaactcacttctcagccaggcaggccaagcttctgttgtaacagtaggcacagtatagtcggatcatcatatcagctgggtttttggtttagtcatctagagtcgtctggactaaaggtctttcaggtctccttgccctgtgagtgcgtgaacctccccacccgaattgcctcagttgtcctgagcctcatgtctctcctggtggtgggccaggcccctgcatgggaagggagcctgctgcggggcaggccagctgggggtgctcacctatgcgcagcatgaagttattgaaggactggttgttgatgttggtgagcgtatccttcatggccagcgcgaagtcggccaggtcagccaggtgctgccagcgctctctctcggacttgtcttcctgtgccaggggaccgtggagaaagtgtcaggagccgctcactgcagcagcctgctctgctgccttccctggcagtgttctgggggtggattccctacacctagatgttcaaggccttacttttcctcccacaaaggagtcgcagccacgctagctctgacttgccactgtgacaaagttcacgtagcaggtctaggcaaagactgggcaattgagcagaggagacggacctgtgagtctgaccacgaggcggaccccttcaccttggctgggcctggtcctggtccttaggttttgtcaggttgtccttgtttggatccctcaactaggtgataagcactggagggggatgacccgccttggacgtgtttctttaacctcatccatataatagggccgtgggatggttgtagaggtaaagcaggatgatggtgttttaagaccagagcttgggaccagggctcctacacctaattttctctcctggtagctgaacaaaggtctaaattagcttaacaaaagaacaggctgccgtcagccagagttctgaaggccattctttcagtttcccttgttgacaattgctctccagttcctatgaaagcacagagccttagggggcctggccacagaacacaaccatcttaggcctgagctgtgaacagcagggggttgtgtgtctgttctgtttctctgcttgccgaactttctcaataaaccctatttcttatttat

SEQ ID NO: 4322 - protein, 294 aa, Homo sapien [sequence omitted]

SEQ ID NO: 4323 - DNA, 1896 bp, Homo sapien
  Unsure 98: Unknown base
attgttctattgatggcaggtaatcatcactcttcactagctgagcattcggtccactaacctgagtcatatccggcactggtttctctagaaagggntccgacggggaatgctgatgcacaggcactttctgcggggtgttctggggtgatgggtggagctgtgcccaaggctggtgatgagggtgtggaggtgaagactggtggtgcaagcccgggtgaggctgcagtggaggacaggttggaactgctgaaaagatggctgttgaccaggatgttgttggccaggtatcagtcgttcctggattgcttgtgggtctccaaggccaacaccaggacaaccatttggcctcatgtgcccagtcaattcccttggtgccgaggacatgcctataaatggacgagactgctgcatgtttctggggcccatattcctctgtccgattcccatggcaccagggggctggtgagatggctgaggatggggcatatttggataactgccaacttccattggtatcccagcacttcccggcctgacttgtggaggaggagtgcctgctggattactcattgctttcatgggtgacatgggaggtggagaggcataagttccctgaggctgtgaaggatgcatagtttgtgtgttcatttggttaagtgagccactggggtggatgggctgctggtgcattagtccttgaccactgtttgatgggaatcctacagcattggggtatcttggtacggactgattcattggagtattatttgtaaggcctaaattttgattcatccctgtattgttaactaatccctgatttaggttactgtaaggatatcgagaatactgccctgagttgtttatagtaggagaggggactgtctggctccgagaactaaagttaagggtttgcggcctaacagccccttgttggggaggattcggggagaatctgggactgtgggcaacggattctccatggagagcagtagaggggtggtgatggaactgctgcaccgagtgacgcaaggaaggtgccatgctgggactctgctggggcacgtgggacaagtggccaggtcctgaggtggcaataaaaggatttccctgattgaggccctcttggccttgggaaaactggctcatcctctgctgtggctgaccatgctgctgcatggaaaaatccccacgtgccatatagctgcccatctgctgcatgtgctgagggtggccctgtgcagggggccccgacggagccggctgcggtggctgcggctgtggctgctgctgctggtagggggctcgtatctggtctggtacctgaacagccctggggccccacatggagctgctgtccacaaaggattgcccatgcctctcattctgcatgccagggtagacacccatctgaccgccaccactgccaccatggggcacctgaggaacgggaggggtgtgatactgcgagtgcggagacgcgagtccgttcccaggggtgttgctcatcattctgttcggctgatccatcagatgcatcttttgttgttcatactgattatagtgatcaaaatgtgtcagctttgtttgattttgattagttgaaggatgatgaagggatggctgtaaagaggcaaagccttggtctattggcatttgctgacccataggatttactggattttccgggtaaccacattctccgaggccttcaagaccttcactgaaaatattcccatcctcgccaaaaagactcatcattcctggatctgccatcttattccaacacacggctcctccaaaccacagctcaggagcttgcctgtgcttcacttcactgaggtgtttgccctcaaagcctatatgaccaatccctaattgctgtcctgatgatga

SEQ ID NO: 4324 - DNA, 2495 bp, Homo sapien
gcggccgctgcctcctgctcgccccggcgcccgcagccccggtcccgccgcggcggggctcctcggcctggctcctggaggagctgctgcggcccgactgccccgagcccgcgggcttggacgcgacacgggaggggcccgatcggaacttccgactgagcgagcaccgccaggccctggccgccgccaagcaccgaggccccgcggcgaccccggggagccccgatcccggccccggtccgtggggcgaagagcacttggcggagaggggccccaggggctgggagaggggcggcgatcgctgcgacgcgcccggtggggacgcggcgcggaggcccgacccagaggccgaggcaccccccgccgggagcatcgaggccgccccgagtagtgcggcggagccggtgatcgtctccaggtcggatcccagagacgagaagctggccctatacctggccgaggtggagaagcaggacaagtatctgcggcagaggaataagtaccgattccacatcattccagacggcaactgcctctaccgagctgtcagcaagacggtgtatggggaccagagcctgcaccgggagttgagggagcagacggtgcactacatcgccgaccatctcgaccacttcagccccctgattgagggcgacgtgggggagtttatcatcgctgctgcccaagacggggcatgggccgggtacccggagttgctggccatggggcagatgctgaatgtgaatatccatttaactactggagggaggctggagagtcccacggtgtctaccatgattcattatttgggcccagaggattccctgaggcctagtatttggctcagttggctcagtaacggacactatgatgctgtatttgatcactcctatcctaacccagagtacgacaactggtgcaaacaaactcaagtgcaaaggaaacgcgacgaagaacttgccaaatctatggccatatccttgtctaaaatgtatattgaacaaaatgcatgctcttgaaatgtctcaaaaccttacaccctgggaataattgcatatataacttgtgtttggagaatcacatgaactttaatcagggtaatagcactttcaaacttgctagtagattttactgtaggtgtaatgccttaatcatctttttgaatgttttctcagagctggaggttgctgggcacctaaatgatgtttcatgatagctttgggtgattttactgctatttataatttgctgtataaagtgagcattacttaatttgcaagctgatttctcacagtgtaaatttgttcattcctggtagtctattttctataaaaatgtatttttgcacaacatttttaaaaactggtgtaccttcatctatgacgtgttccattttgacaaacagctttcaggcgtaaatccagagaagtgctttatatgaaatgtattattttgaacagagtttgtgatttggtagttattttatgttgttgaaatttgaatttcacaattcttagataattatttcaaatggatattgatgcattcttgttaccagatgtttggcccattccattttgatgaaacagagctgttgttttggaagtcattatttttctagaaatggcgaatcttttaaagaaaattacttaatggaaggttgtgggaaggtgtttttttgtgtttttttttgggttttggttttgtttttcctcttttaagggatagtagcaggtcttacttgaatgaaagtctgatatttgctgatggcagaatgattattctgtaccctggttgatgtgtagagtagattgtctggtgctctcagttgtttttatttacatttgtcacgttgttgtaagagaatgttaacatggtataaaactctgtgacaagataagcctcctgctttatataacttcttgaatccagctaagagatttataaactaatggcataaatgtctggagccaaccttggcagttatagcaggagaacactgtcttaatatttctttacattctttcaaaaggcaaaataggattgccctgtattgatgtagaaatgtctgtaaacagagcttgtatggtttgctgggtcaaacaatgtttccaacttaaaatcaatctcattgccactttaactacttttagtcatatttattaagtaatgcagtttgtactttttttattttgtaacattttgtgatttttttgtacaaaactgtatttgtacaatagagcaattcccagctgatggaatgaatgaataaaatgcaaaattatacttttacaatgcctttttggatagagtggtttttaaattgtgatgtttgtaggaaactttcttgcatgtatgcatgtacacaattttttttttccataaagatgccccagcaatagagaggtttcctaaattatcacatgaagaggataggctaatcatgagtaatttcaaaggataagtctgaataaaatataatttaaaagtggagt

SEQ ID NO: 4325 - protein, 338 aa, Homo sapien
GRCLLLAPAPAAPVPPRRGSSAWLLEELLRPDCPEPAGLDATREGPDRNFRLSEHRQALAAAKHRGPAATPGSPDPGPGPWGEEHLAERGPRGWERGGDRCDAPGGDAARRPDPEAEAPPAGSIEAAPSSAAEPVIVSRSDPRDEKLALYLAEVEKQDKYLRQRNKYRFHIIPDGNCLYRAVSKTVYGDQSLHRELREQTVHYIADHLDHFSPLIEGDVGEFIIAAAQDGAWAGYPELLAMGQMLNVNIHLTTGGRLESPTVSTMIHYLGPEDSLRPSIWLSWLSNGHYDAVFDHSYPNPEYDNWCKQTQVQRKRDEELAKSMAISLSKMYIEQNACS

SEQ ID NO: 4326 - DNA, 768 bp, Homo sapien
tgccatttcattacctctttctccgcacccgacatagattttttttcgttaaaggtatttttattgctagtacaagatgcaggatctaggcaaataatataacaattaaatgtgcaaatctcatgaaggtaaactacctttctgttctgtaatattcacccaaatagtcaaggctcagacttgttaaactgtggagttactaaagaaggggggattttccaaattgtagaaacaagagtagtcagattttcccatccctactagctttctaggttaaattcaatgatgtgaaaacaagcatagggtagagtccatatgatattcatacaggaagaatgtccactggggaagctctttcggccctcattcaccacgtccttatcccctgtacacatcaagtcagaatgggctagcccatcagggaagcagcggtagaagaaatctgggcgtggcctccctacgatcagttttattgtgttggtaaagacgccattcagagccagggcaaggctggcagctgcaaagcaaagccattagttgaaaggatctgtctaggaggaaaggtatggtcatggcctcgttatgagagcagccgtgctgtttctgagatggatagaatccaaccaggcctgggcacaaaaataattagggtcctcagtgatcactcttttgtagccgagaacttttgtactaggccaagacatttctgaggtacaataacccagtgcatttagccacaggctgcctgccgtcgctaccttaggaccg

SEQ ID NO: 4327 - protein, 39 aa, Homo sapien
MIFIQEECPLGKLFRPSFTTSLSPVHIKSEWASPSGKQR

SEQ ID NO: 4328 - DNA, 5344 bp, Homo sapien
cgcctgggcgcggcggagggcggggagccgggcaggtcgcgcctgcgggcggcagccgaccgccgggagctgttctgatttccgacgcgcacgctaggggcccggagcagcccccggccccggcgcgccgccgacatgggcaacgcagggagcatggattcgcagcagaccgatttcagggcgcacaacgtgcctttgaagctgccgatgccagagccaggtgaactggaggagcgatttgccatcgtgctgaacgctatgaacctacctcctgacaaagccaggttactgcggcagtatgataatgagaaaaaatgggaactgatttgtgatcaggaacgattccaggtgaagaatcctccccatacatacattcaaaagctcaaaggctatctggatccagctgtaaccaggaagaaattcagacggcgtgttcaagaatctacacaagtgctaagagaactggaaatttctttaagaactaaccacattggatgggtcagagaatttctgaatgaagaaaacaaaggtcttgatgttctagtggaatatctctcatttgcacagtacgcggtaacttttgactttgaaagtgtggagagtactgtggagagctcggtggacaaatcaaagccctggagtaggtccatcgaggacctgcacagagggagcaacctgccctcacctgtgggcaacagtgtctcccgctctggaagacattctgcactgcgatataatacattgccaagcagaagaactctgaaaaattcaagattagtgagtaagaaagatgatgtgcatgtctgtatcatgtgtttacgtgccatcatgaattatcagtatggtttcaacatggtcatgtctcatccacacgctgtcaatgagattgcactaagcctgaacaacaagaatcccagaacaaaagcccttgtcttagaactgttggcagccgtttgtcttgtcagaggcgggcatgaaatcattttatcagcatttgataactttaaagaggtttgtggagaaaaacagcgctttgagaagttgatggaacatttcaggaatgaagacaataacatagattttatggtggcttctatgcagtttattaatattgtagtccattcagtagaagatatgaatttcagagttcacctgcagtatgaatttaccaaattaggcctggacgaatacttggacaagctgaaacacactgagagtgacaagcttcaagtccagatccaggcttacctggacaatgtttttgatgtaggagctctactggaagatgctgaaactaagaatgctgccttggagagggtggaagaactggaagaaaacatttctcatttatctgaaaaactgcaagacacagagaatgaagccatgtccaagattgtggaactggaaaagcaactcatgcagaggaacaaggagctggatgtcgttcgggaaatctacaaagatgcaaatactcaagttcacacattaagaaaaatggtcaaagaaaaagaagaagcaattcaaagacagtctaccctggaaaaaaagattcatgagctagagaaacaagggaccattaaaattcagaagaaaggggatggggatatcgccatactgccagttgtggcttctggcacattgtccatggggtcagaagtggtagcaggtaactctgtgggacccacaatgggggccgcttcctcaggacccttgccccctcctccaccaccactgcctccctcatcagacacacctgaaacagtgcaaaatggtccagtaacaccacctatgccaccgccgccgccgccaccccctcctccacctcctcctcccccaccgccccctccccctcctcctctcccaggccctgcatctgagactgtaccagctcctcccttagcacctccccttccctctgcacctccgctgcctggaacatcttcacccacagtggttttcaactcaggattagcagctgtgaaaattaagaagccaatcaagacgaagttcagaatgccagtgtttaactgggttgctctgaagcccaatcagatcaatggcacagtcttcaatgaaattgatgatgagcgaattctggaggatttaaatgtggatgaatttgaggaaatattcaagacaaaagcccaaggacctgccattgatctttcttcaagcaaacagaagataccacagaagggatcaaacaaagtgacattactagaagcaaacagggccaaaaatcttgccataactttaaggaaagctggaaagactgctgatgaaatatgtaaagctattcatgtatttgacttgaagacactgcctgtggactttgtggaatgcttgatgcggttcctaccaactgagaatgaagtgaaagtgcttcggctctacgagcgggaaaggaagcctctggaaaacttgtcagatgaagatcggttcatgatgcagtttagtaaaatcgagaggctcatgcagaagatgaccatcatggccttcattgggaactttgctgaaagcattcagatgctgactcctcaactacatgcgattatagcagcatctgtctctataaagtcgtcccaaaaactcaagaaaattctggagatcatcttagcccttggaaactacatgaatagcagtaaaagaggagcagtttatggatttaaacttcagagtttagatctgctcttagatacaaagtcaacagacagaaagcaaacactgttgcactatatatccaatgtggtgaaagaaaaatatcaccaagtgtccctgttttataatgagcttcattatgtggaaaaagctgctgcagtctcccttgagaatgttttgctggatgtcaaggagctccagaggggaatggacttgaccaagagagagtacaccatgcatgaccataacacgctgctgaaggagttcatcctcaacaatgaggggaagctgaagaagctgcaggatgatgccaagatcgcacaggatgcctttgatgatgttgtgaagtattttggagaaaaccccaagacaacaccaccctctgtcttctttcctgtctttgtccggtttgtgaaagcatataagcaagcagaagaggaaaatgagctgaggaaaaagcaggaacaagctctcatggaaaaactcctagagcaagaagctctgatggagcagcaggatccaaagtctccttctcataaatcaaagaggcagcagcaagagttaattgcagaattaagaagacgacaagttaaagataacagacatgtatatgagggaaaagatggtgccattgaagatattatcacagatcttagaaaccaaccatacagacgagccgatgcggtgaggagaagcgtcaggcggcgctttgatgatcagaacttgcgttctgttaatggtgccgaaataacaatgtgaacctgagactggcctgcatgaatacagggtgtgcgtgaatgaaactgcccacatgaactttatgtgctacgatttaactgcagccttgaacacacacaaaaatattcttaagggctcagatttagcaaacacggaagaattttaaaatgagctctcctttcaacccttgttaacaagtgcctaaaaatggaagtacctgttcagattaatcaaagcaataggatttgatttgattaggtatctttttacaccagtatgttatttttaaccaaaatgtaaagttcttattaaactcattacctgccattgtgattgtcccatcatggcccacctggtttcctgatgttgtaaataacatcaatgcatctgctgtgggtcctttgctgagatgtcttcgaaggaattttgttttagccatatccatcaactttgtattttacttgcaatttggaagaaggaaagtcacatgatgaaactccttttgtctataaccaggccctggcaaagtgcaaacaggatgcaactgcagtggcacaaaggtcactcaatcctttgtttccagtttcacattctactacttctgcgctagagaacgatgctctgtgagaggcattcactagtatgaatgtggggatatagtgtataagacttatttgcagtactgtgttcttcagctagaggcagctttttaaataatgcaagtgtatttattagcattaaaattaacatctcagtaatcagcattagcatttctgaggaccattattaattctgagaacagaaattggtgccttgcaaggaagtttactagctctatcaacaagcattcaaggttacatctgctagcagagtagtgttaggaacctggccttactctcctctgacaatcgcaattttttcttattttttataaattcaagaagatacacttggcatcgtgtatcgaggctaagtttttcatgcatttcccagactacttatggagaattgcagtttaagttgctgaaaagtattaacatggtattaagcttaaataatacgtaatgggactagatggcccactaagccactgttattttccttcctctctggcagggcacttgatccattccaaagtcaaaaactggactgaagctaaatttgtacttttcataatatacattctgcttctggcttatcttcttggtacatcaatatattaattgtaaagtttattgtatagtatttaaccgctgaagttcctattttatgttgtgcttatgtgaaccccttggtgaaggtcccttttccttggatgtgtagttatatgatctttttaaatgtacagatattttgctataaaatcggtgcagttttttatggtttttacacttctctttaattcccacctaagcctctgggtaatattgtaaatattgttttaaaatgcatcagcctatgctatacaatctgaatgttattttaacttatagttttttttaatatatatatttaactataaggacagtttagggaacaagttacctaccacatttcactttagtgtacctatttacagaaagattaaactgccacctgcgggcacattcccataaatgtgtactttactttaaaaagaacatgccacgattttgtctttctgtggactcaacattcacttcgattaaaaatagcaatttgaccaagttggacttccactacaaagcagctgttttccaaagttcaatgctgacatatatgtatattaaaataattgcctatttattaatctacaaatagacaacgttggcatgttcttttctgtttgtctattaatgggcctgcttcttagcaatattagaatgttttataaaagcaattcatgttacttttctggtcttttcatggcatatgagcaaataataaactatttacactactattctgt

SEQ ID NO: 4329 - protein, 1112 aa, Homo sapien
FPTRTLGARSSPRPRRAADMGNAGSMDSQQTDFRAHNVPLKLPMPEPGELEERFAIVLNAMNLPPDKARLLRQYDNEKKWELICDQERFQVKNPPHTYIQKLKGYLDPAVTRKKFRRRVQESTQVLRELEISLRTNHIGWVREFLNEENKGLDVLVEYLSFAQYAVTFDFESVESTVESSVDKSKPWSRSIEDLHRGSNLPSPVGNSVSRSGRHSALRYNTLPSRRTLKNSRLVSKKDDVHVCIMCLRAIMNYQYGFNMVMSHPHAVNEIALSLNNKNPRTKALVLELLAAVCLVRGGHEIILSAFDNFKEVCGEKQRFEKLMEHFRNEDNNIDFMVASMQFINIVVHSVEDMNFRVHLQYEFTKLGLDEYLDKLKHTESDKLQVQIQAYLDNVFDVGALLEDAETKNAALERVEELEENISHLSEKLQDTENEAMSKIVELEKQLMQRNKELDVVREIYKDANTQVHTLRKMVKEKEEAIQRQSTLEKKIHELEKQGTIKIQKKGDGDIAILPVVASGTLSMGSEVVAGNSVGPTMGAASSGPLPPPPPPLPPSSDTPETVQNGPVTPPMPPPPPPPPPPPPPPPPPPPPPPLPGPASETVPAPPLAPPLPSAPPLPGTSSPTVVFNSGLAAVKIKKPIKTKFRMPVFNWVALKPNQINGTVFNEIDDERILEDLNVDEFEEIFKTKAQGPAIDLSSSKQKIPQKGSNKVTLLEANRAKNLAITLRKAGKTADEICKAIHVFDLKTLPVDFVECLMRFLPTENEVKVLRLYERERKPLENLSDEDRFMMQFSKIERLMQKMTIMAFIGNFAESIQMLTPQLHAIIAASVSIKSSQKLKKILEIILALGNYMNSSKRGAVYGFKLQSLDLLLDTKSTDRKQTLLHYISNVVKEKYHQVSLFYNELHYVEKAAAVSLENVLLDVKELQRGMDLTKREYTMHDHNTLLKEFILNNEGKLKKLQDDAKIAQDAFDDVVKYFGENPKTTPPSVFFPVFVRFVKAYKQAEEENELRKKQEQALMEKLLEQEALMEQQDPKSPSHKSKRQQQELIAELRRRQVKDNRHVYEGKDGAIEDIITDLRNQPYRRADAVRRSVRRRFDDQNLRSVNGAEITM

SEQ ID NO: 4330 - DNA, 780 bp, Homo sapien
cgggagtggcgtgctgggcgtgcgcggctgcggtacggcgtgttggtcccagcggttcagctgaggtagggacgtgctgtaggccggaatgttaccggctgttggatctgtggatgaggaagaggatcctgcggaggaggattgtcctgaattggttcccattgagacgacgcaaagcgaggaggaggaaaagtctggcctcggcgccaagatcccagtcacaattatcaccgggtatttaggtgctgggaagacaacacttctgaactatattttgacagagcaacatagtaaaagagtagcggtcattttaaatgaatctggggaaggaagtgcgctggagaaatccttagctgtcagccaaggtggagagctctatgaagagtggctggaacttagaaacggttgcctctgctgttcagtgaagtgaggaatgtgtttactgtgtacatggtttactagaaatgtttattgattatatttccagctttaattttcttgagtaatttaactgaatttacacagtttgcttcattgtattttcaaacaaatagaaaataaacttattaggaagcattttcttaaagtgtttcttgctgtcttttctatctgctctaatgttttggtccttttattgagtttttattgcttttgatgtcagggcttatttaatctctagtgcatgaaagtctcatatgtaaaaaatgattattctgaatttaatctgtcattggtcatacttctaagtgttcaaccttataaaaaaaataaatgactatc

SEQ ID NO: 4331 - protein, 113 aa, Homo sapien
MLPAVGSVDEEEDPAEEDCPELVPIETTQSEEEEKSGLGAKIPVTIITGYLGAGKTTLLNYILTEQHSKRVAVILNESGEGSALEKSLAVSQGGELYEEWLELRNGCLCCSVK

SEQ ID NO: 4332 - DNA, 2179 bp, Homo sapien
ggggacagccagggttagatgttctgaggaggcgggagcaaccgagagagcacgtgagcatctgtcctttctacccgttcctctttatctttagtgttcagtagcagcggggatagcccggggcccggtgtatggccacggagttacagtgtccggactccatgccctgtcacaaccagcaagtaaactctgcctcaaccccaagtcccgagcagctgcgacctggcgatctgatcctggaccacgcagggggaaacagagcctccagggccaaggtgattctcctcacggggtacgcccattctagcctgccggccgagctggactctggggcctgcggcggctccagcctcaactcagagggcaacagtggtagtggtgacagtagcagctatgacgcaccagctggcaactccttcctagaggactgcgaactctcccggcagatcggggcgcagcttaagctgctgcctatgaatgatcagatacgggagctacagaccatcatccgggacaagacagccagtagaggtgacttcatgttttctgcggatcgtttgatcagacttgttgtggaagagggattgaatcagctgccatataaagaatgcatggtgaccactccaacagggtacaagtatgaaggagtgaaatttgagaagggaaattgtggggtcagcataatgagaagcggtgaggcaatggaacaaggtttacgagactgctgtcgatccatacgaattggaaagatcctgattcagagtgatgaggagacacaaagagccaaagtatattatgccaaattccccccagacatttaccggagaaaagtccttctgatgtatccaattctcagcactggaaatactgtaattgaagctgtaaaggttcttatagaacatggagttcaacccagtgttatcatcctactcagtctgttctccactcctcatggtgccaaatcaatcattcaggagtttccagagatcacaattttaactactgaagttcatcctgttgcacctacacattttggacagaaatactttggaacagactaagttatttaagtaaaataattgtcttatgtaatattacaatcatgttttgattttctatttgttttactgattcacttgagggtggcagagaaaaatgtgttaaaatgctttttagttttggaagtgggtatatttgaggttatatctcatttagttatttgtttactgttggcaccgaattcaacaatgaagtatatgcaactcttacaaaacataaattttaataatattctaatgcaaattactgaaccctcagtgcattaaaattatttcctaatttatgagcctcttagtttggaggttgcttgaagccacaaataaaactcaaatgagagtcagttctttgtcccactgtagtttgcattttgtttagtttggttttagctctactaaggtttcacatatgtggctattgccacattcctctactgttttctttctgatactggacatgctagtaacttggagaggagaataaaagaatgtctcctggaattttacattcccattaatgtcctcattcaattggcagacctaggatgtatggttaactctcaggccattatgtttttcatggcccatttcccaaactgcattgttggtaggtgccttgctaagctgtaatgcagtgaagaagatggtggggcatttttagtaattggaactgtaacattaatctacaagattgaaccggggatgtctggatgctgacaagggagagccaagtactgttaatgccatcaatcctctaggaaggaattggtggtttttctgaagtgtgggggaaagggtggtttcttgctggatttcatggccagtaagtaaatttaaatgcttcatttttaatttggatgtttctgctagagacctttgatttggaaattagttattttgcatgtttgtcaactgtatatgtatgaaaatagaaaaaaaacatgctttttgtaaaaacccctaagatttgtatatgttcatctttaggcttctgaaagggagagaaatcatattggaaatcagtgttggtgttctgaaatctgcttgtaaaactctcatctcattttacattgatattaaaacattttaacactaaaaaaaaaaaaaaaaaaaaaaaaaaaaaa

SEQ ID NO: 4333 - protein, 309 aa, Homo sapien
MATELQCPDSMPCHNQQVNSASTPSPEQLRPGDLILDHAGGNRASRAKVILLTGYAHSSLPAELDSGACGGSSLNSEGNSGSGDSSSYDAPAGNSFLEDCELSRQIGAQLKLLPMNDQIRELQTIIRDKTASRGDFMFSADRLIRLVVEEGLNQLPYKECMVTTPTGYKYEGVKFEKGNCGVSIMRSGEAMEQGLRDCCRSIRIGKILIQSDEETQRAKVYYAKFPPDIYRRKVLLMYPILSTGNTVIEAVKVLIEHGVQPSVIILLSLFSTPHGAKSIIQEFPEITILTTEVHPVAPTHFGQKYFGTD

SEQ ID NO: 4334 - DNA, 2864 bp, Homo sapien
ctcgcttctcgttctactgccccaggagcccggcgggtccgggactcccgtccgtgccggtgcgggcgccggcatgtggctgtgggaggaccagggcggcctcctgggccctttctccttcctgctgctagtgctgctgctggtgacgcggagcccggtcaatgcctgcctcctcaccggcagcctcttcgttctactgcgcgtcttcagctttgagccggtgccctcttgcagggccctgcaggtgctcaagccccgggaccgcatttctgccatcgcccaccgtggcggcagccacgacgcgcccgagaacacgctggcggccattcggcaggcagctaagaatggagcaacaggcgtggagttggacattgagtttacttctgacgggattcctgtcttaatgcacgataacacagtagataggacgactgatgggaccgggcgattgtgtgatttgacatttgaacaaattaggaagctgaatcctgcagcaaaccacagactcaggaatgatttccctgatgaaaagatccctaccctaagggaagctgttgcagagtgcctaaaccataacctcacaatcttctttgatgtcaaaggccatgcacacaaggctactgaggctctaaagaaaatgtatatggaatttcctcaactgtataataatagtgtggtctgttctttcttgccagaagttatctacaagatgagacaaacagatcgggatgtaataacagcattaactcacagaccttggagcctaagccatacaggagatgggaaaccacgctatgatactttctggaaacattttatatttgttatgatggacattttgctcgattggagcatgcataatatcttgtggtacctgtgtggaatttcagctttcctcatgcaaaaggattttgtatccccggcctacttgaagaagtggtcagctaaaggaatccaggttgttggttggactgttaatacctttgatgaaaagagttactacgaatcccatcttggttccagctatatcactgacagcatggtagaagactgcgaacctcacttctagactttcacggtgggacgaaacgggttcagaaactgccaggggcctcatacagggatatcaaaataccctttgtgctagcccaagccctggggaatcaggtgactcacacaaatgcaatagttggtcactgcatttttacctgaaccaaagctaaacccggtgttgccaccatgcaccatggcatgccagagttcaacactgttgctcttgaaaatctgggtctgaaaaaacgcacaagagcccctgccctgccctagctgaggcacacagggagacccagtgaggataagcacagattgaattgtacaatttgcagatgcagatgtaaatgcatgggacatgcatgataactcagagttgacattttaaaacttgccacacttatttcaaatatttgtactcagctatgttaacatgtactgtagacatcaaacttgtggtcatactaataaaattattaaaaggagcactaaaggaaaactgtgtgccaagcatcatatcctaaggcatacggaatttggggaagccaccatgcaatccagtgaggcttcagtgtacagcaaccaaaatggtagggaggtcttgaagccaatgagggatttatagcatcttgaatagagagctgcaaaccaccagggggcagagttgcacttttccaggctttttaggaagctctgcaacagatgtgatctgatcataggcaattagaactggaagaaacttccaaaaatatctaggtttgtcctcattttacaaatgaggaaactaaactctgtggaagggaaggggttgcctcaaaagtcacagcttagctgggcacagtggctcatgccgataatcccagcaattcagaaagctgaggcaggaggattacttgaggccagactgggcaatatagcaagaccccatctctaaaaaattaggcatggtggtgcatgcctgtattcccagctactcaggaggttgaggtgggaggatcacttgagcccagaagttcaaggttgcaatgagccatgattacaccacggcactacaaccttggtggcacagtgagaacctgactcttaaaaaaaaaaaaaaaaaaaaaaaagataactagaacttctagaacatcttgtttacagttagccagaaactatacaagtggtttaacatgcattatcttactcaatccatacaaaagtcttatggaggtgttagcactctttctactgatgaagaactgaggtacttcataaaaccacttacccaaggtgtcttgagtctggtacaactggcattcaaatctaggtcagtctgcccccagagccactacccttacccctcactgaatctgcctttatattgttgagcccatgaccccaaactgctctttccaatttgaacttccagggattttattgtgaacttacatagcaacattaaaatgaagttgaattgtttttaatggcaacgccgtctgtctcctctagcttaccgcttctcacctttcaaccccatctgtggcctttgtccaggcccacagcttagccatggcttccctcctgcatccctgccgtgggttgctggcctcacacttgcagcagctggacagtgattttagaaggccaccagtccccatagctatgtgacaatgagaagcaaacttttttgtgacagattgtattggcataggcatgatagatggggattggtacgttttgaatcagcatttgcaaaaaaattgtcttgaattttaaaataaacaacaaagatttgttcattgagtgcaaaaaaaaaaaaaaaaaaaaaaaaa

SEQ ID NO: 4335 - protein, 355 aa, Homo sapien
SLLVLLPQEPGGSGTPVRAGAGAGMWLWEDQGGLLGPFSFLLLVLLLVTRSPVNACLLTGSLFVLLRVFSFEPVPSCRALQVLKPRDRISAIAHRGGSHDAPENTLAAIRQAAKNGATGVELDIEFTSDGIPVLMHDNTVDRTTDGTGRLCDLTFEQIRKLNPAANHRLRNDFPDEKIPTLREAVAECLNHNLTIFFDVKGHAHKATEALKKMYMEFPQLYNNSVVCSFLPEVIYKMRQTDRDVITALTHRPWSLSHTGDGKPRYDTFWKHFIFVMMDILLDWSMHNILWYLCGISAFLMQKDFVSPAYLKKWSAKGIQVVGWTVNTFDEKSYYESHLGSSYITDSMVEDCEPHF

SEQ ID NO: 4336 - DNA, 4699 bp, Homo sapien
cagggctggcttttttttttttaataagatagctggtgcccaagattgttttccaccttaaggataaaacctgttaagaaagcctgaacaattacaaaaaaggaagaaaaggagacttggccaactggtgtcaggagtcttaacaaggtcatagtttgccagcccctgccctaaacaaataattcttgaatgcctactgtggtgtgtaagatatgagtaaataccagggatacacagagaacaaaagagaaaaactgctattcttgtgaaacttggaagttggaggagacttggaagatgcagaactggatgactactcattctcatgctatagccagttggaagtgaatggatcgcagcactcactgacctgtgcttttgaggacccagatgtcaacaccaccaatctggaatttgaaatatgtggggccctcgtggaggtaaagtgcctgaatttcaggaaactacaagagatatatttcatcgagacaaagaaattcttactgattggaaagagcaatatatgtgtgaaggttggagaaaagagtctaacctgcaaaaaaatagacctaaccactatagttaaacctgaggctccttttgacctgagtgtcatctatcgggaaggagccaatgactttgtggtgacatttaatacatcacacttgcaaaagaagtatgtaaaagttttaatgcacgatgtagcttaccgccaggaaaaggatgaaaacaaatggacgcatgtgaatttatccagcacaaagctgacactcctgcagagaaagctccaaccggcagcaatgtatgagattaaagttcgatccatccctgatcactattttaaaggcttctggagtgaatggagtccaagttattacttcagaactccagagatcaataatagctcaggggagatggatcctatcttactaaccatcagcattttgagttttttctctgtcgctctgttggtcatcttggcctgtgtgttatggaaaaaaaggattaagcctatcgtatggcccagtctccccgatcataagaagactctggaacatctttgtaagaaaccaagaaaaaatttaaatgtgagtttcaatcctgaaagtttcctggactgccagattcatagggtggatgacattcaagctagagatgaagtggaaggttttctgcaagatacgtttcctcagcaactagaagaatctgagaagcagaggcttggaggggatgtgcagagccccaactgcccatctgaggatgtagtcatcactccagaaagctttggaagagattcatccctcacatgcctggctgggaatgtcagtgcatgtgacgcccctattctctcctcttccaggtccctagactgcagggagagtggcaagaatgggcctcatgtgtaccaggacctcctgcttagccttgggactacaaacagcacgctgccccctccattttctctccaatctggaatcctgacattgaacccagttgctcagggtcagcccattcttacttccctgggatcaaatcaagaagaagcatatgtcaccatgtccagcttctaccaaaaccagtgaagtgtaagaaacccagactgaacttaccgtgagcgacaaagatgatttaaaagggaagtctagagttcctagtctccctcacagcacagagaagacaaaattagcaaaaccccactacacagtctgcaagattctgaaacattgctttgaccactcttcctgagttcagtggcactcaacatgagtcaagagcatcctgcttctaccatgtggatttggtcacaaggtttaaggtgacccaatgattcagctatttaaaaaaaaaagaggaaagaatgaaagagtaaaggaaatgattgaggagtgaggaaggcaggaagagagcatgagaggaaagacagacaggaaaataaaaaatgatagttgccattattaggatttaatatatatccagtgctttgcaagtgctctgcgcaccttgtctcactccatcctgacaataatcctgggaggtgtgtgcaattactacgactactctcttttttatagatcattaaattcagaactaaggagttaagtaacttgtccaagttgttcacacagtgaagggaggggccaagatatgatggctgggagtctaattgcagttccctgagccatgtgcctttctcttcactgaggactgccccattcttgagtgccaaacgtcactagtaacagggtgtgcctagataatttatgatccaaactgagtcagtttggaaagtgaaagggaaacttacatataatccctccgggacaatgagcaaaaactaggactgtccccagacaaatgtgaacatacatatcatcacttaaattaaaatggctatgagaaagaaagagggggagaaacagtcttgcgggtgtgaagtcccatgaccagccatgtcaaaagaaggtaaagaagtcaagaaaaagccatgaagcccatttgatttcatttttctgaaaataggctcaagagggaataaattagaaactcacaatttctcttgtttgttaccaagacagtgattctcttgctgctaccacccaactgcatccgtccatgatctcagaggaaactgtcgctgaccctggacatgggtacgtttgacgagtgagaggaggcatgacccctcccatgtgtatagacactaccccaacctaaattcatccctaaattgtcccaagttctccagcaatagaggctgccacaaacttcagggagaaagagttacaagtacatgcaatgagtgaactgactgtggctacattcttgaagatatacggaagagacgtattattaatgcttgacatatatcatcttgcctttcttggtctagactgacttctaatgactaactcaaagtcaaggcaactgagtaatgtcagctcagcaaagtgcagcaaacccatctcccacaggcctccaaaccctggctgttcacagaaccacaaagggcagatgctgcacagaaaactagagaaggggtcataggttcatggttttgtttgagatttgttgctactgtttttctgttttgaattttcttctttgttctgtttttactttatttagggggactaggtgtttctgatattttagttttcttgtttgttttgttttgtgttgtctgtgaatggggttttaactgtggatgaatggaccttatctgttggcttaaaggactggtaaaatcagaccatcttattcttcaggtgaatgttttactttccaaagtgctctcctctgcaccagcagtaataaatacaatgccataatcccttaggtttgcctagtgcttttgcaattttcaaagcacttccataagcattccttccacctccttgataggcatttatggaaagcctgctacatgtcaatcatactgttaggcacaggggacctaaagacacataaaaggatggcattctgcctcataaattgcaaaacctaatgaaagtgactgcttggtaaacaaattattattatattataaaatgctataaaagagccatattgaaagtgccctgttggagacagggcaaatgccacaaaaatgatgtaaatttacatggaggaaaagtagaatctgcctggtttgtaggcagcagaagacatttttcatcagtgggcaggtgttctttaccttttgtagaaatgggagtcaagtctcaaataggaggctccacaaaatctcatgccaggtctctgataccttattcacagaagttctttgaagtatttattgttattttctttgacttatgggaaaactgggacacaggaagacaggtaaattacccaacctcacacgttaagtcagaactgggagccataattttgtatccctggtataaatagacaatctcttgaagaaatgaagagatgaccatagaaaaacatcgagatatctccagctctaaaatcctttgtttcaatgttgtttggcatatgttatctttggaatttagtgtctgagcctctgtctgttactgtagtatttaaaatgcatgtattataatcatataatcataactgctgttaattcttgattatatacctagggacaatgtgtaatgtaagattactaattggttctgcccaatctcctttcagattttattaggaaaaaaaaataaacctcctgatcggagacaatgtattaatcagaagtgtaaactgccagttctatatagcatgaaatgaaaagacagctaatttggtccaacaaacatgactgggtctagggcacccaggctgattcagctgatttcctaccagcctttgcctcttccttcaatgtggtttccatgggaatttgcttcagaaaagccaagtatgggctgttcagaggtgcacacctgcattttcttagctcttctagaggggctaagagacttggtacgggccaggaagaatatgtggcagagctcctggaaatgatgcagattaggtggcatttttgtcagctctgtggtttattgttgggactattctttaaaatatccattgttcactacagtgaagatctctgatttaaccgtgtactatccacatgcattacaaacatttcgcagagctgcttagtatataagcgtacaatgtatgtaataaccatctcatatttaattaaatggtatagaagaac

SEQ ID NO: 4337 - protein, 296 aa, Homo sapien [sequence omitted]

SEQ ID NO: 4338 - DNA, 3699 bp, Homo sapien
  Unsure 116-133: Unknown base
cggcgcgtgggtgagccaatgtgcctggccattcctgtgattttttagaatttttcacttttcatataaagttgcattttatcatgaggaaaatgttttggctgaaaaacatatgnnnnnnnnnnnnnnnnnntcagttttcactatttttccagcttgcctagggaaacgtcctcccctgagcaaagtgggatgtgcatggctcttttttgtgattaagcaggcatcaaatgggcagttttcattttcactgacacagaaacatgtggctgaagcaggaataaaatcctgcctactgacttctgtctccattcttgctccaggtaaaatcagagaacctccccttcttggccctttaattcccccaggcagaggcggctccagctcctgttaagggccccagttttactcatgctacctgaccttagttttagtactttcaaatgtgatttgggtaaaaactattttgcaggcaaaagtgttaattttttataaatatgtataataaaaaagctataaaagtttttccttttcttgtatttttcaaatactccccaagacacaatccttgaaggtgaactaggtggcacttgattatgctaattgtgggagctactgaactatactgattaaattaaatgcttgcaggttcctgggtaattttcctttgtgaataacctggcgctacctgaatttttctctaacaaacatctccaatgagggtaaacaatgatcttgattctaatttatatgaggttaaaaaccttcagatttcgtattttgaattgttctccctagtttcctcagtggttacccccttttagtcagtaaccatctctgttcagaattcagtctttggcttttgaagaaatgggcacagagccaaaggacccatttcacagttcccttggaatatatttcccattgttggactgaggcaaacaaaaccaactgtgcaaatcacaagcaaaagagacttctgtccgtagttgcgagtgccatcagtgtgagcttaccagctacaaaaatctgtcatggactggggaacagtatgattccttattgaaactttcatcctcatcggctggcttgtcagcgttctgaagttaatatccatgctgcctgaaacaaatgttatgtttaactagcacttacttaacttttaaaattgcttaattctcctttcagatgcatgcactaagtcttctctgagcctgcagcaatattttagagggacctcttctaagtcagagccttgacattctactccaaaaggaagtccaaattagagcccataggctttttcttaaaagctgttaaggagtagtaagaaagttaccactctaaggaaaacatgaaactatctgaaagtcttctggttcctaactggatacagattagattattttaaatgagaaaaaagtgcaccgtagttacccgatcaagattggactgcctgtgtccctggcatgaattaaagaacctccatagttgcttgttcccttctgaaggtgtttcctatggcccacgagaattataaagcaatcactttttaagtctatcagtcaaccttaatagctctcaagagtttcgattatcaagctttaaagtgataacatatcaagatgactattaaaaaataaacatctctgaaagtgtcctttcctccataaggctttaaacaatttgcaaattcttaattgggagtatgtcccaatcattctattaaactatttacagctctacctacttctagattcagcaaacagagctactagttagagtattttgagagccaaaatagtaagagacttctgtaatggttgagatttctgcactgaccttaattagggtaccgccatagggctaccaaagtttttagtgagggctggggaggtggagcataagtaacattttttttctgcagaaggtgatggctttgtagaacactataaaatttttcaggaaaacatacagcaaattttcttatccagtgggaacagcctatttgacaaggaatgatatacaagtttgattcacctttgagcactcttatagagtttacagaagaggcgtaactggttacaaaacaaaagttacgccttcactatccagttcttaaagtttatccacatcctacaaatcttatgttcatgtaggtcaggttaaagtaagctccaaacttatggccttcagaagcatctcctgtttaacacacctgaaattactctaacttaatacatttgtattctctaagaaataatgctgactgctgtcaccacagcatcactgatctctcagtggctgttaaaatataaacaagtggaaaaaaagtatacaagttgatagcagctgttcatgtattcttgttttgctaatacctgtgtagagaaagacagtttcacatgcagatcaccatacatttttgcttaaaggttacactgggtaaactgtttgtttatcacattacatctgggtgagattttgcatgtgaccaagaggaagaaatcattcagtcccggaaatagcaactgctatgtaaaaccacatccttgactagtacttcatctttccacagtcatccatctgctaatcaggtgaaatatcagctcagcagaacaaagcaagttatacacaaatttcccccacattcacactgatgccgtacttagtaattctggttctaccattcccttttgcactttttgcaagtcaaattcatgtggaaaaatgttctgtttgtagaactcatagtattcacttatagtgctcatgtcaggaatggcaagtgagtaagagcccctgataatctgcttttgttagaacgtaatgcaaagataataaaacatgtccacttcttttctagttctaatcagtttttagacatcaagatttatttactttgcatgagatttgtttcctattatttgaatatgtgctatacacttgaattagaaaaacctgcttgaatgtattgtcagttattaaagcacatgtgactaagtttgcatttgtcagtattgttctactgtttgtactgaaagtctcattttaaaattgctacttaacactgtactataccttgtaattttttagattctccacttgtattctttaaatgtttccagatgcctttagttttagctgctgtaaaatagctactttgcgttatttgatatagaattgttttttaaaaactccatttatttatacagagacatttataatattttacaaacattcttatattctgaataaatatttctaattccacagtgtaccttaactgtgttatttaaagggtaaggctatccttctgtagaactgtgatatacatgcaggcaaatatcaaatccatgatgcttacatgaaatcaagagccctagtcaaagcaggggtctagaagtaagactattattagatcaaaatggccaaagaaccctcatttatagcccatttttagttggctttttaaaatttggcataaataggaagttatctattgaagagagtcttttcccctcttaaagaaagatcattaaaatggaatgtaatcaaggactggaaatgcaaggaagtcatataggacaacaagatggcaagcagctttgcaacacatctgttagagaaagattacaatgttctcaagttttcactatggaagcaaagtaactttgacagtaagtataacaccttagt

SEQ ID NO: 4339 - protein, 34 aa, Homo sapien
  Unsure 116-133: Unknown amino acid
MASSFATHLLEKDYNVLKFSLWKQSNFDSKYNTL

SEQ ID NO: 4340 - DNA, 1088 bp, Homo sapien
tgagactgtgtctcaaaaacaaaaaagaaaaagagaggaaagaaagaaaacattatatgcctgggattacaagcatgagcccagcgcctggctgtatctttcattttacccaagtcactttacccaagtaagtaattaggggaaagcctgagtcttgtaccacctgttcatttggggaactgtgggaaacggagccaacggacctaagtgccctttgacagtgagtttcataccatttcagtagtgtatttctttcttaatctgaataaaccagaatgatactctcagcacagaagaataaagggagcgagtcattaacgttttctttttaaacctttatgatgacttccttatgaattactgaacgaacactggaatgggactcaggtatcctgaggacatctctcaactctggccttagttccccctctgtaaaattagggtgccaactaaatgatctacaaggtcccttccagcgccgccattctgtaattacatcatgtgtaactgtattaaacatacacaagtgactgccaggcatgggaatgtaacttccgagtaaatgctttggtttgttcagaatacactatgaacttctttccaaagacgggttgtggtaaatagtggatattttgattataagaaatagagtttccttgaagctttagctggagatacagcaatagtgtggtgttcctacaaatatcacagtgtattcaaacatatttttctatcaaaaatcatttttgtaaaagctgtgtgtttttatccaacttgtgataataaatgttctttattttagaataaaaactggcctttttgtatgtattgaatacagttaatagaatttataattttaattaacaatttgctctttcatgtgtgaatatgtgatagtctagtcctttcaaaagattgagacggactggctttcattgtttgaaggctggtgagagaaggggttacctgctgcacaccagtggggagtgacatactcctaacacatgccagaaacaaaaagtttggtcataaaacagttctaataagaaatctgcctggcctgctcacacctgtaaccccagcacttt

SEQ ID NO: 4341 - protein, 45 aa, Homo sapien
ETVSQKQKRKREERKKTLYAWDYKHEPSAWLYLSFYPSHFTQVSN

SEQ ID NO: 4342 - DNA, 1098 bp, Homo sapien
ctcctgctcagcatggctgctttagggactgttctcttcacaggtgtccggaggctgcactgcagcgtagccgcttgggcgggcggccagtggcgactacagcagggactggctgccaacccctccggctacgggccccttaccgagctcccagactggtcatatgcggatggccgccctgctcccccaatgaaaggccagcttcgaagaaaagctgaaagggagacgtttgcaagacgagttgtactgctgtcacaggaaatggacgctggattacaagcatggcagctcaggcagcagaagttgcaggaagaacaaaggaagcaggaaaatgctcttaaacccaaaggggcttcactgaagagcccacttccaagtcaataaaaagcaactcctgcctcccttcctcaccctgtctctggatttcttttctatcacctagatgcttcatccagccagaagatagccttcacgttccccatctgtcttcagagaaaaagagctgggacaccaagaacaagctgttagatcactgcctgggaggcttggcttagtactctcatctctggttccattccagttcagctaagtcttgctttaaaatttttacctcctagctgggtgcggtggctcacgcctgtaatcccagcactttgggaggctgaggcgggcagatcacaagatcaggagttcgagaccagcctggccaacccagcctggtcaacatggtgaaaccctgtccctactaaagatacaaacaattagccgggcgtggtggggtgcgcttgtaatcccagctactcaggaggctgaggcaggagaatcgcttaaactcgggaggtagaggttgcagtgagccaaggtcacaccattgcactccaacctgggcgacagggcgagactccgtctcaaaaaaaaaaaaaaatttacctcctttgcaggccataggactagcccaactatgagaaatagctgttctgtgaacgtgaaaaggggacagcagttttcccagttttggccaggcagtcaagcctttaacagctcatgcacagtttaggccatgtacagctggcatctaataaatgttttcatgaaaaa

SEQ ID NO: 4343 - DNA, 9162 bp, Homo sapien
tcgtatattgtgtggaagaattcggctcgagtggcagcggcggtagcagtggcaacggcagcaagaggaccggccgccccatagacccccccgcgcaccacccccgccgcttcctctgcttgggtgcccccccggtctgacttcccttttctcccacctttcccggcaccgcgggaaaagcagcgcagggcagagcaggcagggagggcggccggagcccggacacgggagcctcccagtcagttcaagacccgacatgagggaaaagggacgtaggaagaagggcaggacctgggcggaggccgccaagacggtcttagaaaaataccccaatacacccatgagtcataaagaaattcttcaagttatccagagagaaggactaaaagaaatcagaagtgggacttctcctcttgcatgcctgaatgcaatgcttcacacaaactccagaggtgaagagggcatcttctataaggttccaggtagaatgggagtatatactttgaagaaagatgtgccggatggggtgaaagagctgtcagaaggttcagaagaaagcagtgatggtcagtcagattcccagagttctgagaacagcagcagcagcagtgatggtggcagcaacaaggagggaaaaaagagcaggtggaaaaggaaagtatcgtcgtcctccccgcagtcaggctgcccatcacccaccattccagcaggtaaagtcatttctccatcacagaagcacagccaagaaggcactaaagcaggcgctaaagcagcaacagcagaagaagcagcagcagcaatgcaggccaagcatatccatctcctccaaccagcatctctcactaaagactgtcaaagcagccagtgactctgtacctgccaaacctgcaacatgggaaggaaagcaatctgatggacagacaggcagccctcaaaactcaaactccagcttttcttcctcagttaaagtggaaaatactttactaggcttggggaagaagtcattccagagatctgagagactccataccagacaaatgaaaagaactaaatgtgctgacattgacgttgagacaccggactccattctggttaatacaaatctgcgagcactgatcaacaagcacacattttcagtccttcctggagattgccagcaacgactgcttttactactcccagaggtagatcgacaggttggtccagatggtttaatgaagttaaatggctcagcccttaacaatgaattcttcacttcagcagcccaaggctggaaggaaagactctcagaaggtgagtttacacctgagatgcaggtgagaattcgacaagagattgagaaggagaaaaaagtggagccatggaaagaacaattctttgaaagctactatgggcagagttctggcctgagccttgaagattctaagaaattgacagcttctcccagtgatcccaaagtaaagaaaaccccagctgaacaaccaaaatccatgcctgtgtcagaggcctctcttatcagaatagttccagtagtctcccagtcagagtgtaaagaagaagcattgcaaatgtcatcaccaggcagaaaagaagagtgtgaaagccaaggtgaagtgcagccgaacttctccacatcttcagagcccctgctttcctcagctctcaatacacatgagcttagcagcattcttcccatcaagtgcccaaaggatgaggatctcttggagcagaagccagtcacctctgctgaacaggaatctgagaagaaccatctcaccacagcttctaattataacaaaagtgaaagccaagaatctttagttacatcgccaagcaaacccaagagtcctggggttgaaaaaccaatagtgaagcccacagcaggagcgggtccacaggagactaatatgaaagaacctctagcaactcttgttgatcagagcccagaaagcctcaagaggaagtcttccctcacccaagaagaggcccctgtgagctgggagaagaggccacgtgtcactgagaatcgccagcaccagcagccatttcaggtctcaccacagccctttctcaatagaggggacagaatccaggtgcgaaaagtaccacctctcaagatcccggtctccagaatctcccccatgccgtttcatccatcgcaggtctctcccagggctcgttttccagtctccatcactagtcctaacagaacaggagccagaactcttgcagacatcaaagcaaaagcccaactggtcaaagcacagagggcagcagctgccgctgccggccgcagctgctgcagccgcctcagttggagggaccattccaggacctggcccagggggtggacaaggtccaggagagggtggtgaagggcagactgctagaggaggcagtccaggctcagacagagtcagtgaaactggaaagggccccacactggaactggcaggaactggaagcaggggaggtacgagagagcttttaccctgtggtccagagactcagccccagtctgagaccaagaccaccccaagccaggcacagcctcatagtgtctctggagcacaactacagcaaacccccccagtgcctccaacacctgccgtcagtggagcatgcacaagtgtcccatcaccagcccacatagagaaattggataatgaaaaactgaaccccaccagagcaacagccacagtggcctctgtcagccatccacaagggcccagtagttgcagacaggagaaagcaccttctccaacaggtcctgctctaatctcaggtgcctcacctgttcattgtgcagctgatggcacagttgagctcaaagcaggtcctagtaagaatatacctaacccttcagcctcatcaaagacagatgctagtgtgccagtggctgtaactccctcccctttaacatctttattgaccacagccactttagaaaagcttcctgtaccccaggtcagtgcaactacagcacctgctggatcagctccaccctcgagcactttgccagcagcttctagccttaaaaccccaggaacttctttaaacatgaatggacccactttaagaccaacctctagtatccctgctaataatcctttagtgactcagctgcttcaaggcaaagatgttcccatggagcaaattctgcctaaacctctcaccaaagttgaaatgaaaacggttccactgactgcaaaagaggaaagggggatgggagcgctcatagctaccaacacaacagaaaatagcaccagagaggaagttaatgagagacagtcccatccagctacgcagcagcagctgggcaaaaccttgcaaagtaagcagctcccccaggttccaaggccccttcagctcttttcagctaaggagctgagggactccagcattgacacacaccaataccacgaaggactaagtaaagcaacccaagatcagatccttcagactctcattcagagggttcggaggcagaatcttctctcagttgtgccgccctcacagttcaacttcgctcactcaggtttccagctggaagacatctccacaagccagaggttcatgctgggttttgctggcagaaggacatccaaacctgcaatggcagggcactacttactgaatatttctacctacggccggggctcagagagctttaggaggacccattctgtaaaccctgaagatcgtttttgtctaagcagccccactgaagccttgaaaatgggatatacagactgtaaaaatgcaacaggagagagtagcagcagcaaagaagatgacactgatgaggaaagtactggtgatgagcaggaatctgtcacagtgaaagaggagccccaggtttcccagagtgctggcaagggtgacacaagttcaggacctcacagcagggaaactctatctaccagtgattgcttagctagcaagaatgtgaaggctgagataccattgaatgagcaaaccactttaagtaaggagaattacctgttcactagaggccaaacatttgatgaaaagaccctagccagagatttaattcaggcagcacagaagcagatggctcatgcagtgagaggtaaggcaatccgtagcagccccgagcttttcagttctactgttcttcctctgcctgcagacagccccacccaccagcccctactccttccacccctgcaaaccccgaagttgtatggaagccccacccagatagggccaagctatagaggcatgatcaatgtctccacctcatctgacatggaccataactctgctgtaccaggtagccaggtatctagcaatgtaggtgatgtcatgtcattttcagtgactgtcactaccatccctgctagccaagctatgaatcccagcagccatggccagaccattcctgttcaggcgttctccgaagagaacagcatagagggcacgccttcgaaatgttactgccgcttgaaagccatgatcatgtgcaaaggctgtggcgctttctgccatgatgattgcatcggcccctccaaactgtgcgtctcctgccttgtcgttcggtaatgagactagaaagagatacactgtaaaggagggggaagggaagggttgaccagttgggttttttgcgtccttttggaatcacagaaataaacaagtaggtttcagttgtcttcagagacaaatgttacttaatcaggaatacaaagtacagattttttacattttagaggaagagcaccttgtatagtaagtctaagtcaagcaagactttgtgaatttgtgacaagtttgcacttacaaaatcatgtaaatatgtcacattttgtttaacattatttttccaagtgtttaggtaataatgtattactttgaattcagattaatgttctactacttgtgactgagaaaagtttaatgccggcatggtaaaaggaagctgtctcccttctgacatttcctaggaagctaggaaaaggaaagtgaaggaatggtctaaagaaatgaccattcacactgattttgtctggacagtctggccgcaggttattcatagattattcagcctttgcaggacttggattcagggttttactcagtccctttaccttaggtggaatcttcttaaattgaaatttttggtaaggaattcatttcacaggtagtgtttcagactctgaaagccctgacttggttcttggcttctactgtactagttactagttactggtactgttgccaagcaatctgcttggaatttgtggatccctgctgttccctaatcccaccccctgccctgagacagtgaatgtagtccgtgaagggagtgcctctctgggaccccctgtgttgttacaggctgtgcagtgcaacaattccagcaaaaataccctatccccgcacttagtcattcgtggtaactaacaattttgaaatactcatataaaatgaacaggaaagtgttagtgattgggtgatttgagctacatcttgttgagcaaggggagtgaaaccacagaaactgttaaattgaacgtaaataactttggaaaacagttttgacactagaacaaggtcgcttctcttttcctcttctctcccaacctgttaacctagtgctagatagtcagctgctgttgcaggtagaaaagctcaccaatgccacatttgttcattctgttcaacctgttttgacctcccaggcatctgaacaggatgacatcatcttattatatcttactttacacatacgtgtatgtacacacacacacacaatacaagacatttttcctgttttagaaaatatagcccttgtttggattactgctgtctgagcactagaaatttctaatggaaagaggcctctgaatggctaagggaacatctggaaaggaaggaaaatgagccctaaaggttttttggttgcttgtttttgtttctttttctttcttgtttccttttttgtttttaaatccttctctagtgactgaagaaattgtgagtacataatatttaggtcatggttaaggaacattaaaataaacctgcagtttaacagaattttgtattaaatgggggagtgtcaatttgcatcatttgcatattgatttcaagtctcctaatttggaatgggtaaagtacaaatgttaatgcaacatagtacagttgtatttgtccttcatattcaggatgtgatatttacaaaatgcagaacagtttaaacttgttaagtcacattccagattaggagaaaatgggcaataatcatctctgttttgcccccattctactacccaccactgcccaccccacccccacatcacacactcttcgatgctttcccacagcccctgctccgctcctctccgtaagaaactcacttcactgtttttcacttttcacttctggcttttttgtggcccaaggccaatataggattaatatctgtgttccagcttcagccagaacgatatgtctgtccatctttctcctttcttccagcacacacagctaagagataagaaggctgcaaggattggggataaggagtatattttcaagccaagaaccagtagaaaacagaaataatggtgctcccaaatattcagtaccttgggcaatccaggaagggtttaaagagacctgttgctgcatagaactctccctgccctaccccttaactccaccttagtgccagggccgagggctggtctgcatgctggaagaggttgagagttttggaattgattccatgctaaatgtcagttaccagtttggattgatgaaagtgatttttctgctttacctttttcctgtcagaaaggttttcctctgtgctacccttaacttagggatgaacagactataactaggaaaggaggaaaggtatcagggatttttaagtccgtttagagagcaaaccatattgtgcctcttcatcttgacccaggctcttatagataggtcctaaacattgctgttcactagattatcttaacaaataatactcagctaaatatttgcatttaggaatactcctaaaacagatattgccaactagatacactgcctcaatcttgaccagacaagagaacagttaagttctctcagttgggtagtaacttgaataccagtctatttatcagttggtttcaacacagaggtttcaagtggaaagccattcatcttaaaagctgaacagaaaaattaaaaaaaaaaaaaacacattacaatctggccttttagaaaatgaagcagtagaaacaaaacctttattagtatggtattccagcagcacctttaaagcaatctttaccttagttttttgagttgttttacctttcatcccaatctgaaaagttttaataaatgctgagcttattcttagggtatgacctggcattatttccagtgactagtcaggcattatgcctgatgcatacgcctcccgtgcacccctatctagccttcagatgtcctccactgcaggtcaccccaggagatagcatcaataaatagtctcagtcttgtttataaagattctaagttgtctagtaaataagtctccctgaatcttaaataattttggagaattagaattctccatcctattaaacagaaagtaaagccaaatagcctggagttgtttgtcctacttgttccataacccctatgctcaagatactgaagctatctgtggtatttcatgtaacatttctaagaataagagctggcaaatgggaaacttggggtggagagagcatacttattgggctgtgaaggcatacggatgtacatgttttagagcttatctcagatttaaatagccaaaggaagacctcattgccttccaggtgaaggtgcaaagtcatacatattaatgacctgacagttaacattctgttgtttattattgcctttctccaccttagagagccataaataactctctggtgaagtgatttgctataatgggggtgaggagtggggagacttctctggtcattacactgctatttatttctagaactcactatcagtgagcagtgccagagtgttttctctttgacctagaggtttcacatcatagcaaggagggaaaagtctccccatctccttacaactgtgtgctaagtaagtaacttggccaagggtagttttcagctcaatttatagaatagtccaaagagactttgagaaacatggtgataggcaggggcctttcctaccatgtttcaatacctacaaacctattgaaagagaacagtaggtaaaacatttcctaaagttgaagcaatagcttcgtagattcttggttactttattttttttaatgctttacatttgatacaactattgaagatcaattttaaaaatagctttccagtaatatattttaagtaatatatattttaatatctgtaaaaagtgacagtggaagactttgaatttctcatatatggtatgtttgatgtaggacctcactgttaaggcacaaattatttcaaaggaagttactctaaagacactcagattatttcagaaaaatgcaataaggggaatagttttggggtttattttttattttaaaagaaaattgacttatttaccacaagctatttttttcccttctggctgtaaggtttgtacagactggtttggtaaatgctaaacttttgtgtcttttgcctttttaaaggaattgttaacattggaattgagggtatgtacagagaagttggtgtcaacaccatttaaaaagtcatattttttcacaaatatagaaaatcattttacataagaattttaagtatttgcaataaatatatgtatatagattgtatgtattcctatattcttatttttcattttattattaagtaaaagatcattaaaagtgaaaataaaaaccttggagttttttggtgaatcttgaggtttaacatacatctgagagtggcgtgggtaagagtcctcagttactgccttatactcctatgggatggttcccacagattgtatggaagagagtaaaatgaggaacttggtgataaatcagggtagtgtatttcttttggaatttaagtaaaactgattatgattttccttatctgtctatatccatgttctctctcataatctgttccgtgctcataacct

SEQ ID NO: 4344 - protein, 1334 aa, Homo sapien
MVSQIPRVLRTAAAAVMVAATRREKRAGGKGKYRRPPRSQAAHHPPFQQVKSFLHHRSTAKKALKQALKQQQQKKQQQQCRPSISISSNQHLSLKTVKAASDSVPAKPATWEGKQSDGQTGSPQNSNSSFSSSVKVENTLLGLGKKSFQRSERLHTRQMKRTKCADIDVETPDSILVNTNLRALINKHTFSVLPGDCQQRLLLLLPEVDRQVGPDGLMKLNGSALNNEFFTSAAQGWKERLSEGEFTPEMQVRIRQEIEKEKKVEPWKEQFFESYYGQSSGLSLEDSKKLTASPSDPKVKKTPAEQPKSMPVSEASLIRIVPVVSQSECKEEALQMSSPGRKEECESQGEVQPNFSTSSEPLLSSALNTHELSSILPIKCPKDEDLLEQKPVTSAEQESEKNHLTTASNYNKSESQESLVTSPSKPKSPGVEKPIVKPTAGAGPQETNMKEPLATLVDQSPESLKRKSSLTQEEAPVSAGRRGHVSLRIASTSSHFRSHHSPFSIEGTESRCEKYHLSRSRSPESPPCRFIHRRSLPGLVFQSPSLVLTEQEPELLQTSKQKPNWSKHRGQQLPLPAAAAAAASVGGTIPGPGPGGGQGPGEGGEGQTARGGSPGSDRVSETGKGPTLELAGTGSRGGTRELLPCGPETQPQSETKTTPSQAQPHSVSGAQLQQTPPVPPTPAVSGACTSVPSPAHIEKLDNEKLNPTRATATVASVSHPQGPSSCRQEKAPSPTGPALISGASPVHCAADGTVELKAGPSKNIPNPSASSKTDASVPVAVTPSPLTSLLTTATLEKLPVPQVSATTAPAGSAPPSSTLPAASSLKTPGTSLNMNGPTLRPTSSIPANNPLVTQLLQGKDVPMEQILPKPLTKVEMKTVPLTAKEERGMGALIATNTTENSTREEVNERQSHPATQQQLGKTLQSKQLPQVPRPLQLFSAKELRDSSIDTHQYHEGLSKATQDQILQTLIQRVRRQNLLSVVPPSQFNFAHSGFQLEDISTSQRFMLGFAGRRTSKPAMAGHYLLNISTYGRGSESFRRTHSVNPEDRFCLSSPTEALKMGYTDCKNATGESSSSKEDDTDEESTGDEQESVTVKEEPQVSQSAGKGDTSSGPHSRETLSTSDCLASKNVKAEIPLNEQTTLSKENYLFTRGQTFDEKTLARDLIQAAQKQMAHAVRGKAIRSSPELFSSTVLPLPADSPTHQPLLLPPLQTPKLYGSPTQIGPSYRGMINVSTSSDMDHNSAVPGSQVSSNVGDVMSFSVTVTTIPASQAMNPSSHGQTIPVQAFSEENSIEGTPSKCYCRLKAMIMCKGCGAFCHDDCIGPSKLCVSCLVVR

SEQ ID NO: 4345 - DNA, 2861 bp, Homo sapien
gttgctgctgctcggcctggcccgcggcgccgcgggagcgcagggccccgacggtttagacgtctgtgccacttgccatgaacatgccacatgccagcaaagagaagggaagaagatctgtatttgcaactatggatttgtagggaacgggaggactcagtgtgttgataaaaatgagtgccagtttggagccactcttgtctgtgggaaccacacatcttgccacaacacccccgggggcttctattgcatttgcctggaaggatatcgagccacaaacaacaacaagacattcattcccaacgatggcaccttttgtacagacatagatgagtgtgaagcttctggcctgtgcaggcatggagggcgatgcgtgaacactcatgggagctttgaatgctactgtatggatggatacttgccaaggaatggacctgaacctttccacccgaccaccgatgccacatcatgcacagaaatagactgtggtacccctcctgaggttccagatggctatatcataggaaattatacgtctagtctgggcagccaggttcgttatgcttgcagagaaggattcttcagtgttccagaagatacagtttcaagctgcacaggcctgggcacatgggagtccccaaaattacattgccaagagatcaactgtggcaaccctccagaaatgcggcacgccatcttggtaggaaatcacagctccaggctgggcggtgtggctcgctatgtctgtcaagagggctttgagagccctggaggaaagatcacttctgtttgcacagagaaaggcacctggagagaaagtactttaacatgcacagaaattctgacaaagattaatgatgtatcactgtttaatgatacctgtgtgagatggcaaataaactcaagaagaataaaccccaagatctcatatgtgatatccataaaaggacaacggttggaccctatggaatcagttcgtgaggagacagtcaacttgaccacagacagcaggaccccagaagtgtgcctagccctgtacccaggcaccaactacaccgtgaacatctccacagcacctcccaggcgctcgatgccagccgtcatcggtttccagacagctgaagttgatctcttagaagatgatggaagtttcaatatttcaatatttaatgaaacttgtttgaaattgaacaggcgttctaggaaagttggatcagaacacatgtaccaatttaccgttctgggtcagaggtggtatctggctaacttttctcatgcaacatcgtttaacttcacaacgagggaacaagtgcctgtagtgtgtttggatctgtaccctacgactgattatacggtgaatgtgaccctgctgagatctcctaagcggcactcagtgcaaataacaatagcaactcccccagcagtaaaacagaccatcagtaacatttcaggatttaatgaaacctgcttgagatggagaagcatcaagacagctgatatggaggagatgtatttattccacatttggggccagagatggtatcagaaggaatttgcccaggaaatgacctttaatatcagtagcagcagccgagatcccgaggtgtgcttggacctacgtccgggtaccaactacaatgtcagtctccgggctctgtcttcggaacttcctgtggtcatctccctgacaacccagataacagagcctcccctcccggaagtagaattttttacggtgcacagaggacctctaccacgcctcagactgaggaaagccaaggagaaaaatggaccaatcagttcatatcaggtgttagtgcttcccctggccctccaaagcacattttcttgtgattctgaaggcgcttcctccttctttagcaacgcctctgatgctgatggatacgtggctgcagaactactggccaaagatgttccagatgatgccatggagatacctataggagacaggctgtactatggggaatattataatgcacccttgaaaagagggagtgattactgcattatattacgaatcacaagtgaatggaataagattcgtcactcatgctgctgcagatggcgggtgttggactgggttccctggctgttgtgatcattcttacattcctctccttctcagcggtgtgatggcagatggacactgagtggggaggatgcactgctgctgggcaggtgttctggcagcttctcaggtgcccgcacagaggctccgtgtgacttccgtccagggagcatgtgggcctgcaactttctccattcccagctgggccccattcctggatttaagatggtggctatccctgaggagtcaccataaggagaaaactcaggaattctgagtcttccctgctacaggaccagttctgtgcaatgaacttgagactcctgatgtacactgtgatattgaccgaaggctacatacagatctgtgaatcttggctgggacttcctctgagtgatgcctgagggtcagctcctctagacattgactgcaagagaatctctgcaacctcctatataaaagcatttctgttaattcattcagaatccattctttacaatatgcagtgagatgggcttaagtttgggctagagtttgactttatgaaggaagtcattgaaaaagagaacagtgacgtaggcaaatgtttcaagcactttagaaacagtacttttcctataattagttgatatactaatgagaaaatatactagcctggccatgccaataagtttcctgctgtgtctgttaggcagcattgctttgatgcaatttctattgtcctatatattcaaaagtaatgtctacattccagtaaaaatatcccgtaatt

SEQ ID NO: 4346 - protein, 570 aa, Homo sapien
MDGYLPRNGPEPFHPTTDATSCTEIDCGTPPEVPDGYIIGNYTSSLGSQVRYACREGFFSVPEDTVSSCTGLGTWESPKLHCQEINCGNPPEMRHAILVGNHSSRLGGVARYVCQEGFESPGGKITSVCTEKGTWRESTLTCTEILTKINDVSLFNDTCVRWQINSRRINPKISYVISIKGQRLDPMESVREETVNLTTDSRTPEVCLALYPGTNYTVNISTAPPRRSMPAVIGFQTAEVDLLEDDGSFNISIFNETCLKLNRRSRKVGSEHMYQFTVLGQRWYLANFSHATSFNFTTREQVPVVCLDLYPTTDYTVNVTLLRSPKRHSVQITIATPPAVKQTISNISGFNETCLRWRSIKTADMEEMYLFHIWGQRWYQKEFAQEMTFNISSSSRDPEVCLDLRPGTNYNVSLRALSSELPVVISLTTQITEPPLPEVEFFTVHRGPLPRLRLRKAKEKNGPISSYQVLVLPLALQSTFSCDSEGASSFFSNASDADGYVAAELLAKDVPDDAMEIPIGDRLYYGEYYNAPLKRGSDYCIILRITSEWNKIRHSCCCRWRVLDWVPWLL

SEQ ID NO: 4347 - DNA, 2586 bp, Homo sapien
  Unsure 358-483: Unknown base
tgcaaacatgagaactaatgaaccaaggcggctgccaccaggaaggaacagaacgcaggcattcaaccatgacgtctgcacagtgttagtaacatgtcattgtggtttcgttctcactgtggtaaaatttatttctgagcacttaaactgtgttgcatacccctaattttttttttttctgtatcttccttgccctcaaataccctgaggtgataaactgttccagttgtagccaactaccactgcgcccggccttaaataaaatattgtagtcattaatggtgtgtttgaattgaagagataccaggagatagaggtgaagtgcagtacttttattctttaagaatatagtctttannnnnnnnnnnnnnnnnnnnnnnnnnnnnnnnnnnnnnnnnnnnnnnnnnnnnnnnnnnnnnnnnnnnnnnnnnnnnnnnnnnnnnnnnnnnnnnnnnnnnnnnnnnnnnnnnnnnnnnnnnnnnngtttcccattcatattaactccatcttttaaaaatgtcatgattacaaagtgaaaagatttggctttcttagaggctcaatcacagaggtgaaagtgaccttggaaatcatatactctatccccatgttacacagattagaaaaactgaggttatggcactgacttaggcacccccagcaaggcaacccagggactacaactggcaatcccaactcctgggctagggctttttctacctttttttgcattggcctcttaaagaggcaatgaatactaattcctggcatcagaaaaaaaaaaaggcatgaggtgggaggattcttttttccctgatgggaaacagtgaataagaaaaatctcatcattcgatggaagaggtgacttaataattttattaatgaatttgatgtcccatgttttgtagttttgttatcattgaaccatgggggctggaatctgcctaaataattttatcttggtagccagcaattatgttggtattttatgtgggccttcccagattttcatattaatgaaatgactaatagtcgtacttaagaggtaactctactaaagcagaatgagatctaatatgttgtggaaataaaagagtttgcagtggaatgatactctcactccgtgcttgtaaaattgagttctattcaagacggaactgctatgactggcctattcaaggcttcatatttttatacagactatttcacagaccatagatttattttaaaagggaaaatctcacacataattaagcagtggaaaatgtgctcaatgctatggtgcgtcaggccctctgtctaccaggtttctcccctttctgcagagctgtggaccctgtacgtaccaaacaggtgaacttggtccatctttccttcttcctttttttgcacatttgcatttatatcttcctgtactaaaagaaacaaattatttataattggggtgacaatataaaggaacaaaagatggggcaatagttgcttcctagctggagctgtaagtccatgttacagaaactcactatttaaaaagttttaaaagatttatgaaccttgtcctacaattcgctgaatacttatttgtcttttaaactcccctcggtgtatggatcatcttcgtcagaatgccgttgtttcattgtgaatcaggggaaaatgttaatcatttggagactgttttcttattaccaaatgtacaatccataagacaactgaaagcaacaactgctgggttcactgacaaagattataaaaatcatcacgttcaaagtagagtttttagccaaggtcaagaactaacctggggctgagtcagcgtctctacccacttaaataacagcgtaaagatctttcactaaattcgttatgtggtctgtctggatgtaaacctatatatttccttttgaaacagaatcatatcctgcagactcttggcactcctgcatagctttgaccgaatgttcactctcatcgtaatggaagatttctatctatgcagataatacatgtttttaaatactgttttctgtttagtcctcaatcttcctaactcaaattggggactgaggagagagaaaggtggttacccctgttaccgtgccatattcttcttgctgcttttcaaccccacgtgattgttgattgacggttctgctataatgtgcgtgcccttcaagtttcagaaaactttcccaatcatttcacttcaatcttaattgaacccaagagtcaaagttattattttctccgaacgtgtttgtgatcttctgttatattttggggcatgttacctttatggtatataagctgtagtgcatactctttgtattgcaaaaaactggtcagtaatttatgtacatgtattccacattttagtgtgcttgaagtgacaatccatagtttgtagtagtttgttatttgtcaactttaccctgtgttttaaggacatctaaacattccttgtcctatcaagatgacaaaagcagaatgtaatttttttttggaagcttcgtgattacctgtaacaagttctgtttttaaaacgaatacaaataaagttagtaactatttttaaatcagaaaaaa

SEQ ID NO: 4348 - protein, 54 aa, Homo sapien
  Unsure 358-483: Unknown amino acid
ANMRTNEPRRLPPGRNRTQAFNHDVCTVLVTCHCGFVLTVVKFISEHLNCVAYP

SEQ ID NO: 4349 - DNA, 3280 bp, Homo sapien
agcgggcgaatctttttcattgaatttgaaccatttgtaaaatctgtgatgctgaagcagagtgtgtcacaaagtgatgagaacattactaaaatccacggacgcactgcgacctaagggctcaacggctgactcggcagcgggcagccaccccacgctcccctgcggtcactcgcacaccacagcctgaagctcccccagcgcctgcacctcgcacacagctaaggtcaaagttcaaacgcactccacacggaagctcattctatacccgaagagcagtctcagaaagcaagattacttttgtgttttttaaaaaatgattctttaatgtatttttctaaacattctgattggaagtagtggattcctaaatgattccaaagtcatctgtaattcttctgtttttgttttgttctgtcttttcttcattttggctttgggtggggggaggggcaggtgacacaaaggattttttttttttttttttaatttttggaatcttttccaataacaagctaaagatttgcactgaaatacaacttgtatgccttttgcatttttaaagcctgcttcctggatttaagcagagtgatagtgttcaaagagccagttcagcctgtaacatatttgaaaaagatatgtctgcactttgaggtcccttttgaatgccattcactagacctctcaagcattttgtttcattgctacatccaagcgcctcacaagtccacaatgcgggacagcatcaaaagctcaagactttggaaaaagcttgtgggcttgcactgggggagggaagggaacaaaatttgtgtacttctttgtttaatttagaaataaggcatccaagagatgccattattttctgtgtttcaattgttgtgcctttgagttaaactgcatttttgtcttttggttgaaatctgaaatgtactgtcccaatataaaacagtaattatttgacctttgcactgtttgtctggtccttttcagtttgattgcatataaatgtggaacttgatagatctctatatttttaatgcacttgtgataaactggcagcagggttagacattactttcaaagcttgaggtagaccgagtcagcatgctagacaggcttctctctctaaccaaaactgtaatcttcaggaccagcaaactcagcccaaggcagctaatccccccaaccccatcctccgcgccccgtgcggctgatcggcagccctgattcgccaatttgtcctctctcattcactgatccaccagcctgactgctaagagctatagtctttttagttgttttgtctttttaagcaagatgaaaacctttctattagggattttggggttgggaggggatgggcagagatataaaccccagcctttaagactttgacaattgtacgtaaatacagatgtgtataaatataggcacatgcatatttttatgtgaaagttgattttaaaaaactaaaaaaatctaaactgcactcttattgataccatcataacgcaagtgggaaaaataagagtacgcagtctaatttaatttcatgcagtgggaaaatatatatgtgtgcttctgtaacatcctgaaaacatagctttccatcccctgttggctttgaatggtgggccgagcacccaggtcgtctgtattttggttttcttttgctaagcagagatcttgaattcttcaaggtgctgatagcaactgctggctcctttctgtagtcacacacctaatgctagtttagtgattcaaaatgcatcacatttttaggcaggacctagattttccctgtcaacctaagatgaaaataatttcagtgttgattcagaactgaacattaagtaggccctcgtcctgcagttggccacttgagtgttttgttttgtttttattttttaaggtgggcattttcctttaacctctactttttcaaaagcaacaaaggggcctcaacctgagtttcctatgggcctctcttctgcatccccaaagcggccaagagcaaatcctgggggataagaaaaaagtgtaaactaggtaggattgtgatgctcaaaataaccatctagcaatatcttggagcttgagaatagattttgtgggcttatttcttcttgcctcttccccatcctttcaagagagaacttatttttgaaaagtatctatatatacacacacacacacacacacacatattattatttaggtttttataccatactgtattggcgagaataccactatcattgtcctttacagtctatttcttcccccaagtcttggtctttttttattttctattttttcatgaaccacacaggagactttaacatcctggtcttttctgtttcttctttgtttccccaagtttgtctgtccccctttgccttccctgagtgttgaacatcaggtagtaaaaggctaaacgcaatttcttgcatgtcaatctattctttttctatgtttgactctgatgcagtgtgtttagcgtgtctagtagctggctactcctatttaaaaactcttcctggtagaagacaacccaaagacccttttcgatgaggtggtttctcattctacatcctctgatctctatagactgtaggatgctttgctttcaaagataactgggttagagggtggggtgtgcaataggtgatttatcatggtttttttcattatcaatattacatggatgattttctcagattcttctgaaagaagaaattgacaggcactgctagattcagctattgaatggctgaagagattgagtatttgaccttctctcaaaatcataaagtgagaattcataaggcacccaatgttaagatttatccagatttttacattttgatttcttctctctgtggggtggcaagttgagggagcattcttcattttagcttttacctgacaaccaaacttgcctttaccccatccctagaattggtgctcttggaatattgctgttaccatcatttttggggggccatcttcctaatgctacacacagcctgacaggggagcagcagatgaaagggtatgctattctgtttccagatgtttctttatgtaaatatgacgccaatgtaaatcctgtgtcaagatcatagagaatggtgctttttactacagttagcacatgcatttttagaaactactacatgttttagagaatctttgctgtgtatatgtaaactgtattgttcaactgttaacaaataataaattatttcattattaaagaaaaaaaaaaaaaaaa

SEQ ID NO: 4350 - DNA, 1878 bp, Homo sapien
tctggcggatgaaaataaccagaatgaaaatagctagaaaactcagcaagcaggaagctccctttctcacccttttgttcccttgccgatagaatcagtcactattagaaaaaatgaaagacgctctgtttaaaacaatgatgacagcagtacttaatatgtatttcgaggtgaacttatatagattgagagaggctgcatttggcagactgatgtataggaagacccatttgtttctagcttctccctgcagggaaaatgctttcgtcattatagcctctttacacagactggccattctagtgaaacaggtggtaaacctttgggctgcccagaaacattttatctgttttcacttacctaggaaggggtaagattagcgggtcatccaaaatctgtatgtaagctatcttcattttcttccccaaccttctcctcctgggaaacacaaatgctatctcatctgacaaaaggttttagaggataaagctgaaaagattggattgggatctttttgtggcttggggcggagccttttgctaaaatctcaagaatgctgctttgagtttagctagggtggctctcagaactggggtgcctggcattctcagcatttctcaggggcctcccacctctgacaactgcagtgttagctaatacataccttgagcatagaactgaatgctgtaattcagagccattttttttttcaacttgaacattgtacaattttactgcaatttcctttgaactttcttgccactgtttggaatcttaaaaattcattagccttctcctttctgacataaagctactcttcatcagagatgagttcctatgtatgtcctttgttccttcaatagctaattaatgtgcttgaggatacttcagtggaaaaaaaggtttaaatatgcaaattactaataaatgtgtaaccttatgtaacttgtgttacatcaagtaacaagctaatctagtttgtttcactggactaggcttgtgctccctacttcagtattttgatgctttccttgatctttgtttcacaaaatgttgtgaattttggtatcattcaaaacaaatgacatttattaggtttcattttgaaacgatgtacagacaagtccccaacttagaaaccggtttgttcttaaggttcttgcgtcagcccatagaagcccactgacctccaccacagcccaaatggagggctgtgatagccagatctggttggcttttgtgggctgacccagacatttaatcaccatctcttatgttgttgccgtaagaaatgcattccaggttgggacttgggatcctgagagcacattcgccccctgtggtggccgcttgccaccttgcaagatggaagcccagtctccttactaccaaactgtagttgtaagcagagggaggggtgagatgtttataggacattccctaagctggggagtgatttttatcactattcatgtcaactgtactttggtatagactccctatcaatttaataatatgaaaagcctaaaataaaactatgcatgctattctatgtgctattttatatcagtaaataagcttatgcttgccagttgtatacacagttatgaggtgtatagaactgactttgacagtattttttgcactgtttcctatctgtttttataaagtcttatttagatattggaccttgttgatgttctcactgcccttgtgcttgctataaaatgtttcatatgtgcctttacaaatgtgagatctttattctaacctttttttgtaaaagatatctattgatttccaataatgttcatcacagcatgtgcaatatgccaagattaccctcggtcattcctgtcaacaaggggtcaatgtcat

SEQ ID NO: 4351 - protein, 50 aa, Homo sapien [sequence omitted]

SEQ ID NO: 4352 - DNA, 1088 bp, Homo sapien
ggaattcggcacgagcccgattccgcgcccgccatggccgacaaaatggacatgtctctggacgacatcattaaactgaaccggagccagcgaggcggccggggcgggggccgcggccgggccggctccagggccggccgccgcggtggggcgcaggccgccgcgcgagtgaatcgaggcggcgggcccatccggaaccggccggccatcgcccgcggcgcggccggcggaggcggcaggaaccgaccggcgccctacagcaggccaaaacaacttcccgacaagtggcagcacgatcttttcgacagtggcttcggcggtggtgccggcgtggagacaggtgggaaactgctggtgtccaatctggattttggagtctcagacgccgatattcaggaactctttgctgaatttggaacgctgaagaaggcggctgtgcactatgatcgctctggtcgcagcttaggaacagcaaacgtgcactttgagcggaaggcagatgccctgaaggccatgaagcagtacaacggcttccctctggatggccgccccatgaacattcagcttgtcacgtcacagattgacgcacagcggaggcctgcacagagcgtaaacagaggtggcatgactagaaaccgtggcgctggaggttttggtggtggtggaggcacccggagaggcacccgcggaggcgcccgtggaagaggcagaggtgccggcaggaattcaaagcagcagctttcggcagaggagctggatgcccagctggacgcctataatgcgagaatggacaccagttaaacagaccagcaaatccgcgtgcggaacaggacccaggcgtctcctcttgctccctggttggggggcggtggctggggctgtgcgcccaatgatggatttgtttcttttatgttttaaaataggatttaaaaactcatgtaaaggttttttttttttcttttttttttttttaattctgaaacagacctgttttgtaccgagttatttttgggataaattttactggttgctgttgtggagaaggtggcgtttccaccttttccataataaaatagaaatgtgtgtaa

SEQ ID NO: 4353 - protein, 255 aa, Homo sapien
MADKMDMSLDDIIKLNRSQRGGRGGGRGRAGSRAGRRGGAQAAARVNRGGGPIRNRPAIARGAAGGGGRNRPAPYSRPKQLPDKWQHDLFDSGFGGGAGVETGGKLLVSNLDFGVSDADIQELFAEFGTLKKAAVHYDRSGRSLGTANVHFERKADALKAMKQYNGFPLDGRPMNIQLVTSQIDAQRRPAQSVNRGGMTRNRGAGGFGGGGGTRRGTRGGARGRGRGAGRNSKQQLSAEELDAQLDAYNARMDTS

SEQ ID NO: 4354 - DNA, 1088 bp, Homo sapien; identical to SEQ ID NO: 4352

SEQ ID NO: 4355 - protein, 255 aa, Homo sapien; identical to SEQ ID NO: 4353

SEQ ID NO: 4356 - DNA, 2578 bp, Homo sapien
  Unsure 747-895: Unknown base
aaaaaatattttccctattagagaagagattgtggtttcattctgtattttgtttttgtcttaaaaagtggaaaaatagcctgcctcttctctactctagggaaaaaccagcgtgtgactactcccccaggtggttatggagagggtgtccggtccctgtcccagtgccgagaaggaagcctcccacgactgcccggcagggtcctagaaattccccaccctgaaagccctgagctttctgctatcaaagaggttttaaaaaaatcccatttaaaaaaaatcccttacctcggtgccttcctctttttatttagttccttgagttgattcagctctgcaagaattgaagcaggactaaatgtctagttgtaacaccatgattaaccacttcagctgacttttctgtccgagctttgaaaattcagtggtgttagtggttacccagttagctctcaagttatcagggtattccagagtggggatatgatttaaatcagccgtgtaaccatggacccaaaatttaccagaccacaaaacttttctaatactctaccctcttagaaaaaccaccaccatcaccagacaggtgcgaaaggatgaaagtgaccatgttttgtttacggttttccaggtttaagctgttactgtcttcagtaagccgtgattttcattgctgggcttgtctgtagattttagaccctattgctgcttgaggcaactcatcttaggttggcaaaaaggcaggannnnnnnnnnnnnnnnnnnnnnnnnnnnnnnnnnnnnnnnnnnnnnnnnnnnnnnnnnnnnnnnnnnnnnnnnnnnnnnnnnnnnnnnnnnnnnnnnnnnnnnnnnnnnnnnnnnnnnnnnnnnnnnnnnnnnnnnnnnnnnnnnnnnnggcaggcaggcggttatggtggttccctcccatcccaccacataaagtttctgagacttgagaacagcaaaatgctgttaaagggaaatattaagaatgagaatctgcagtaagggtgattctgtgcccacagttcttcaattctttataccgttttacccacatgtggtgttaccaaagccgggcagaaccatgctagcggaagatgtgaaatccagatagctcattattgccaagagctaggcagctttgatctccaaattgttattgctttcatttttattgtaatggaattgctttgttttgtttttttgtttttgtattgaagagggttgttttccctttatttttcataagctaatgtaaatgaagaaaaaatgtcttctctgggctgtaggcctggctcagcgtacacaggtatacatcctaagctctctatgttctctaatctgtggtgactgaacatgtgtctcaatgcacggggcatttctacctgtgtttctgcagcacccccactgccttgagtccccagcagtgctgttatttgcctaacacctgtagccatctgccacgcagccagacgtgaaacgctgagacagagaccatttaggttaaatacgacagcttatcctgctgggtggggaaagtaaaaaatatgctggttcaaggcctaaagtaaaatgatcaataatgtttgtagcattaatgaaatattttcaagaaatgtgtccaggggtagcactggctatgttgacgaggcctttggtaactcagagagctcttggccctgatggggacttgcccttacgctttctttatcaggctctgagttcacacggagcctctggcacttccctgctgtcttgggagaaaggaaactggttgccgcggcaggttgtggaatctgttgctggaaccaggctggaagcccacctggtagtgaacagggcccagtggggcaggctgggcatgttgtggtctatgggtttgtttcctggagaatgttcaggaatgtcttcccagctgctttggtgctgagctctattatctcacagcacgtccagaaggctaacccaggtggggaggatgctgacaccagctccaggtggagttggtggtcttaatttggagatgcaggggcaacctgtgaccctttgaggcaagagccctgcacccagctgtcccgtgcagccgtgggcaggggctgcacacggaggggcaggcgggccagttcagggtccgtgccaggccctcctcagtgccctgtgaaggcctcctgtcctccgtgcggctgggcaccagcaccagggagtttctatggcaaccttagtgattattaaggaacactgtcagttttatgaacatatgctcaaatgaaattctactttaggaggaaaggattggaacagcatgtcacaaggctgttaattaacagagagaccttattggatggagatcacatctgttaaatagaatacctcaactctacgttgttttcttggagataaataatagtttcaagtttttgtttgtttgttttacctaattacctgaaagcaaataccaaaggctgatgtctgtatatggggcaaagggtcagtatatttttcagtgttttttttctaccagctattttgcatttaaagtgaacattgtgtttggaataaatactcttaaaaaata

SEQ ID NO: 4357 - protein, 110 aa, Homo sapien [sequence omitted]

SEQ ID NO: 4358 - DNA, 3156 bp, Homo sapien
ccttcaaagaagaaataagagaattattagtaatttgctcagaatctggtatgtggaagagccaacatggggacccagccttttgtgattctaaaacctttgatctttctactaacattcactgttagagagtgtaggcgctgcaggagaaagagaaagtgcccacgaaaattagtctagcattgccgggggtaaaaagcacacactggtcctgcagcttattgaatcagagaaatgtgaagataagatgaactaaacaaacatattttagagcatggatctcgaagcagaatttggctaaattttaacaaaatgttcttcagtaacacatctcatgatctgaagattgtgttacaaaaaatattatcaggccaaaatttgttcggaatacactaatttttgctcctctatatgtgaggaaaatgagactagacagatttaagtaattgacaacttacttaaagtagcaaagtcatggattgtattgacttttaaaaatatagtaaaagtcatatttaaactttatcctaaagtttaaatctaacagaacaactgaaatacttgaaatagacctataaaatagtaattaaaatgagaaatacataagatgataaataaaatgaaggtgaaggtattccagatctaccgaaaagattttcagtatcacagattattcataagaaattgagaaaaggaacaatcagaagttgcaaaagatggtatagccgaatataatggaaataggaaaaattagtcgaaaataaaggttgatttagaaatgaagaaaatgaatatatttcttaatacaaaataagtgggaaatgagaagttataccaataaaaagcatttaaaaatttaggggatattgtaacccagtataattttctgacaggttggactttgaccctaatggacttactggtgaactttttcaaatgtttaaataatgtctatccatgtatcatgaaggacagtatgcttcaaattgtcttttgaggcagacatgttctcagtactaaaagacatttttagaaggattttattctcaacagatgcaaaatgcaaaataaaatattgacaaacaatacagcaacaaataatttactatcactcaggattataaggctggtgttaagcagaacagccattaaatcagcatcaaaagaacaaatagtaaaatccaaagtattaattacagataacttttcaaaaattcatcattcacccttgatttaattatttctctggcaatgatttaatagacttctcggagtctgttaagtacttaaaccaagaactaccattattcctactgggaaaacataaacatttctcaagtggaaagtaaacagtgttggcactatttttatatatggttaaagagacctgtcattgcaataaaagccagcattcacaaaatgaggaagataaggaaagtagcataaatattttctattaacatggctttacaactgctaaaacttatagtataaaaatgtactaacaaagactaattcaagaagttgcaggatacacaatttttaaaaatctcatttctacatcttagcagtgacaaactgcaatttaaaaagtgtgtttggttattaatatatatgagacttttaaagaaagttatataactacatagagataaattaagaaagatgcctaaatagaagcaagtttaaagagctatatttttaaacatgaacaaactcccatgggagccatgccagtgtagtggaaaagtagtacatggggagatggggagtttttttgaaaaccagaattacagttctcatttcactacttaccagttgtatactcttgggaaagtcactcctagtatctatttcaccatctacagaagagaaatacttcacagaattattgtggggattaagttagataatgtgttttaaaatataaagctacatccaaagaaatgccaatatgtgacattagtatgaaatttactacagttccatttaacattccaactggttgctgtgtggaatatggcataattgtaataaattatttaggaaagcaagcaaagatgtaagtttttttaatttagggggaaaaaatgggagccttgctctccaaatccttaaaacatgctattaagcaacctttctgaatattctgtggtgccaagtagaaagtttaactgaaattaataagccaatggaaagaaagaaatattaataactgctggtggaaagactagctagatgtcagtgtggaaagattagatccactttacatgtgatattccaaatgaattaaaatgttaagtataaaaagaaaaatactacaagtctcacaccaatagtggtataaaggaacttcatggcaattggcaaggtagatcaactaagagaaaaagttttaaatgtgtagtaaataggaaaaagacaaaacaagatggaatttaaaagaagctatttgcattacacatggatgcactcagtttttgtaaaactatatgcatatccataagggtttgtactcttaggcaaatttataaagcgatcgtgtataaatgatataaaaaatcaatttgaatggtattcaaatttcctaatattaaaaatgcaactttgacttagttcatgctattgtattagcaaaactgttttaattgcatgtgtccttatagcagcagcattgtgtattagtagccttttaagagaactgtgtagaagactataaaaagggctttataactgatcttttgacatactcactttgagtggcatatgcccaggaaaatatttaaaagaaagaaaagctatttgtacaaagttttctagcagttccactcagataactttaagggggaaaaaagcccaacgattggaaatggttaagtaaattttggtgtattgctagtgctatcacagaatgttatatagccattcaataatattgatatatgtcaaattgtatgcaaaaaagtgagattcaaaaatgttaataagaacataaattgtgtttactgatacatgtgaaaatttaggtctacattgaaaagaatcagaagataacatgtaattcagtttaacattaggggttctttatttttcttctgttaaatattgatgtatgcaataaaaaataaaagattaattggtaaaaaaaaagtcgac

SEQ ID NO: 4359 - protein, 71 aa, Homo sapien
MNKLPWEPCQCSGKVVHGEMGSFFENQNYSSHFTTYQLYTLGKVTPSIYFTIYRREILHRIIVGIKLDNVF

SEQ ID NO: 4360 - DNA, 4282 bp, Homo sapien
  Unsure 4057: Unknown base
tgacaaaatcttttatttatttaaatgttagtaatacgtttattgatgagactaggagcttctctgcagcatcttcataatacattggttttagttcccacactattcccacatcttatctgggaagattagaaatacagatgtaatatggaagcttcaacagcatgggggtggtgatagtgtcctatttgcccttggtaaaatattaaagcgtatttcttaacccaaagagtgattggttatatgaatatatttgaaaaagttaaagcaaatttgcaaacctttacaaaatcatgtatcaattttatgctatccagtttttacgtacccatgtgtcaacatttcatatatccagttctttgggtgctggttcactttttttcatttattcaaattcagaaaaatacggacggatctaatgttaaattaaccagaaaccctggaacattcatatcttgagagggaatttgctactcttttacttttgggatttcattataaaataggctcattttatacatatgtcctgtggtctgtcttccagagtgtgctgtaatcataagtctctagcaaagagtggagggtggagggtgtgtagaactccactcagcctcatggatacatctacaagtctctcaacccatcctgttacagttctccatgagagtcacctcacacttggaaaagaaggaggttaaagcagagtattgttggcagccagctatgcccatcctcttgtaaataactttccaacacacccatttccttgccttaaggtgcaggttcctacttctacaaaatttcaaatgattgcaggtcaaaaacctttggagttactcacaaataataataaaatttcaaataactagggtctacttgtccatcaagatgacattaccagtggaacccacctgttaattttaaagtagcttcagaacccaacaaaaattatgtaagcctggttaaatgtccttttttcttcttgcctctaataaaatcaggatcttcggccttgatactaaatatgtgtatatttagttatgatggtacttgtagatgctcacatttccagttccaaactcgcccgtactttttatgtgcttcaaaatattggacacatttctgttaatatatgatttctgtatccacaaaccgctgtttgcttatgctgagtcaatttagaagttaatttccaatctagtctcaactgcaatgcatttaaaataggtaaaacaagtaaatgagtttgggacattttgagattaatgttactgcccacttgactgtcaatttcaaatggctcctaatgcaaccaaaattataaccaatgtagcatgtgtaggaaaggtatttttaattatttaaaatcattgtgtatattacagcagtatgaggaatgcctggctaaagaggattttttaaaagatgaagaatggttttgcttgtattatataggcttactgagtttgtgagcagcataaaaacaatcattccttaattcttcattgtggaactgaaatatttctgtaatgcattttttaaaaggagactcctagacacagctgtaatagtgggaatagaaatgtagagcttttctcataacacaaaaccagaaaataattttcagcactttgacttactctatgtaataaggaaaaaaattgtttccacaaagttgaactatgtagtaatatttggtaacatatggcatggccactttatatcacagaatgtgtgtcaagttgcaaagcatacttgggccatagcagacactaagaattaaaactcttaaatcagtgaaacaaaaactaatgggcagcattctctctgtttggaatgggatcagtatacaattaatacaatttaattttacacattccctaagacaccatttttaagttacagtcacatgagtgtttgtataaatttaagtcaatgcttttagcctaggcaaagctaaatacaaggtttttggggttttcttttttcagctttattattgaagtattacaaacttaacatcagataccaatgtgtaaaaagtactattgggtccttaagggctctatcagggagttgaaatttcatacgctttaccaggttacttgtaaaaaatgaacagctgtaagacatttcaaaaccattgcagacacattgttaaaatgcagccatttgataatgaaagcagaaaccttaagttttacctaattattgcactaaatgtaaatgataacataaaattaagtgtgcattttaaacagattctatttcccacttactgcttagcatagaaaaagagctatggttagaggagtgaccagcaagatttatttcagatggaaaaggggtgagaaagtggaagcaccttactgttagagcatgttgcatctatttagtgctactgaacaattcagtagttatttctgaactttgctgcaaagtgctctttagttaaagcacattaagaagggtcactgcttaattgctttgtaaaatgaagcaatggtattttttatccgatatagtgtaatttaaaagttttcctacaaagtgagtttatattgttgcctaaactatgttatgtaagcaaaggttttggaaaggcgggagggagtctagattcggcgagagtgtgcgtttgtgtgtgtgaatgtatgaaaagtttccccattgggttattcttaagatgtgtttattgtaaagttttctacgttttgcccacagtaaatgtacaacttcgcaattgtaggatttaattgattgaattccaaatttatactgtctcttcccttctgcagagacattatgccactgtaaggtgcatgtacagaaaatacctctgaggttgacttgttaaataactgatgaatgttatttcacactgaatctcaaagcagtcatttgttttgcgggttaggggaaagttttgttttttgctggtgttttttgttgtttttaattaggcacactaagagtggctaaatttgggggaattggtggataggaaagaccttgaaaagtgatgtgtagatgaaaacacaaggtatggatgttggttacagagttcagttttaacaagggaaatttggggatttttttttttttacttgcatgttctatgggtagctatcaaagggtgtaacaaattattccagcttttcccaatactaattatattggttttaaaaagtctgcataatcactaggtggcattttcccttcatttgtgaaccaagaggggtaaatgatgctacccatacagtgacttctgagttctttaactttgacagaatctccattgtttcattgaatttctcattgtattatatgtctttccaagtgtgcaaactataatatgtagttaatgaaaaatggaaggctgcagattattttgcatgaataattaattgcccattagggctaaggagactgacatgatttttatcggttctgggtaaatgaaaattttaatggaaaactcattcaccatttactagctttgtgcaatattataaaaggtagaagcaaaacactagcacattgtgctttgcttggcttgtaaggatggctttagtaccattacattaaatggacagtgtgcacagtgtattgtaaatgccaactcttgcaaatttacaatacttaaatatgttcaattaacatcctaaagtattaaaagtacagaggaaaaactaagcaagcatttatagcaataccatgaaatctccagtaatcgttttgactgttgccttttgctctttagtgcagcttttctgcattgtaattgtattgctttgtatttcatgttttttacactcatgacttcagagttaagtacttgtacaccaagtattgcaatcacctttctcttgttgtacatgcaatgtaacaacctacagttttggtgcttttaacaatattcctctttttctttaataaaggatatttatttgaattaacctgattttgtttgtttaaaatatcagtggtacatattttcacttcatttcaaataggaggaccatagcaaattgtatatctgttatgacaaaagttntaacatggagaacaggatccagagaccatccatgcctgtatttctgcctcttcctgagcgctgtttgttgtgacatattttgatggcaactttctttgtgctattaatgaactttctcattgtttataaatattcacaaagtttggaagtgctgacttccaaattggaaaatttttaaatgggggtggggagaggcagaaaaatatttataaagttacacactca

SEQ ID NO: 4361 - protein, 25 aa, Homo sapien
  Unsure 4057: Unknown amino acid
TKSFIYLNVSNTFIDETRSFSAASS

SEQ ID NO: 4362 - DNA, 2012 bp, Homo sapien
gcggctgtccagtcgtagcccggccgcccgcgcctgtccggtccggtccggccacggaggcagcgcagcggcgggactccgagcctaccccgccgagtgagctgcgccgcaccgtgccgtcccacccggcacccaccagtccgatggggccgcagcggcggctgtcccctgccggggccgccctactctggggcttcctgctccagctgacagccgctcaggaagcaatcttgcatgcgtctggaaatggcacaaccaaggactactgcatgctttataacccttattggacagctcttccaagtaccctagaaaatgcaacttccattagtttgatgaatctgacttccacaccactatgcaacctttctgatattcctcctgttggcataaagagcaaagcagttgtggttccatggggaagctgccattttcttgaaaaagccagaattgcacagaaaggaggtgctgaagcaatgttagttgtcaataacagtgtcctatttcctccctcaggtaacagatctgaatttcctgatgtgaaaatactgattgcatttataagctacaaagactttagagatatgaaccagactctaggagataacattactgtgaaaatgtattctccatcgtggcctaactttgattatactatggtggttatttttgtaattgcggtgttcactgtggcattaggtggatactggagtggactagttgaattggaaaacttgaaagcagtgacaactgaagatagagaaatgaggaaaaagaaggaagaatatttaacttttagtcctcttacagttgtaatatttgtggtcatctgctgtgttatgatggtcttactttatttcttctacaaatggttggtttatgttatgatagcaattttctgcatagcatcagcaatgagtctgtacaactgtcttgctgcactaattcataagataccatatggacaatgcacgattgcatgtcgtggcaaaaacatggaagtgagacttatttttctctctggactgtgcatagcagtagctgttgtttgggctgtgtttcgaaatgaagacaggtgggcttggattttacaggatatcttggggattgctttctgtctgaatttaattaaaacactgaagttgcccaacttcaagtcatgtgtgatacttctaggccttctcctcctctatgatgtattttttgttttcataacaccattcatcacaaagaatggtgagagtatcatggttgaactcgcagctggaccttttggaaataatgaaaagttgccagtagtcatcagagtaccaaaactgatctatttctcagtaatgagtgtgtgcctcatgcctgtttcaatattgggttttggagacattattgtaccaggcctgttgattgcatactgtagaagatttgatgttcagactggttcttcttacatatactatgtttcgtctacagttgcctatgctattggcatgatacttacatttgttgttctggtgctgatgaaaaaggggcaacctgctctcctctatttagtaccttgcacacttattactgcctcagttgttgcctggagacgtaaggaaatgaaaaagttctggaaaggtaacagctatcagatgatggaccatttggattgtgcaacaaatgaagaaaaccctgtgatatctggtgaacagattgtccagcaataatattatgtggaactgctataatgtgtcattgattttctacaaatagacttcgactttttaaattgacttttgaattgacaatctgaaagagtcttcaatgatatgcttgcaaaaatatatttttatgagctggtactgacagttacatcataaataactaaaacgctttgcttttaatgttaaagttgtgccttcacattaaataaaacatatggtctgtgtaaaaaaaaaaaaaaaaaaaaaaaaaaaaaaaaaaaaaaaaaaaaaaaaaaaaaaaaaaaaaaaaaaaaaaaaaaaaaaaaaaaa

SEQ ID NO: 4363 - protein, 520 aa, Homo sapien
MGPQRRLSPAGAALLWGFLLQLTAAQEAILHASGNGTTKDYCMLYNPYWTALPSTLENATSISLMNLTSTPLCNLSDIPPVGIKSKAVVVPWGSCHFLEKARIAQKGGAEAMLVVNNSVLFPPSGNRSEFPDVKILIAFISYKDFRDMNQTLGDNITVKMYSPSWPNFDYTMVVIFVIAVFTVALGGYWSGLVELENLKAVTTEDREMRKKKEEYLTFSPLTVVIFVVICCVMMVLLYFFYKWLVYVMIAIFCIASAMSLYNCLAALIHKIPYGQCTIACRGKNMEVRLIFLSGLCIAVAVVWAVFRNEDRWAWILQDILGIAFCLNLIKTLKLPNFKSCVILLGLLLLYDVFFVFITPFITKNGESIMVELAAGPFGNNEKLPVVIRVPKLIYFSVMSVCLMPVSILGFGDIIVPGLLIAYCRRFDVQTGSSYIYYVSSTVAYAIGMILTFVVLVLMKKGQPALLYLVPCTLITASVVAWRRKEMKKFWKGNSYQMMDHLDCATNEENPVISGEQIVQQ

SEQ ID NO: 4364 - DNA, 3804 bp, Homo sapien
  Unsure 343-382, 1239-1264: Unknown base
gctcatttgggggcatgaatgttctccttactaacctctcatggagtcatgtgataacagccatgtcatgtgtatggatgccaccattcttgaatttctgctagaaataagtaggttgctatgcacttagagtcatctttgcaagggactcattccaaaccaattccaatcgacctgaaagtcccttgcactaaagaaatgtgatttttttttaacccaaggagaaagttggttgtaacaatttttcaccagaattagcaatctgatagaataggcttttttaacaggaattttaaactggcggtgccagttgcagtgaaggtgaagtggctattgctttatnnnnnnnnnnnnnnnnnnnnnnnnnnnnnnnnnnnnnnnncctgaagatagagcgttgaacaaacccaatggtcttggccctcaaaaagctttatgtgacatagagcatccagctcgacaattagcaaacccctgatattattcatggacttgacatgaggtttggactattcatgagcaacagcagaaggtccatgacccctacaaatttacatttttctatggcccatatttgaaaacctcacattcggagcaggccactttatattcgtgagtgatcccaagctcactgaccaacagaaaagatgctaaaaaaatgtgtcctatcatgtgcctgctccaactgatgggtaatgtctgcctttaagccccagaatggattctccaggcacagtgtggaagagtgctgtggttgattagcaatgtctgccttgggtgaggaaaggggaacactcctcaagtgcctcctactgtcatctccattcagcctagcaccacatccccatgtagaagtgttgtcttctactgcttgccacgtacaagtgtgaaatgccaaggtgagactcgtacacttggggatttgcaatggtttttacccctcatgaaggtcagaggtggactatttgtacacatacacacatgcacaccctctcacgtcctccagaggctgaaagaccatcagcatcttggtaactgccatgcatgagcagcaaggacagccttccataatccatgccccatttcctctggaagcctggaaacttttcatttcctgttccttgctaattaacatctaaacatgcttctcatttccagccattgctgatgcttctcagttgaagtttgagccacatccctcttacagctagtgaatgagttggtagcagatactgtatnnnnnnnnnnnnnnnnnnnnnnnnnnaggggagggtgggatggggtgtgggtaagttttgccttttgttttgtttttgatgccgtatatagtgaaggggtgaggatattctaaacaaacaaaaattgaataatttattcacagaaactattaagattgtattgtaaagctcacagcaagctcagtgggcagcagctgcaacatctcaccggggaaattattttatttaacgtgagtgagatgtgggccggagaaggtagctgaagctatttataaaacgttgtgtaccttcttccgagctctctcccctttgtgaagggcgcagcaactatacccttgatggatggagatttatgcaatgtgttttactgggtagagtgacagaccttggctgtccctggaattgagaatctggaccttatttccaggcagagaacactgtcctcagaaatgggacttctgataatgaaacaggttgtccaacattttctaatacgcattctacagaacacaggttccaggaggcatcaggttggtgtgatgcagactaagggttttgtggtcaaatatccttaagaaacaaagttaagtcagtttcctttctgcaaggacttttcagccttcaatgtgtgctgtgcatggtgaatccccaaaaataatccttgagtctgtagcatttcctgaacttacatgaccaggatactctattttgcagatcaccccacagagctagggttccaccgagtatactttgcttaggttgacttagcatatctgaggtcttcaaggataaaaactgccaccccaacacccttccattaaaaaaaaaaatacaaaatagcaccacagtctccatctggtttatagcaacagaggtactttatttaatgaagcaatggttctaatcctggatactgccacggactacaattctatccctcccagagggagtggaggaagtcttgggtggtgtggacagaaggaagagaggagagggtgagtggggtatagggcccagggtggctccctactcctcaggctcaaaaggatgctcagtgggaacagatgatctcttgatgagtgcttcttcagtttcatagtttggaatcgttcactgtgtgctttttggggggttttcaatggaaattcacgttgctttgcatttctgtgtccgtctttggtcagttgtgcaagcctgctcactgtcatgtgaagatggcctttcatctggcttctctctcttaagtgagaaagattgtccttcaggggacatgacatcaataggtttctggaatgagggactctttctccccgtgttttgctttgtgttcacattttcttttctaatggcattgaaactttaaaaaaaatggattcaactgtttttgcagaatgtagaaagtattctgtgtccttggttaaagaaatccacttgtgaagtgtgcctggaaaatgaaagtttgtgttttttaaagaggaatatttgaaactgctttctatgcatgcttagctggagaaaagtacaggcaggcgtcccatctcccagccacttctcaaaggtgctgctgtgttttaaagaccaggtacagccagggcagtatttgcaaggacattcctgcttactttatccctttggttggaaagctctagatgattcccgcagctcctccagaccccgcctccctgccctccccagctggtctgggaagaggtggtctgctgacctgtggtatctcagaggggacgttcctcctcctccctgtgcaccaggtgggctgcaccctcctgcctattcaggatgtggatgccacaggagagcagcaggcagtggaaacttcagttgcactggttctcctggtggcaaaggcatgaagcacaggggtcgattaatccaggctactagaaagctccagagcaaagtgtgcgggtcccacaaatgcttggctggtggggtctggatcagtgctgagatagagttggcagaagaagcagaggcactctgcttgctttcctagccagtcctcccctaacaacacaacacaacaacacacacaatctcagctgcgccattctgtgcaatcccagtgaccaaatcccttccttgcccacctctatgtcagcaggactgaccacatcactcccccgagttcccaccaccagcatttcctccaacctttttccatcacaaccagttagaaccctacaggcaacaaggccttctagaatccgcttaacccttggctgataacaggcaaatttcagtctgctacactttgttaggtccagaaggagctgcccatactactttcttatgagcatgctcagtatggcatatggacatgtaatgtcacatctttgtggagtgtgattttctttttttacatatttgtatgcagtagagagcctgttgtagaaaacgctccctgtatcttgctgtactgttaaagaaagctgaattccacattgccaacaaaagcgtgaaaatgttcatgaaccttcctccaggaaaagccattcaagcctgattatttttctaagtaacttcaattaaattgaagaaaaaagag

SEQ ID NO: 4365 - protein, 170 aa, Homo sapien [sequence omitted]

SEQ ID NO: 4366 - DNA, 4162 bp, Homo sapien
ggaatataatttccccaagagaatttgttgatttctcctatactgtgggctataaagaagggcttttatcttgtggaataagtcttgactgggatgaaaagagaccagaatttgttcgaggatataaccatccctgtggttggttttgtgttccacttaaagacaacccaaaccagagtcttttgacaggatatattcagacagatctgcgtgggatgattcctcagtctgcggtagatacagccatggcaagcactttaaccaacttctatggtgatttacgaaaagctttatgagaggcaaaatacattcaaacttgtagtactacagatcaactctctcagctacatggcctgtaaaaatcattgattccacttttctgcatagccggtagaaaaatttgaaatgtttttggttcactagtacaatgtttggttttattcctaaagtaaatagctatctaagagagggcattttcacttttttttttttaaattttgagacaggctctcactctgttgcccatgctggagggcagtggtatgatcacagctcactgcagctttgatctgaccgctcaaggggttattctacctcagcctcctgaatagctgggaatacaggtgcacgccactatgcatggctaatttttgtttaattttttgtagagatgtggtcacactgtgttgcccaggctggtcttgaactcctggcctcaagtcattccccaccttagcctcccaaagtgttgggattataagcgtgagccaccatgcctggccccaatttaaaatgtggaattcagttggtgtccaagacttatcttgagactcttaaaagcatcagtctgtaactagaacaaatacggtcttagatttacccaagtgcctagatatcattttataatgattagaattgagtattgtgggtcccctaattctgtgggtgccttaagtgagaatttctaaatgattttcacattctaaatgactttgggttttgaactctccatctagtttacttctaaaatgggaacttgaggcaattcaggtatccaggcaaatctttgtatatatttttttgtgtacatgcacacatctcgaaatccatttccgtgtttaatgttagttgtttatgtgttagtattcctgtgtctactgttttgttgttgttaatatgggtaaagtgagccctgaaatacatgctaaacaagacatgaaatgcagaaaggtacatagtgtttcaagtgcatggtagtttgatctgtgttttactttattgtgttttcttgagtgtaaagaaagaataaatcaaagttcttcatacccattttgacaaagtggaacagtggagctgttttttgcttttgtttttatttattttttgccactggtgatgatagatttcaaaaaacaaaaggtggcagcagcacaatgttcatggtgaattatctcatagtatctagattgatcaagatctgacagaaggaatgcacaaaggattctatattcttaatgatttattaattaccaggatccttttctaaattgaatgtacttttgaattactaggtttcttctttttttttgttctgcaatagtgaaagaaaactcagtagtttagtttcagtttctcatggaaattggtaaatgttagttttgacttcatctattttttatttgtttttattagcgtagagtaggaagtctcatattctactgttctatctaggatggtgaaattccaaaggtgcctaacttgagtaagggatttgtgacaagatagtacacattactataagggctattatttcctgaactggatgtccctaaaagcaaataaactgcccactatctctactctagtgctctctttgtccttatcaacatatacctccaataagtaattacataattcaccgttaaacatggacccactctaggtaattaccctcatggaaacattttcactgtgagaatgatgaattttaaaattatgtttgaatcacctaaaatgtatgtgcagcttctagatggccccttagatctgctgggctctagctgtgtactttaaaaaaacaaaaacagctttattgatatataatttacatattatgtaatttacccacttttaagtatctaattcagtgatgttttaatacatatgtagaactatgcagctatcagcacaatctggatttagaacgtttccatcatttcaaaagattccttttgtcttttttgcagactcatacctaacacaaatctaaagtttatcactgttgccaggataattacagcaggttatgtttggtttcatttttaagagtggaggtgttcatgattctaagctcaggaatcttgtgatcatgtattaaatatgttatctcatactataatgataaaaaagcttaatgatgtgggttgggatggatattaacataaataattgagtccgctgcttctatagcaatgctgtaggatagaacaataatgtaagtgatatatgtaattaaaaaattctagaagccacattaaaaaataaaaataaacagctgaagttaattttaatattttatttaactcaatacatccaaaatgttatcattttaacatgtaattgatgtaaagatttattctgatagtttgtactatttcttgtactaattttttgaaatctggtatgcattttacaaatttgggcaaaccacattttaagtgctcattagccacatgaggccagtggatactgtgttgaatagcacagtcctatagcatatttattaatttgtcttgtagtaagatgaaatagacaataatacggaataatatcttaaatggaaatctttgttagtctctagagccttcattgcttgataaataggacatctaaactttagatataaatcagttgtcaatgagataaaattattgccagcaaatattttccttcaaagataagtaacttttgatatggcagttggtgaaatgaaagaatataatctgccttcttgttaaatggttgactattctgtagcttgtaggtagtacgtattagaaacttgtgtatgtgggaaatatttggcataatactgttttcagtatatagtagcttttttttaaggaaattagtttcatacaagaaaaagattattataaaagtgatacttttgcatgaaatattagtttgtgttgataactcttagttaacccttaaagcttaaaacagtactcaaaaaaaaataatgagaatctagtattctgtagttaactaatctataagataaattgctaaagtactagggagcttgtaaatcttaaaaatctttttatttcagtgttcattcaggttggatatatttgaaattgtagatttctatctgtacaacatctcctagttaatagaatttttttccttcccctcccttctctctcctcctccttttctaaccaaagggcattttatcaacaatcatgctgaattcaattaatatctcaagctaaaaaactatgtaattgaggttgtatctggagaagatgggaaaacattgtataatttaagcccttaattgtctgttgagcttttagggctgagtaattgcctttcatacaaataaaagctttaactcttttctcaagagtgtaccaccgtccttagaatcaggtgttttaaatccagtttcttttaattaaatgggactgtagtgatccctaccctgtagagaaatcaacagaactagagaagctaagggcttgatcaggtttcccctagaacctgtgttgcctgcctgctgtatcttccatgtctttcttattcaacttctagaagtagagaaggttgggacttgagtgtagaagaaacatcagaataatttcaaaaaacaggaagttggaactataatttttaaattattgtattgtttttacggattttacatgtatagttaaatattaaaattcatctcttgcagttcaataaaagctatagtatagattttatttttaagaagtttatataattcttttgtgagccaatatgtaaaactagaatatttattaaactaataatatgtattagtatcaataaaatatgtatttatttttaaattggtatgaaacaaaataaaaatttgtagacactcttaaaaaaaaaaaaaaaaaaa

SEQ ID NO: 4367 - DNA, 3471 bp, Homo sapien
tttgctgaggggcaggcacaggagtcctggctgagctcatggcctgaggctgcctagcggccacggggaatggttgcaatggcggaggcagaggcaggggtggcagtggaggtccgtggactgccccctgccgtgcccgacgagctgctcactctctactttgaaaaccgccgacgctctggagggggacctgtgttgagctggcagagactgggctgtgggggcgtcctcaccttcagagagcctgcagacgccgagagggtcttggcccaggcagatcatgaactacatggtgcccagctgagcctgcggccagctccaccacgagcccctgcacgcctgctgctccaaggactgccccctggcaccacgccccagcgcttggagcagcatgtccaggccttgctgcgggcctcggggctcccagtacagccttgctgtgccttggccagcccccggccagaccgggctctggtccagttgcccaagcccctttctgaggcagatgtccgtgtcctggaggagcaggcccagaatctgggcctggaggggaccttggtgtccctggcccgggttccccaggcccgagcggtgcgtgtggtgggggatggtgcctctgtggacctgctgttgctggagttgtacctggagaatgagcgccgcagtggtggggggcccctggaggacctgcaacgcctacccgggcccctgggcactgttgcctccttccagcagtggcaagtggcagaacgagtgttgcagcaggagcaccggttgcagggctcagagctgagccttgtcccccactacgacgtcctggagcccgaggagctggctgagaacaccagtggaggggaccacccgtccacccaggggcctagggctaccaagcatgctctcctgaggaccggagggttggtgacggctctgcagggtgcagggactgtgacaatgggctctggcgaggaaccagggcagtcaggggcctctctgaggacaggtcccatagtgcagggtagagggattatgacaacaggctctggccaggaaccagggcagtcagggacctctctgaggacaggtcccatggggtctctgggacaggcagagcaagtcagctcgatgcccatggggtctctggaacatgaggggctggtaagcctgaggcctgtggggttgcaggaacaggaggggcccatgagcctggggcctgtggggtctgcaggcccagtggagacctctaaggggttgccggggcaggagggcctggtggaaattgccatggactcaccagagcaagaggggctggtgggtcccatggagatcaccatggggtctctggagaaggcagggcctgtgagcccaggatgtgtgaagctggcagggcaggagggcctggtggagatggtgctattgatggagccaggggcgatgcgcttcctgcagctctaccatgaggaccttcttgcgggcctgggagacgtcgctctcttgccacttgaaggaccggatatgactggctttcggctctgtggagcccaggcttcctgccaggcggctgaggagtttctgcggagcctgctgggcagcattagctgccatgtgttgtgcctggagcactcgggcagcgccaggtttctcctgggcccagaagggcagcaccttctccaggggctggaggctcagttccagtgtgtctttgggacagagcgcctggccacagccacgttggacacaggccttgaagaggtggaccctaccgaggccctcccagtgctccctggcaacgcccacaccctgtggaccccagacagtacaggtggtgaccaggaggacgtgagcctggaggaggtccgagaactgctggccaccctggagggcctagacctagacggggaggactggctgcctcgggagctggaggaggaagggcctcaggagcagccagaggaggaggcgaccccagggcatgaggaggaggagcctgtggcccccagcactgtggcacccaggtggctggaggaggaggccgctctgcagctggccctccaccggtcactggagcctcaaggtcaggtggctgagcaggaggaggctgctgccctgcggcaagccctaaccctctccctgctggagcagcccccgttggaggcagaagagcccccagatggggggactgatggcaaggcccagctggtggtgcactcggcctttgagcaggatgtggaggagctggaccgggcgctcagggctgccttggaggtccacgtccaggaggagacggtggggccctggcgccgcacactgcctgcagagctgcgtgctcgcctggagcggtgccatggtgtgagtgttgccctgcgtggtgactgcaccatcctccgtggcttcggggcccaccctgcccgtgctgcccgccacttggtggcacttctggctggcccctgggatcagagtttggcctttcccttggcagcttcaggccctaccttggcggggcagacgctgaaggggccctggaacaacctggagcgtctggcagagaacaccggggagttccaggaggtggtgcgggccttctacgacaccctggacgctgcccgcagcagcatccgcgtcgttcgtgtggagcgcgtgtcgcacccgctgctgcagcagcagtatgagctgtaccgggagcgcctgctgcagcgatgcgagcggcgcccggtggagcaggtgctgtaccacggcacgacggcaccggcagtgcctgacatctgcgcccacggcttcaaccgcagcttctgcggccgcaacgccacggtctacgggaagggcgtgtatttcgccaagcgcgcctccctgtcggtgcaggaccgctactcgccccccaacgccgatggccataaggcggtgttcgtggcacgggtgctgactggcgactacgggcagggccgccgcggtctgcgggcgccccctctgcggggtcctggccacgtgctcctgcgctacgacagcgccgtggactgcatctgccagcccagcatcttcgtcatcttccacgacacccaggcgctgcccacccacctcatcacctgcgagcacgtgccccgcgcttcccccgacgacccctctgggctcccgggccgctccccagacacttaaccgaaggggccaccctctggcctcctgcttcccaggctcccagctccgcacaggctgatgctccccgcccccaactgtggccgcctgagctgtccccggggacgcccctgcctccctctgcgggctccagaaggcggtgtgggggatggcggtcagcagcggccgagaggggctgggctaggtcccagcctgggccgaccccaccaccaggggtcagcagagcccaggaggcgacactgcccgcccgccgctcccagacctcgcccgagtcggctctgttgtttgaataaacgtgaacgtgaacccaggcggaagggacccggg

SEQ ID NO: 4368 - protein, 1025 aa, Homo sapien
MVAMAEAEAGVAVEVRGLPPAVPDELLTLYFENRRRSGGGPVLSWQRLGCGGVLTFREPADAERVLAQADHELHGAQLSLRPAPPRAPARLLLQGLPPGTTPQRLEQHVQALLRASGLPVQPCCALASPRPDRALVQLPKPLSEADVRVLEEQAQNLGLEGTLVSLARVPQARAVRVVGDGASVDLLLLELYLENERRSGGGPLEDLQRLPGPLGTVASFQQWQVAERVLQQEHRLQGSELSLVPHYDVLEPEELAENTSGGDHPSTQGPRATKHALLRTGGLVTALQGAGTVTMGSGEEPGQSGASLRTGPIVQGRGIMTTGSGQEPGQSGTSLRTGPMGSLGQAEQVSSMPMGSLEHEGLVSLRPVGLQEQEGPMSLGPVGSAGPVETSKGLPGQEGLVEIAMDSPEQEGLVGPMEITMGSLEKAGPVSPGCVKLAGQEGLVEMVLLMEPGAMRFLQLYHEDLLAGLGDVALLPLEGPDMTGFRLCGAQASCQAAEEFLRSLLGSISCHVLCLEHSGSARFLLGPEGQHLLQGLEAQFQCVFGTERLATATLDTGLEEVDPTEALPVLPGNAHTLWTPDSTGGDQEDVSLEEVRELLATLEGLDLDGEDWLPRELEEEGPQEQPEEEATPGHEEEEPVAPSTVAPRWLEEEAALQLALHRSLEPQGQVAEQEEAAALRQALTLSLLEQPPLEAEEPPDGGTDGKAQLVVHSAFEQDVEELDRALRAALEVHVQEETVGPWRRTLPAELRARLERCHGVSVALRGDCTILRGFGAHPARAARHLVALLAGPWDQSLAFPLAASGPTLAGQTLKGPWNNLERLAENTGEFQEVVRAFYDTLDAARSSIRVVRVERVSHPLLQQQYELYRERLLQRCERRPVEQVLYHGTTAPAVPDICAHGFNRSFCGRNATVYGKGVYFAKRASLSVQDRYSPPNADGHKAVFVARVLTGDYGQGRRGLRAPPLRGPGHVLLRYDSAVDCICQPSIFVIFHDTQALPTHLITCEHVPRASPDDPSGLPGRSPDT

SEQ ID NO: 4369 - DNA, 1648 bp, Homo sapien
cgtccacaagttcagagccatgctgggcaagaaccggctcatctttccaggcgagaaggtgctcttggcgtggtctggggggccttcgtccagctccatggtctggcaggttcttgagggcctgagccaagattctgccaaaagactgcgctttgtggcaggagtcatctttgttgacgagggagcagcctgtggccagagcctagaggagagatcaaagaccctggccgaagtgaagcccattctgcaagcaactgggttcccatggcatgtggtggccttagaggaggtgttcagcctgccaccgtcggtgctttggtgctctgcccaggagctggtgggatccgagggggcctacaaggcggccgtggacagcttcctccagcagcagcatgtgctgggggccgggggtggtcctggcccgactcaaggggaggaacagccaccccagcccccgctggacccccagaacctggcaagaccgcctgcccctgcccagactgaggctctttcccaactgttctgctcagtgaggacactgactgccaaggaggagcttctgcagaccctgcggacccacctgatcctccacgtggcccgagcccacggctactccaaggtcatgactggggacagctgcacacgcttggctatcaagctcatgaccaacctggcgctgggtcgaggggccttcctggcctgggatacgggcttctcggatgagcggcacggggacgtggtggtggtgcggcccatgcgggaccacaccctgaaggaggtcgctttctacaaccgcctgttctccgttccttctgtcttcacaccagccgtcgacaccaaggcccctgaaaaggccagcatccaccggctgatggaggccttcatcctcaggctgcagacccagttcccctccactgtcagcactgtgtacaggacaagtgagaagctggtgaagggcccccgggatggccctgctgctggcgactccggcccccgctgcctcctctgcatgtgtgccctggacgtcgacgccgctggtctgtgtttcatgctcttggggtgatggggggagggagccagggagtgggtgtgggggctcagcagccccaggctccgtcaccccctctctgcttgcagacagtgccacggcttttggggctcagacctcctcgcgtctctcccggatgcagtcacccatccccctgactgagacccggacacccccggggccctgctgttctccaggggtgggctgggcccagcgctgcggccagggggcctgcaggagggaggacccccaagcctgcattgaggagcagctgtgctacagctgccgcgtgaacatgaaggacttgccctcactggaccccctgccgccgtacatcctggctgaggcccagctccgcacacagagggcctggggcttgcaggagatccgggactgtctgattgaggacagtgacgacgaggcgggccagagctgagcgtgaggacgtgcttgccgggacagcaggcagtggccacctggtacaccacactggagccggaaggcaaggacgggggactggcctctgattgtccatttgtataaataaaacattttttaattaaaaaaaaaaaaaaaaaaaaaaaaaaaaaaaaaaaaaaa

SEQ ID NO: 4370 - DNA, 2437 bp, Homo sapien
aaaatgctacagatggaatttgtcctcctaatactcatatgttggaacctaatatgactctatctggagacagtgatagtaggagatagttaagattacaggtgtgagccaccacgcccatccaggagcagctctttttttaaaagtgagtttcagcaaacagtattgaataaaagcatccttttcatatcttcatatactactttatgatgcaataatttactgttcctatacatattataaggtagaaaaaagtttttaaatccttataaagaggatgcagtttagaaggttaatatgtcagcttacccagacatattctatcaaggaaaacctagtggtagcaataaatctttggaaaggacttcttatactcatgtacctttaaaacatctaagcaatttaaaataatccctgttgagtttaaattcgagatgcatttaggtaaatcggataaattcaacatttgaataaatccgtcaggttttagatggtgggattgatgaactttggtactttctcaatccaaaactaatttatttggaactagtacgttatggcttctcagtcatgaaaagctcagttatttggggtctacattttctcactgagagccttgatattttgccttctttgttatgcattataacttgactgtatcaccactgagtatctgctgtatcagaagttcagaagaaaaggtaaaactgaaatcagaatgggggtagaggaagttaaaaacaagttatttaaaaagaactcttggtttttggatgacttgaattctgttaaatctgtgttcttggccttgcacttccgttcctcttccatctctatccctgctagtcacaatggcattttagaactagaatgccactctgtagaggttttcccttttgctctgttgtgcctatttgtctaattcatatctttctgtggagtttcatatgtccttaatctaaagtaacttaaaattggaatggaagaacaagtttcagaattatttacagtcttatacatagaacttctagtgtaatgtttggttgtaaggagaatgtgaatttgcaggtaaatgaattgtatggcaaccagacagatccctggggtttgggagaaatagagcttgagatttgaaaaaaaggtacaaggtacaaaacaactctaactgccagtgccaaagggctaatttttaagcatgtaagctttaccacagtcttgaaaaaaatattaaccataggttcattcagctgttttatttaacccttagttccctggtggttgattttttttttaaatgggtctccagctttccagtgaaatgtgacactctcaatagaatgcataatgttggtttctaaagttacactccataattattgttattctgtagaaaactgtacagaaggtaaatagaatagcttcaatgggaatataatttaaatttttttaattttataaaaatttatttccattgcattaaaagaaatgggtagcatgtgtctttcagagaaaggagctatttggttattcactttgtcaatcttaggtttttttaaatctttaaacaatttcttctttgtgatgataaaaataatataaatttactgtttctgatcatgactgagtctattacttgtcatggcttttgtacgcaactgtgttttaaaaataccggttttgcctctttggttacatgtggtgagcatggatgtcaagattatttttcaactagattattcaatttgttttatatttcttatacttaatacttatgactacagtccaaatcagtcttttagaaggtgctcttgctaactgtggaatatttgacgacatgaaagtcctttttctttgctttcagtggttggctttcactgaaagaaagtgtaaaaaaagtcagaatttatagctttcactatgtccaagactaggactgggttataaagattttcttttgtgaaggaaaataaaagaaaatttgccactactgcatttactttactattgtaaacttaagattcattccttagtctttggaattttgatgtctcaaaaccagatgagtggaagtgctgaatttgcaaaataaagctaagaatgcttaactctgcactttaagttctactctgaccaaattgaagatgagcagagcagccctgaacagcattttgtttatacagtcttgtttaagaatagaatttttttaactcttcattttttgtctctgtggaagctgtgtaactctttttaaaatgcaatttaaaacattttgttattctaacaattctctcaaaaaacagcatttccaatggtaatcggtattgttacgctgtacttatgtattccctgtacctgaacacttgttgctgcctcacaagaaaatagaacttttatgttaaaaataaagtctgttcttcttgagtttttttcaatgaga

SEQ ID NO: 4371 - protein, 14 aa, Homo sapien [sequence omitted]

SEQ ID NO: 4372 - DNA, 5061 bp, Homo sapien
  Unsure 332, 341: Unknown base
gagctgccgggttacctgctttggggtttgaactggctgctggttttattcccctcccctgtctctggtctctccgttcttcttttaggttgctccaccccggtcaggatcaggcgagggggaaccagcctgagtgcagctgccaactcccgccgagtgcgtctgcgaactcccggagcggagtcccgcgtgccgccacctccccgcgggacgcactctcctcgctcccccgggccccgcgtcctccccccggccacccttccccacttttccccccttttccaatcacatggcattttaagaatgccggaaagatggcggtagcggcggcngcggcggcngctgggccggctggcgcgggaggcggccgggcgcagcggagcgggctgctggaagttttggtgcgggatcgctggcacaaagttctggtgaacttgagcgaggacgccctggttctgagcagcgaggagggcgctgcggcgtacaacggcatcgggaccgccaccaatggctcgttctgcaggggcgccggggctgggcacccgggcgcgggcggcgcgcagcccccggactcgcccgccggggtccgcaccgctttcaccgacctgcccgagcaggtgcccgagtccatctcgaaccagaagcgtggcgtgaaggtgctgaagcaggagctgggcgggctggggatcagcatcaaggggggcaaggagaacaagatgcccatcctcatcagcaagatcttcaaggggctggcggcggaccagacccaagccctgtacgtgggcgacgccatcctgtccgtgaacggagccgacctgcgggacgccacccacgacgaggcggtgcaggcgttgaagcgcgcgggcaaggaagtgctgctggaagtgaagtacatgcgagaagccacgccctatgtgaagaaaggatccccagtatccgagattgggtgggaaacacctccgcctgaatcccctcggttagggggcagcacctcagaccccccgtcatcgcagtccttctccttccacagagaccggaaaagcatccccctcaaaatgtgctacgtcactcggagtatggccttggccgaccctgagaacaggcagcttgaaatccactctccagatgctaagcacacggtgatcctaaggagcaaggactcagccacggcccaggcatggttcagtgccatccattccaacgttaatgacctgctgacccgagtgattgctgaggtcagagagcagctggggaaaacaggcattgctgggagccgagagattaggcatcttggctggcttgcagaaaaggtgccaggggagagcaagaaacagtggaaaccagccctggttgtgctgactgagaaagaccttttaatctatgacagcatgccacggaggaaggaagcctggttcagcccagttcacacataccctcttcttgccaccaggctggtccattcaggtccaggaaagggatcaccccaggctggtgtggatctgtcctttgcaacgcgaactggtaccaggcaagggattgaaacacatctcttcagagcagagaccagcagggacctctcccactggacaaggagcatagtacagggttgccacaattctgctgaactcattgctgaaatcagcactgcttgcacctacaaaaaccaggagtgccgtttgaccatacattatgagaatggattttctattaccactgaaccacaggagggtgcctttcccaagaccatcatacagtctccttatgaaaagctcaaaatgtcttcagatgatggaatcaggatgctgtatttagattttggaggcaaagatggagagattcaactggaccttcattcctgccccaagccaattgttttcatcattcattccttcctgtcagctaagattacaagactgggcttggtggcctgaagacaggggtgacttgcctttgagaaaagaagggctgcaatgccaccagagaacgtgatgtcagacaccatctgtagtgagcagcgcaccagatgtagcgtgctacagtcagctttagctctcaagagtcgtatgtaactgtcccagactcctctgtcagtttcagcaactacaagggataccctgcgaaagtaccatgagaaatatcagagtaaaactttctagaacagtacaaggttaaagaggtgaggtgacgggaaatacacagcatagctttgaaataatgacaaccaaggacatgaccattagaacagcatgtgcagatcttaatcatcccagttcctaggcaacttgttcaccaggtacgcaagggccgaatagttgagaaatggacatttttacctactcctcctagccccctatccccagtaacagtgatcccttttcttattgtgatttatttcctaattcttgctgagttgactttcccttgtaggaaaagaaaaatatttcaaatagaaacccaccttttatttaagtatgaagcagctgttactttttaaaaaatgaattatctttcaatggtgtagaatgattccaaagtgtctccattagcatatactgagcaggaattaaataaagcatcagatactgatctgagctgtaagctggtagaatctgagccaaagtagactgcttaaattgataagctttgctaaagagttgtatgcacaaaggatgattaattctgggactatactcacaccaaggtctgctgtcttatagccaagaattacagctttatttatagagagtgaattatgggtattttttcagaaaatattgtcatctgatatacacataaaacaactcacattgttggagttaactaattatccccatttcatggttttcagtggcaacttactgacccttgtttttgcctgtgcttgtatgcatgcattttcaagcaagtaataaagcagcctcatttaattctggataatgctgggttttacatatagactgaatgctataatcaaatctattgacagtatctgcagttctttcagaattccagggaaataatataacgacctgatatctttctacaggaatattttcagacattatatagcacattactgatttaatgcttttacttttatctttcaaaacaaattcactaaaaataacacctattgattttgaagtcacttttctcaaaccttgaaaatgagctctaggatctctataaacatttctaacacttttcctgtagtttacatagacagacatctgttgttagacctgtgtgtttttaaagaatcatatgttaacaaatacccatgcaaagagcttcaaaaagtgaaaccgtattaaaggaacacaatttttctcactcagacatatttgtttattgaattgcaaagttttattttaaatcagcatttccccaaagaatatatcatatgacgctagttccaaggggcttgactgagtggtgttttgctggggggagacaggggtttgttaatacactttactaaatactgagctgaaaaatgttaaatagatttcacgattgcctccttgaagattttaaagttcattgtggttcttcaaggcgaaatccggtgaaccattcctcacacttacctacaggactcttttctaatggagcatcttgtgaagctagtgggttttttagtgttgttatttgttttttgtttttaatgctttagaaaacacagctttaggatattgactttttgtttatttctattttcaaatgctgaaaagtcaagtcccagtttgaataccatagaaaagctttgatgcatttgtaaattatattgcactctttcactatatattttcaaaatcactggaatgttgttatacaagagaattataattgtgtattgtaaataacatattaaaatacatatattaatgccaatagttaaattcaacaatatgtaatctaaggtgctcggttctacatgaagtatgagttaactgctcataattaagttgccaagattctattatatatttatagacaaattaaaatgatcataattacaaatatgatttctttatcacttaagctttgggctgattaatatctgtgtgggggtcaatggaaactacattctctacatttataaacatttaatttaattatttatattttaggaaaatatatttgaataaaattaatgcattttctagagtaaattaaaatgttattagcaagaaatagaaaatttgactaagataattgtgtatatgaatcatttttcccccaagttaaaatgtatcataatagagaggctctaatgaatcaatttccaatactcatttctttcttattttgaattcaagttacaatgactttacactgtagattttaatcttgtctgatgtgtgctggtgtgtatgacacaaactcataagtctggatcatgcttgggtacagtcaatgaatcaaccgagtcactttgaggaatttgtttttgtccaatttgctctgtgctcaatcccatgaattattaaatttacaatgtttgtccccaaatgaaaaccaatataaatgaatgatgttttaatctgtactttatgggaagttgcctatttgtcagtagatgtggttaagtgagtcctctggtgcagtgacatccttttaagccatctcatagggatttaaagaaggccaataggaatatagatattggtttttctttctctgacttgaactaagtaggagaaaccaaaccataaacctattacaaactacccaggcagaggcatttacttaattcatcaactagtgcaattaaaaccctgaaaacacatgatccttgttgactctgcttggttgaagcaggaaagaatggtcttgatggtcagaaagttttaaaattaatgggcagggcctttctggaccctgttttccaaacacgttagatattccgtcttgaggggattggagtaggctacagtgagggggtaatttttggatgtatctggacttttaaaaaatgtgcctatatttatagcaccatgaatattatgtaaaatttatatatgaattaaataaatattcacctctgatttccagtgc

SEQ ID NO: 4373 - protein, 642 aa, Homo sapien
  Unsure 332, 341: Unknown amino acid
AAGLPALGFELAAGFIPLPCLWSLRSSFRLLHPGQDQARGNQPECSCQLPPSASANSRSGVPRAATSPRDALSSLPRAPRPPPGHPSPLFPPFPITWHFKNAGKMAVAAAAAAAGPAGAGGGRAQRSGLLEVLVRDRWHKVLVNLSEDALVLSSEEGAAAYNGIGTATNGSFCRGAGAGHPGAGGAQPPDSPAGVRTAFTDLPEQVPESISNQKRGVKVLKQELGGLGISIKGGKENKMPILISKIFKGLAADQTQALYVGDAILSVNGADLRDATHDEAVQALKRAGKEVLLEVKYMREATPYVKKGSPVSEIGWETPPPESPRLGGSTSDPPSSQSFSFHRDRKSIPLKMCYVTRSMALADPENRQLEIHSPDAKHTVILRSKDSATAQAWFSAIHSNVNDLLTRVIAEVREQLGKTGIAGSREIRHLGWLAEKVPGESKKQWKPALVVLTEKDLLIYDSMPRRKEAWFSPVHTYPLLATRLVHSGPGKGSPQAGVDLSFATRTGTRQGIETHLFRAETSRDLSHWTRSIVQGCHNSAELIAEISTACTYKNQECRLTIHYENGFSITTEPQEGAFPKTIIQSPYEKLKMSSDDGIRMLYLDFGGKDGEIQLDLHSCPKPIVFIIHSFLSAKITRLGLVA

SEQ ID NO: 4374 - DNA, 2935 bp, Homo sapien
cacggctttgttccggaaagcccttaggtggagagcgatgtggggcgcggcagggggatcgcgtagaggaaccttcgcgcaccgcctctccgggtctgggaatctgctgaactccttgcctctcttggggtccctcgaacgccccagctaagaagggcgggggccttgccagggcgcgagcaacatgacgttcaaggtcttcctgtggcttctgtaaagaaatgttcacgtgggagcctgtccacatgggctgtactaaggatctggcacgaggaagaaatatcactgcagaacctgaagccctccgttggaagggtcgttcactcgagtacctattctaagtaacagtgacacaaaacacatgttagaaaaaaacaaaaagtatggtaggttatactgttttttaaaagaaacttttatttatgccttttgctgttaagtcctctaattttacattggaactgagtcattcttggagcaaaactagaataggtttgtatttgttttctttttggatgtgtatctaaattgtacataattaagaaaaagcaagtaatggaaaagctggagatgtagaacttagttccttctaacttagtatgcaattgaaagcctcaagtcaagactcctgtgtattgttttgtattaggactctattgtacaaatatttgagtaccttaatatgagtcagttactttttctagatcttggatccatgccagacaacgcacattctgcagacactggttactccagtggctccttactggaaacataatatcagtgataagtgctgtgaagaaaataaaacaatgatgtgctggtatggatttttaacttttttatgtgatgaaccacagaatgatggttttaaatgtatgaaatacatagaattgcaacagaaaccagttatgaaataatgaagatattaaatatgacatctatattttagtaaagcattagtgaggactgtaaatgatctttaaagaatttggcttaaatttaatctaaaattgctatcaggtatttcacatcgctgtaatttttgcctgcattcgtaactgaagagataagtaaatgtcagaggttaagataaatctttttctttttttacctgtccatatttacaaacattctgcgttccgtacatagacgcctggataagaacccctgtgcaagaatgactttggtgctactttaaaaaaagtggttggggaagacctcataggaaatgacatcaataatagattgcatgataacctatactagttcttactgttaccaatttaaattctaactgcttaaaagctaacacggtccttccctttttttgagcacctgatttgaagtactttgagtaggcctcaagtgtcgtatgcaagtactaatctagggggtgtgcctttttcaaaagtgatttttggagaagataggatgtagtattatagcaaggaaaattcagcatctgggatgatcatttccttctgattagagaaatttaccttgttaatattctgttcacccaacccttctaccctcagtgttgaccaatactggaaaaaatttagggctttggagtgaaattttaaaagttcaaaaccttgatctattaattagtttgcttaccttgaggaagttgcttatcttaatcttctatttgaacttcaagtacaaaaaccctactcacggacttaactgtgaccattaaatgagataaccaaaaggctgaagatgatagtgagttgattttaccttttttctacatacagatgtttcagttctttcattagtggttgaaggtctgcgttctttttctccctccactccctccttgactacccccagaatgagctttgatggtctctactgggcctttgggggggatacattatcctgttgtttttgttctgttacttatatataatactcatggatttatttctacttctcttccattttctaatttataataacatgtgcatcttgttttccctgccaaactaaatttcgtgagggggtacatactgcacagttttttttgtcacatactgcttatgacacatgaatatgcagagcttgtcaagctctttaattaagtttaaaatgctaattgagtgaatcaaaacttaaccattatggttaggctaaaaatgtcagcttgtgtttatatagtgcttacctcagtattggaaatgccatgagtttagtatcagaaggacattattactagtgcattttaaagtgataccagtcatagttgcaaaagaaagtacacaatgggaaatggaagagaaatgtagggaatcaaaacaactagttttttcctttataacggaagttttataattcatcttttatgtaagtgtaattctcattaaaaataccctaaagcttaaagtttgcaaggctgcccagcctaacccacaacagtttgatgctgccccctagcgtttgattcccttcaccttttgctaaaataaggtaatgtttaaattacaattagatttacttactgctgtaaatctggtctattttagtttcctctgggtagttagtgttgctaataagatggacgtaagtgtttttgaactggtgaattctgattgcttttagcccccagttttccaaataggggtgaattttgggtagagatagaacaatcaccaagttaccttgctccaaaaaagaaatttacgtatgggattgttttcaaagcgggaagttagctgtgtaaataacaacaattttatatatttaatctgggcttctccttatcttgaatgatataaaaatctactttctagattaatttagttccatataactttgtattgctttgactgtactgataataaagtttgaaagtgttaaaaaaaaatctatgtcgggtgcggagaaagaggtaatgaaatggcaggaattcgatatcaagctt

SEQ ID NO: 4375 - protein, 49 aa, Homo sapien
TALFRKALRWRAMWGAAGGSRRGTFAHRLSGSGNLLNSLPLLGSLERPS

SEQ ID NO: 4376 - DNA, 2857 bp, Homo sapien
cctcaaccaaatgcaattttttgtgtgtgtttgaaagctaatttgagaaaatttcataggttacatttcctgcagcctatctttatccacagaaagtgttttcttttttttaaatcaagacttttaaaactggatttcctcccatcactgttttttgaaggtcctccaagtccgtgttaaggtaaatatctgttttcttcctgatgtcacagcctgagcatactctgtgcattaggaagacctgagtgcatttcccaccattgtcctttccacattatgttgtagctggctggctgtcaggcgactacaagactgagggtcttgtgccttatagatctttgtatcccccatggctgacacatagtaggtactcagtaaatggttttataatgaatcagtgaacattttgcttctatagaagtgtaccttctttgtttctatattatgaaacctctttattagaatttgtgattgattctgacagtgtatagatttaccttatattgtctttattttccatgagctactaagtcattagagatactctgaagcatagttagtttaggaaatcacttcatattgattgtattagaattatcttggaattgaagatatatccctagagcaggggaccccaacccccaggccatgggccacacagcaggaagaggtgagtggtgggccattgaggagcttcatctgtatttatggctacttcccatcactcgaattaccacctgaactccacctcttgtcagctcagtggcagcattagattctcatagaagcacaaatcctattgtgaactctgcatgcaagggatctaggctatgcgctccttatgagaatctaatgcctgatgacctgaggtggaacagtttcatcctgaaaccacccttcaccctgcagtctgtggaaaaattgtcttccacaaaactggtccctggtgccaaaaatgttggggaccgctgctctagagagaggtcatgatatcataccaaccaaatggaaatgacaaatgttttatgtcaagtgttaattgcagaaataaatcttttttttttttttttggtagaaaacaaagaggcatactctgatttttatactctgtttttgcaggtgctcttttctttgaatggagatttgatgagcaagtggttaggatgcagggagagctactatgggtgatattttccttgtttaggagctgtgagttaaaattgtatcctttctggtttatctaaggaaagtcaaatcttgacagaaaacatttttccttggaaggtcaactctcagacattgtattttggtttccctcagtcctcataacttccttcttgctgaacatattttattctcttttcagagaaggaaaataaaaaggattctaaaagtttgatgcattggaaaaatttccttgaggcatttagcaacacatagaaaatgggctttgattcttttccaaaacttttagccatagggtcttttatagacagggatagtaaaatgaaaattgagaaatataagatgaaaaggaatggtaaaaatatcttttagggggcttttaattggtgatctgaaatcttgggagaagctgttcttttcaggcctgaggtgctcttgactgtcgcctgcgcactgtgtaccccgagcaacattctaagggtgtgctttcgccttggctaactcctttgacctcattcttcatatagtagtctaggaaaaagttgcaggtaatttaaactgtctagtggtacatagtaactgaatttctattcctatgagaaatgagaattatttatttgccatcaacacattttatactttgcatctccaaatttattgcagcgagacttgtccattgtgaaagttagagaacattatgtttgtatcatttctttcataaaacctcaagagcatttttaagcccttttcatcagacccagtgaaaactaaggatagatgtttaaaaactggaggtctcctgataaggagaacacaatccaccattgtcatttaagtaataagacaggaaattgaccttgacgctttcttgttaaatagatttaacaggaacatctgcacatcttttttccttgtgcactatttgtttaattgcagtggattaatacagcaagagtgccacattataactaggcaattatccattcttcaagacttagttattgtcacactaattgatcgtttaaggcataagatggtctagcattaggaacatgtgaagctaatctgctcaaaaagatcaacaaattaatattgttgctgatatttgcataattggctgcaattatttaatgtttaattgggttgatcaaatgagattcagcaattcacaagtgcattaatataaacagaactggtggcacttaaaatgataatgattaacttatattgcatgttctcttcctttcacttttttcagtgtctacatttcagaccgagtttgtcagcctttttgaaaacacatcagtagaaaccaagattttaaaatgaagtgtcaagacgaaggcaaaacctgagcagttcctaaaaagatttgctgttagaaattttctttgtggcagtcatttattaaggattcaactcgtgatacaccaaaagaagagttgacttcagagatgtgttccatgctctctagcacaggaatgaataaatttataacacctgctttagcctttgttttcaaaagcacaaaggaaaagtgaaagggaaagagaaacaagtgaccgagaagtcttgttaaggaatcaggttttttctacctggtaaacattctctattcttttctcaaaagattgttgtaagaaaaaatgtaagacaaaaaaaaaaaaaaaaa

SEQ ID NO: 4377 - protein, 59 aa, Homo sapien [sequence omitted]

SEQ ID NO: 4378 - DNA, 1752 bp, Homo sapien
cgcctcaccctcccacagtgctggaattataggtatgagccactgtccccggccagatttttttaaaagtaggtatcttgtgggatttatgttctgagagatacacctaaggaaatgctgccctacagtgtttttgctagttcatactcattacaaaggtttcttgttgttgggtgcccctctagccagtggtagtaaaatgggaagagacaggtcaagactcccttggaccatggcattgagagagggatggctgtcggcatagatatgttggttatttaggcatttgtgagggaggcccctggctcttccagcctgtttccttaggatcccagttggccgggaacagctgtacaagggtctgctgaactggtggtttcagcagactacccagttcctaagcatccatgagacagagggaaccaacttgtatttccagaacaattttccaaaccttttctggctgtactttaaaagtgccaaaaaggcaatgggtgtttatgacactaaagtcacatacaagctagtatgatacatacatcatagaaagcttatagttgctcagtgacaaagcaaaggaagtttaatattttccagttttgttcattaccgaagacagtctacggttcatagttttcactaaattctaagcagattctatatcctaaaacatttaaacctcactaggcctgcaattttgagagggttagctaaatatgtttggtatcacttcagagtctaaaaccagattactaatcgtgtgtaaggaggcattttgtgtgtctttgcaatgtatacaattggattatttggaacaccattttgaatgtgtatttgagagaaagctcgcctgtgggttttgagttgtggtgtaatggtgaacatgtagccacgtgaaaggccgttggatctttgttctgattcttcagtcgtcttcttgcaaattcagagaaatgtcttttaatcatttcgtttacatatcccagatccttggaaatcatgaaaaataacttgccagagtttgcatcagccctcagtaagtcatgaaccatagagaaggtcatggggccatttattctttggaccactggctacttctgaagttctggcttccttctctctaggaggagtcgtgtattcaagcttttaagttaaatgcataaaaatgagttttacttctcttctgacttgatttttaattttatgaaatgggaaataatgtttttccatttttctgttcattttgaagtgggaatttgaggtgtttgtaatgtcatgttactgttctgaaagattgacagtaaagaagacaagaaatatatgtatgtagtatgcatattagttttgtcccaccaagcctatctttgaatggcaaacattttaaaaacatctgttctagttgcacaactactctagcttctttataaagtaaacaatcttaaagtaagcaatgttggccataatttcaatattctagccttgccgagtgtgaatatattttactcagagactatgtacaaatacactaaagtggtgatggtgatcaatattgtaaagaatttattctgataaatgagaaactggatataatgtcaaaatagctattttctcaataaaaatctcaaatctcctgactgcttatgaattctcgatttaatgttatttattctttgaggtaaatcttttcatcgcgaagaattttttgctggttgaatgtggttgttcagggctgggactgagctatagacatag

SEQ ID NO: 4379 - protein, 31 aa, Homo sapien
ASPSHSAGIIGMSHCPRPDFFKSRYLVGFMF

SEQ ID NO: 4380 - DNA, 3241 bp, Homo sapien
ttccagctcacttgcggtggcagcacaacttagggaaataataccatccagtgctttgcctaatggcacagttcagcatatcctcatgccagatgatgaaggtgaaggtgaattgtgttggaaaaaagtagacttaggggacatgaagaatgtggatgtcttatctttcagtcatgctccttcattcaattttctttctaattcatgttggtctaaaccaaaggaagataaagcagtagatacatcagatttggaagttgcagaagatcctatgggcctccaaggaatagatctgatcacagcagcattgcttttttgtctaggagattctccaggagggaggggtatatctgatagccgcatggctgatatttatcacattgacgttgggactcagactttttcacttccatctgcaatattagctacaagtacaatggttggggagatagcttcagcttcagcttgtgatcatgccaatccacagctttcaaatccaagtccgtttcagacacttgggctggatttagtattggaatgtgtcgctaggtaccaacccaagcagcgttcaatgtttacctttgtgtgtggacagttatttagaaggaaagaattttcttcccactttaagaatgtgcatggtgacattcatgctggactcaatggctggatggaacagaggtgccctttagcttactatggttgtacctattctcagcgtagattttgtccatcaatacaaggagcaaagattatacatgaccgccatttgaggtcatttggagttcagccatgtgtatctacagtattagtggagcctgctagaaactgtgtgttgggattacataatgaccatctaagtagtcttccttttgaggtcctgcagcatattgcaggctttctcgatggcttcagcttatgtcagctctcatgtgtatccaagttaatgagggatgtgtgtggcagcctgcttcagtctcgtggcatggtcatactgcagtgggggaaaaggaagtatccagaaggaaattcatcatggcagataaaagaaaaggtatggcgatttagtactgcattttgttctgttaatgaatggaaatttgctgacatcctaagcatggcagaccacttgaagaaatgcagttacaatgttgtcgagaaacgggaggaagcaatccctttgccatgtatgtgtgtgacacgagaactcactaaagaaggacgttcactacgctcagttttaaaacctgtactttaaaagttgtaatattactagcacatatatgcaagcacctagtataatttctttgtaatatgtgaaactttattaatgtattaaatattacaactagctaaatttattgtcactgtgtatataatgttttgaagtgacatctatttttataaagtactgtttagttggaaaaagttgccttaatgtttgaaatgtgtgaaatttttggaacttgctggacagggtgatttaatttttagctacataattttaagaattagtattttcagtggtgtgcatattttggttcttaaatttttgcttcttaaactaaaaaaatcctgaccaatttatttgttgttttctgtgggttgcgacccatgcaatcaaaaagcaaaattttgattgagattttttacagcataggtttttcatataaaaatattctgaatttgttaagcactgccataatatcattataatgtttttgtcttttagtgcttccctatacaattgttaatgcacaaatgatctctaatatatacttacatacgtaaaatcataaagtttggtaatgcagtttatcgttttaaaaataatccacaaagatgtttttatctcacatacttacaactcaacacacagagtgaccatgtgcagctttcttttttgttagatgccacatccgaagactcatcgcagtgtgttatatgacaggacaaagcaaaaacaaacaaaaagcaagcctgtgaatataatttaatttgaaactgctcctggtattatatatttgctagttatctaatgttttaaaagaaaatatacctcatttaggtttgaattgggcgtattgtgtaaatttcaaatattcagaatgcaaagggcttgactattaaatgtttgcctttgatgtttataaacattacaactatgttgttttaagacatttaaaaacgtgaaatttgttatctttgtaaaatgacaatcatgtagaaacctgtcttggttgacaatctctttgaaacatttccgagttaatttcccataggcttcaccaccaagaaagtaagaattgcatctttacataatgatcaaggtataatggaaaaatatacctattcttgaagtagtttattatagttttcaaattgatttataccattattaacctgatgtggtctgcttaaaaaatgaatatatcagtatttagaaataaattgcaaaggtgggaatatatacttaaataatttgtcttaagtaaattagcatttggtagtctgaaatggtgacagattacttgttaaaattgtgaaaactctgttgtgtcctctcttcctacatttgtccctgagagtactccacgattactaggttcttgattcccttatatggcaatcaggcagaggcgttccttaagcattagagagttctgaagcttaagatttgttttggttggatgaagtccttagtacagttgaaaaacagagcattaaagactaatcaattgttttgcctcaccagtcattttaaatagtagaatacttatttctcagtgcttaaaatttctttttcaactgtgagattgaataaacagtctctatttctgtggaaaaaacaacagaaaagagatattaaataccataaaatgtaactctgccttttaaagttttgctgaagaatgtgtctgtggttaggatagcacaagcattaacttttgttttatagttatgctttttaaaattcattgtttttaaatttagacttcttatttccacactggattatgagatacttaacaatttttccaccttatatttcttttacacattttgctgttctcttttttgttattgttatgccaccataccattttgttaaaatgttttctttgtgaaacatttgttcaagttctaataaaattaatgttttcccttaacatggctcaataacttaaaaacgttcatttaaataaaattttaatacttgtttgacaaaaaaaaaaaaaaa

SEQ ID NO: 4381 - protein, 390 aa, Homo sapien
MPDDEGEGELCWKKVDLGDMKNVDVLSFSHAPSFNFLSNSCWSKPKEDKAVDTSDLEVAEDPMGLQGIDLITAALLFCLGDSPGGRGISDSRMADIYHIDVGTQTFSLPSAILATSTMVGEIASASACDHANPQLSNPSPFQTLGLDLVLECVARYQPKQRSMFTFVCGQLFRRKEFSSHFKNVHGDIHAGLNGWMEQRCPLAYYGCTYSQRRFCPSIQGAKIIHDRHLRSFGVQPCVSTVLVEPARNCVLGLHNDHLSSLPFEVLQHIAGFLDGFSLCQLSCVSKLMRDVCGSLLQSRGMVILQWGKRKYPEGNSSWQIKEKVWRFSTAFCSVNEWKFADILSMADHLKKCSYNVVEKREEAIPLPCMCVTRELTKEGRSLRSVLKPVL

SEQ ID NO: 4382 - DNA, 2331 bp, Homo sapien
gtcaccttgtaactcatctctttttattgtaagtttattaaaaatgaagaggacaacaatgagaaggaacataaagggttagctagcactgtctcctggtgcatggggctgtgcagatgtcccggccacttcttccttcatacttcccttagagaacttgctctgctacaagcagtgggcttggactaaaagtgattaaaataccacaggcataaggagaaaaggagtatatgtagtagtaataattactagtataaattattttcttcacatgctatgagtaataatattaaaaaactcattttaccattaagattccttatgctgaagctcttccatttagaatactgtcaatgtcatttactggtatgaactaaagtcccccttcttttccactcactgggaaccttagtaaaacaccagcatatcttacctctctttctgactggccgatgcttccagagactgaatgttgggaaaacctagtagccaaacaattctaggacagaataacatttttatatttggttccaccatcttattacatttagttatagttttaaaaaagaaattcaagcccattaaaatatgtctggtcaatgaaatgcttccttttattgtgttgtgctattgtactttgtttttcaaaacattgtaaaaatagtatctttggtttagtattttggattatatattataatctgaggagtgttttgcttatgtagaatccagatatatttctgttacctaggagatgttacttacatatgtaatactgtatcctgcacgtggaaatattcagaattgtagatagcataactctccctgctcctattcttttgagcctaggtataattttttttttttttttagaaaaagacatatttagctttaatttctatttatgctaaacatatttataagtagtctgtcaatataataccaactatttttatttttacataattcaattatttcatttgacatgtctggcagactcaagacattaagtaaaaaattggaactatgatttttctttgtcattttttaaaaaagaattattttattaacctgctggcatataatctggagttcttttcacaaccttactttttctgatttgctttattgaatgattgaatactcatttctttctaaaaatatgttgtaaattctcccttggcaagatttctccctatgagggtagttattatttgagtctgccaagtggttaccatggggcaaggtgccatgatgtattcttgggtgcattggttttttgcgcattgtaaatttaagacacttatagtaagtggactcattcatagatgagtttcagaaccttttacgttctcggtagaggcttctgtcggacaggcagaagagtgtattcctcacttttttttttgtcttcaaattccagtaaggcatagcacttttaagaaattagaatttttctatcatctatgcaaatgatatttatgttaatattaaatatcttatgttacactgggagtaatttgaggtgcaattatttttattactactttgaatagaggaccattatccttctttcttcagaaaactaagaagtaagtgtaacttttaaagtaagtatatatcagtgagagtaggcttgttttacaactatttctagccagtgagttgtgttttcatgtctcatcaaaagacaataccacattgcatcattttacaaaatatgttgtcattttcatttcagttgtaacataggaaaatagatatttcctagatgatttctgagtttcttactgcaaagaacagttataaattggtatacatgtgtctctgtaatagggataatattgatatatctgttgctacatatttaagaatcattctatcttatgttgtcttgaggccaagatttaccacgtttgcccagtgtattgaattggtggtagaaggtagttccatgttccatttgtagatctttaagattttatctttgataactttaatagaatgtggctcagttctggtccttcaagcctgtatggtttggattttcagtaggggacagttgatgtggagtcaatctctttggtacacaggaagctttataaaatttcattcacgaatctcttattttgggaagctgttttgcatatgagaagaacactgttgaaataaggaactaaagctttatatattgatcaaggtgattctgaaagttttaatttttaatgttgtaatgttatgttattgttaattgtactttattatgtattcaatagaaaatcatgatttattaataaaagcttaaattctcatctaaaaaaaaaaccacta

SEQ ID NO: 4383 - protein, 26 aa, Homo sapien
SPCNSSLFIVSLLKMKRTTMRRNIKG

SEQ ID NO: 4384 - DNA, 4881 bp, Homo sapien
  Unsure 3603-3790: Unknown base
ggataattccattcttaaagttttgatcagtatgcaactgatgtctggtgacccatgttttaaaacgcctccctccacttcaatgtctataccaattgctggtgaatctgaatctttgcaagaagatagaaaaggtggagagactctcaaagtgcatcttggaatagcagatctttcagcaaagagtgcctctgttccagacgaacttggtgcctgtggacattctagaacatcaagctatgcaagtcagcagtcaaaagtatcagggtatagcacgtgtcactcccggtcatctagtttctctgagctctgccacaggagaaatacctcagtgggaagcacatcaacaggagttgaaagtattctagagccatgtgatgaaattgagcagaaaatcgctgagccaaatcttgatacagctgataaagaagatacagcttcagaaaaactcagcagatgcccagtgaaacaagattctgtagaatctcagctgaagcgagttgatgacaccagggtggatgcagatgacattgtagagaaaatattacaaagtcaagacttcagcctagattccagtgcggaagaagaaggactaaggctatttgtgggtcctgggggaagtacaacctttggcagtcatcatcttccaaatagggtggggtctggagcttatgaacaagttgtgatcaaacgctagaagtcaagtcggtgaaaacatttccttgtggatttaagatgtgagtagttgatgtatcaaggcattttattcaagcacttaatagaaaatgaacctcaactatcaagaggaaagccaatgctggtttcttctctggaaggacccaccgccatcctgtaccagccaccaaaggggaacatctacatggcagtctccaggcactgtgccactgtgtgccttggaagcacctggcttctgtggtcactgcacatcataatgaaaagcctgctttttctttcagaacaccccagcggagaaaacagcattatatacatcggagtatcattttaggattcaagtgtaaaaatctgtgatcaagaggctcaatagatttgggctctatggttggtttttttagtttgagagacagtacatgaatataacttaaaccctatagattttgtcaagatagttgtaattcctgttctggaaatcttccctattacactacctacagcattgtataaagtgtgggtgttcatgctttgggaaaatgttagactacaatttaaacatgtgatgtgcttattcataattctcagtgtatcagtcataaatgaaataacaagtgcatttaagtcagagatacgtgaatggatgtaatgccgttatgcagtatatattgttaattgtcattaatattagatgagctgcagaaccacccccaagcactacataaaagactcaaaataagtttaacacttactgtgttgggcaccctaacagaagagctatcttaactcattgaatattaagatctgctggtttcaggagtcaaaatgtagaaaaagaggagaattgtaatatggtcagaaacagagaagccttttctatgtaaattcagacttatctgaggctaacagttttccgaagtggtggtgggtagcagcatgacagctgcttgccatgactgatgcagactactaggtttccattttagctctctgtaggtactgttttcttccccactgtgtcgaaagtgatttgttttgaagcaagagtagaatataacatctatcaaatatagcttttaaaataagaatacctggtctggatccagttgagcagcacagcagataaaccttagagtttttctgttcttacatgacggtttccatgtggaaagatctaaactttcttggaatcactattagtgaagaaaaatgtagaatctgtataaccagtaattccccaattcttactttcaaagtcatatccaagaaagacaatatgtcagaatagaatgactttggtctaggtgttttcacgttggcaaaaataaggaggaaattatattattttaatatccaaatttaaaggtttggaaaattttgaatagttaatattagaacttatgttgctgttttttatatttcaaggattgagtattctgcattaatccaatactattccaacaaagagattctggaagtttttaaaaaatgataccctgttttatattttgaatgtagagagactctgagagagagaatgttctgagttatactttttattttttaagatttatttttaagaataaaacattgacctgaacattttagcctaaccaagggacttaagtggtaaagacttgcattatgtcttcatgtgaactgatccgttcattatatattatgggaaaaatcaaagaaagttttttatagagatatgaagatattatttagagagatatttattatgacattttttaaaaacatatttttctattttcaaaatattatttctaggctatatttttattggtgctgtgcaaatgattttgcagttttgaaaatgataaaactagattgtaagtggggttcagtgaggacattcatcagacacgtaagaggtgctgcaatcagggtgatgcccatcttactcatccttggctgcccttggtccgacacctctctatacaagactggttctcagtattttaaatggtacagaattctttttaaaaagtagagagattttgaaaagcataaaaatcatgcctttataatcttagcagccatcagatacaccttgatttatgtagtagtaaatataacaaatattttaataaatagaaacactgataaggaagaaaaaagaactaatgtctatgtcttctgtagtcagcaaaagtctggatccattttctattttgtgttccattggcacactttgtgttcaaatttcagtgcagtcctttcaaaatactcgctaagggttgcctaagtgtctgccttactttctgattgtccttttctgagagcatggttaagaacatcttaaccatatagctgttgaaaaaatctgtttattaaataacaagttcacttctgtttatgttttgagtttagaaaatttgacttgaaaatttagattattaataaatttatttttaaatattaaagtcaaatttcaaatcacccagtgttgaagaatttgcagatgtatacaatactttttctaattatgtcttttctatctccatgcctggctttttctaattatatcctagagaaaaagactaatggtatttcaaagctgtgtatttgtgacgagataaagaagagtcttaaacatcttgtttgggagaatgcacaggccagtcaggagacccacctcctcctgtgccctgagctgctgagacccgacagatcatgaaggctagtaaagggcagagaaggccctgagccatcagtttacactcgaattgttgactcccctttgtggtgtttttgaaggctgcttataccaacagctaatgtggattagtgcttatgatcttgaaaaagtcttgaccaagaatcctaaactccaccactcctcccattccagcttaacactatcagaataatatccaaattccagannnnnnnnnnnnnnnnnnnnnnnnnnnnnnnnnnnnnnnnnnnnnnnnnnnnnnnnnnnnnnnnnnnnnnnnnnnnnnnnnnnnnnnnnnnnnnnnnnnnnnnnnnnnnnnnnnnnnnnnnnnnnnnnnnnnnnnnnnnnnnnnnnnnnnnnnnnnnnnnnnnnnnnnnnnnnnnnnnnnnnnnnnnntagtttcttttctgtatgctttttttacaaaactgtgagccacagaggttgaccacttagccaatttgttgctagaagggagaaaaaaatctccaactagcctccagacaaaacatactcaaattcaaacagcagttagttttaattaacatacagaagtaattttagactttcagatttctatgctgactagaacactttgcaggctgaagctgacattattaccaaatacttcatttaagtacatactctgaagtgtcaggcttccagtatatatagcaacgctctgagagacaaactgggctcatatgacggggttgcattttattttcttaacaggtctttaaattgggcagttctgaaattctgtttggtcagttctagatggtacgtcatgtgaatgcaaccaagcactgtagttgaaattgtgttatgccactactcatatgttgtcttaggtactacgcataatgttaatagctgagatgttaaagaatttgaagtctaaaatataaaagatgaatatacccatattaatcctatgttaagatgctctggaaataaaggccttattcccttacacatgcgatttttgtaagataatatatacacagtatattttaaatgtttgtgtgggtggtctgtgtagttactccccatacaacaaagctgacaaaatttttaatttacacaatgtattctgcattttcaaatgtttatgttgtgtatatagcaaagaaattatcttactgatatgcgttgaccaaatcccatggagaaaagacatctcatttgaggttccccttcctctcatgtgtttgattttttggaaggtgatacagtatgtgggtaaccatgcaaatgtttatgaataactttactgaagtgattccatccgtattctgttctaatacttggagaatgaccttcatatttatatattttatttctttgtttcaactatccagtgataattcaggaaatgtttccttttttttttttttttacaaaaactttttatttgtaaaatgtttgtaataatgtaaaggtgaacatgttcaataaaaatcatatattaaaagtttaaaaaa

SEQ ID NO: 4385 - protein, 231 aa, Homo sapien
  Unsure 3603-3790: Unknown amino acid
DNSILKVLISMQLMSGDPCFKTPPSTSMSIPIAGESESLQEDRKGGETLKVHLGIADLSAKSASVPDELGACGHSRTSSYASQQSKVSGYSTCHSRSSSFSELCHRRNTSVGSTSTGVESILEPCDEIEQKIAEPNLDTADKEDTASEKLSRCPVKQDSVESQLKRVDDTRVDADDIVEKILQSQDFSLDSSAEEEGLRLFVGPGGSTTFGSHHLPNRVGSGAYEQVVIKR

SEQ ID NO: 4386 - DNA, 5629 bp, Homo sapien
  Unsure 708-897: Unknown base
cgaagatccaagtttctttccatctgcctgaagaactttctttagcacttctggtatagcagacctactgatgataatttttcttttagtatatggtgattagtttactttttattcaactgtgtctttttttgaagtcttcttcattgaaatatattgttactaaatatagaattaatggctttctttaagcacttcaaagataatccactgttttctggactccgttgatacttaagtctttatttttgtgtaattctttttctttaaatgtgccatttttcatttttctctgactcctacctactaagatatttttacctaagtattgagtcagttttggttatgatgtgactcagtgtgtttttatttatattgtttggttgtttgaacttcttgaatctgtaaatgttgtgctttatgttaaatttggggggatttcagccatttaaaatataacttttcagtctcttccccctgggactccaatttttacatatgtattagacctattaatatttttctatggatacctgacattctttttaaatcttatttttggtgtttttcactttgaacaacctaataatttgtttccatccatgtttactcactgtttattctattttttcccaatctgctcttaagcctatcctgtgaattttctttttaatttattttattttttagttccagatattttctgcnnnnnnnnnnnnnnnnnnnnnnnnnnnnnnnnnnnnnnnnnnnnnnnnnnnnnnnnnnnnnnnnnnnnnnnnnnnnnnnnnnnnnnnnnnnnnnnnnnnnnnnnnnnnnnnnnnnnnnnnnnnnnnnnnnnnnnnnnnnnnnnnnnnnnnnnnnnnnnnnnnnnnnnnnnnnnnnnnnnnnnnnnnnnnntcgttgtgttgcccagctgtcttgactcccagactcagcgtcttcctgcctcgcctcatgcccgcgccaaccagttctttatttttaatattatgttgtatttgatgtgctatcctattcatttagtataagcacatttttctttatgtcttcagcataattatatgctttttcagaattttaacatcaggactgcttccagggtagctttattgccctttgtcttaagtatggattatagttttcattctttgtatgtcaagtaattttggattgtaacttgaactttgaatatactgtagaaactctgaattctattttattcttctaaaacaatatttctcagcttcagcactactgacattttgaactgggtcattttgtttgtgttgttgtgtgtattttgggagggtactgttctatatgcattgtggggtactgagtattatcctttgtctccactcactacttaccagtagcataactctctctcctccccacatcccctgccaaaaaatgccttcagtcctttctaagcgctcttttttatggtgttggggccaaaatcatgcatctttactcactctttctcattgagagctatggctataaagggtagtgatacttttacttatttatttttaaggcaagcagttaacttagctggattcaaactccaggctgcctcgtgtgctgtgggaagcagcctacgctctattcagttcttttcttttcatattggttgggttactttgagtctggcctacatgatgggcagtttagaggtcaaccaaaggatttcagcagaacttatacacagaatttcattcaggcttcccgtgtctgattggctacagtgtgggaatttcctcccacttttcagccactactgaggatgcctttcggcaaaattccttgaaattggaaacttacagggaaattcctttcctccaagagtgcgctctcctccagtgttggcttgcttttggttgttctccgtggttttagatagctgtctttatattaattctggagtttacagttgatatctgttgggggcttagtttgataacatgtattcttctattactagtagccagacctgtatgtcttacttgacctgatggagaaaagtttcaacttatgagacaatactgtgctagctagttttactgatttgtactctaaagtacccaagcctaaaatagtagagctgtctatcccacatgaaacttctctgattttcactgttttttataaaaagtatacatgttcacatttctgtaggtttttttaagcatcacaatttttataaactttctatatttccaaggtctacctgctttgtattttgcctagtgagagttttgtattcatgtaggaataatctcttggtgtgagtatctattttccactcatccaaaacagatagagcattgatttcactaagcgttatgttctagtttgctttggtattattattagaaatacctggtgattaatttgagctaagtattcttctctaccctcattcccagcattatcacccgcttttaccacttccaaggggtggaagcattctccacaatgcattttttcatgccagagaaaaatctagaaaaaaatgaataaaacgaagaaattctttccccttggtatctgtagctaacttgcctaagtgttctttcccacagtttaagtcttcagtccatagttcataagcaaaggggtgtagcgagctctgatcttgccagaagagagaataagtgagctaccccacggtggacattctggccatctgaaatgagtcgatgcatgtggcttttgtctaaaggctacaaataaaatgtaaccactttcttctttgagtagttgatatagcaaatagttgaaacagaagttttgattggcaaatcaggatgtggtagatactttaacaaagagtagaactattaccagttttatgtgttgctgtttgtatctctttcacagttttgataatatcacatcctggaaagtgaaacagaaaattattattccattttaaatgactaaatttgctttcatggtatttacagtgaaagagtaaattagaaagtgaatggatgactgttcatgagaaaaagcagggtaaaaagattttatttaattaattgaaaatattagggtcaaaacataggcttatgttatgttttgtgaattgtgctgtgttgtagacatttgatgagtcctaacatagaattgatctagctcttgaaataccatttttgattgagtataaatgggatataggcaccttacaacttcagaattcgaggaagatgatgtgaatcttccaattttatctatttgattcaaatggtatgttttttcacatttctcataatttccacgtcaactcccatgatgatcatgcaggaaagcagcatgattgcacttcttgtagtgcataccatcactaaaacatagttactgtctttctgtggtcttaagaaaaattcagaaacagcataccaatgtacatataagataaataagcttatgtggtacagtaagtgttctgttctgagaaataccttgattcgtatcctaatgtctgatgttattggtagttctcaaacttccccaattctgctttcatctaaattcatcttatctatctattgttaaataatctatcagtccatttttatctatcatctatatatctgtctttatcaatcattcgtctgtaatctatctgtgccgtttggcataagagacagaagggcatagcagtggaaactcaaaggagttacctccatgtgaatggacagtggtgatggtgatctgtgaggtggtgatgtatagaaagaaaaactagaagagagcatgccctaactcagggaccttgtccagcaggcactctggccttgttatactgtgcttgaatatgaaaaaaaaaaaaatcaaaatagtgctgacattctttgtcttctgggtctgagaaaacttagagtagatatgatgactctgccatttcagtcttttgtatttccacatttagagctcagttttaattatgtagaattatttctccagcctgtgttaaactagaccatggattggcaaactttttttgtaaattgccaaatacacattttcagttctgaaagccttgtggtctttgttgcagctaatctactctgctgttgtgttatgaaagcagccataggtaatttataattgaatgagtgcgctgtgcctttcttccaataaaactttacaaaagcatcctgtgggctggagtttaccctttgggaaaccagagcattggctaaactggaacctgaaaaaataatcacatcaactcagccacatggtaataatatttagagtattatttcaacattttcattttcataaaaatttttttagctcttttgccaaattccatctgtgagtgatacaaatgactaccacgtgccattaacatcacctaaacagtgcaaaacaagcatagtagaagtaattggaatgatataaaccccttgctgtaatagttatagttgataaattatgtttcaaaattgaacctatttcttccaaatttcatctataaagttccaaggagttccaaaatcttgcctgccttcttttcccagttagcagtattgtctctgagcagccatggtggtatccatcctccttggacaatgaatttagcctattttgacttcatttgagcagttgtaattgtttcaccacatcagagtaagattactacatgccagagctattctttaactcagcttgtaaaaacatgatagcatcaacaatatacatagcaaatgaatgccatctttaatccaattaaatggtttttacaaatttgctcttgtttgttgatgctatctgcattgcagtaattaaaggtgaggtaaaaagaatgaataaactgccaagttaaaattaaatttgggcaatttctcttttgcagtaatgtatgtatatttactcaaaacatatgccaaatttagtgttgaaaggctcattcaaatcaattgggaaagcacgtaaatgaacaattcataaaagaaaagcattgcaaatggccaagagcatagaaaatgtgctcaatcttaccagtcattataaggaaataatgaaatttgtgtatatatgaaatacttaaaatatatataaaataaaacaattatttgccttttttcacctatcagattaacagattatatgtgttaacaaggtggggagaatttacaactcctgatatgttaaaatctttcaggaaggtagtagaaaatatatgtaagatggaaattagcacttttgaccaacaattttagttttagatatttacctataaggatataataggaggtgttcaaagatgcatgtaactcaatgtagtattaattataattgtaaaatagtaaataacatttttgtcaaatcataatgttaggaaaattagtgatggcacatttaaccaattgaattatattcagttctgaataccgtgatgcatgttcaaattaattgatacaaaaatccaacaactttagcagtttgtttaccagttattgagtaccaactgtgttcaacattgttatttcactcatatgaaatgataaatgtatgtgcttgttatgatacggtcaataaaaccacttttataggaagaatacgcccaaaaaatctatgtcgggtgcggagaaagaggtaatgaaat

SEQ ID NO: 4387 - protein, 114 aa, Homo sapien
  Unsure 708-897: Unknown amino acid
MVLGPKSCIFTHSFSLRAMAIKGSDTFTYLFLRQAVNLAGFKLQAASCAVGSSLRSIQFFSFHIGWVTLSLAYMMGSLEVNQRISAELIHRISFRLPVSDWLQCGNFLPLFSHY

SEQ ID NO: 4388 - DNA, 2473 bp, Homo sapien
ttgtgatgaacttcaaaaacaataattctaagtggaagacctataaaggaattgtgaataatgaagaaaaggtgcttcagggtaactctaactttcgggacccagtgcaaaacaatttcatccctcccatcgtggccagatatgtgcgggttgtcccccagacatggcaccagaggatagccttgaaggtggagctcattggttgccagattacacaaggtaatgattcattggtgtggcgcaagacaagtcaaagcaccagtgtttcaactaagaaagaagatgagacaatcacaaggcccatcccctcggaagaaacatccacaggaataaacattacaacggtggctattccattggtgctccttgttgtcctggtgtttgctggaatggggatctttgcagcctttagaaagaagaagaagaaaggaagtccgtatggatcagcagaggctcagaaaacagactgttggaagcagattaaatatccctttgccagacatcagtcagctgagtttaccatcagctatgataatgagaaggagatgacacaaaagttagatctcatcacaagtgatatggcagattaccagcagcccctcatgattggcaccgggacagtcacgaggaagggctccaccttccggcccatggacacggatgccgaggaggcaggggtgagcaccgatgccggcggccactatgactgcccgcagcgggccggccgccacgagtacgcgctgcccctggcgcccccggagcccgagtacgccacgcccatcgtggagcggcacgtgctgcgcgcccacacgttctctgcgcagagcggctaccgcgtcccagggccccagcccggccacaaacactccctctcctcgggcggcttctcccccgtagcgggtgtgggcgcccaggacggagactatcaaaggccacacagcgcacagcctgcggacaggggctacgaccggcccaaagctgtcagcgccctcgccaccgaaagcggacaccctgactctcagaagcccccaacgcatcccgggacgagtgacagctattctgcccccagagactgcctcacacccctcaaccagacggccatgactgcccttttgtgaacacaatgtgaaagaagcctgctgtggtactgagcgtcgggctgtcacaaggcactggaagaagggagcctgctggtccagagtgtgcgtgtgtatcggtgtgtgtgtacacttgcatgtgtgtgtgtgatccagtaggatcctagagacaacctgtcatactgtttacaaaattgtgcagctggtttcgtgctgacccttagggtgcgtctgttgggttttgttgggctagaaaaatgaaaatttttagatggcgttttcattcctctgactgatattgagctgctttggtgttaaaggtgtaatgtgtacagagttgtatttaacaataataaaagtaacttaagtttgctctatcagattttagttctgcacagaggttaagtgggaaaatgcagctgttgcaaaatgtatataaatagtatgttcatttttttcagtatattatctgatactgtgttagcagcaggtctgcttaaacctagtcttgttgttattgagtcatttcctctcctttgataactagaactgaaagcatttttaacattcttctcctggaagaaatgaattacttgaagcatgaaaagcacaccagggtggttgtttatttagcaattatgactgtagatttaaaaacaagcaaagaaacaacacctcagcagctgcccgtttccttagtctccacttcagagggggatgcgaagaggtcggcccagctccggtgaccatgaaggtggcacaggaattacagtgtgaatggctgtgtcagatgttttcgtacctcagattaaaaatattgctgaggtcagacgccacaattttcatgactttcttcagaagtagcacattttcgtgacttccgctgtcctctgaaaaacaaagttatttggaacatgttcatgcaaaagtgattctgaccaagtctaaatcgagcttttctactgacatgaaactgttggaaactgatctcattttataagaaatgattttcccctcaaggaggcgtctgtaattccagaacagtccagacatcagctgtacctcatgctcagtagtttttatttgagtttcttttgtgagttaactatgggagatttaacctcttttgccaaagagggaagtgtgtgtgtttttttaatagaaaatatggaccaaaaatttttttccctgaagaatgtattataaccctatttgtgtggttattacatcctgtgaaatgtatatatgttaaaataatgggggtgctggaaggtcatggcagactagctgctggttagtgtggaggggaagtggtttactttgtagagtttacatggttttatgcgcacactaattgtaataaactatgccaaacc

SEQ ID NO: 4389 - protein, 370 aa, Homo sapien [sequence omitted]

SEQ ID NO: 4390 - DNA, 1097 bp, Homo sapien
gcggcgatcgaggagctctgcggccgccaagctgcgcgggcagaagcggtccggggcctccgcggcccccgcggcctccgcggccgctgccttggcacccagcgccacccgcacacggcgctccgctagccaggccgggagcaagagccaggcggtggagaagccgccgtcggagaagccgcggctgaggcgctcgtcgccgcgggcccaggaggagggcccgggggagccgccgccgcctgagctggcgttgctcccgccaccgccgccgccgccgccgactcccgcgaccccgacgtcctcggcgtccaacctggacctgggcgagcagcgggagcgctgggagacgttccagaagcggcagaagcttacctccgagggtgccgccaagctcctgctagacacctttgaataccagggcctggtgaagcacacaggaggctgccactgtggagcagttcgttttgaagtttgggcctcagcagacttgcatatatttgactgcaattgcagcatttgcaagaagaagcagaatagacacttcattgttccagcttctcgcttcaagctcctgaagggagctgagcacataacgacttacacgttcaatactcacaaagcccagcataccttctgtaagagatgtggcgttcagagcttctatactccacgatcaaaccccggaggcttcggaattgccccccactgcctggatgagggcactgtgcggagtatggtcactgaggaattcaatggcagcgattgggagaaggccatgaaagagcacaagaccatcaagaacatgtctaaagagtgagcttctgcctctcctgccctgaaaaggaggaatgattggggccagcaactttgctctccctgccgtgcctcggtggtgctcctgaatgtggctgacctgggctgctggttccgtggactagggtcatcttgatctctgcagtttgctccagctaccagtttctttaggcagctctttgtcctccctctgcccagattttgatgtagtctaattgacatccttctcttcccaacttttgtgtgatcttttaggaaaaaaaataaatatttttaacattaaa

SEQ ID NO: 4391 - protein, 271 aa, Homo sapien
RRSRSSAAAKLRGQKRSGASAAPAASAAAALAPSATRTRRSASQAGSKSQAVEKPPSEKPRLRRSSPRAQEEGPGEPPPPELALLPPPPPPPPTPATPTSSASNLDLGEQRERWETFQKRQKLTSEGAAKLLLDTFEYQGLVKHTGGCHCGAVRFEVWASADLHIFDCNCSICKKKQNRHFIVPASRFKLLKGAEHITTYTFNTHKAQHTFCKRCGVQSFYTPRSNPGGFGIAPHCLDEGTVRSMVTEEFNGSDWEKAMKEHKTIKNMSKE

SEQ ID NO: 4392 - DNA, 1097 bp, Homo sapien; identical to SEQ ID NO: 4390

SEQ ID NO: 4393 - DNA, 2069 bp, Homo sapien
aaaaaaagaatgccaggggggaattatcatgctaaattattttactgctgaagatagcttcattgcaaattattctttttccagaatttcccccaaacaacttagaattccataagtagaacaagatagattctacccccaaaatattcataagcaaatcccactgcccttaaaataaggaagttatgcctggttgtctgtgaatggaacctcagtaggtaatcctgatgaagcttaaaaccttagggcagtgtctacatgggaaacaagtatgtggaaattgacaatcatttttaccaaatcgttgagtaataatatgacttacctgatagatatacacattcaataaggaacatttttttttttcaataaggaacattttaactaaaacattactttagggctgagatttccaggctatctacattgatctactgaaaaatttctagatttccatatacaaacgaagaagacatgagtttagagaatttttttcctttaatttttttttaacagaagggtatcagagtggaggacctagattacgctacctgtgtttgaaaatattgcgctttgcctaaccttcggtggaatgtattgtttcagcatattctatgtataaaaaagtttaaagatgtcttcaaagaagactagagtctttaagtcacttatagctatattttactacaaaatttgtgtataaagatatatttaagtgttttagataaatttaagttactccatatgaaatgtttaatttcagctactgtgaattctttcgatcagtcctttgcttttttaaaaaatcttttccatcgtgttaaaaagaaaattagctattaggagatattaaaagattgatgtcttagaaggacagggttaaaaccttctgtaatatatttaaatatatatttttaagagagatgctacattgccaatgattttataaataatttaaaattaatttacaaatttatagatgcaaaccaaaagatctttttaaaagagagagagaggaaaaaaatcaccttttatttgtttgggtctcattgtcagaattattattcagatcaagaaatctgtgtcgataaaacctaatctcatattggagagtgaatgtcgttaagtatttctgaaatgtttctaaaaaatgaacatgaaaaaaataaggtattttctccctagcttctcattacagtatttctaattgcttcacactttacagttttaatacaaagtacaagctctacttttataacgtgtactacaagtttctttaaaagtattgttgtatttcagctgaactcttgtatctgcagtcttttgttatttctgcaggctacacccttaatttgcagaggccattttgttgtttgtttgatgctgaagctgttgttaaaatgccccaaactccaaggcagattgtctgtataatacgctatagcttttcaccatgtggtgtttaccagctgttactctgtattttaaaaagccagagatttcttctgtctaaactgtttctatagcattttctaaacaaaaaaaatggtttttttctttgccttgtaataagattgtaaatccatttcctgcttgtgttcttagtgggcatgattgtgagtgtgtgtggggtgctcacacgcgtgccagtctttttgtactgtaactacctcatggtttgaatgatgattgtactgctggttgtgttaacagagcacattttgttgggtgagtcctatgtgatttttttcatgtttgttttatctgggggttgttcatgaaactgacagatgtttttctaaaaaggactattatcagtttccaaatacaatacttctctcttctggtttttcctgaatgagcctgattttgttgctggttttcatcatctatgagggtaaaacgagtacccttaaaatccctgtggccagtttgaacacccctgttgtattcttttctctgttcagtgtgtcagctattttgtgaagatgcttagatgtatagttttgataaccacagttttaaatcttttatctgtgcataataaaaagatatatatcagttattaa

SEQ ID NO: 4394 - protein, 37 aa, Homo sapien
KKECQGGIIMLNYFTAEDSFIANYSFSRISPKQLRIP

SEQ ID NO: 4395 - DNA, 1527 bp, Homo sapien
agttgcagaaagaagaaaggaaagggaaagaaaagtgttcagaaatctttatatggggaaagagacattgcttctaagaagcccctcctcagtcctattcccgagctgcctgaagtccctgagatgacaccttccattccgagcatccgaagactgggttcaggttatttcagttcaaatggcaaactggaagaagtgaagactcctaaaaatccagtgaaaagaaaggatcttttgcgtcatgacccagatttgcatatgcatcaaggctatgataaatatgatgtctctgaattctgctcttatataaaaagttcctcatcgcttggcaatgctacttctgatgaagatccaaatacaaatataatgaacattaatgaaaataaaaatattccaaaagcaaaaaataagtcagaaagtgaaaatgaaccaaaagctggaactgacagtcctgtttcttgtgcttctataactgaagaacgtgtggcatcagatagtcccaaacctgctctgaccctgcagcagggtcaagaattttctgctggtggtcaaaatgcagaaaacctttgtcagttctttaaaatttcaccagatttaaacataaagtgtgaaagaaaggatgacttcttaggagctgcagaaggaaaactgcaatgcaatcgtttaatgcctaattcacaaaaagactgtcattgtttaggagatgtcttaattgaaaatacgaaagaatctaaaagccagagtgaggatttgggaagaaaacccatggaaagtagcagtgttgtgagttgcagagacaggaaagatagaagacgttccatgtgttattctgatggtcgaagtttacatttggaaaaaaatggaaatcacacaccatcctccagtgtgggcagctctgtagaaattagtttagaaaattctgaactgtttaaagatttgtctgatgccattgagcaaacctttcagaggagaaatagtgaaaccaaagtgcgacgtagcacgaggctacagaaggatttagaaaacgaaggtcttgtatggatttcacttccacttccttccacttcccaaaaagccaaaagaagaacaatatgtacatttgacagcagtggatttgaaagtatgtctcccataaaagaaactgtgtcctccagacaaaaaccgcagatggcacctcccgtctcagatccagaaaacagccagggccctgctgctggttcttccgatgaacctggtaagaggaggaagagcttttgtatatctacacttgcaaatactaaagccacttcccagttcaaaggctaccggagaagatcctctcttaatgggaagggagagagctctctgactgccttggaaaggattgaacataatggagaaagaaagcagtaattgacatttcctgcagagtctgtagcaagagggaaagtaaccatctatgctgaaatgatctgtctagttcccattctctgttcaacctcagtgtttcaaaagttcctaataaataaactcatttgagttgaacct

SEQ ID NO: 4396 - protein, 422 aa, Homo sapien
MTPSIPSIRRLGSGYFSSNGKLEEVKTPKNPVKRKDLLRHDPDLHMHQGYDKYDVSEFCSYIKSSSSLGNATSDEDPNTNIMNINENKNIPKAKNKSESENEPKAGTDSPVSCASITEERVASDSPKPALTLQQGQEFSAGGQNAENLCQFFKISPDLNIKCERKDDFLGAAEGKLQCNRLMPNSQKDCHCLGDVLIENTKESKSQSEDLGRKPMESSSVVSCRDRKDRRRSMCYSDGRSLHLEKNGNHTPSSSVGSSVEISLENSELFKDLSDAIEQTFQRRNSETKVRRSTRLQKDLENEGLVWISLPLPSTSQKAKRRTICTFDSSGFESMSPIKETVSSRQKPQMAPPVSDPENSQGPAAGSSDEPGKRRKSFCISTLANTKATSQFKGYRRRSSLNGKGESSLTALERIEHNGERKQ

SEQ ID NO: 4397 - DNA, 2920 bp, Homo sapien
cgccaggagaccccaagctgcatcgccgagtggaagcaactagaactccagggctgtgaaagccacaggtgggggctgagcgaggcgtggcctcaggagcggaggacccccccccactctccctcgagcgccgcagtccaccgtagcgggtggagcccgccttggtgcgcagttggaaaacctcggagccccgctggatctcctggctgccacccgcaccccccgccagcctacgccccaccgtagagatgccttcttcggtgacggcgctgggtcaggccaggtcctctggccccgggatggccccgagcgcctgctgctgctcccctgcggccctgcagaggaggctgcccatcctggcgtggctgcccagctactccctgcagtggctgaagatggatttcgtcgccggcctctcagttggcctcactgccattccccaggcgctggcctatgctgaagtggctggactcccgccccagtatggcctctactctgccttcatgggctgcttcgtgtatttcttcctgggcacctcccgggatgtgactctgggccccaccgccattatgtccctcctggtctccttctacaccttccatgagcccgcctacgctgtgctgctggccttcctgtccggctgcatccagctggccatgggggtcctgcgtttggggttcctgctggacttcatttcctaccccgtcattaaaggcttcacctctgctgctgccgtcaccatcggctttggacagatcaagaacctgctgggactacagaacatccccaggccgttcttcctgcaggtgtaccacaccttcctcaggattgcagagaccagggtaggtgacgccgtcctggggctggtctgcatgctgctgctgctggtgctgaagctgatgcgggaccacgtgcctcccgtccaccccgagatgccccctggtgtgcggctcagccgtgggctggtctgggctgccacgacagctcgcaacgccctggtggtctccttcgcagccctggttgcgtactccttcgaggtgactggataccagcctttcatcctaacaggggagacagctgaggggctccctccagtccggatcccgcccttctcagtgaccacagccaacgggacgatctccttcaccgagatggtgcaggacatgggagccgggctggccgtggtgcccctgatgggcctcctggagagcattgcggtggccaaagccttcgcatctcagaataattaccgcatcgatgccaaccaggagctgctggccatcggtctcaccaacatgttgggctccctcgtctcctcctacccggtcacaggcagctttggacggacagccgtgaacgctcagtcgggggtgtgcaccccggcggggggcctggtgacgggagtgctggtgctgctgtctctggactacctgacctcactgttctactacatccccaagtctgccctggctgccgtcatcatcatggccgtggccccgctgttcgacaccaagatcttcaggacgctctggcgtgttaagaggctggacctgctgcccctgtgcgtgaccttcctgctgtgcttctgggaggtgcagtacggcatcctggccggggccctggtgtctctgctcatgctcctgcactctgcagccaggcctgagaccaaggtgtcagaggggccggttctggtcctgcagccggccagcggcctgtccttccctgccatggaggctctgcgggaggagatcctaagccgggccctggaagtgtccccgccacgctgcctggtcctggagtgcacccatgtctgcagcatcgactacactgtggtgctgggactcggcgagctcctccaggacttccagaagcagggcgtcgccctggcctttgtgggcctgcaggtccccgttctccgtgtcctgctgtccgctgacctgaaggggttccagtacttctctaccctggaagaagcagagaagcacctgaggcagaagccagggacccagccctacaacatcagagaagactccattctggaccaaaaggttgccctgctcaaggcataatggggccacccgtgggcatccacagtttgcagggtgttccggaaggttcttgtcactgtgattggatgctggatgccgcctgatagacatgctggcctggctgagaaacccctgagcaggtaacccagggaagagaaggaagccaggcctggaggtccacggcagtgggagtggggctcactggcttcctgtgggatgactggaaaatgacctcgctgctgttccctggcatgaccctctttggaagagtggtttggagagagccttctagaatgacagactgtgcgaggaagcaggggcaggggtttccagcccgggctgtgcgaggcatcctggggctggcagcaccttcccggctcaccagtgccacctgcgggggagggacggggcaggcaggagtctgggaggcgggtccgctcctcttgtctgcggcatctgtgctctccgagagaaaaccaaggtgtgtcaaatgacgtcaagtctctatttaaaaataattttgtgttttctaaatggaaaaagtgatagctttggtgattttgtaaaagtcataaatgcttattgtaaaaaatacaggaaaccacccctcaccctgtccacttgggtgatcattccagacccctccccaaacatgcatatgtacctgtccgtcagtgtgtggatgtatgtttacagttctacataaatgggatcattttatacatggtgctctggaacccacatttttcatgcagtcatttgcagtgaattatttattgtgataataaatagcattagaatacaaaaaaaaaaaaaaaaaaaaaaaaaaaaaaaaaaaaaaaaaaaaaaaaaaaaaaaaaaaaaaaaaaaaa

SEQ ID NO: 4398 - protein, 589 aa, Homo sapien
MAPSACCCSPAALQRRLPILAWLPSYSLQWLKMDFVAGLSVGLTAIPQALAYAEVAGLPPQYGLYSAFMGCFVYFFLGTSRDVTLGPTAIMSLLVSFYTFHEPAYAVLLAFLSGCIQLAMGVLRLGFLLDFISYPVIKGFTSAAAVTIGFGQIKNLLGLQNIPRPFFLQVYHTFLRIAETRVGDAVLGLVCMLLLLVLKLMRDHVPPVHPEMPPGVRLSRGLVWAATTARNALVVSFAALVAYSFEVTGYQPFILTGETAEGLPPVRIPPFSVTTANGTISFTEMVQDMGAGLAVVPLMGLLESIAVAKAFASQNNYRIDANQELLAIGLTNMLGSLVSSYPVTGSFGRTAVNAQSGVCTPAGGLVTGVLVLLSLDYLTSLFYYIPKSALAAVIIMAVAPLFDTKIFRTLWRVKRLDLLPLCVTFLLCFWEVQYGILAGALVSLLMLLHSAARPETKVSEGPVLVLQPASGLSFPAMEALREEILSRALEVSPPRCLVLECTHVCSIDYTVVLGLGELLQDFQKQGVALAFVGLQVPVLRVLLSADLKGFQYFSTLEEAEKHLRQKPGTQPYNIREDSILDQKVALLKA

SEQ ID NO: 4399 - DNA, 4657 bp, Homo sapien
  Unsure 2726-2752: Unknown base
ggtggccagtactactgggacaaattgtgttttttattattaataataatgataataatactatccctccaaggcacaagtgaactatatagaactgcgtgtgtgtaaactctttactctcgtctcattttgttgagtttagaacttgatgtgctcgtcagtcttgtgtttcaaaacactgaataacttccaaagcaaagttatgccagtgtgttcaaaagataaattaataatgtaccagcaaagagcatcattcaaagtatagtccttgcatattccagttaccatttctctaataattaaaatattcatgataaatatatatatagcatcatatgttaaaaactatttcaaattctacatattaaggatgaaaattttaaaatccagtaataagaggagagacctgcctatcagtacagtgatataggtaaaagatgaaatatgtttttaaaataccagcaattaactattgttttcatgtgttctcctctagaagcaaaccaaaaattccttcatggaaaacaattcttacttctacatgtgtagtttatatctgatgcattacaagagctaatgtttaaagacaaaacaaaacctgcctgtatgacagcagcaactcgagccaacatttagtgttacatgttatatttttgaaataccgttttgttatcatattccacatattactttccataaagtcagagaagttcaatgtaaattgttggctctgattcttccaccttgggatacacattcacaagaagatttatatattttcttactatgatagaggaacataatctgggaaaacttcccatgtctgtaagatgaaaaggatacctttaccatgttgtttttgataataaagaatatggaaaatggtagaaatctctcctctctatgtgtatttgtatatgtgtgtatacacacacacgttattgacatttttacataacatgtgattgccacttcttataaagttatgatatagaaccccatgaaaacaactttatattatagatcaaataatgtgcccagaaacgcaattgcaacagtaaatcttgatctattggtaagagtctatgatacaggtcttcattctatccctaaacataatgttagtaaagaggttccatcagattgtattatagagaccttcctattgctatttatttttaagagatgagaagactgactagcaatgtctccacagtgcaatggtttcacttctgggtctgtctgtctgttgtgtaggtgagatcagtgttgtcaggctctcagaataatttttaaaagaatccagaagcctgacttcacaccaagtagccatcctagatgggcgggggggatctccatgttcaaccaaaccctcagaacttagagcaataaatacattcagtcatttatttataaatgaatgacagaatattcaatccaaatagaaacaaccttttgtcagtgatgcaacataacatggagtcttatattgagaaagtgaatatgaatattttaaatagatgcctaggaaatctgtgtttgctgtttacatttaatgtactttgccacattagcagtaccacacttcttttactttcatccttctaagaactaatgaaagatagcttgctattagctttgacatgttgcacatgccattatgttgttctctaagaacaactaaattctctccagtgttcatgtgtgattcctttttcatcattattactttaatgtggatgaatactatttctaggaacttgattatcactgaacagattgcatatgtaaatgcagataattcttgagcaatatagtgaaaatgatttcacacacagtttgaaatctcatattaaacagtggtaaatttttaaacattaggacattagctggctgcttctataaatgtacctgtattgtctgcctgctccttttgtggagatgtgtttttgtattggatgtttgggccaatgggaggcttcaagctacaacatattttcccactttaaataatatttaacatatgacaaaccccagacaaggcttttaatatgtataaagaactgcagtgttaggtggtttatttgcaaactgttttcagtgttgtccatttttatggcacctttaacaatattcttgtttccaaagtacaaaaaaaataggttaaataatctagccataactgaatgtcaagcaataaaacaaatgacttttgtgcatagacttaaaaaatacaaattttagacatctgcatgtaaatgcaatctcttgtttactgctttcttcaacttgagcaatcgattccttatttactattaacttaagaacttgtaacggcctgtaaacattttctctcttactcttctttcaaatttacctgtccctgcttttgagtcataatatttaatgttgttctgcacatctctatacagttaactttttggctttcattctgtatagataagaaaatgttatattataaacagcctactcagtgcaaatatttatctgtttatcaaatccacaatatgctgtataataccggttttactatataatctattttagacatagctgtttagaactagagtgtgctatttttgtgtttttctgatgtgtggtgctagacaagttacttttgtgaacaacaaaaattatcccttttattcctagacaataccacctttgggtcttgttaatttcactgagtataactatatatttgnnnnnnnnnnnnnnnnnnnnnnnnnnnccctatgcccaactggcagctgtatcagagtgctggatttgggacatgcttttctctttaaatacataatatcattatataaattattctagagtgtatttaattaggataaaattacttccttagtatggatatttgacatctatagggtgaatttgtttataaatatggctatatggaaacttattagcatttactttatgtttgctacttggctttacagcatatctcctaagctgaaaaataatttgccaggccttcaagatcctaaagaaacttgtttaatggagtaatatacttttttttcttattaaggaattgtattactggcacctaacacagttgtattcttagctcctattatagataatgggcatttacataaaatatcctagatggcttgatggcagaataaacctttcccctcctacctgagtcatgagaaggatggagacgtcctctgccataacatgggccataaagcaaattcgacatgggatgttctgtttcagtatgacctcaaccagttccatgaactgagtgaaggaccttcattttcaaagttatttaataagtagcttaattaagcctttctacccattctcccaagatctattggcattattgaaaagcaaagtttatcaaatatctaactaaggatgtagttaaccttattaaatattgattagaattgttctgtaatattactgaatttgtaagatctttagcaaagatttttgagcaatttataaatgtagagcaaatgtttctgtttactgcactttttgtaactgaaggtgataaattctcaagccatgattattggcttccatgcactgcagtatttatccacaattctagacattttccatttttgtggaagagttgctgttaccttaattataaatgcaattgtgtggttaatgagagctaatactagtagttaaccttttaaagtggattggctacagttgagggagaaatctcttttaatataaatcacatcattccttaactgcctctcttggaaagagattgaaaccttttttttaaagcacgatttagcatcctaagcttcctgagggtagagattgtatctttttgcgtctgcacaatggctagcacatgtcagcatttgacaattgttaaatgataacaagtgtgccccaattaaaacgtttttcctgggttgttttgttaaatttacaaagtaagccaagccttacggttaacattctcctctacaaccaagtattaaagccacatttaaaaagaccacatgaaatgctgattctaattgtgtgtaggtcttgaggattaagcacacaaatttcacaaacttctgtttgagtaaacaaactcagccttctgtaaatatacatgcaagtttggaaacagtaatactgtacctataaatatatgctgtctgttttgtgtacagtatgtaaaaactccttttctgccacactaaaaatgcaagccatttatgggaatcctaaaactagtattgaactaaaactttgctaatgatctttattagaggatcgtccaacttttcacttaccttgggttttcttttcaattcactcttacactagtctgcttatttccagctgtttattttattgagtcctgaatttaaaaaaaaaatattttgattcattttgtaaatacaagctgtacaaaaaagagagatttaatgttgtcttttaaatactccaattttcattctaatatgaatgttgttatattgtacttagaaactgtacctttaatattacattacctttattaaaagtgcattgaacacatcaattttagatgtgctttatgtactgttatcctataataaaacttcagcttctaatggaaaaaacaaaaaaaaggggcgcgccgccgattatt

SEQ ID NO: 4400 - protein, 27 aa, Homo sapien
  Unsure 2726-2752: Unknown amino acid
MCFMYCYPIIKLQLLMEKTKKRGAPPI

SEQ ID NO: 4401 - DNA, 3926 bp, Homo sapien
cccggcgcgggcttcccgtacggcgggggcgccctgcagccgtcgcctcagcagctctacggcggctaccaggccagccaaggcagcgatgatgactgggacgacgagtgggacgacagctccacggtggcggacgagccgggcgctctgggcagcggagcatacccggacctcgacggctcgtcttcggcgggtgtgggcgcagccggccgctaccgcctgtccacgcgctccgacctgtccctgggctcccgcggcggctcggtccccccgcagcaccacccgtcggggcccaagagctcggccaccgtgagccgcaacctcaatcgcttctccaccttcgtcaagtccggcggggaggccttcgtgctgggggaggcgtcaggcttcgtgaaggacggggacaagctgtgcgtggtgctggggccctatggccccgagtggcaggagaacccctacccgttccagtgcaccatcgacgaccccaccaagcagaccaagttcaagggcatgaagagctacatctcctacaagctggtgcccacgcacacgcaggtgccggtgcatcggcgctacaagcacttcgactggctgtacgcgcgcctggcggagaagttcccggtcatctccgtgccccacctgcccgagaagcaggccaccggccgcttcgaggaggacttcatctctaagcgcaggaagggcctgatctggtggatgaaccacatggccagccacccagtgctggcgcagtgcgacgtcttccagcacttcctgacgtgccccagcagcaccgacgagaaagcctggaagcagggcaagaggaaggccgagaaggacgagatggtgggcgccaacttcttcctgacccttagcacgccccccgccgctgcccttgacctgcaggaggtggagagcaagatcgacggcttcaagtgcttcaccaagaagatggacgacagcgcgctgcagctcaaccacacggccaacgagttcgcgcgcaagcaggtgaccggcttcaaaaaggagtatcagaaggtgggccagtccttccgcggcctcagccaggcctttgagctggaccagcaggccttctcggtgggcctgaaccaggctatcgccttcacaggagatgcctatgacgccattggcgagctcttcgcggagcagcccaggcaggacctggatcccgtcatggacctattagcgctgtatcaggggcatctggctaacttcccggacatcatccacgttcagaaaggagctcttaccaaagtcaaggagagtaggcgacacgtggaggaagggaagatggaggtgcagaaggctgacggcattcaggatcgctgtaacactatttcttttgccactttggctgaaattcaccacttccatcaaattcgagtgagagactttaaatcacagatgcagcatttcttacaacaacaaataatatttttccaaaaagttacccagaagttggaagaagctcttcacaaatatgatagtgtttaatgactggacgttggattatgaagtctgttagggaagaaacagtgccactattcccttagatgcaacagtagcatagcctcttcacccaggcgtcccaaaagcttggcgtgaagatttcagcaaacatgtcttacaacatgaggaggaggagtctaaatcagtcaggggataaaagtatcgaatcattgacaacacacacttggctttagttcttaggagggttttgtttttgtttttgtttttaggttgaagattttcttttaatattcagttttttgaaaaaaaatggatctacactgttaactgattgagactccactgtgattcacttgtttacttaaaaacttttcagggatgtctgtaaatttcagtgttaatatgtcatgaaaagtggtgtggattgatctaaggagggaccagaaataatttttgctattccaaatactgaaggaaaaagataattgatttatactatgttttaaaaaaaaaaaggtattgatgagcccccccccccaggacatttaaccttaaaatttattttaaatgtattcttttattattataagggaaatacagatggctgataaataccaaaaagattcaaaagcagcttaatttaaaaagcacaaagagattctggcttacagtgccccaatctcaatgtttttatagttgctgagctaactaatgtgattattgagtttacagatttaaaaattgtcactgttagagtatctactgtttttatgaagtcaaacttatgctgcctcagaaatccctgggtactgaaatggtaacatggaagtgaagaggtcactttgaaatattggtgagtcacaaagattaaagaaaaggatcagtttgcagatactcagaaaaggttattgaaataattactgaacagcacattttctctctaaaaagtagtttcatatgggttgtatttttaagatcagattatcattttgatatttggtcaaaattttgtaccttaggttacttagagccagatttaacatcatgaacattatgtggctttgtctttactacagatatgtggaactgtaaccaaatatgttgtctctaaaacttgttgattgcaaaatacagttctataaacaaaacccatatgtatatataaatgttaattttgcggaagtctggaaattataactatagcatttaagtttgagtctgtattggacaaataagcaccatgcttttcaaatgatttaaaaattacttttatttgcctctttattttgatggtggttggatttttttttttaatagtaaaatcactaaacttgtgcaatggtagcatggaaattatctgaggtatattgtatgattgtactttagccagggtggacatagcttaaattataaaaactaaagatgaaagtacaaggaagtataagttatacttatgtaagtataaattcatgctgcctacttctaagagaaatttcattcttcataaccacataacattataatgccactgattcatacgggatttacattaattctatgggggaggacactagaattattagtgttcattttcatctaagatctttattctctaacgttcttggtcctattgaaacattgcagtatgcaaaactactgcaatgttaaacccaagagaaaagccattatcatgtgtatgctggtcatcatgatcagtgtggtacaatttttaaaaataaactatcatgcccttcatgccattatttgtctttatttctatgatttataatcctgatatgtgatgtgtttgtaacacagggtgtgcacttgagcctggttttactgtttttattagacagagttgtttatatgctgtaactgtaacgcagcgagactggttctacagccatgtgtcgtaatcttgttccccgtccaagctgttgtatctgaaggtacccagtttgcacccaggatgagggaacgcattcaaaagtgaaatgtaaagccagtgcacgaatattatagtaattgagattttcccaggcttcactgatacagttgttttgcatttattcacaataatacagcagattcttaaatgccgatttttaattgtcttaaattttgctgctgttctcataattaaggacttgaaaaatgttttagtctgtcaagtatgtaaagtttgtgtaaaaacttttaaatgtcattcttaagttcattgccatagccattttccatttatgtcttcattttccaaaaatcaaatgccatgtctgatacctttaagtccataagcattcaattttctcatttccaccttcatctttggttaacagaataagtaaaacagggtattatttatttgtagtctagaaatgttgaatattgttttatttccttcaaaatgttatgattagtgcagatcagccatgttt

SEQ ID NO: 4402 - protein, 503 aa, Homo sapien
PGAGFPYGGGALQPSPQQLYGGYQASQGSDDDWDDEWDDSSTVADEPGALGSGAYPDLDGSSSAGVGAAGRYRLSTRSDLSLGSRGGSVPPQHHPSGPKSSATVSRNLNRFSTFVKSGGEAFVLGEASGFVKDGDKLCVVLGPYGPEWQENPYPFQCTIDDPTKQTKFKGMKSYISYKLVPTHTQVPVHRRYKHFDWLYARLAEKFPVISVPHLPEKQATGRFEEDFISKRRKGLIWWMNHMASHPVLAQCDVFQHFLTCPSSTDEKAWKQGKRKAEKDEMVGANFFLTLSTPPAAALDLQEVESKIDGFKCFTKKMDDSALQLNHTANEFARKQVTGFKKEYQKVGQSFRGLSQAFELDQQAFSVGLNQAIAFTGDAYDAIGELFAEQPRQDLDPVMDLLALYQGHLANFPDIIHVQKGALTKVKESRRHVEEGKMEVQKADGIQDRCNTISFATLAEIHHFHQIRVRDFKSQMQHFLQQQIIFFQKVTQKLEEALHKYDSV

SEQ ID NO: 4403 - DNA, 7522 bp, Homo sapien; identical to SEQ ID NO: 703

SEQ ID NO: 4404 - protein, 1103 aa, Homo sapien; identical to SEQ ID NO: 704

SEQ ID NO: 4405 - DNA, 1720 bp, Homo sapien
gagaagaccagggaagaagcagaacttgaggccaacagtgtgtttcgtcaaaaggtagaaatgtcctaccagcggatggagaatcctggctgccatgtggttgatgccagcccctccagagaaaaggtcctgcagacggtattaagcctaatccagaatagttttagtgaaccgtagttactctggccaggtgccacgtctaactagattagatgttgtttgaaacatctacatccaccatttgttatgcagtgttcccaaatttctgttctacaagcatgttgtgtggcagaaaactggagaccaggcatcttaattttacttcagccatcgtaccctcttctgactgatggacccgtcatcacaaaggtccctctcatcatgttccagtgagaggccagcgattgctttcttcctggcatagtaaacattttcttggaacatatgtttcacttaatcactaccaaatatctggaagacctgtcttactcagacagcaccaggtgtacagaagcagcagacaagatcttccagatcagcagggagaccccggagcctctgcttctcctacactggcatgctgatgagatcgtgacatgcccacattggcttcttccacatctggttgcactcgtcatgatgggctcgctgcatctccctcagtcccaaattctagagccaagtgttcctgcagaggctgtctatgtgtcctggctgcccaaggacactcctgcagagccatttttgggtaaggaacacttacaaagaaggcattgatcttgtgtctgaggctcagagcccttttgataggcttctgagtcatatataaagacattcaagccaagatgctccaactgcaaatataccaaccttctctgaattatattttgcttatttatatttcttttctttttttctaaagtatggctctgaatagaatgcacattttccattgaactggatgcatttcatttagccaatccagtaatttatttatattaatctatacataatatgtttcctcagcataggagctatgattcattaattaaaagtggagtcaaaacgctaaatgcaatgtttgttgtgtattttcattacacaaacttaatttgtcttgttaaataagtacagtggatcttggagtgggatttcttggtaaattatcttgcacttgaatgtctcatgattacatatgaaatcgctttgacatatctttagacagaaaaaagtagctgagtgagggggaaattatagagctgtgtgactttagggagtaggttgaaccaggtgattacctaaaattccttccagttcaaaggcagataaatctgtaaattattttatcctatctaccatttcttaagaagacattactccaaaataattaaatttaaggctttatcaggtctgcatatagaatcttaaattctaataaagtttcatgttaatgtcataggatttttaaaagagctataggtaatttctgtataatatgtgtatattaaaatgtaattgatttcagttgaaagtattttaaagctgataaatagcattagggttctttgcaatgtggtatctagctgtattattggttttatttactttaaacattttgaaaagcttatactggcagcctagaaaaacaaacaattaatgtatctttatgtccctggcacatgaataaactttgctgtggtttactaaaaaaaaaaaaaaa

SEQ ID NO: 4406 - protein, 58 aa, Homo sapien
EKTREEAELEANSVFRQKVEMSYQRMENPGCHVVDASPSREKVLQTVLSLIQNSFSEP

SEQ ID NO: 4407 - DNA, 1198 bp, Homo sapien
gccgcatccaggcgagcgggcagcctttgtggcctatgccttggcttttccccgggccttccagggcctcctggacacctacagcgtgtggaggagtggtctccccaacttcctagcagtcgccctggccctgggagagctgggctaccgggcagtgggcgtgaggctggacagtggtgacctgctacagcaggctcaggagatccgcaaggtcttccgagctgctgcagcccagtgagtttcccggggaggaggtgtgcctggtgggagatccccggggtttgggaatgggcagggaaggacagtgaggtactctgctgaagtttcagcggtgatactgtaggccgtggcagggaagtaagtggtggggctccctaggagctcccaagcagaaggtgagcacaggtgtccttgactgaggcggggcggggagcagggggacaccagggtgaatcaggaagacccgaggggtggcccccaccctttctccacccacgcggcaggttccaggtgccctggctggagtcagtcctcatcgtagtcagcaacaacattgacgaggaggcgctggcccgactggcccaggagggcagtgaggtgaatgtcattggcattggcaccagtgtggtcacctgcccccaacagccttccctgggtggtgtctataagctggtggccgtggggggccagccacgaatgaagctgaccgaggaccccgagaagcagacgttgcctgggagcaaggctgctttccggctcctgggctctgacgggtctccactcatggacatgctgcagttagcagaagagccagtgccacaggctgggcaggagctgagggtgtggcctccaggggcccaggagccctgcaccgtgaggccagcccaggtggagccactactgcggctctgcctccagcagggacagctgtgtgagccgctcccatccctggcagagtatagagccttggcccagctgtccctgagccgactcagccctgagcacaggcggctgcggagccctgcccagtaccaggtggtgctgtccgaaaggctgcaggccctggtgaacagtctgtgtgcggggcagtccccctgagactcggagcggggctgactggaaacaacacgaatcactcacttttccccaaaaaaaaaaaaaaaaaaaaaaaaaaaaaaaaaaaaaaaaaaaaaaaaaa

SEQ ID NO: 4408 - protein, 133 aa, Homo sapien
MKLTEDPEKQTLPGSKAAFRLLGSDGSPLMDMLQLAEEPVPQAGQELRVWPPGAQEPCTVRPAQVEPLLRLCLQQGQLCEPLPSLAEYRALAQLSLSRLSPEHRRLRSPAQYQVVLSERLQALVNSLCAGQSP

SEQ ID NO: 4409 - DNA, 948 bp, Homo sapien
  Unsure 156-239: Unknown base
aaaatgtgtctctttaaagaaaaagactataggaactccaacagtactgtgttccaaacagtgtgagaaaacaagaaatgtattttaatatatatataatgtttacaaatgaatgattttcaaatacagttgttaattctcaggtatttgaagcannnnnnnnnnnnnnnnnnnnnnnnnnnnnnnnnnnnnnnnnnnnnnnnnnnnnnnnnnnnnnnnnnnnnnnnnnnnnnnnnnnncttgtttaagatcacacagctagtgcagttaccccctctcagtaattatgtttggcaaatatgaaatacaaggatctggcaaggttaggaagaggttaagaatatcagtgacagtactctgaggcatctgggcatgtcagatgaagatttattattcagaaaagttaagtcagctgttgcagggatcagttgttttattcctggaaaatgtttttcattttgctgcaaatctatatctgacctgctgaggaaatcgtttggtgaaatgaatccagaaagcagagaaaatgcttcattactttaaatagcagcattaagcccattatagcctctgaattgtcccttccttgagtttgctaatgcttccaacttagtcatttgaagcccaagagtctaattttatatgccctgccaatgtcctcatctattgcagaatgtataattatctatttgttttggactatatgttacaaaaatttaaaacataagatcctctctctatatttcattattggtgaacccacattgtgctgtgttttgtgatattttatcattttctagattcttatgtggatctaataacgaccacttgaacccagtttcacagaatccttatttttctgttcaaattaggaattagggacatgggatggaaattgggaaatccttccattctccagtaaactatcgcaaggacaaaaaaccaaac

SEQ ID NO: 4410 - protein, 64 aa, Homo sapien
  unsure 16-44: unknown amino acid
  Unsure 156-239: Unknown amino acid
MNDFQIQLLILRYLKXXXXXXXXXXXXXXXXXXXXXXXXXXXXXLFKITQLVQLPPLSNYVWQI

SEQ ID NO: 4411 - DNA, 3789 bp, Homo sapien
aaagagcaggcgaaagccacggcgtctgcgtttgcaatgcatgctggtccgtgtagttctcagcctgacaccgtcgttcccagaacccagcgcgctctgtgctggcgggcgcagaggcctcccaggaggagagcaaggacctggcaggggctgctgaggaggagagcgggctgcccggggccgggcctggctcctgtgcttttggggaggagattcccatggatggggagcctcctgcctcctcgggcctggggctcccagactacacgtctggcgtcagcttccacgaccaggctgacctccctgagacagaggacttccaagccgggctctatgtgactgagtctccccagccccaggaggctgaggctgtgagcctgggccggctgagtgacaagagcagcaccagcgagacctccctgggtgaggagcgggctccagacgaggggggtgcccccgtggacaagagcagccttcgatcaggtgacagcagccaggacttgaagcaaagcgagggctccgaggaggaagaggaggaggaggacagctgcgtggtgctagaggaggaggagggggagcaggaggaggtcaccggggcatctgagctcactctgtctgacacggtgctgtccatggagacggttgtggccggcggcagtgggggagatggagaagaagaggaggaggcactgcctgagcagtcagaaggcaaagaacagaagatcctccttgatacagcctgcaagatggtccgctggctgtctgccaagctcggccccacagtggcctctcgccacgtggcccggaacctgctccgcctgctgacgtcttgttatgttggacccactcggcagcagttcacagtgagcagtggcgagagcccaccgctgagcgccggcaacatctaccagaagaggccggtcctgggcgacatcgtgtcagggcctgtgctcagctacctcctccacatcgcccgcctgtatggggagcctgtcctcacctaccagtacctgccctacatcagctacctggtggccccagggagtgcctcaggccccagccgactgaacagccgtaaggaggcggggctgctggccgcggtgacgctgactcagaagatcatcgtgtacctctcagacaccacactcatggacatcctgccccggatcagccatgaggtcctgctgcccgtgctcagcttcctcacctccctcgtcacggggttcccaagtggggcccaggctcggaccatcctgtgtgtgaaaaccatcagcctcatcgccctcatctgcctgcgcattggacaggagatggtccagcagcacctgagcgagcccgtggccacctttttccaggtcttctctcagctgcatgagcttcggcaacaggatctgaagctggaccctgcgggccgtggtgagggccagctgccacaggtggtcttctctgatgggcagcagcggcccgtggaccccgccctgctggacgagctgcagaaggtgttcaccctggagatggcatacacaatctacgtgcccttctcctgcctgttgggtgacatcatccggaaaatcatccccaaccacgagctggttggggagctggcggcgctgtacttggagagcatcagccccagcagtcgcaaccctgccagcgtggagcccaccatgcccggcaccgggcccgagtgggacccccatggtgggggctgccctcaggatgacggccactcagggacctttgggagcgtcctggtggggaaccgcattcagatccccaatgactctcggcctgagaaccccggaccactgggccccatctcgggggtgggtggcgggggcctgggcagcgggagcgacgacaacgccctgaagcaggagctgccgcggagcgtgcacgggctgagcggaaactggctggcgtactggcagtacgagatcggcgtgagccagcaggatgcccactttcacttccaccagatccgcctgcagagcttcccgggccactcgggggccgtcaagtgcgtggcacccctgagcagcgaggacttcttcctgagcggcagcaaggatcgtaccgtgcgcctctggccgctgtacaactacggcgacgggaccagcgagacggccccacgcctcgtctacacccagcaccgcaagagcgtcttcttcgtgggccagcttgaggccccacagcacgtggtgagctgtgacggggctgtgcacgtctgggaccccttcacagggaagacccttcgcacagtggagccgctggacagccgggtgcccctgactgcggtggctgtcatgcccgccccccacaccagcatcaccatggccagcactgactctaccctgcgctttgtggactgcaggaagcctggtctgcagtacgagttccgactgggcggtgggctgaaccctgggcttgtccgtgccctggccatcagccccagtggccgtagtgtcgtggccggcttctcctcaggcttcatggtgctcctggacacccgcacgggcctggttctgcgaggctggccagcccacgagggggacattctgcagatcaaggcggtggagggcagcgtcctggtcagctcctcctctgaccattccttgaccgtctggaaggagctggagcagaagcccacccatcactacaagtcagcatccgaccccatccacacctttgacctgtacggcagtgaggtggtcactggcaccgtgtccaacaagattggcgtctgctccctgcttgagccaccctcgcaggccaccacgaagctcagctctgagaacttccgcggcacgctcaccagcctggccttgctgcccactaaacgccacctcctgctgggctcagacaacggggttatccgcctcctggcatagactgaggcaggagctggccgggcaagggtgggaagacatctgcgggcgcgtgtccgctcaccctgttccctgagcagcagctccctccagggaggccctgggtcccacgccctgggtgcccacatggcctgccaactagggcctgcaaatggagtgggggagtcctggcccctgaatcaccagagccaccaagcctgccagaggggtcccattcatggcttggggacacagggctcctagcaagcaggaagttaagagcaggaggaagcgttgctaccttcacttctccccagctctgccctctgggtccacatgaggacagggaagctcgggaaggggaagggagactggccctgcccagccggtctctagcccctcagcccccgctgggcactctctgtcccatccctctaggacagggaagctggcctggtccagggcactgatggtgcttggattccagcctaaggaaggctggccgtggtccaggagttaagggcttgggtctggggtttaagtggccacccatccaggccctggccagtgtgggaccgggacgggaaggaagaaggaggctaggagcagggggaaaaggtgcacttggccagtggcgcctgccaggagtgagtccatgcgttgtctgcccacccctaccacagtgtttgtgccttcagctgagggggcagcctctgggccctgaacccctgctggggctccacgaccctgagagaagggttgagaagaatcatctctgcacctcgggtctctgccagaggaagacttaagcatccctgcgacctcacattctagacagagatgaggtccaagggttggcccctgctgccttctcacaatttgcaatagatgtaaataggaccaataaatcctttggaagagc

SEQ ID NO: 4412 - protein, 890 aa, Homo sapien
MDGEPPASSGLGLPDYTSGVSFHDQADLPETEDFQAGLYVTESPQPQEAEAVSLGRLSDKSSTSETSLGEERAPDEGGAPVDKSSLRSGDSSQDLKQSEGSEEEEEEEDSCVVLEEEEGEQEEVTGASELTLSDTVLSMETVVAGGSGGDGEEEEEALPEQSEGKEQKILLDTACKMVRWLSAKLGPTVASRHVARNLLRLLTSCYVGPTRQQFTVSSGESPPLSAGNIYQKRPVLGDIVSGPVLSYLLHIARLYGEPVLTYQYLPYISYLVAPGSASGPSRLNSRKEAGLLAAVTLTQKIIVYLSDTTLMDILPRISHEVLLPVLSFLTSLVTGFPSGAQARTILCVKTISLIALICLRIGQEMVQQHLSEPVATFFQVFSQLHELRQQDLKLDPAGRGEGQLPQVVFSDGQQRPVDPALLDELQKVFTLEMAYTIYVPFSCLLGDIIRKIIPNHELVGELAALYLESISPSSRNPASVEPTMPGTGPEWDPHGGGCPQDDGHSGTFGSVLVGNRIQIPNDSRPENPGPLGPISGVGGGGLGSGSDDNALKQELPRSVHGLSGNWLAYWQYEIGVSQQDAHFHFHQIRLQSFPGHSGAVKCVAPLSSEDFFLSGSKDRTVRLWPLYNYGDGTSETAPRLVYTQHRKSVFFVGQLEAPQHVVSCDGAVHVWDPFTGKTLRTVEPLDSRVPLTAVAVMPAPHTSITMASTDSTLRFVDCRKPGLQYEFRLGGGLNPGLVRALAISPSGRSVVAGFSSGFMVLLDTRTGLVLRGWPAHEGDILQIKAVEGSVLVSSSSDHSLTVWKELEQKPTHHYKSASDPIHTFDLYGSEVVTGTVSNKIGVCSLLEPPSQATTKLSSENFRGTLTSLALLPTKRHLLLGSDNGVIRLLA

SEQ ID NO: 4413 - DNA, 3718 bp, Homo sapien
cggccgctgcccgcaggaggaagccccggccgccacccccaccgccggcgccccccgaggagagctgcccggccaagcccgtggcccccgggccctgcttcgggggccgcaccttggaggagatctggagggcggccaccccgacgctgaccaccttccccaccatccgcgtcggcagcgacgtgtggggcgagcgcagcctggcggcagcgcggcgcagggcgcgccaggtcctgcgagtgaacctggaacccatggtgaggctccgccgcttcccggtgccccgggcatgaggtgcggcctccagggcgcctcctgccggccccgaccttgggacaggccttccgcccggaggaatgaacaagtgtcagtcgagtgtttacagatccggccaggaccccggcccccaatgcactttacgcgcgaagaagttgccggatggttgtccctgtcccgggccgcggcgcggtcgtcttggacgctggggcaggtgtgccctctgctgcctcccgtacccggcctgcggagggaggggacagctggacccgcaggggaggtccctttcttcctgaccaccgattgagacgtctccaggaccttaggggcagatccgttttctcactgttggactctacctcactggtctggaagtcctccgaagacattatttttccaaaggaatttggtttcgtgcttgtgtaataaagccagaatttacttgttctttatctccccctttttctatttcactgtcacccctctttgtggacagaagttcgaacatgtggtgttgcactagtttgtgctcagggtattctgaagcccactcgtttcctaatttttactggattccaaagctttgatcgaggatattttttaagaggttcaagcttgtgactgttagtagtgcaaggatttgtatgggctcagtgattacaaacaaagacatgcaaaatacaactgtttaaacattttcaaggtatttttaaaggttttgtattgaaacaatgtttatatttactgagctcctaaaaatggtagaatacacatgaaaacttttgtttaggaaaagttaacttgttaaattcttttgaattgaataaaaaaatgcattgaaaccatatggtgtgtgattgaaaaaaatgaatatattgtgaagaactggtttggttacaggagtcactggaatccgactggagatgatttggccccctgtcctggtctaacatacaaatctaggaatattatgcgttaaagtattttaaaatacattatccttgtaatgtattttacaaggataatgtattttaaaatgggagttgcataggagagatggatgtgtgtaaacattatcactaaaatgataaacagaatacccattagaattcttagaactattaatgatcaagaggggtggaggcatttcttggtatcaaataactggttaaggttactttgggcgaaatctatttcctttttgtttttgttgttggataacaagaaatgtctagactaatattcatcagttttacaaacataatgaaaattagttgatttttagttgatttttttgtcccaacattttttttaacctttttgccactcattatatgtttgcagttctaggtctttgacagctgaagaccacaggaatcaaacaggcgagacacacagaatactgacccttctttacgcttttatagtgtttataccatatggcccagtgtggaattcttgattatccaagtgcctttggtcatttgtggcaggaaaacttaatagtttttagccagcagtgccacagccagcttttactgcaatacctaaagggtcaagtagtgtttttgtaccactattatttcaaatttaagtattctgccatgaaacgatccatactgggctggaacttgacatgtgaaatctttaatactaaagcttatctctgcttggcagctttttaggagaataatgagagttacaattttgactcttgcgttcctagaattcaaatggcatagctttctgaaatgagtatttcaagtttagtagtccgtataggagtgttgtgacttcaatttcagtgttcttgttaaaagaaataatatgatatatatatacacacatatatataacttgatgccagttttctagtaagcctcagtcttttattcactactcaatgataatgcattgtacaaacactgtcacatgagtaaataaaaatgaataattccttagaagatggagagtgttaaattatatttgtgataggaagcttagacatatcttttggttattagcttccattgccaattgtatttcagatgcatagggttttcttcccaaaaatatattgttaacttttatagctaactagcacctggaaaaaatgtatttgtacaactttactattgtatatagttttataataatgaaaaataaacccaatggccatattagaatgcaatttcgacatacagcttatctagatagttttccagaggattttgaaatttggcttaactgggaggataactgctcagcacaccactgaaacataaccactgacaccattcatttattttaactgagattcttgacatttttctctcctatgccttgttactttagcatacttgaactcacataaatgcttctttggattacatgggctatctgattccattttggatctgattgtccatcttgaattcaatatggtattcatctggactattcaaaaattatgccatttctagtctgtgaaataagatgtaaaaaatctttatttttgccctttggtaaaaacctatgtgacaacttttaaaatgtgaagcaacatctaatatagttgactggtatactaataggaaagtgaaagtatttcatgggtactttgtcacagaatgtgaaaagaaacttggcatagtggcctttataatgaggcatccacttactcctctgaagtgaagtctgtagcttagcttgtgtatagtttttgaaagaaatctcatgatcttcgttcattctcttgccttctcttttatctcatatggcacaagtagagggggaagccaggaggaaattcatcacctcgctatgcttttatttgatttttaattcctgagtgcctaaatgtggtgaccggcacctcacataactttttgagattcttgatgtcatttttatccttcctgtcaaccagcaatgtatttttatgttactaaaaccagtaacgtcataattgttgagggcaagcttcattgttgatagtgcaaagtgtcgctgttgtgatgtgtgtttattttattcaagtttgaatattgacaagtgtaacttaagctggtgactgacacctattgatctgctgtgtgcaaatgatagtactattttttagaaaactcttaagtaaattttaaaaatatttgaatacaaaatatctgagcaattttgaactcaaaagtttttcattgttttaaggattgccacaggactctttaatggtttttaatggacatacatgcctaatatttattggtgtgtttaaaatattttttgatagagtgttatgtcttaagcgcattagaaaacaattgtttgtaatggaatcaaagtgtttccctggacagtttgatgtgcttatggttgagatttataatctgcttgtactttgctttttaacttattaactgtaaataaattttagagaatacataaa

SEQ ID NO: 4414 - protein, 193 aa, Homo sapien
GRCPQEEAPAATPTAGAPRGELPGQARGPRALLRGPHLGGDLEGGHPDADHLPHHPRRQRRVGRAQPGGSAAQGAPGPASEPGTHGEAPPLPGAPGMRCGLQGASCRPRPWDRPSARRNEQVSVECLQIRPGPRPPMHFTREEVAGWLSLSRAAARSSWTLGQVCPLLPPVPGLRREGTAGPAGEVPFFLTTD

SEQ ID NO: 4415 - DNA, 3063 bp, Homo sapien
agcggggcagaagaggaagatttctgaagagtgcagctgcctgaaccgagccctgccgaacagctgagaattgcactgcaaccatgagtgagaacaataagaattccttggagagcagcctacggcaactaaaatgccatttcacctggaacttgatggagggagaaaactccttggatgattttgaagacaaagtattttaccggactgagtttcagaatcgtgaattcaaagccacaatgtgcaacctactggcctatctaaagcacctcaaagggcaaaacgaggcagccctggaatgcttacgtaaagctgaagagttaatccagcaagagcatgctgaccaggcagaaatcagaagtctggtcacctggggaaactatgcctgggtctactatcacatgggccgactctcagacgttcagatttatgtagacaaggtgagacatgtctgtgagaagttttccagtccctatagaattgagagtccagagcttgactgtgaggaagggtggacacggttaaagtgtggaggaaaccaaaatgaaagagcgaaggtgtgctttgagaaggctctggaaaagaagccaaagaacccagaattcacctctggactggcaatagcaagctaccgtctggacaactggccaccatctcagaacgccattgaccctctgaggcaagccattcggctgaatcctgacaaccagtaccttaaagtcctcctggctctgaagcttcataagatgcgtgaagaaggtgaagaggaaggtgaaggagagaagttagttgaagaagccttggagaaagccccaggtgtaacagatgtacttcgcagtgcagccaagttttatcgaagaaaagatgagccagacaaagcgattgaactgcttaaaaaggctttagaatacataccaaacaatgcctacctgcattgccaaattgggtgctgctatagggcaaaagtcttccaagtaatgaatctaagagagaatggaatgtatgggaaaagaaagttactggaactaataggacacgctgtggctcatctgaagaaagctgatgaggccaatgataatctcttccgtgtctgttccattcttgccagcctccatgctctagcagatcagtatgaagaagcagagtattacttccaaaaggaattcagtaaagagcttactcctgtagcgaaacaactgctccatctgcggtatggcaactttcagctgtaccaaatgaagtgtgaagacaaggccatccaccactttatagagggtgtaaaaataaaccagaaatcaagggagaaagaaaagatgaaagacaaactgcaaaaaattgccaaaatgcgactttctaaaaatggagcagattctgaggctttgcatgtcttggcattccttcaggagctgaatgaaaaaatgcaacaagcagatgaagactctgagaggggtttggagtctggaagcctcatcccttcagcatcaagctggaatggggaatggagaatagagatgtggtgcccactaggctactgctgatagggagctgaaattcctccaccaagttggtattcaaaatatgtaatgactggtatggcaaaagattggactaagacactggccataccactggacagggttatgttaacacctgaattgctgggtcttgagagagcccaaggagttctgggagagggaccagattggggggtaggtccacgggcttggtgatagaattatttctcgattgacttcttgagtgcaatttgaactgtaacatttgcttagtcacctttagtggagtaatccactgggcttgtttctatatttatataaagcagccaaatccttcatgtaatattgaagtccatttttgcaatgttgttccatacttggagtcattttgcatcccatagaggttagtcctgcatagccagtaatgtgctaagttcatccaaaagctgggggaccaaagtctaaatagggctcagtatcccccatcgcttatctctgcctccttcctcctccttcccagtctatcatcaaccttgagtattctacacaatgtgaattcaagtgcctgattaattgaggtggcaacatagtttgagacgagggcagagaacaggaagatacatagctagaagcgacgggtacaaaaagcaatgtgtacaagaagactttcagcaagtatacagagagttcacctctactctgccctcctcatagtcataatgtagcaagtaaagaatgagaatggattctgtacaatacactagaaaccaacataatgtatttctttaaaacctgtgtgaaaaaataaatgttccaccagtagggataggggaaaagtaaccaaaagagagaaagagaaaggaatgctggtttatctttgtagattgtaatcgaatggagaaatttgcagtattttagccactattaggaattttttttttttgtaaaatgaagactgaactctgttcaaatgctttcatgaacctggtttgagacggtaggaaagcaacaaaacgtgggaacctggtgactaagggcctggtgcaaggacttgggaaatgtcattaataatagatggtggggttttcccccctttagaaatgttggatattaagtgatataaacacttcttttaactccgaaaatcttctgagaaatcacaaaattcacggtatgcttggaacgattgagattttctaggtagatgctgaatagcctagacatcaaagttggtgtgaaccaaaatagagtcagctgacccagcatcagccacactctgggttggaaaatgtttgcctgttggaattaatttaagcttaagtatatatcaacattattttattgtgcaattaaaacaatacaaattcatggttttttaaagttaaaaattctaaccactgtaacaacagtttttgtgttattttctgtattaaacatcttgttgcacgcatttgaggtcatcagggtgcaaaatttgtattcctgaaaatgtcatatattttcattaataaataacctaaatatgataaaacataaaaaaaaaaaaaaa

SEQ ID NO: 4416 - protein, 460 aa, Homo sapien
MEGENSLDDFEDKVFYRTEFQNREFKATMCNLLAYLKHLKGQNEAALECLRKAEELIQQEHADQAEIRSLVTWGNYAWVYYHMGRLSDVQIYVDKVRHVCEKFSSPYRIESPELDCEEGWTRLKCGGNQNERAKVCFEKALEKKPKNPEFTSGLAIASYRLDNWPPSQNAIDPLRQAIRLNPDNQYLKVLLALKLHKMREEGEEEGEGEKLVEEALEKAPGVTDVLRSAAKFYRRKDEPDKAIELLKKALEYIPNNAYLHCQIGCCYRAKVFQVMNLRENGMYGKRKLLELIGHAVAHLKKADEANDNLFRVCSILASLHALADQYEEAEYYFQKEFSKELTPVAKQLLHLRYGNFQLYQMKCEDKAIHHFIEGVKINQKSREKEKMKDKLQKIAKMRLSKNGADSEALHVLAFLQELNEKMQQADEDSERGLESGSLIPSASSWNGEWRIEMWCPLGYC

SEQ ID NO: 4417 - DNA, 3204 bp, Homo sapien
cttcagagaccctttggaggcacaatctgtggttatcacagccaggaccggtacgaattctcttcccacattgtccggggggagcataaggtgggctagcaacctctccctctctcctcagtccaccactccactgccctgactacaggcattgatccctgtccccaccatttcccaaggagttttgctttgtagccctcactactggccacctgacctcacacctgaccctgacccctcctcacctattctcttcctctatcctgaccgatgtaagcattgtgatgaaacagatcttttgcttatgtttttcctttttatcttctctcatcccagcatactgagttatttattaattagttgatttatttttgcctttttaaattttaacttatatcagtcacttgccactcccccaccctcctgtccacaactcctttccactttaggccaatttttctctcttagatcttccagcagccccaggggtaggaagctcctcttagtactaagagacttcaagcttcttgctttaagtcctcaccctttacattatctaattcttcagttttgatgctgatacctgcccccggccctaccttagctctgtggcattatatctcctctctgggactcttcaacctggtactccatacctcttgtgccctctcactttaggcagcttgcactattcttgaatgaatgaagaattatttcctcatttggaagtaggagggactgaagaaattctccccaggcactgtgggactgagagtcctattcccctagtaataggtcatattcccctagtaatatgagttctcaaagcctacattcaggatctccctctaggatgtgatagatctggtccctctccttgaactacccctccacacgctctagtcccttcaacctaccggtctattaagtggtggcttttctctccttggagtgccccaattttatattctcaggggccaaggctaggtctgcaaccctctgtctctgacagattgggagccacaggtgcctaattgggaaccagggcatgggaaaggagtgggtcaaaattcttctctttctcctccacctctcaaacttcttcactatagtgaccttcctaggctctcaggggctccttcagtccccatcctatgagaaactagtgggttgctgcctgatgacaaggggttgtttcagcccctcagtcatgctgccttctgctgctccctcccagcaggattcaccctctcattcccgggctcctgggccctgttcttaggatcagtggcagggagaaacgggtatctcttttctctcttctaattttcagtataaccaaaaattatcccagcatgagcacgggcacgtgcccttcaccccattccacccttgttccagcaagactgggatgggtacaactgaactggggtcttcctttactacccccttctacactcagctcccagacacagggtaggaggggggactgctggctactgcagagacccttggctatttgagtaacctaggattagtgagaaggggcagaaggagatacaactccactgcaagtggaggtttctttctacaagagttttctgcccaaggccacagccatcccactctctgcttccttgagattcaaaccaaaggctgtttttctatgtttaaagaaaaaaaaaagtaaaaaccaaacacaacacctcacaagttgtaactcttggtccttctctctctccttttctcttcccttccttccccttccatctttctttccacatgtcctttccttattggctcttttacctcctacttttctcactccctatcagggatattttggggggggatggtaaagggtgggctaaggaacagaccctgggattagggccttaagggctctgagaggagtctaccttgccttcttatgggaagggagaccctaaaaaactttctcctctttgtcctcctttttctcccccactctgaggtttccccaagagaaccagattggcagggagaagcattgtggggcaattgttcctccttgacaatgtagcaataaatagatgctgccaagggcagaaaatggggaggttagctcagagcagagtagtctctagagaaaggaagaatcctcaacggcaccctggggtgctagctcctttttagaatgtcagcagagctgagattaatatctgggcttttcctgaactattctggttattgagcccttcctgttagacctaccgcctcccacctcttctgtgtctgctgtgtatttggtgacacttcataaggactagtcccttctggggtatcagagccttagggtgcccccatccccttccccagtcaactgtggcacctgtaacctcccggaacatgaaggactatgctctgaggctatactctgtgcccatgagagcagagactggaagggcaagaccaggtgctaaggaggggagagggggcatcctgtctctctccagaccatcactgcactttaaccagggtcttaggtacaaaatcctacttttcagagccttccagctctggaacctcaaacatcctcatgctctctcccagctccttttgcataaaaaaaaaagtaaagaaaaagaaaaaaaaatacacacacactgaaacccacatggagaaaagaggtgtttccttttatattgctattcaaaatcaataccaccaacaaaatatttctaagtagacacttttccagacctttgtttttttgtgtcagtgtccaagctgcagataggattttgtaatacttctggcagcttctttccttgtgtacataatatatatatatacactatatatatatatttttaatcagaagttatgaagaacaaaaagaaaaaataaacacagaagcaagtgcaataccacctctcttctccctctctcctagggtttcctttgtagcctatgtttggtgtctcttttgacctttaccccttcacctcctcctctcttcttctgattcccctcccccccttttttaaagagtttttctcctttctcaaggggagttaaactagcttttgagacttattgcaaagcattttgtatatgtaatatattgtaagtaaatatttgtgtaacggagatatactactgtaagttttgtactgtactggctgaaagtctgttataaataaacatgagtaatttaacacc

SEQ ID NO: 4418 - protein, 86 aa, Homo sapien [sequence omitted]

SEQ ID NO: 4419 - DNA, 4446 bp, Homo sapien
gcttggttcctgagcggatgctggggctgtaaggcgcgcgcggtcagctgttggcggtgcagggaggaggacgccggggctcgccttccctcctctgccgccgctgccgccatgattccggtgtcgctggtggtggtggtaggtgggtggctggactgtcgtctacctgaccgacttggtgctgaagtcatctgtctattttaaacattcttatgaagactggctggaaaacaacggactgagcatctcccctttccacataagatggcaaactgctgttttcaatcgtgccttttacagttggggacggcggaaagcaaggatgctttaccagtggttcaattttggaatggtgtttggcgtaattgccatgtttagctcattttttctccttggaaaaacgctgatgcagactttggcacaaatgatggctgactctccctcttcttattcttcctcctcttcttcctcttcctcctcttcttcctcttcctcttcttcatcttcttcctcttcctcgcttcacaatgaacaggtgttacaagttgtggttcctggtataaatttacccgtcaatcaactgacctatttcttcacggcagttctcattagtggtgttgtacatgaaattggacatgggatagcagctattagggaacaagttcgatttaatggctttgggatttttctcttcattatttatcctggagcatttgttgatctgttcaccactcatttgcaacttatatcgccagtccagcagctaaggatattttgtgcaggtatctggcataattttgtccttgcactcttgggtattttagctcttgttctcctcccagtaattctcttgccattttactacactggagttggggtgctcatcactgaagttgctgaggactctcctgccattggacccagaggcctttttgtgggagaccttgtcacccatctacaggattgtcctgttactaatgtgcaagattggaatgaatgtttagataccatcgcctatgagccccaaattggttactgtataagtgcatcaactttacagcagttaagtttcccagttagagcatacaaacgactagatggttcaactgaatgctgtaacaatcacagcctcacagatgtgtgcttttcctacagaaataattttaataagcgtttgcatacatgtcttcctgcccggaaagcagttgaagcaactcaagtttgcagaaccaataaagactgtaaaaaaagctcaagttcaagtttctgtataataccttctttggaaactcacactcgcttaataaaagtaaaacacccacctcagattgatatgttatacgtaggacatcctctgcatcttcactacacagtgagcatcaccagttttatcccacgttttaactttctaagcatagatctgccagtggttgtggagacatttgtcaagtacctgatttccctctcaggagctctggctattgttaatgcagtaccctgctttgctttggatggacaatggattctaaactctttcttggatgccacccttacctcagtgattggagacaatgatgtcaaagatctaatagggtttttcatcttgctgggtggcagtgtacttttggctgccaatgtgaccctgggactctggatggttacagcacggtaatgtttgcactcatctgacagaatccctgagttacagtatacagctatgtggtaatattcattgccattgaaattcttacttggtatgaaatataaagtgtttccttaaaattacatcttagccaacaaccctgagctcctcccatatccagagtacccaaactctgtggtagaagataagcagaagaaatgaaaggcatagtccctgactatattctaatttaggactgaatgtacccagatgcttgtggaataatatctaagcaagtgcaaattcatgtaataccgttttgtctgattacatattgtgttgaaatagtataaaggagaacagaactgggtggaattaattgggaaaaacttcttacaaaagcatcattaatcaaaatttgaaggagaccagactttggccaagtggaaggatgaccattgtcttggcctgtatctcttgtcctttgtcttgtttgaaaagtattttaaaacttaatggtgtattattttgtgctctgaaagctgaggtctgattacaattagtaaaattctatagaagaatctgctgacgtgaaagggaaaaatctttgtcaaatgataccaaataaatgaacaaaacaggaagtagggcctatgatatcgtgagacatgttttgccccacaagagttgcatcttttataaggtgtctctgccccctcataaagcagcactagctttgacatccacggtgagctgcaggaagcatcacacaccagcagcatgtgagcagagggaggcagttggggttgaacttcggaactaggccgggtctcctgacagatcacaagacaccccagaggatcttcagcagtcctacttcccattctctatagagctttgaagcttggaacccttccagggtaaacattttctcttgtgctgctcaggacatctggggcctagctcctgggttcctgtctccaagaagcaatgaccttaaactctgagccatactctgtcctcaccagcggctcccatgtttttctgtgtcaggttattaagtacctagtccttgttttctgtctctctcctaagctacctctctgggtccacagaagacttggtagtatagtgagaatggctatacgtgagtacaaacatggattttccagggcttgggaactgattcttgagcccagaagagccacgcctgctttgaggtcttttggagtggagatgcagccctgggaaatttggggagtcagcaggccagtgtgaagctattggtcctaggagtatatgagcttgctgtttctttgatggaaaatacatgcttctcttgtatactcagaagtgactaagggcaataactcattaatagccatctatccaacttctttactgagtgatgtattccatggggttacctttttcagattattgagttgctctgtaagcactaaaactttttaatcatttttaagaaactttttagattgtattacaaatttgccttaacagtaattagatgttgaatataattttaacattttattaatgacttgggtcatcagttaataccagtactaaaaccatacgaattattggtttattccagaaaatacagtatttgttctatttttaggtagacaatcatttgggatcagagtacattagcatagtaatgctcagtcagacctgttcaagtagtagagcttggagaatgccatgaaatacttatataattaatttgattgcatgaactaagcaattttactaatgaaaaggttgtatatgtgcaagtcacttttttaaaaaccaagaaaaaactttaatagaggaaatcttattcattaatttatttttctgagtaaaaaaacgaaacccaaatctcattttatttcaactgttaaacattttgatctgttgacccataggatcaggatttgggaaccactttactaggaaagagcagatcagtaccatttgtataaaaccggcctcattatgtaagaaagaaaatgttacgtgttttcttctttagcttggttgtgggcacttctacagcaaggaccatatcatattcatctttgcatccctggcacagtgcatgagacataagtacttaataaatgcagttgaatggataatgattagtgttatttatggattagaaaaagcatgtttctatttaagtaagctgtaaaaagtattattgaatatttactgtaaatatatgttcacataaaaaaataacttggagggtctttgtgtccctggcatattatcatcttcatggaaagaatccactgtggtttctgtagagtgattggaaaaatggattattttgaggattgaagaaagtgttctttctgcgttgtcactttgttcaacagtaaaactttattctcagtgttcctactctgcattgtttacatttttgacagttttttttaatcacctacaatctgtaaagaatgtatatattcttttcagcatctcagtttgaaaagacatgcagttaaacttgaccttttgataatcgctcttacaggtcattgtctgttctaacagcaaattgtaaacatgtgcttcatagatattgtggctctcagtcatcactttgtcctatggtatttattgaatgttcacatactaatggtgcacaggtgtttttttctataaatcttctgactgtcctgtaattcattcttaagctttaacttgaaggtatcgtaattgccggcatttgatgtttagcaataaaagaataaatgtgtaccagcattttatgtttaaaaaaa

SEQ ID NO: 4420 - protein, 556 aa, Homo sapien
AWFLSGCWGCKARAVSCWRCREEDAGARLPSSAAAAAMIPVSLVVVVGGGWTVVYLTDLVLKSSVYFKHSYEDWLENNGLSISPFHIRWQTAVFNRAFYSWGRRKARMLYQWFNFGMVFGVIAMFSSFFLLGKTLMQTLAQMMADSPSSYSSSSSSSSSSSSSSSSSSSSSSSLHNEQVLQVVVPGINLPVNQLTYFFTAVLISGVVHEIGHGIAAIREQVRFNGFGIFLFIIYPGAFVDLFTTHLQLISPVQQLRIFCAGIWHNFVLALLGILALVLLPVILLPFYYTGVGVLITEVAEDSPAIGPRGLFVGDLVTHLQDCPVTNVQDWNECLDTIAYEPQIGYCISASTLQQLSFPVRAYKRLDGSTECCNNHSLTDVCFSYRNNFNKRLHTCLPARKAVEATQVCRTNKDCKKSSSSSFCIIPSLETHTRLIKVKHPPQIDMLYVGHPLHLHYTVSITSFIPRFNFLSIDLPVVVETFVKYLISLSGALAIVNAVPCFALDGQWILNSFLDATLTSVIGDNDVKDLIGFFILLGGSVLLAANVTLGLWMVTAR

SEQ ID NO: 4421 - DNA, 6055 bp, Homo sapien
ggaattctgtctggagtcatatcttcaaccattgctaatccaactgatgttttgaaaattcggatgcaagcgcaaagcaacaccattcaaggaggaatgataggcaacttcatgaacatttaccagcaagaggggacaagaggactgtggaagggtgtgtcccttactgcgcagagggctgctattgttgttggtgtggagctgccggtctatgacatcaccaagaagcatcttattctctcgggcctgatgggagacactgtgtatacccacttcctctcaagcttcacctgtggtctggcaggggccctggcctcaaaccctgttgatgttgtgaggacacgtatgatgaatcagagagtgcttcgagatggcagatgttctggctacacaggaaccctggattgcttgttacaggtaagagcagatgtctgtctctgcagggttgtgaattatatatttttttgatctaagaagtaactaaattatgaaagctactaaaactaagatgaatgatgctttaaagcccagagatgtacatgtgtgagaccatttttgccacactgtgcttagcttttataaatacaatgttgttttctttatacctccatctgctgtgaaaggtgaggaaatatttcctgtgattataaaagaactgggtctccttccaaaatgtactttcttcctgttgggtcaaactagtatgaatatccctcattcagacatctctgttaaaggaacacatcaatcttactttaattctcagtttaaataattgggcctcctgttttatgagtgggtgaaaggtttcacctgtctctgccactagattgccagtagtaggattaggagtcacttttttttttttttttaaggtgatatttatttatttattttcaagttttaatgtattttagattcagggggtacatgtgcaggtgtgttacataggcacatgcgtagtggtggagattgggcttctaatgtacccattacccaaatagtgagcattacaccagacagataatttttcaactctagcctctcccctttaggagtccccagtgtctgttacttctatctttatgtccgtgtgtacccattgtttagctcccacttaaaaatgagaacatgtggtttttgatcttctgtttctgcgttagtttgctcaggataatggcctccagctccatccatgttgctgcaaagaacgtgatttcttttttatggctacaggggccacttttgtggttcctgttttccaacatgacactagcacattttattcttcaggtgttgccttaatgaagcaaagacacttatcgtattcatccacctgacatcttgggaaatagtggtactctgaatgatatctctaccactattgcttctttatttgtgacctgttcaggagcccacatggcacggaagcaacagaccgtaattggaattaaatctaattttttcctcactcaacagtgtttatctcctttgtgtggagttcattcaatccttcgtgtggggttgttgggcatggagccttagtcttccacccacacaagcctctaaagagcaaagatttcttaggcagtccttccaaacaggattttatttttaagaaaaataaatcagtctggccactaattattattattattttttgagatggagtctcgctttgtcgcccaggctggagtgcagtggcgtgatcttggctcactgcaagctccgcctcccgggttcatgccattctcctgccttagcctcccgagtagctgggactacaggcgcctgccaccatgcccggctaattttttttttgtatttttagtagagacagggtttcactgcattagccaggatggtcttgatctcctgacctggtgatccacccgcctcggcctcccaaagtgctgggattaaaggcgtgagccaccgcgcctggcctggccactaattattaatgcatttggcataattagaaagttggaagttaacttttttttcttcttttaacagacatggaagaatgaagggttttttgctctctataaaggcttttggccaaattggttgagacttggtccttggaatatcattgtatccttttctgttgcaatagatctgaaaaaagatacagctaaagaatactatttgtataaactctcatgttattaattataatttagaagtaggttctgattattttgagttcctctgatgctaagaagtcactacttagtttcttttttaggaagtgtaaagtctccgtgctagacactgaatcttgctttgatggtggtattattcaaaagtagtgatactactaaaaaggtttagttagactctgttctagaagctgagggtatttacgatttcagagagagagagaggaggattggctttatagccctagccaccttgggaaggatgtggttggcaacagtgtcttagaatgcttatcttagaaagtgcctgaagataaacaggaattagctccggaattgtttggcaggccagcacgcttcctatgtgccacagtgggaggcaggaaaggaaaggcagttaacttttttttgtttttgagactgagtctttactctgtcgcccaggctggagtacagtggcgtgatctcgggtcactgccacctccgcctcctgggttctagcaattctcttgccttggcctcctgagtagttgggattacaggcacataaaaccacgcctggctaatttttgtgtttttagtagagatggggtttcaccatgtcagccaggctggtctcaaactcctgacctcaagtgacctgccccttggcctcccaaagtgctgggattacaggcgtgagccaccgcgcccgtgaggcagttaattagacactgaagggcagagtgatgaagcaggaatgctggcttttgctgtcctcttgttgctcttcatcagctcctgcctcccaaggaaggatgcatagtggaagcctttgaggagagcttcccagggcttgctaactctctctctctctctctctctctcaaaagcttacagtgctggaaagtttttccaccacagcaaagccacaaaagcttatcagcgtagatgccatctcagaagaggctgataccaggggatttacatatctcagctgtgatctttctgctccaagctgaccttggaagatagtttgatgtggttaagggtggaaccccttttatttaatcgtgtccatagcgtgggtctgcctgtacctatttgttattaagtgtgccatttgtaagtctgttgttatgcactggagttgtgaagatggcattttctgtgtcatccttaacccataaccacagttctttgtgacatacgagcagttgaagaaattggatttgtgacaagccaaggctgcatgagacatctttctgaaaatggtaacttctgaaacagcaaagcttcctgtgtttcactctgcttctcactgcttggctcatcacagattctgggatgtgagcaacagatgaagactgggttagttgagattgctgtgtgttggcattggatgctcttcatcaaacgtttaatggcataaactaacatccaaacactagtctttaccactgaagtgcccttcaacatcaaagataatatgtgaaatgcatgtttcttgctaaagaaaacttgcaagaaaatcaggagcgatgtattgttttattcagggagagtagctcctgatgcatctcagctcatgactgagaatcagactgctctagaaaagctcactggaaccatggaatggagcctccgagaaggtgttatggtttctgaatttctgggagattttgctccttgtcaactgaagaaatttcatgtatggagacctggactgttcaaccccaggtataaacggtgcaggaaatggatcctaggaatatcacactgctttatcatttcctattttggcaggatcttccacttataataagtgattttaagctttgaagacttgacatttgtgagaaattgttacaaagtaataatctctaaattcgtggtggtgttatgtgttggctttgaaggttgcaaggtctgtattggtggggggtgttttcaagcagcttaggttctgtcttaggtcatgttagtaattagctttatgatttttagcaaagcatatgtatttctcaatgagtaaaatggggataataacgtctattgatgtagagggtcaaatgaagaacaaatagtagctgctgctacttgactggaaaggtaaatgtgtttacatcatgctgtggaacagctctaaacagtctatgtagaagaggggcatgttctcatgggcttctcatggtaattgtgaatgaagccctttgttaaggtcttgttgaagaaagaacactgtataagttcaggctttagtacattttccttagcaaaatgttggtagtgaatcaaagagttgatttttccaggtttccagtttttactttagtttatgttgtgcctgtcttggactttctgtttagtttggatggaaaatacctgcttgaaattttaaaaatgatttctttagtgcatctatttagctagtttctgataggtggtatgtaatattttccctttttctttccttctgtagacacaataagtcattctccctcttctttttttctttttctattttcttattctttactctaacctgcttcagagaaagagccctcttccttcttgtcttcatcttagtcttttcaaaataaaagatgactgtgagaaccccaagaacttccacttctgggaggcagccacaggacagggaacatatttatttgggtctcttcagttccccctttgagaacaacattaaatacatgttagctggggctccagggcattctccttccacagtagtgcggccaaattcccagtctggccagtctctttgttgagactgaatagaaggactgcaggtttttttggaggatgagataatttttcctcgcaggcatttttcccttgccttccttatgcatgaatggtccctttgaatattatttccaaaagtgagagctaagacaaagtcatcaaaaagagaggataacagaaggtgggggcgggggcggggtgcagtggggtagggttacctgttaattgctgagactcagatgaaagtccagctctccctgggcaaccctagagggcagcagaggaccccagagctcattcaggccttgctgcttgttctaaactacaccttaggattttttcttctttccaaagcattccattgattttataaagactttctatagagaggctttcacttttgagttctttgagtttaaagattgcttttcttgaaatgctctttttttaatgtagaaaaattttactttttcaaatatgcatacaatttttaaaacagtagaagcaaattcattttaatgaccatgtaaagagcgaatgtcagacagtattattaccagtttattcaaattacatacatgttcctaccaaggtggaaagaaattcaaacctcatggtaaaacttaagcacgatttaagataaaagcatagtatttcttcagtgtagacttattaagtgccttattgaacaggatcttaacctgctttttctgtttttttgaaagagttaatgcaattgttgaagcttctaaccaagaaacaacttaaggaattgggagacttggtcccctcgttgtcagggttctggctataagtacctccccacctttgggttttcttaaatatgccaaaaggaattctagtttttataaccaatgggtttttttgtttgtgtgcttatggatttgtgtaatcattgatgcttaatgttgtggattcataatataaaaagtggctcctgtcctttatatttattcatgtgctagaaatagtatgcattatataaagagtatgaagttttcataagcctttatatttcaagctctttatttaaacattgttggaatatgtggcataagccttgtttcatttatttaataaactggagtaatatataataaaaaaaaaaaaaaaaaaaa

SEQ ID NO: 4422 - protein, 155 aa, Homo sapien
GILSGVISSTIANPTDVLKIRMQAQSNTIQGGMIGNFMNIYQQEGTRGLWKGVSLTAQRAAIVVGVELPVYDITKKHLILSGLMGDTVYTHFLSSFTCGLAGALASNPVDVVRTRMMNQRVLRDGRCSGYTGTLDCLLQVRADVCLCRVVNYIFF

SEQ ID NO: 4423 - DNA, 4538 bp, Homo sapien
atgtccggggtccgggaggagaaaagtgtctctcatctgtcccatcaaagcaaattagtgaaacctgcctcaggtgaagtgcaaaggccagtctgtaggcagagtttcgacctctccccacgagattggctagacatcacctgcccaagctctctcccgacctgctagagccgagagggcggaggccggagaggctgcagccgggaagtagcaccgccaccgcacatccgggaacgccagcagccggctgagggctgcataactgatggagggccgggcgcggtaagagcgtctcgggggagtggggcaaggcggccgggcccctcccatgccgccttttcttcagcgtcctacccgcggcactggctgcgagcgccgggccacctgcgagtgtgcgcagggactctggacacccgcggcggcgagctgagggagcagtctccacgaggacccaggcggaccctctggcgccatgcgcgcccttcccggcctgctggaggccagggcgcgtacgccccggctgctcctcctccagtgccttctcgctgccgcgcgcccaagctcggcggacggcagtgccccagattcgccttttacaagtccacctctcagagaagaaataatggcaaataacttttccttggagagtcataacatatcactgactgaacattctagtatgccagtagaaaaaaatatcactttagaaaggccttctaatgtaaatctcacatgccagttcacaacatctggggatttgaatgcagtaaatgtgacttggaaaaaagatggtgaacaacttgagaataattatcttgtcagtgcaacaggaagcaccttgtatacccaatacaggttcaccatcattaatagcaaacaaatgggaagttattcttgtttctttcgagaggaaaaggaacaaaggggaacatttaatttcaaagtccctgaacttcatgggaaaaacaagccattgatctcttacgtaggggattctactgtcttgacatgtaaatgtcaaaattgttttcctttaaattggacctggtacagtagtaatgggagtgtaaaggttcctgttggtgttcaaatgaataaatatgtgatcaatggaacatatgctaacgaaacaaagctgaagataacacaacttttggaggaagatggggaatcttactggtgccgtgcactattccaattaggcgagagtgaagaacacattgagcttgtggtgctgagctatttggtgcccctcaaaccatttcttgtaatagtggctgaggtgattcttttagtggccaccattctgctttgtgaaaagtacacacaaaagaaaaagaagcactcagatgaggggaaagaatttgagcagattgaacagctgaaatcagatgatagcaatggtatagaaaataatgtccccaggcatagaaaaaatgagtctctgggccagtgaatacaaaacatcatgtcgagaatcattggaagatatacagagttcgtatttcagctttatttatccttcctgttaagagcctctgagtttttagttttaaaaggatgaaaagcttatgcaacatgctcagcaggagcttcatcaacgatatatgtcagatctaaaggtatattttcattctgtaattatgttacataaaagcaatgtaaatcagaataaatatgttagaccagaataaaattaattatattctggtcttcaaaggacacacagaacagatatcagcagaatcacttaatacttcatagaacaaaaatcactcaaaacctgtttataaccaaagaattcatgaaaaagaaagcctttgccatttgtcttagaaagttattttttttaaaaaaatcatacttactattagtatctatggaagtatatgtaacaatttttatgtaaaggtcatctttctgtgatagtgaaaaaatatgtctttactaagttgaaatgaatactttctgcctttgctaatgatagttattctacaatctccacaagaaaaatataccttttatccggaaatattggtttaaggcaaataaataaaactgtgcttgctctaaagctctgcactacaaaagcaaattttccagtctttattccactcataaccactgctttccccaccaggctaaagtgcttcttagtcttaaatagggtttttaacttcataaggtacaccattgtttatgttttagggtgcaggtccatatagtcgtaatacttaaaacactgctacactgatgcttttgtggctcatggtttcctggttctttgatttaacacctggcttcctggtatctatggctggttaaatatctaaacctgcattattagtgctttacaataataattcccttgactgaagtccagaaatactaaagcacttcttttttattgctgtgaatgccttagacttatcttccaaaataggatacttcgtttctattgcatatataactgaaatattttataaactcactgtaatcaaatcttataaaatctgaatcaacatgaaaagttgtcaatgcttgaatgaatactaaaatcataccacaagatactagataacataaatgaccatgaagtgtcccactgctcaaagggcaacaactttaagaacagaagcaaagagtggtggtgtggaacccaagattcttggcgactagggaatttaaaggttggggaggaggaattcaatgatttgacaagaaatactttataaaaatttgctccatgtattggctaagaaaaatataataaaattttggtagtgaaaattgtatcactaatgtttaccaatattactagtatgaataatacacataaggtagtgacttggaagctgctcaatactttgttgctataacaaaatgcaatattttgttgtaaagcatcttaactacacatataagtttgctgaacttgaatacatcccggtaatggcaaacttcattttattcttggttttcattttattctggtctcagggccatacatttattttagtttaattaattattattttgacaacattacttgggtaatatctatataatggtagataaccaatcagttagcttaattaatctaagctatttgaattcagggaaatattagtcaaatctgctgtttgactaaatacaattcaaagcagtgtatttgtgacttggaatatagaacacaaacaaatgtgtaacccatctgcagtatgcattcttccattttaccaccactaaccattgaggctcatacaattttcaagcaacaagcattgcttcccaaaggtaaaataatcaggaatatttctatagtaaatggagtttttaattggcaatactgtttatttttttctagcaaagacaatttatctcagtaaccttaaataggaaaagtactcaaaaattaaagttgacttttggctttttgtagtctctctggaggacttccagaaaattaccactgttggattttaatctgcttccattaaccaatcttacagagatgataaatgaattaactaatattgaccaaatataaattgactgcaaataataagccgcataaaagttgaagtaggaaaactactccaagtttatatattaggcaccttggggaattctcttagtctttccagctaacaaggattttcagcataataagtagatttaatgatggcataaaattcccagatactttcatatacattttttgccaaagtgtaaatcttctccttttgcagtctttttgttattatcccaacatctagctgctcaggccctaatttagaactcattctgatattttcttcttctgtattaattaatacttatgggtcatgaatccctgctcctttgacctttttaatagctcatgaatccatcccattgcctccccaactctgcccacacctgctgcaacagctaatgccttgattttcctacctcagtctccttttctattaatccctcttttgcgtggctgcctgagtccactttctcaaacacaaacctcactatgcaactttggaatctctgtaggctcacctttgccatttcttaatattgcattctccaaattgctaatctctatccagtctcttgaactagacttggcacatggagattccgctcagaaagtgctcttcacacttctacctgcttgactaaccccagattatctttcaagactttaatctgatcttgtgtcttagagaagcccccatacctggtagagcatgtaccatcttacatgcttaaataactccacatttatttgtgtttattactctgtgttataaatatacatttgttggtctctctcttggattattttgtttctttgtcctgtaactaccactgaaagggtgcaatacagctttcttgaaatgtgtattgaacggatgaatgtataaataaaaattaaattttgtaaatttctgcttattcttagaaaaagaatctaaattgtgacaaatcagaattgaaaaaagtattctaataaagaaaaacaagcttttataacttca

SEQ ID NO: 4424 - protein, 327 aa, Homo sapien
MRALPGLLEARARTPRLLLLQCLLAAARPSSADGSAPDSPFTSPPLREEIMANNFSLESHNISLTEHSSMPVEKNITLERPSNVNLTCQFTTSGDLNAVNVTWKKDGEQLENNYLVSATGSTLYTQYRFTIINSKQMGSYSCFFREEKEQRGTFNFKVPELHGKNKPLISYVGDSTVLTCKCQNCFPLNWTWYSSNGSVKVPVGVQMNKYVINGTYANETKLKITQLLEEDGESYWCRALFQLGESEEHIELVVLSYLVPLKPFLVIVAEVILLVATILLCEKYTQKKKKHSDEGKEFEQIEQLKSDDSNGIENNVPRHRKNESLGQ

SEQ ID NO: 4425 - DNA, 6309 bp, Homo sapien
  Unsure 267-571: Unknown base
catgagccaccatgtctggctgattaattttttttttaactgtaagagtttgatcttttcaaatgtgttcagaaactaatttggattctttgattctagtatctcaacgtgtttatttttagattctgataagtgaaatggatgtccttgtggagctctggcctccccagcttatctatcagtcctgctgtcctcacctccttgcctctttccatgcttacccttaagccaccatctttctcagctagcgtgtgtgtttctagtgtnnnnnnnnnnnnnnnnnnnnnnnnnnnnnnnnnnnnnnnnnnnnnnnnnnnnnnnnnnnnnnnnnnnnnnnnnnnnnnnnnnnnnnnnnnnnnnnnnnnnnnnnnnnnnnnnnnnnnnnnnnnnnnnnnnnnnnnnnnnnnnnnnnnnnnnnnnnnnnnnnnnnnnnnnnnnnnnnnnnnnnnnnnnnnnnnnnnnnnnnnnnnnnnnnnnnnnnnnnnnnnnnnnnnnnnnnnnnnnnnnnnnnnnnnnnnnnnnnnnnnnnnnnnnnnnnnnnnnnnnnnnnnnnnnnnnnnnnnnnnnnnnntacacattaggatgatctatattgaaatctacatggaacagagtgggacttctaattgtatgacttcaagattttgctttgtttaaattaataactgttttcagaattaagtgcttaaaaacaaatttgattgaaaagttcaagacaagaattttgctctctatggctgttccatataaatttgatggttgattctgaatgtaaatgactgaagaattaaaaaataagaaattcctttttaaaaggcatgcctcttgcactgtgaacaagacagtagtcccttaaaccatgaatatgtcagtgttctatggattacgaaattagtaatgttgcttagcccaaacgtgttttttaaaaagtatagttttgtacatctctaagttatcaaacttcaaaattgagaacaaatttaaaagtccatatatgcaactctagtaagcacttaataggttacatagcactggttaagaacaattaattttgtttctatattattactaattattattacaaatcaaaaaacactgtgataagaacttcaaagcatatatacaaatatagttaaagcaatgaatagatgaaacatgtctactttatttcatttagaaaggaattaacttttttgttaggcttttaagaaaagttctattcattttaatcccctagggaatttgtaatatgtcctacttcatatcatcttctgttgcctctattgatccacattttctgcagtggatttcttgaaaagaatcacacttatagtatgcctctagaaatatgattttactgctttgaagtttacatgaaacatgccagttgcttaactctaattttttatatgaatctcagtagcacttttgttgtacattgtgttccaataagtatagtatggaacactttctcatttttagttcccataatatgccagtttttgctttcctagtgttctgtgagtattaggatttggcaatctgcttttgcatttcaatttctgttttacatgcaagaaaaacatggacactcttacgtggtgcttgtagctgtgtctccgtagagctcagtaaatagttctacagggtttagaggatgagaagcgattgtcaaattaggctgaattgtagaacacaaataatttaattcaaaataacttaccaattttatatacatgataaagtattcagacaactttctaaatgcataatagtaaaagattgtgaccagatattatgatattaataaagttaccagatactaaaatcaatgaatgtaatttgaattacttagaaattgtatattagagcccttatgagtaaaaacatttcatttagcaacttaacttttagaatattcttcctacttagggattttgattagattgtaacattaaattcgagaatatttagtctcaagagaaacacttcctggcatccatcttaaatagtggccttttcccactatggtgtttttaaatgcatattcatatataatagtatgtttcttacatttaatccctaaataacttagataatcattcagtggagaacaagtaaaaggatatcattccttttggagataaacattgagtgtctagaatttttttctattaatgctttgtatattagttttttaaataagatctatagatatgtatttatgtgtgtcttatatatgaaacagtgctctgggtttgactcctatgttttgtaattttaaaaactacgatatgcttgcagaaattcattgagaagctgttataaaaaatgcagtgaagcatgaccaaatagctaaaaatattactgaatctttacaaatatataatctttattgttgtactgtggagtgcaaggatactaaatattggctattgataaaatactaacttgcatttcatggcaaatagatgttatatcgcttgattagtctagaacatttctaatattttgtgctttcatatatcaaaggagattatgtgaaactatttttaaatactgtaaagtgacatatagttataagatatatttctgtacagtagagaaagagtttataacatgaagaatattgtaccattatacattttcattctcgatctcataagaaattcaaaagaataatgatagaggtgaaaatatgtttactttctctaaatcaagcctagttgtcaactcaaaaattatgttgcatagttttattttgaatttaggttttgggactacttttttccagcttcaatgagaaaataaaatctacaactcaggagttactagagaagttctaagtatttttttgctaagtagtaaaaatataaacatatgaaaatgccataatgcctgtcatagtcattgtttcatattttgtcatataaaatcacctaccctgcttctagttttatactttaatctgagtgaaagtatgatgtggtggaaagaaaaaacagtacagtattacatctgagttagtctttgaaaaatcatagtagtaaatgaacctcaacactgagtggtcaaaaattgggttaaccaatggggggagaatatttggttaattgttttaatattaaattttcaagtttataatagagttatggttgagtagtcatccatactgagtaatcacgcattttttaaactataattgaggctcttctaaagctttgttttctaatctaagatacaaaggatattcttgatcttgcttgattgtaactacatctaccagtctttaatgtctgtttggggtgagtggcgatcctctgttgtaggaatgtttttgaagatttctattttgttttccacttaggaaattcccctctctcatttggggtatatgcgttgagtataaggtaggctgtatttagacacactagaatcattaaatgtaggtgaagttgtagagaaaaatggcctgggtcaatgtaggatctagaaaattaggagtgtacatttgctggcttctttttgagttttgtactgtttattacaggaacatatttgtgtggctaatctctagggtgacagtgagtactaccctgctccttctgcattctagttatccaacacacccagcagattgtgttcagggacagaatgtgtttttagaaatcccttattattgaaatgaataataatatagctataaatatgaatgtctggaggtatccagatgtgccttaacaaatgtaaatggttttcattcagaagtttacatttttattacattataaaatctcatcattgggaactttctaaaccatgaatatcagttcttttaatgaaatttaggtggtgctttatcattttggagaagttgctgtttgggacaatagcatcagtttatcaagaagtgtactcaccatgatattcaacaatgtgttacatttgacaaaacgtgtttagagtaagaaagactaactatactgtctgttatatttatttatgctttttgtagtttagctacatactataattttcattttaaacgttccttagttactacaaataatatttatgttttgcttcttcttagatgtaggcggatgcagaaatagaattatgttagagaaattattaaaagtttaattccagtaggcagttggagaaatctgaaactaatttgaaaaacttttatgctgtagtctcattagaatcattttaaaagcactgttcttgcatttttcctagactacagagagtgttctttgtcattttttttcctattctgttgtgaagtttattgtttcagttatttgagggaaataacctcttaatatgtttattttcctgaactaaagttttcatgtagagaatacaattaaatgttttgtgttatgacccaaactggctggaagtagagttcagagagggagaagggacaagaatcagtgtgggcatctcaggaaagtggcgccagtgctgggctccagccttctccactggcatgatgggtcctcagattctcctctggataatgagggtgttgggcactgtgagctctgacttctggggaggataggccatcatggactccatacacaattttgatgggtatcagttctcataaaatacctgctacaatttatttattttgtagttgtttagaaaactgtgagcagttgggcattagtaaattgtagttatatcttaacgatcttgggaatcattgaaatatgagtttttttccctcactcctatttatttaattaaaaaattagggaagttgttcattcacagctgtatattaatataaaatctctttataaaatgattcagagaaaaggcagtagtggtcacttactgtgctaaaatacctttttctctaaaaatatttaagctttagggtttgtcatagttttactttttaaattatactttgtgtaacaatttacgttaactagaaaaattagatatataataagttttggtactaagaaacatttacattctacactcattagtcaaatgaacttttctttcccagtgctaacagattttgtttcatgtgaagaaaaataaaatacaaatgaaataaaagtctagaaacagcaacaggaaactcaccacagaaataaagacataacccttgataagtttgtgtaagtgccagaattattggaagcaggtgacgaatgattaagaaaagctttattgtggggacatgctttaagaatcagctctgtatttgtgccaaggagatcaggtattggtgtgcaaacagatcccattaatactctgatttgaaccatgaattccacctactctgcgttgaagccctccagtagactgatagatgtaatcaaatgatcagctaccaagtttaattcctttgcctgtgtgtagcaacagttggtagttttacaagttaagttgatggtctggctgcagataagagaaagactcagtgataggtggtttgtgagtgaagtaacttccacactgtcaagagttgacagcatattaattgtgtggcattataattgtgagaaacaaatgagagcaaaatgttaggtcctttgacaagcattttcctcctgtttttaaaaagggctttaagttgtttcctatgtaaggtaatctttcttttttagtattatctaagaaggatggtagattatgtcattttggaaactattgtgtcccttgtattttaaatatttcaggaaaatgcctacgattgttacaaagatgtgtgttttacttataacataagctctgattctccagtggccactgggccttctctgtgctctgtattcaactgcagtatgaattacagaatgctgtgcatgttcgttagtaccaataccatgtgtatgtggtagaagttgtaaccagtttctggatctgtatggtactataaaatacttattttataattctgtaaccgtatggcagtgttatgccaaaaatgtataaagagcaatagtttttgttgcttactgctgtattttaaaatattgtttctaaaataatagagttagagttccttttgagtaattatttttaagaactattgccaaatatacatcctgtaaaactaataaaagccactccatcttagataacattttagcattgtgctagagtacattatggtgattttgcacgattaaaatatttttaaagaactagaaaaaatgacttgctgttttcctgtcattaagcatgtattttttatgattaacacataagactaacattattttcttttatcctcaaaaataaatattgtgaagggtgaatcat

SEQ ID NO: 4426 - protein, 171 aa, Homo sapien
  unsure 43-144: unknown amino acid
  Unsure 267-571: Unknown amino acid
MSLWSSGLPSLSISPAVLTSLPLSMLTLKPPSFSASVCVSSVXXXXXXXXXXXXXXXXXXXXXXXXXXXXXXXXXXXXXXXXXXXXXXXXXXXXXXXXXXXXXXXXXXXXXXXXXXXXXXXXXXXXXXXXXXXXXXXXXXXXXXHIRMIYIEIYMEQSGTSNCMTSRFCFV

SEQ ID NO: 4427 - DNA, 3226 bp, Homo sapien
ggcaggaatttcggtagaactggagtgacctgtggaactgctttagaatctaacctgctgtcttcgtgctctgtgtgaaggggaagctggggggttagcatgaagtctggccttgtgtgcattggagcttccaaggcactttgaaatcattccagtatatttgggaagaattgagtgaatgagaatgctcttccttattctggtagatttgacttgtttataattctgcactttagaagaaaaacagtgttaatctgtagttgaaagaaagcttagtagatgagagagttctaggctactgtggctttttccagtagatttagatgagattatgtgttttgaaatgttttgtgggatcccttagaaagcatcacttcagggcagagacactcaatattgccagccagcttgggttctaaagtgatttaatcaaattcatgctcctgatcttttttttcccccttcctttggctatgaaaacccaaagcccggagtgattgttttctccttgctttaagcagtgaagttatcctaatgcaaaagagcttagtagaaaatgagtggtttacctttttttctaaaagtatattttcaagtttattctggaatgtgatgtcttggtcctcttaaaagcagatcagccatgactgaaactcaaggcttagctggtatctatgttgtgctacattaggtgactagaagccacttcttagtgtaatcagctcctgtttccctgtgagccttagttatattttaattcagtggctttgagtcaaggccggttctaattgaggggacccagtgtgcttcagtgttaagagtggggcaatgaagagtgaaccccaatgaagagtgatcccaactttggaaactatctggtcattcatgaccttaaaaagctgccatggtggtcaaatggcatgtgtttgcacaaaaatgaccgatgtgtttaaccaaagctttgaaatgtgatgaagccaccaacataagcacttgcctaacagaaatcagtatttcttctacttagaaggcttggggcccagggtaatgaggcaccagatgaagataagatctgcatcaaggaattaaatttccagtttgtccttggggttctttctgcttatgttttttcccccccatctggtaatagtcctcttctgagaatgaaaggaggcacagaagttgcgagaaagacccagtccccagtctttgccaccattgcaccatggttgtctcggagtcccttcacctgacctttttagtcagctcagatctttttgtagtttgagaatagacctattcaagagctatcagggttaaaagctgcactgaccaaagctgtacttttaaaacacaacccctgggctagtgatgtctctacttgctctatgagccttttgccagcctcagaataggcgaggtaaccttgaatttcagggccctggaaactctagctgaaacctgcctttcctaatgctcacacaagcaccaggtaccctgagcttatactgagtccagtggttcctatttatgtgtgtgtgtatgtgtgtgtgttgagtaacatgaaacttggcagtagcagagagcactgaagttcacatgcaagttctaatctaaagttaagcagtctcttatttgtttcgggactctgatttgactctttttctgatgctttcggcatgtctgcagcctgttctcctagcctgctgcttggagtcaggttgagcatcagtgagatgaagacagtaccttttcctctcacattggcagaatagcacgcactagatgcctgaccttgagctctagtctcccctttaaatcttaccttggcagtaacacattattcctcattcaataatttcaatgctgaaactgaactctattactaatgccttccaatcagagttcctgatggggatgcctgtgggatggcccacacctgggggacctggcagatggggtgagttgggtaaggaagatgatgcttagttcctgatagatgctacagatgtagtttggcatttcagtttttgtccagtttgattttcactggggtttgagtcacagcaagctgtgtatgaacttgtgttttgtggtgacacattaataatcaaattgctaaaaccctgaatctgcttattcttcagcttcacctctgcactaaccccttacccttatggtacgtcaggattttaactagtactgctttgttgactttgggaaatggtgccactcaaaagcaacttcctaacttgaggaataactcctttgtagtttactttctggtactggttggtgccttgtattgggatacagctatattcttagctcaaatgtcctctttttgagagcaaagtagttatccaatggtgagacgagaccctgacgctcatagaggccattccttcctgggtgtcggaccagggctctgtgtcagggaaaaccttctgggtggactttgtaagaatccagtttccaaggttagattcacatccttaatcttgcagagactagaatttcacagctcgctttggaacatattccaattcaaccagttaaaatcagaggaccaagtcgtgggggaggggggcggtgttgaggagaggtatttttaaagatctggcaacttttcaggattatttgtggagaactctaaggttaagatcaggaaataaaagactgtgtgtgtgggtgtgtgcgtgtgtgtgttcaagtgcctaaatcttgtttacctatcactttaaaaaaataattgaagtgtaagctaaataaaatgcttggagttttgcctgggctagtgagagttggtgcaaattcttgtgtgtgtttgcataggaaggtgagatgaccatctactaaagaggaagtagctaaatacagatctgtgggtgtttttaaaaaaactcaacctatctggtgttttattttaatggataaaaatgtaatttttctaaggtagcaacttatttccaaattaatatagatgaaaaatagataccaattagactaaattgaaagctttttgttctatatttgcatagcctttgaaatatttcttagtgcctaggaggtctggggattcctctttcgtggtggtcactaaccttacttgatgcagataaaatcacttgtcaatgcaaaatgtgttagaacttgataaagctttgagtttgagaaataaaggtatatttaaaatttaaataaaacttgtcatttatgctcattg

SEQ ID NO: 4428 - protein, 25 aa, Homo sapien
GRNFGRTGVTCGTALESNLLSSCSV

SEQ ID NO: 4429 - DNA, 3983 bp, Homo sapien
gtgccaaggcggctgggggcggcgagcggggccgcgggcgcgcaccgactcaagagccgactgtcagcctcggcgggccggagttctccggcgctgggacaggggcgctgggacaggggcgctgggggcgagccctggcgggggccaggtccgaggaccctgggcgcggcggccccgccaggaggtccggccgcgagcgtgacctcacggggaggggccagcgcggcggcctgggcgctgagccgagcgccgggagagcagcgcagaagccgagccgcgaggagcgcactccgtggccccgatggagcggtacaaagccctggaacagctgctgacagagttggatgacttcctcaagattcttgaccaggagaacctgagcagcacagcactggtgaagaagagctgcctggcggagctcctccggctttacaccaaaagcagcagctctgatgaggagtacatttatatgaacaaagtgaccatcaacaagcaacagaatgcagagtctcaaggcaaagcgcctgaggagcagggcctgctacccaatggggagcccagccagcactcctcggcccctcagaagagccttccagacctcccgccacccaagatgattccagaacggaaacagcttgccatcccaaagacggagtctccagagggctactatgaagaggctgagccatatgacacatccctcaatgaggacggagaggctgtgagcagctcctacgagtcctacgatgaagaggacggcagcaagggcaagtcggccccttaccagtggccctcgccggaggccggcatcgagctgatgcgtgacgcccgcatctgcgccttcctgtggcgcaagaagtggctgggacagtgggccaagcagctctgtgtcatcaaggacaacaggcttctgtgctacaaatcctccaaggaccacagccctcagctggacgtgaacctactgggcagcagcgtcattcacaaggagaagcaagtgcggaagaaggagcacaagctgaagatcacaccgatgaatgccgatgtgattgtgctgggcctgcagagcaaggaccaggctgagcagtggctcagggtcatccaggaagtgagcggcctgccttccgaaggagcatctgaaggaaaccagtacaccccggatgcccagcgctttaactgccagaaaccagatatagctgagaagtacctgtcggcttcagagtatgggagctccgtggatggccaccctgaggtcccagaaaccaaagacgtcaagaagaaatgttctgctggcctcaaactgagcaacctaatgaatctgggcaggaagaaatccacctcactggagcctgtggagaggtccctcgagacatccagttacctgaacgtgctggtgaacagccagtggaagtctcgctggtgctctgtcagggacaatcacctgcacttctaccaggaccggaaccggagcaaggtggcccagcaacccctcagcctggtgggctgcgaggtggtcccagaccccagccccgaccacctctactccttccgcatcctccacaagggcgaggagctggccaagcttgaggccaagtcttccgaggaaatgggccactggctgggtctcctgctctctgagtcaggctccaagacagacccagaagagttcacctacgactatgtggatgccgatagggtctcctgtattgtgagtgcggccaaaaactctctcttactgatgcagagaaagttctcagagcccaacacttacatcgatggcctgcctagccaggaccgccaggaggagctgtatgacgacgtggacctgtcagagctcacagctgcggtggagcctaccgaggaagccacccctgttgcagatgacccaaatgagagagaatctgaccgggtgtacctggacctcacacctgtcaagtcctttctgcatggccccagcagtgcacaggcccaggcctcctccccgacgttgtcctgcctggacaatgcaactgaggccctcccggcagactcaggcccaggtcccaccccagatgagccctgcataaagtgtccagagaacctgggagaacagcagctggagagtttggagccagaggatccttccctgagaatcaccaccgtcaaaatccagacggaacagcagagaatctccttcccaccgagctgcccggatgccgtggtggccaccccacctggtgccagcccacctgtgaaggacaggttgcgcgtgaccagtgcagagatcaagcttggcaagaatcggacagaagctgaggtgaagcggtacacagaggagaaggagaggcttgaaaagaagaaggaagaaatccgggggcacctggctcagctccggaaagagaaacgggagctaaaggaaaccctactgaaatgcacagacaaggaagtcctggcgagcctggagcagaagctgaaggaaattgacgaggagtgccggggcgaggagagcaggcgcgtggacctggagctcagcatcatggaggtgaaggacaacctgaagaaggctgaggcagggcctgtgacgttaggcaccaccgtggacaccacccacctggagaatcccaaagctgtcacacctgcctctgccccagactgtaccccagtcaactctgcaaccacactcaagaacaggcctctctcggtcgtggtcacaggcaaaggcactgtactccagaaagccaaggaatgggagaagaaaggagcaagttagaaaacaagcttcatctaaagactctcatgtcaatgtggaccttggtgacaatcctgctttgttaaagcaaaaactatgcgaaagggtgagtctgtttagaagaaaaagcaaagactgaggtactgtgaatggagagcttcagctaagaggaggctctgtcccttttcagagccaaaggaaataatacaacaaaaaggaggcttctttggagacctaagtctattggatgtaaacaagacgttgtatttagggatgttctgtgtttctttcttttttgaagttgtcatcaattgctttactaagatttttaaatagtgaaaacctcctgtttagactttggtggaagatgaatcaaggaagcagggccctgtcttatgggtcacatgtctttggtgagtgagaagacctaaactcctggccatcatctcttatccaatacttagcagttggggattaaaccatccttgccttcagttctctccaatattaccaggcccaactcagtcttcagtgattttaaacagcattgacatcatctgtaaaaccatcatctgtaaaaccatctatgacatgagttttgagaaacaataatggggaaaatatttgggaccaagctgaagcactaatcccactaagttaaagacttctttccagtccaaggcaggcctgaatcaactgtctttaaataaaattttaagtgatgctgtattatatataggaaaaaatgcttaaaatcctgtcatttagaacagtgaaaagtatcttttgagattaaagtgactctttactgtaggaaaaatattactctgtgtttacagattcattgctgtggtcaggccatttttaagggaagagttatttaatataaatagtctctgattttaagttctgtttaatgttcattctccttccaagaacaaagtggtgatttttggttagggtgatcgccctcttaaaattggcagtgctgttccttgtgctgcccctgtcttttcctctgatggcatttttttttttttttttttttaacacaggttgaaacatttcatctattatctctgcctcatttctggagggttgtgtatcagttctctaacacttgttcctgagaactaaatgtcttttttattcttatttcctctctcataaacatttggtgaccttttaccaagtggtgagttaggttttttaaaataaaatgttcattgtatttgaaaaaaaaaaaaaaaaaaaaaaa

SEQ ID NO: 4430 - protein, 814 aa, Homo sapien
MERYKALEQLLTELDDFLKILDQENLSSTALVKKSCLAELLRLYTKSSSSDEEYIYMNKVTINKQQNAESQGKAPEEQGLLPNGEPSQHSSAPQKSLPDLPPPKMIPERKQLAIPKTESPEGYYEEAEPYDTSLNEDGEAVSSSYESYDEEDGSKGKSAPYQWPSPEAGIELMRDARICAFLWRKKWLGQWAKQLCVIKDNRLLCYKSSKDHSPQLDVNLLGSSVIHKEKQVRKKEHKLKITPMNADVIVLGLQSKDQAEQWLRVIQEVSGLPSEGASEGNQYTPDAQRFNCQKPDIAEKYLSASEYGSSVDGHPEVPETKDVKKKCSAGLKLSNLMNLGRKKSTSLEPVERSLETSSYLNVLVNSQWKSRWCSVRDNHLHFYQDRNRSKVAQQPLSLVGCEVVPDPSPDHLYSFRILHKGEELAKLEAKSSEEMGHWLGLLLSESGSKTDPEEFTYDYVDADRVSCIVSAAKNSLLLMQRKFSEPNTYIDGLPSQDRQEELYDDVDLSELTAAVEPTEEATPVADDPNERESDRVYLDLTPVKSFLHGPSSAQAQASSPTLSCLDNATEALPADSGPGPTPDEPCIKCPENLGEQQLESLEPEDPSLRITTVKIQTEQQRISFPPSCPDAVVATPPGASPPVKDRLRVTSAEIKLGKNRTEAEVKRYTEEKERLEKKKEEIRGHLAQLRKEKRELKETLLKCTDKEVLASLEQKLKEIDEECRGEESRRVDLELSIMEVKDNLKKAEAGPVTLGTTVDTTHLENPKAVTPASAPDCTPVNSATTLKNRPLSVVVTGKGTVLQKAKEWEKKGAS

SEQ ID NO: 4431 - DNA, 2088 bp, Homo sapien
gattcgaatcagtgttaaatcagaaaatcagggttttctaggaaattgggaattagttgccagaaaggaaactgaactatgcagaaggagttaagagctgggatgaggctggatggggtgactgacagtccagatcattgaaacagattgggtcgtcggaaactggtccagatgaggctggatggggtgactgacagtctggatcattgaaactgattaggtcgtcagaaacgggtccagacgaggatgaggctgaggctggatggggtgactgacagtctggatcattgaaactgattgggtggttggtcagaaacgggtccagatgaggatgaggctgaggctggatggggtgactgacagtctggatcattgaaactgattgggtggttggtcagaaacgggtccagatgaggatgaggctggatggggtgactgacagtctggatcattgaaactgattgggtcgtcagaaactggtccagatgaggctgggtggggtgactgacagtttggatcattgaaactgattgggtggtcagaaactggtccagatgaggatgtggctggatggggtgactgacagtctggatcattgaaactgattgggtggtcagaaactggtccagatgaggatgtggctggatggggtgactgacagtctggatcattgaaactgattgggtggtgagaaatgggtccagatgaggatgaggctggatggggtgactgacagtctggatcattgaaactgattgggtggtgagaaatgggtccagatgaggatgaggctggatggggtgactgacagtctggatcattgaaactggtccactatgacgcagcaggggcagtttggcagagcatcctcttcccttgtccttgtgaaagaacacaggaaacatttgggttttacagcttttcacaccctactatcaggcatcagaatcaaaattagttactaaattgggtgaatttttggaaacctgcatttctatgcatctgctattccagaaaaaaatgggaatgtattacaggagagttacctcacagtgtcttatgttgtggaacctgaaacataaccacgtgttttcttatatgatcatttgtgttgatactgcttttatttgagtttatgaacagaaatagaaagtatggtgcttgggttttgccctttcttactcctgaaagttaaatcagaagacactgatttcattttgtgaaatttagctcagagactattgatcttttgtttcattaatatgaacaactattagtaaaaaatagctttaacagcatttctgctgatatctagtaatctattcttttaatgtgaaaataagataaaatgtcctggagctaattctagcttaaatttgccagtatttctgtatgtcattaagtttttttcctctaaggttggtaatagaattttgttaatctttgcatacctgatggcatctatgtcaatgctgattgggtaattataaattctgtgctaatttaaaacttaatttgcctcttaaggtgattgtcctctgagtaatgattgtagttaaatgaagtatagcttgcaactatactatcacatgggtcgttaagtaaaaataaataaaccaaatttgtctgagacaggctaagatcaatcttctcatcaaaccaatttttctctaagagcaatttcactttcagttttagggtggacattcttgaatgcctcaaattaaacgttatctatttaatcttcctggaatagtctgtgaccaaaaaggagggtgtgatatatttaggtgtaaatatatcacatatatggtgtgatatatttgggatttatatattcagctcattctctgtgaagaagtcttcctgactaaaattggtttcaagataaactaatttctgttagtatttctactctgcctaccatgtatgcctttttgttagaaactaataaatgtatcagtcactagcaggtactggtcctttttcctctcatttttgtggaaaggatatgcaaacactgaatttctcagggagtactaaggctgtgcagaggctgagaatctgaaaaataaaatactaaaaatt

SEQ ID NO: 4432 - protein, 30 aa, Homo sapien
IRISVKSENQGFLGNWELVARKETELCRRS

SEQ ID NO: 4433 - DNA, 703 bp, Homo sapien
  Unsure 505-523: Unknown base
gtaataacccagatatgagtaggtcacataaagtatatcttttttaaaaaaagaattcaattatgtcttattttggggggtatatttccccagaagatatttttctggcatgtggtctgtaaacacagcatgattcatattttttatgtttcatgctactcattttgtttaattaccaacaaacatggggactttggctttttgacttatttgcaacaagcatgaaattgttaaatttaccttttatcaattgtaatcatcctatgccaacatattatcataaattcatagaaatatttttaaaaataaataacagacattgaaatccaattcttagataatactcccagaacagccaatggtaaatgccctatacttgagtcttacttagatgctgtggtaatgcaccattttagaagatgaatgatactgctatttctcttcagggaaacataatggataaagaaatgtaactgccgggcagcaagcttctaagtgaaacctnnnnnnnnnnnnnnnnnnnggagaaaatgtgtagtcatcaagtgaaaataggaaaggatctatgatttatgatgtcttaatagaccctaaattgttctttaattacagagtggcagtctctgaagtcatttgtgagcttgtatgacttttgtatttagcatgttgcatgctcacataattgaaaattaaaagtaacaca

SEQ ID NO: 4434 - protein, 14 aa, Homo sapien [sequence omitted]

SEQ ID NO: 4435 - DNA, 1752 bp, Homo sapien
catatttgtgtaagtttgtatatgtgtagggctgtgtaggtatgtgtatatacagccatattctaagtgtatatttattaaaatagattgcatgttgcaatacagttttctgaaaggggtctcattgactattaaataaatgactactactaaacttgtctgtagtcattaatcttaaaattacctgaaaatctgatgacagctgccttccctaactttaatgtattaggttggcacaaaattaattgcggtttttgccactattaatggcaaaaaccgcaattatttttgtaccaacataatacacctttcatattatgtattatcttgcttaatgggttttatcttgattatccagttacttccatcctcttcccaatgttaatttgcaatagttttaaaatgggaacaaatgaatcaatcatcagatagttaaaatgaaattaaatcagctgcctaataatttatggaattcattggaatgtgcttaaaatgctaaagtgtatgtcattgaacatgaaatcttttttcaggcacatacattgttggtattgatgactttttaaaacctgtgggataaacttgcactgcacacggaagttttattcttgtatatttagatttgtatgcttgtgagtaaaaatgtgcatttgtaaatactgtgtttttaggttgaatcaattaagtcttaaaactgtaaatttattaagcttgttgccagtaggtttaagaaaatcatgatctcacatgcctcactttgacatttatcatgccttttattaaaaatatcccttaggaacagtaagtttgccttaactctctgcatggtttaaaaagccattggttttgtgtgtgtttacagtaattatgcagatgactaaatgagttgacacagtaaaattacttccatatggtacagtaacaacctaactcccttctacctgatgtaaccatttacaaattatagttattgtaccagtctttcaacatttcagggttaatctgacctatgcagaattctagtgtgaatttattgtgaaaatgctaaatgaaacaatttgtcagaaattatgtacaattttcattaccttcaaaatggatcttttgcactgtctgagagtatatatttttgcaactcaagacttggtactagttttaatacttaacacttactgacccaacagaagtttggaattaccttgcatataaaaattgaggttgaataaaatgaaaaattgttgttttctgttacattaagcctcttgaaatctgtaatctttagaatcccaatattttgttttttccattccttcactcgtaacttgaactcaagttttcacttactgacgcgcttcccattaaaaaaaatctgtaaagatctctaccttgaaaactttagtctgctgctgccatttagatattgggactgatttcttgttataaatttttaaaggctttttccaatacccaccacagagagggtaccactaaaaatttacaagacaaaaacattattatggaaagatttagaagtacctggaatgacttgtagcactgtatgcaactttaatcctgataacttctaaaagcaatctttcaaattagtccagattactcagcagtaccttatattggtttggggttcgatagcgatttttttttcttccaacgaacgaattgtacaggttgatcacaacctgcatagttaacgacatgtcagaatgacttgcgtgtgtgtggagaactgggtat

SEQ ID NO: 4436 - protein, 10 aa, Homo sapien
MTCVCVENWV

SEQ ID NO: 4437 - DNA, 1846 bp, Homo sapien
aagaccctgatggaagtggaggagaatcatctcaggcaaactttttgtgtgccagtaacagaaaccctctttgtgtgatcacatgcaaagtataggatatttgcaatatagccatggggaggagtgcagggcccaagggtagattttagccaggcctcccaggaacagaactcggatccgaaaagcccagagaagctagagctgcccctccaacactctcggatccacatggtctgtgttctctagacccccctgcatgttagcggtgttctctctctgtggactgactgtccttctcagtgaacatgtccacccgacagctcctgagtttatatcatctcaaccctcacaacccacagaggctgtgtctcctagtcacagctttaaattactggaaaaataaatgactggccaaacttggagcaggtgtccatcccagccctgtgtagttagagcaggaatcaagatctcaacacaaatgtggctgccaagcactcagccccggggcgaggggtcaagttcttctcagagaaagaggaataagttggttctcagaagacatcacaagatacgtgtgtacccaacaatctctgatctctgctgatcttttgcttagacgttaacttgatgcatcattggaaaggtgtttctctcatctctgtcctaaggcttgataaagtcattaaaattgtgttcttttgactaaagaaatatgctttttttttactgttgcatatactaccctgaagtcactggaacttctaggagtaattccagagcttttagatttatgcacctgcgtgtatactcacatttgtttctagtctcaaggtacgtagtcttttattttaaaaaacaagttgtcctcctgcattcttgatctttcactctcttttagaacagacatccagtagtctcctgtcctttgtatccaaactctccctttttgcagggtcaccctacaaatcataagcatgtcatctctcctatataacaagaacatcaaatcctctgtctgtccttgacccagtctcccttccacccaagctcctggtcacgctctctgagagtgtctacgtggactgcctccagatcccctcttcccatccactctctttcggttttaatttttaaccaaattatgttatagtttaaagagtcaaatatttctacaatatttgctacagaaataccagtttccagccccatctcccaccatatcctcacccttacagaaaataactttcaattgttctaatatgttttgttggtattaacctcccatctctaaataacatgtttgtgttgctacatctagatttttcagctttaggctttatctctttacctcctgctgtggaagagggggatttagatttttttcatcctcaaagaacatcatgccccctttcccatgccctttcttttaatgtgactatattgtaatttttacaatatagtaaaagttactgtgtttactatgtttctatcaatatgaccatgtaatggcaaaccatagagcaagccatgctcactcttccttttctagacgacttcgttttctctggagtatatagttgtcctgttttcctttgtgtggctgtatttgtacttattattaatgaatcacaaaattcctcacagtacaatcaaacacatcaggtattctgtcaattttatcaccagatataactctcccagaaccttctgtctgctccattcttaactccttgcccttgatgatacagcggtcactctgagatcactcttcgccatcctcgtcaggatttacctatcctccgagttggatcttctgcttcttgtatccagtcattgcccttttgtg

SEQ ID NO: 4438 - DNA, 1704 bp, Homo sapien
aaatatcctaactaacttgttaataaggaaagaaaccagatttgcttaaatctgttcaaggctgacattctgaaattctaaactggaaataacttcccagagtatttggaaaggttctaagtacaaggatcaggcctaaaatagctccttgggaaagaaatttcctttttgatgagaaaacttaaaatactgtttttggtaatgtaagcagttaaaaacatgactttagaaagacagcttaatgcgtattcaagcaaacctttgttttgttgcttttgcttttgtttgtagaagagagaggaagttattataccaaaaagtaatagtatatgtaactttgagtgaggctacttatatcttagaatgggtatccttgaactatatctaccccaccatggcttaaaaaaatcagtggtatatattgagaatgtcagtcatgagcttagtgtttaagtaacacatcccacttacagttgtttgcatgattagtcttgtgtatcatgatgttcaactttgcttttgctgtgccagttcaaaaatatcttttttgctaaaaactcttaaaattcatgacataagttttgttttgatcacccggttttatatagtatttctgggaccaaaaaatttaaatatacctttttaatataaaacagaagtttgaagctggaaagatagtgtttatggaagatttgtgtgcttttgtgttttttaaacccgtcaggctgctggtaaggcagtttctagggctcacttttcctccttacctcttgactagtgtagcatgtggtatgtttaaaatatttcattttctgcttcgtaattctaaggtcaacactatactgtatgtagacaggagagctgatttgtatattttagttatttggtctaatcaagcataactaaagggacttcttttttgatacttttctcaaattaagtttaaatatagtatacgggccacatttcatgtctttgaaagtgttgtacattactgtaaaccaagtactctgtctacaccagagggtgctttaactgcaaaatatttgagaaacaattcagtctctcaaacattttggcacagttcatcactccagtttgttactttcttgagaatagtccattttttgtttttgttattataccgtatgttctggtcattggaaacagaacagctcatagttgggtgatgtaatataataacagtaatataacctagtagtcattttgcttcaagtaatttaattagatagcaaaatcactgcggtttgtttattacacttgtagggctttttgtcttactcagtgaccatcactacgaatgtcttacattgaagcacagactgcagagcacttgttaacttagtcctcctgcataatgcactcgtgaaaagtagtgcttgctaggtgtttgaagattttatgatccgtgtgcttgggctcgttgagttatttgtaaaataaacatttagtttgagttgatgcagtaagttttttggactagtagtatccaggtccctactctactgaaaatataatcttcactatctccccttaagtcagaggagatgtagcatttagaacaccttgagacatgacattgtaaaatagcttgttttatgttcctgaagctatcttgttctctgttaaagctactaattgtctcagtgtaagttttaaataaacatatttctttaaagctgg

SEQ ID NO: 4439 - protein, 15 aa, Homo sapien
NILTNLLIRKETRFA

SEQ ID NO: 4440 - DNA, 2937 bp, Homo sapien
gctggaagcaacagatggggactgcagaggaggtggtggtattgggatagtgctgcagccaagaacttaacgactgaaagtaactgggatatcttcataattatctgaaggtcacagtgggagaacaaaattaaaagaactgagaagacttacaagagaacctcctaagagtcacccaaacaatcggctgagaatgagaagaggttcaagtgattcttgtgcctcaggctcccaagtagctgggactacagtagctgggccagcacacccagaaagcctcacattgtgcagtggagaagctgagagaagaggaaaagaggagtggccagactcccaccactacccaggaccaactcctgctcctgaatcttctgatgggccccacaaggtgacagtgctggctacaatgctatccagccggtggtggccaagttcctgggggatcctagggctgggcccccgaagccctcctcggggatcccagctctgtgccctctatgcctttacttatactggggcagatggccagcaggtgtctctggctgaaggggataggttcctactgcttcgaaagaccaactccgactggtggttggcaagacgcctagaagctccctccacctctcgacccatcttcgtcccagcagcctatatgatagaggaatccatcccttcccagagtccaactaccgtcatccccggccaattgctctggactcctgggccgaagttgtttcatggttccctggaggagttgtctcaggccctcccaagcagggctcaggctagctcggagcagcctcctccacttccccgcaaaatgtgtaggagcgtcagcactgacaatctgagccccagctttctgaagcctttccaggaaggaccaagcggaagatccctctcccaggaagacttgccgtcagaagccagtgccagcacagcaggcccccagcccctcatgtcagagccccctgtgtactgtaacctggtggaccttcgccgctgtcctcggtccccacccccaggccctgcatgccccctgctgcagaggctggatgcctgggagcagcacctggaccccaactctggacgctgcttctacataaattcactgactggctgcaagtcctggaagcccccgcgccgcagtcgcagcgagacgaaccctggctccatggaggggacacagaccctgaagaggaacaatgatgtcctgcaacctcaggcaaagggcttcagatctgacacagggaccccagaaccgcttgacccacagggttcactcagcctcagccaacgcacctcgcagcttgaccctccagccttgcaggcccctcgacctctgccgcagctcctggacgacccccatgaggtggaaaagtcgggtctgctcaacatgaccaagattgcccaaggggggcgcaagctcaggaagaactggggcccgtcttgggtggtgttaacgggtaacagcctggtgttctaccgagagccaccgccgacagcgccctcctcaggctggggaccagcgggtagccggcccgaaagtagcgtggacctgcgcggggcggccctggcgcacggccgccacctgtccagccgccgcaacgtcctgcacatccgcacgatccctggccacgagttcctgctgcagtcggaccacgagacagagctgcgagcctggcaccgcgcgctgcggactgtcatcgagcggctggttagatgggtggaggcccggagggaggctccgaccggccgggaccaagggagtggggatcgggagaaccccctggagctgcgtctgtcgggctctggacccgcggagctgagcgccggggaggacgaagaagaggagtcggagctggtgtccaagccgctgctgcgcctcagcagccgccggagctccattcgggggcccgaaggcaccgagcagaaccgcgtgcgcaacaaactaaagcggctcatcgcgaagagaccgcccttacaaagcctgcaggagcggggtctgctccgagaccaggtgttcggctgccagttggaatcactctgccagcgggaaggagacacggtgcccagctttttgcggctctgcattgctgctgtggataaaagaggtctagatgtggatggcatttatcgggtgagcgggaacttggcagtggtccagaagcttcgctttctggtggacagagagcgtgcggtcacctccgatgggaggtatgtgttcccagaacagccaggacaagaaggtcggttagatttggacagtactgagtgggatgacattcatgtggtcaccggagccctgaagctttttctccgggagctgccccagcctctggtgccaccactgctgctgccccatttccgtgctgcccttgcactctccgaatcagagcagtgcctctctcagatacaagaattaataggctcaatgccaaagcccaaccatgacactctacggtacctcctggagcatttatgcagggtgatagcacactcagataagaatcgcatgacaccccacaacctgggaattgtgtttggaccaaccctgtttcggccagagcaggagacatctgacccagcagcccatgctctctacccagggcagctggtccagctgatgctcaccaacttcaccagcctcttcccctgatgcagggaaggaagaagagaaaacatatttccggtcatctctggtggtgagaggctggtgttctgttttgaggatatccctttaaatctcccaaatgactgtctctatcttcatgagtgtgacttgaggtgttgggatgggtgagggagcttctctaaagaggaaagtgagtggattaacccctgcttctcttcttgttccctgttatcattcctccccaacataataatacataaagtggcatggtatttttaaaaaaaaaaaaaaaaaaaaaaaaa

SEQ ID NO: 4441 - protein, 750 aa, Homo sapien
MLSSRWWPSSWGILGLGPRSPPRGSQLCALYAFTYTGADGQQVSLAEGDRFLLLRKTNSDWWLARRLEAPSTSRPIFVPAAYMIEESIPSQSPTTVIPGQLLWTPGPKLFHGSLEELSQALPSRAQASSEQPPPLPRKMCRSVSTDNLSPSFLKPFQEGPSGRSLSQEDLPSEASASTAGPQPLMSEPPVYCNLVDLRRCPRSPPPGPACPLLQRLDAWEQHLDPNSGRCFYINSLTGCKSWKPPRRSRSETNPGSMEGTQTLKRNNDVLQPQAKGFRSDTGTPEPLDPQGSLSLSQRTSQLDPPALQAPRPLPQLLDDPHEVEKSGLLNMTKIAQGGRKLRKNWGPSWVVLTGNSLVFYREPPPTAPSSGWGPAGSRPESSVDLRGAALAHGRHLSSRRNVLHIRTIPGHEFLLQSDHETELRAWHRALRTVIERLVRWVEARREAPTGRDQGSGDRENPLELRLSGSGPAELSAGEDEEEESELVSKPLLRLSSRRSSIRGPEGTEQNRVRNKLKRLIAKRPPLQSLQERGLLRDQVFGCQLESLCQREGDTVPSFLRLCIAAVDKRGLDVDGIYRVSGNLAVVQKLRFLVDRERAVTSDGRYVFPEQPGQEGRLDLDSTEWDDIHVVTGALKLFLRELPQPLVPPLLLPHFRAALALSESEQCLSQIQELIGSMPKPNHDTLRYLLEHLCRVIAHSDKNRMTPHNLGIVFGPTLFRPEQETSDPAAHALYPGQLVQLMLTNFTSLFP

SEQ ID NO: 4442 - DNA, 568 bp, Homo sapien
cccacgcgtccgccgggcgcgttccgttggcggcggattcgaacgttcggactgaggtttttctgcctgaagaagcgtcatacggaccggattgttttcgctggcccagtgtccccggagcttgtgtgcgatacagagagcacctcggaagctgaggcagctggtacttgacagagaggatggcgctgtcgaccatagtctcccagaggaagcagataaagcggaaggctccccgtggctttctaaagcgagtcttcaagcgaaagaagcctcaacttcgtctggagaaaagtggtgacttattggtccatctgaactgtttactgtttgttcatcgattagcagaagagtccaggacaaacgcttgtgcgagtaaatgtagagtcattaacaaggagcatgtactggccgcagcaaaggtaattctaaagaagagcagaggttagaagtcaaagaacatattcttgaaagttatgatgcattcttttgggtggtaacagatcataaagacattttttacacatcagttaatatgggattattaaatattggctataagtgaaaaaaa

SEQ ID NO: 4443 - protein, 88 aa, Homo sapien
MALSTIVSQRKQIKRKAPRGFLKRVFKRKKPQLRLEKSGDLLVHLNCLLFVHRLAEESRTNACASKCRVINKEHVLAAAKVILKKSRG

SEQ ID NO: 4444 - DNA, 481 bp, Homo sapien
ttttaactttgcaacaggtttttatttttgctttatatctattacagtgtttgaaacctaaagaaatacattttctcttcaaatttggatgtgtatataaataacatttgtctggactcagcacactcaatgccatgttttcttcgcctatgtctgctctgaaatcaagctgtgtctgtctacccaggggccctgagaacatggaaaatagagtttattgttattagaaaaataaaagcaaatgaatttgcaaagaaaaaccagtgagaaggattagattcatcttccaagggtccatagctggtaacccaagccattctcgggggatatccagtctcttgagtggctgggactccattacccactttccttctttaataggtcaaaggcaattcccacaaaagctggctaaaaaagccgacacccaactccagagtctgagggttcatgaagatgtggacttttttttttgagacaagag

SEQ ID NO: 4445 - DNA, 2349 bp, Homo sapien
ccacgcgtccgctgtaaaccagaaaaatgttggttatctagaaaacttgagagagcatgtagattaacttttctctttggagttctaaaacattaactggaaagattagataatatactaaatgtatacagaagtatacagactatacaaagactgaaacaagtcccttttgcactacaactctataacattaccgcagaaattttggttctatgtagcatggacctcctaaggaattctgtttcttttagcattgagatccctggtgctctttttttacctcagaattggtacaatcattattaaacgttaatttatttcaaactttttaattgaaaaaaggaaagggaaacttaattggggataaattcaggcatcatattattatgatagagtctcctgagtggttcgtctataggtaatgaactcattggtgttatttcttggacatcttggccttttaatcaaagactgtgtgctgctatttgctatgagcaaggtttctcaaaagcaaaaggtgcttggaccatttggatcacctgagttagaatctctaggtatagggcccaagtatctgcattttcacaggtttcttgtaggtgactttctgcaagctaaagtatgagaaccattggcttggatgtagttctaaacttttaggtctgtaaatcttgaaatcttgaactgaaggtcaactattggcttttttttttttttaatggtccatcatgtcagcaggtgcaaatcacttttcccctttgcatgatctgaggcacctcctcagttgtttcactgccaactcttatttcagaacctgtttacaaacaagccttccagttggtgaatggttagccattggagctcctaccctgtacatcagcacatcttctggtttacaagttgggtaacaatgaaagctggagatgctaaatggaaatccagcattgcatacccttagacctgatcacataccagtaaaagccttaatttagatgttagttgtatgtgttggacagatccttgcaaaagtgtgtctgtctattagttgtaaatttgaaaattataaatctctgaatctgctactatccaagtttcatcccttttgaagatgaggcatgagcctattaaaatatttataatcatttttcgtcccctactgcaagacttttagattcttacaaatgattactacaggaatagtggccacttaatgtcagttactccggtggaagaatttatctagttttttttcttttcttttttggaaggatggtgtgaaaaatagcaagattagagaatgagttgtatagttttttctatcacatttcatctaaaatgatttgaaggacttttgaagatttttaccaacatccttaaatcaactccaggttggatgaacaactgatttaaaacaaactaagagaacattaactagatgtgggctttttaaaatatataggtattgcatttcctaccttgttatttattccactttgaatactttagagggcttaactttcaactctttaaggtagtaatggatagttttatacttgttctcacaaaattgttatggtcagtttatatcattgctccatgcattgattataaaaattcagtattaattttttctgatcttataagctttataggagttttcttttctcttataaagtgtttcaccttatgtaaaacaaatgcctgcttgcatattggaagatgttgaaattagttttagacaaaagtggtccatcaattcagacactctgcttggatgccttacccttttcattagtgcattctttgcttctgaaacttggcagaaactcgttagccagtccactgcctttctgacaatgtgtggagtcacgtatgcttggtatatgcctttactacttttaaagttctacagtttattacttgcccaagtgttactaaatccttttcttatgtgtactggatggagaaaaaattatagccagcactttgagaggaaagttttcagaaacaatattaactggcactactaactgaaggccacaggagatgctatcaatgttatttgtaatctgaagattgaacaaggctgtgaggctcatttcaaactattttgaggtgttaaaatatatatatgctgtttctcagctgttccactcaaaccgtgttaggactctcaaaggtaaaatgtcacaggggcttttcagttgttacagagctcagcagctgtggttgcccctgttctacaccaatttcagttcaataaaaatgttaacgggcaaaaaaaatctatgtcgggtgcggagaaagaggtaatgaaatggcaggaattcgatatcagcttatcatacc

SEQ ID NO: 4446 - protein, 31 aa, Homo sapien [sequence omitted]

SEQ ID NO: 4447 - DNA, 3591 bp, Homo sapien
ccgtaaagcggtggagaatctcaagcatgtgcatttaattgaggaatagcagaagggctaaagcaaccaagaaaagaagtgtgggtatttttgttaagtaaaacagcccaagtgcttctggaggtgggtttctaccaagatagaggaaaagggctgaattccctctaagtgggacagccgagctcaggatgtgcttcccagcttcactggttaatttgacctgaacctatttaaagatcccttctgcccctgaagacctatccgcactcaaattctaacatgaagaaatctactcgaatgcatcctttactttgaatgagctctattcggttgcatgttatatgtgatttccttcctcccaactgtttccactgagcgcacccagtctcccctagtcttcctctgtgggtgtgatttttgtgatttttacaaacaaaacccttgaagttcttggcagatgtgtttgtttctgtttgcatgtactgcagataccccaggacaagcgggggattcatttttcagccattcagttgtttcctcaataatccgcagcaaagtgaaaatattcttagcactcagactgtacttagagtgttttctcagtccagtctgtacagtctgtaggcagaaggcctcagaagaaagtcatggccactcagtgcccactgtgggctttgtaagtcctggctctcccgtcaaggttacccagaggtaaaagcttcctgggagtggggccaggtgtgtttggcactccagatagaaggcaaaatgctcagattcgggcctgtgcacttgtatgcaacctgtcggtcgatacctagcatttatttttccctgacaatgaacgacctttccctcacccaccctaagctcaaagagtttagcaaaattctcttttaaataaacagaatgccagtaagaggttgacccctaccatggaacttctgggatgctaaatacttcctcatgaacaaaataagttccttattataagttccttatactagcagcttcacctaaagaattttctctccagcaatattgacttcactggggaaaagccaagagtgtgtggtgagtgatttgttctcactcgacctggctaggactggctaggagctgttttttgtacatgagggaatttgggctttcctcagttatctgaatgttttacccaagtgccttcctgctattgtagcaaagtagctcagcttccttgtccacagggtgaaaaaggactaatgcattttccatcagttttctaactatgttagcaaaaacggcctcctggtagctcaacctcctgtacgcgtgtgtgtgtgtaatacacacacaaataaacccctctgtttttctaagacatcttagctggatattataggaagcactttcataaacaactgtaacaaatcgcaaaggaaagagaaacaaaagcattagatttgagacataaacaggcaagagaaagtgtattaggaactgacagctatcaaggaagttttgtcagttacaaatgctaggaggaaattttgccaagaaggatggctcatgaaatatttccagtacgggaagaggcaataagatcctctaagagaatgagaaagtaggggtgtctaaatggtaaagatgggtgtgttgcacgtgtgttagaaggatctcagttgagtgaaggtttgcactgctacatctaagttaatgtaaatatgtagcactctgacaggtctaccgtgttgctgaatgtagtatatttccaaagtttgcaagtcttcctgtattgtacaaagatgctgctgcttgataatatgtatagcaatccagattagtatgttattaaattttattttcttacctgtatttttatgctttttacctgtcctcaaaatattacacccctgttggaattagatttatatttataaatggtcagaaatctttttaagtgtctctttttacacataggttgatttttttttcttaagagaaatgatgtattcttgaaacatttgttactcattccaggaaacaaaaacccatataataaaacccccactcagagcctgttagtcacctctctagaagatggcatctcaggagaaggaatggctttgtggaagaaggaatcacctttttcttgctcaagaattatgctgacttcagccctgagcctggatctggtcactgagaatcatcaagtgtctagatcctccccccaaaataactaatttagtaggtgattttgattttaaaaaattgacaccaaaaccctgcctgcattgtaatggaattcgaaaagaattcatgttcacagaactcaacgttcaggctaatatttacagaagggaccaaatctaaatcctggtagataactcctgtatgctttatccaaaggacacccacagttttccagcatagatataaccaaggatgaattgattccttcaaagaactgggaggcacggatattgcattttttgtttacatccagtagccaagacgcctcagtgagccagtcttgggcagaggctgtcacatttaggcagattggaagttggtatgttctaattctcactctggactacagtgaggctgaatttatcatgtcaaaaaaaaaaaaaaaaaaaaagacctttccaagtgctttctattgctcagaattgaaagaatgttttcatttcaagtttacaagaggcatggatggagttgtgacgttcttgacaagctgggctaacctttcccgaacttgtttcccggaggcaaggtgctcggtgacccagcgcatcttaaccttgggtctcctaggctcgaggctagggcattacgtttcgtggaaccaaagcagccaattgcatagcaagtattttcctgcattccaattaaatgcttaagaaaaagcagcatcctataaaattgtgatcataaacatccatttccctcagcttttgtgagtgccttgacttacagccaacatcactgtttaactcagtctgtttaaaaacaaacttttctggtggttgataacagagagttgctccctgagccatcagggtcctgggagctggaagtgaaagggttattaacattctacctttatgcagctgttggctgaccagaataaactccctgctgagttcaagctttgaatggaatggatgcaaatgatgttgtttccattagagcaggtgctcacagcattctgattggcctgagcagaccgaggctatggctgttgggacaagcttagcatcctggacatcttgtcaaagaacctcactcacccctcttggcctctacagccctcagaggagagaaaaccaattctccaacaaacaggtctctccaacatggtggtgctggcaggcttaggtttagaaaatcctgactgttaaaggcgtttgaatacatcacattcctatgcaaatgtttttaatctccagtttaatgtagtttatttttcctatatgtaaagtatttttatacggcttgtatcatgatagtttagcaataaaacagttggccgcaaaaaaaatctatgtcgggtgcggagaaagaggtaatgaaatggcaggaattcgatagcagcttatcgatacc

SEQ ID NO: 4448 - protein, 12 aa, Homo sapien
MKWQEFDSSLSI

SEQ ID NO: 4449 - DNA, 723 bp, Homo sapien
gcctcaagccgacgcagcggcctactctcgcactgcagacggggaaactgaggcctgaggcggccggggtggggcagacctcccggcgagcccgagcccccgcccccggctagccccgccctggcccgtaagaagcacccggggcgcgaggcgaaggcgcacagcgcggggccaggctgggtccagcagcgcgatggcagctcagcggctgggcaagcgcgtgctgagcaagctgcagtctccatcgcgggcccgcgggccagggggcagtcccggggggctgcagaagcggcacgcgcgcgtcaccgtcaagtatgaccggcgggagctgcagcggcggctggacgtggagaagtggatcgacgggcgcctggaggagctgtaccgcggcatggaggcagacatgcccgatgagatcaacattgatgaattgttggagttagagagtgaagaggagagaagccggaaaatccagggactcctgaagtcatgtgggaaacctgtcgaggacttcatccaggagctgctggcaaagcttcaaggcctccacaggcagcccggcctccgccagccaagcccctcccacgacggcagcctcagccccctccaggaccgggcccggactgctcacccctgaccctcttgcactctccctgccccccggacgccgcccagcttgcttgtgtataagttgtatttaatggttctgtaacaataaaaaaa

SEQ ID NO: 4450 - protein, 147 aa, Homo sapien
MAAQRLGKRVLSKLQSPSRARGPGGSPGGLQKRHARVTVKYDRRELQRRLDVEKWIDGRLEELYRGMEADMPDEINIDELLELESEEERSRKIQGLLKSCGKPVEDFIQELLAKLQGLHRQPGLRQPSPSHDGSLSPLQDRARTAHP

SEQ ID NO: 4451 - DNA, 5486 bp, Homo sapien
cgcggcgtgagcgccccgggaagatggagcagtcgccgtccacgccaccgccgccgcccggggctcccccgtccctgcggggccagcagcagctccagccaccagtgcccggtctcccggcgcgagaggcccgggagccgccggccaggacgcccccgagggtgtagaccgcgcccctggagagagtgataatcttcaaaatgaagactttggaaaattttaggttctctataggaactacaaaaatggaaggaaagaacattttcaaaaggaaattattttgaaagtatgtttacaacaaactgatactattgacagtttttttttttaaataataaaacactttaagaagattgtatttatggtaaaaggaaactggactaacaatgaggccaaagacttttcctgccacgacttattctggaaatagccggcagcgactgcaagagattcgtgaggggttaaaacagccatccaagtcttcggttcaggggctacccgcaggaccaaacagtgacacttccctggatgccaaagtcctggggagcaaagatgccaccaggcagcagcagcagatgagagccaccccaaagttcggaccttatcagaaagccttgagggaaatcagatattccttgttgccttttgctaatgaatcgggcacctctgcagctgcagaagtgaaccggcaaatgctgcaggaactggtgaacgcaggatgcgaccaggagatggctggccgagctctcaagcagactggcagcaggagcatcgaggccgccctggagtacatcagcaagatgggctacctggacccgaggaatgagcagattgtgcgggtcattaagcagacctccccaggaaaggggctcatgccaaccccagtgacgcggaggcccagcttcgaaggaaccggcgattcgtttgcgtcctaccaccagctgagcggtaccccctacgagggcccaagcttcggcgctgacggccccacggcgctggaggagatgccgcggccgtacgtggactaccttttccccggagtcggcccccacgggcccggccaccagcaccagcacccacccaagggctacggtgccagcgtagaggcagcaggggcacacttcccgctgcagggcgcgcactacgggcggccgcacctgctggtgcctggggaacccctgggctacggagtgcagcgcagcccctccttccagagcaagacgccgccggagaccgggggttacgccagcctgcccacgaagggccagggaggaccgccaggcgccggcctcgctttcccaccccctgccgccgggctctacgtgccgcacccacaccacaagcaggccggtcccgtggcccaccagctgcatgtgctgggctcccgcagccaggtgttcgccagcgacagccccccgcagagcctgctcactccctcgcggaacagcctcaacgtggacctgtatgaattgagcagcacctccgtccagcagtggccggctgccaccctggcccgccgggactccctgcagaagccgggcctggaggcgccgccgcgcgcgcacgtggccttccggcctgactgcccagtgcccagcaggaccaactccttcaacagccaccagccgcggcccggtccgcctggcaaggccgagccctccctgcccgcccccaacaccgtgacggctgtcacggccgcgcacatcttgcacccggtgaagagcgtgcgtgtgctgaggccggagccgcagacggctgtggggccctcgcaccccgcctgggtgcccgcgcctgccccggcccccgcccccgcccccgccccggctgcggagggcttggacgccaaggaggagcatgccctggcgctgggcggcgcaggcgccttcccgctggacgtggagtacggaggcccagaccggaggtgcccgcctccgccctacccgaagcacctgctgctgcgcagcaagtcggagcagtacgacctggacagcctgtgcgcaggcatggagcagagcctccgtgcgggccccaacgagcccgagggcggcgacaagagccgcaaaagcgccaagggggacaaaggcggaaaggataaaaagcagattcagacctctcccgttcccgtccgcaaaaacagcagagacgaagagaagagagagtcacgcatcaagagctactcgccatacgcctttaagttcttcatggagcagcacgtggagaatgtcatcaaaacctaccagcagaaggttaaccggaggctgcagctggagcaagaaatggccaaagctggactctgtgaagctgagcaggagcagatgcggaagatcctctaccagaaagagtctaattacaacaggttaaagagggccaagatggacaagtctatgtttgtcaagatcaaaaccctggggatcggtgcctttggagaagtgtgccttgcttgtaaggtggacactcacgccctgtacgccatgaagaccctaaggaaaaaggatgtcctgaaccggaatcaggtggcccacgtcaaggccgagagggacatcctggccgaggcagacaatgagtgggtggtcaaactctactactccttccaagacaaagacagcctgtactttgtgatggactacatccctggtggggacatgatgagcctgctgatccggatggaggtcttccctgagcacctggcccggttctacatcgcagagctgactttggccattgagagtgtccacaagatgggcttcatccaccgagacatcaagcctgataacattttgatagatctggatggtcacattaaactcacagatttcggcctctgcactgggttcaggtggactcacaattccaaatattaccagaaagggagccatgtcagacaggacagcatggagcccagcgacctctgggatgatgtgtctaactgtcggtgtggggacaggctgaagaccctagagcagagggcgcggaagcagcaccagaggtgcctggcacattcactggtggggactccaaactacatcgcacccgaggtgctcctccgcaaagggtacactcaactctgtgactggtggagtgttggagtgattctcttcgagatgctggtggggcagccgccctttttggcacctactcccacagaaacccagctgaaggtgatcaactgggagaacacgctccacattccagcccaggtgaagctgagccctgaggccagggacctcatcaccaagctgtgctgctccgcagaccaccgcctggggcggaatggggccgatgacctgaaggcccaccccttcttcagcgccattgacttctccagtgacatccggaagcagccagccccctacgttcccaccatcagccaccccatggacacctcgaatttcgaccccgtagatgaagaaagcccttggaacgatgccagcgaaggtagcaccaaggcctgggacacactcacctcgcccaataacaagcatcctgagcacgcattttacgaattcaccttccgaaggttctttgatgacaatggctacccctttcgatgcccaaagccttcaggagcagaagcttcacaggctgagagctcagatttagaaagctctgatctggtggatcagactgaaggctgccagcctgtgtacgtgtagatgggggccaggcacccccaccactcgctgcctcccaggtcagggtcccggagccggtgccctcacaggccaatagggaagccgagggctgttttgttttaaattagtccgtcgattacttcacttgaaattctgctcttcaccaagaaaacccaaacaggacacttttgaaaacaggactcagcatcgctttcaataggcttttcaggaccttcactgcattaaaacaatatttttgaaaatttagtacagtttagaaagagcacttattttgtttatatccattttttcttactaaattatagggattaactttgacaaatcatgctgctgttattttctacatttgtattttatccatagcacttattcacatttaggaaaagacataaaaactgaagaacattgatgagaaatctctgtgcaataatgtaaaaaaaaaaaagataacactctgctcaatgtcacggagaccattttatccacacaatggtttttgttttttattttttcccatgtttcaaaattgtgatataatgatataatgttaaaagctgctttttttggctttttgcatatctagtataataggaagtgtgagcaaggtgatgatgtggctgtgatttccgacgtctggtgtgtggagagtactgcatgagcagagttcttctattataaaattaccatatcttgccattcacagcaggtcctgtgaatacgtttttactgagtgtctttaaatgaggtgttctagacagtgtgctgataatgtattgtgcgggtgacctcttcgctatgattgtatctcttactgttttgttaaagaaatgcagatgtgtaactgagaagtgatttgtgtgtgtgtcttggttgtgattggattctttgggggggggggaactgaaacatttgtcatatactgaacttatatacatcaaaagggattaatacagcgatgccaaaaagtttaatcacggacacacgtccgtttctgtagtccgtatgctctttcattcttggtagagctggtatgtggaatgccatacctctgaccctactacttacctttttactgacagactgcccacactgaaagcttcagtgaatgttcttagtcctgttttcttctgttactgtcaggaaactgagtgatctaatggttctctcactttttttttgttcttttagtgtactttgaagtatcaaatcttaacttggtttaaacaatacatattcctaacctttgtaaaaaagcaaagattcttcaaaatgacattgaaataaaaagtaagccatacgtattttcttagaagtatagatgtatgtgcgtgtatacacacacacacacacacacagagataaacacaatattccttatttcaaattagtatgattcctatttaaagtgatttatatttgagtaaaaagttcaattcttttttgctttttaaaaaatctgatgcttcataattttcattatattattccacatatttttccttgaagttcttagcataatgtatccattacttagtatatatctaggcaacaacacttagaagtttatcagtgtttaaactaaaaaaataaagattcctgtgtactggtttacatttgtgtgagtggcatactcaagtctgctgtgcctgtcgtcgtgactgtcagtattctcgctattttatagtcgtgccatgttgttactcacagcgctctgacatactttcatgtggtaggttctttctcaggaactcagtttaactattatttattgatatatcattacctttgaaaagcttctactggcacaatttattattaaaattttgaatccag

SEQ ID NO: 4452 - protein, 1088 aa, Homo sapien [sequence omitted]

SEQ ID NO: 4453 - DNA, 1931 bp, Homo sapien
ggctcgggctccggctcgggctcccgcggcgtgggctgggcagcagccgggcggcggctccgcggcgccgggcaggggccgtccgcgggtccgcgccctcgggcggcggcgtctcctgggtcccggcagccgtccgcgcgcccgggcgcaggtttggttttcctaaacaaatcctttcacagggaccgacggcacttgataatgtgacaaaaaccagcctcttccaccccactgcagtgacttttgccggaaagtggagcagtgggcacggccaaccttgtcgttcatcaatgccgcccctggcagtatctgaggatcggtggcagccatgcctccccctgccccagccgctccttcccccccacgctaatctgcatggtgtgggcgcccttgggacccccgaggactgattgtctgaccttgcttcacacgcccagtaaggactcccccaagatgtcgctcgagtggctggtggcctggagctggtcgctggatggcctgagggactgcatcgccaccggcatccagtccgtgcgggactgcgacaccaccgctgtcatcactgtggcctgcctcctggtcctcttcgtgtggtactgttatcacgtgggcagggagcagccccggccctacgtctccgtcaactccctcatgcaggctgccgatgccaacgggctgcagaatggctacgtgtactgccagtcccctgagtgcgtgcgctgcacccacaacgagggcctcaaccagaagctgtaccacaacctgcaggagtacgccaagcgctactcctggtccggcatgggccgcatccacaagggcatccgcgagcagggccggtacctcaacagccggccctccatccagaagcccgaggtcttcttcctgcccgacctgcccaccacgccctatttctcccgggacgcacagaaacatgatgtggaagtgctggaacggaacttccagaccatcctgtgtgagtttgagaccctctacaaagctttctcaaactgcagcctcccgcaaggatggaaaatgaacagcacccccagcggggagtggttcaccttttacttggtcaatcagggggtttgtgttcccaggaactgtaggaagtgcccacggacgtaccgcttgctcggaagccttcggacctgtattgggaacaatgtttttgggaacgcgtgcatctctgtgctgagccctgggactgtgataacggagcactatggacccaccaacatccgcatccgatgccatttaggtctgaaaactccaaatggctgtgagctggtggtggggggagagccccagtgctgggcagaagggcgctgccttctctttgatgactctttcctgcatgctgcgttccatgaaggttcagcagaggatggcccacgggtggttttcatggtggatttgtggcatccaaacgtcgcagcggccgaacggcaggctcttgatttcatctttgctccgggacgatgagagtatttcccatgctggagtcggcgagaagggccgaggcggggcctgggcagactgtggtccggtccagtccctaccggtgttgtttccatgctcagaaacctgcctcagcggaaagctcttatttgggattttatatcatgtcgggtccctctttcccttggttattgtaaatggaaacttttcggcttgtatttccttagattttttttttttccttccaatcatttgcttcagagactcctttctggcctaacagcgcattcctttgattggtccttgagtgaccagagacttagtgcccttgtaagtctgtcttctgttgctacttgtttttttcagtgctctgaaatagagtaactaaatggttatttgtctgaatataataatgtaaaacttaaaaaaaaaaaaaaaaaaaaaaaaaaaaaaaaaaaaaaaaaaaaaaa

SEQ ID NO: 4454 - protein, 343 aa, Homo sapien
MSLEWLVAWSWSLDGLRDCIATGIQSVRDCDTTAVITVACLLVLFVWYCYHVGREQPRPYVSVNSLMQAADANGLQNGYVYCQSPECVRCTHNEGLNQKLYHNLQEYAKRYSWSGMGRIHKGIREQGRYLNSRPSIQKPEVFFLPDLPTTPYFSRDAQKHDVEVLERNFQTILCEFETLYKAFSNCSLPQGWKMNSTPSGEWFTFYLVNQGVCVPRNCRKCPRTYRLLGSLRTCIGNNVFGNACISVLSPGTVITEHYGPTNIRIRCHLGLKTPNGCELVVGGEPQCWAEGRCLLFDDSFLHAAFHEGSAEDGPRVVFMVDLWHPNVAAAERQALDFIFAPGR

SEQ ID NO: 4455 - DNA, 5277 bp, Homo sapien
gtgggccgcggcggtggcggagactgtggctttaagagcgtgccgggagcccgagccccagccgggccgcgcttcgccgctgcgcaccccagcggagccaagccccacgctggccggacagggccgcctgtcgccgggctgctgagaactagccctagacctctgcgtgagggttcttctgccgaagacatcaccagtgtgtggagcctgccacacccacccgctgccaaaccacggcctttacctgtgtcttccggtgtttcccgtgcgacccatcctgtgggagtgcctcgtgggctgccccagagttcaccccacactcagcagcaccaatggtgaagatgacaagatcgaagactttccaggcatatctgccctcctgccaccggacctacagctgcattcactgcagagctcacttggccaatcatgatgaactaatttccaagtcattccaaggaagtcaaggacgagcatacctctttaactcagtagttaatgtgggctgtgggcctgcagaagagcgagtgttgctaacaggactgcatgcagtcgcagacatttactgtgaaaactgcaaaaccactctgggctggaaatacgaacatgcttttgaaagcagccagaaatataaagaaggcaaatacatcattgaactagcacacatgatcaaggacaatggctgggactgattggacagcatctacccaacccagtgtccacgtgaacgccattcaaccgaacattcttcccaagcgtgagagagtgactgacacttggttccatccatttaggggccttgccatccggggcatcctcccaccctgacgccatctttctggtgaccggcctctaaatcgctgtctctctgtctctttgctttgtatctgtttgtgagttgatcctggcttctctctctgttctagttttggctgaaaacaaaacaacaaaaggaacagatccttgaccgcatggcggcagcccaccttggtaagggccccagggcccatgcgagagctgcctgatggcctcttgtcaggagagcagtggcacgggggcgtgaggaagagggaaaggggaaactctaagggtcctggcgcggggaaggggtggaagggtggaggtaggaacaaaattgcgccgctcctggagacctgataacttaggcttgaaataattgacttgtctaaaaggacaaagagaaaaaaaaaatacctcatgactgcattctctctgactagaagcttctgttcctgacaccaaatgtgccaggttagcaaatgagcacaagatgtggccctgattctagttggtggggcaagggcctggttctcctgggctgagtgggggagtgtcctggcagcagcgagtgacctgggcagtggccaggtgggtgcgatgactctgatgcctcactcagtctctgggcaatcatcatctttgcctctagccaccgtagataaggtgtgaagggactgctgtttgcaatgggcttaccatccaaatatcccaaaggctttgaccagcaaccaagtaaaatcagtaattgaggagagcagggcacaaaggggctgcagtttgggagctcctgaagaaatggctcagatattgagtcagagaaataaaaagtaggatcagttagcaattctaactgcccttccttctgacccctcataagaggagtgtggtgagggaggggactgggtaggggtcatcccaggaggaggggtttacattggaaccagttcaggttcggtgcatctttcctcttcggttttacagtggcttccgtgggatcgtcaatttcttgttcttagagtttcgggtgtttttctccagtcttgttactgtagactgtagaaagcacgggccccaggctctgagcttagtaataacctggctggtagattcctcatgcccctaattgtcccacttaggcctgaatgtcttgcatggagagaaatctcctgtcagtgtggtccagcagcagggaggagttctgcccaaattccgatatcaccccttcccccatccaaacatccttcgattagggaagtggagagcacatccctgtaaggcccataagagaaagaggagtttgttacatttaatcaacactgtgaagtctgttctacagcaattcagccattacacagtatatgactgaaactcatttaactgggttaatttcatttcttagactgaatatattattgttaagatacgtgtgcgtgttaggtaattctcagcatctcctccaagtaggccgaccttctcggaaaattcaccctaaaagtctcacaaaagaatgagttcatggggagattctgtaaagtgatgaactgagatgaaagcagccaacagcccaggagcttttcagaatagcgtctgcagcagaaccagtttccattcagagcgcgtccttggtggaaatgcttttttgtgtgtctccacgcgctgatggtggaatgggagccccaagacgtgtgggcttagaaatcaacttttgttccccaaggcttcttgtccagatctttccagtgctttcatagccctgggagatcaagttgttctccccactttactgcaaggtagactgaagttcagaagaaatactgaatttctgctcccagaagaatagtttctctggctcacaggcccaagttctcaatgaaatcgttttttaactttcacattcctaagctggcttcccgtgcacagaagccatggatttcccctctctcccttccccctcctcaaggaaatagtcttcctttatggattttcattggactctttcctcagcgattgtcctggctgtttattgatagtccttcccataagaaaatggggttaaacatggggtaggtattttgtctttcaaactacaaatggaatgtggtgacataaactagacatggggtgccctcaagtttccaaggggaccaatgtgccactgttcttccttggggatgaggcctttgactgttggatggatcagagcaggctccagtcagaccctggttctgaatgttttttttttcggtgactatccagtgagccttcagtgggtgcaaggcgccatacttgctgtgagagagctgagtagagtgttggtttttccataactacagggggaaaaaaagtcattaggctttccctttgtgtcagtgaaaccaaaagtgcttcttacaacgttcgctctgttcatgggttgtctatctaacattgagcagcattggagaggccacagctgagctatggagatgctaaattaactcatggcctcagtcagttcattctttaatttcctcaccaaattattgacttagagcataaccaaagacctcattcattcaccccaggtgggttgggggaattggagtttgttggtgaagtttgggggcggggtgtggggagtagagacagggtaaggggacgtgagaaaggaaaaggcatgaagttctatacctcagccagcagctgccttcgtttggaactgaagtccagccagcagactctctagctccatctcccctgtgccaccctaggtcatatgaccttggccaccttggagtagacccagacccctcgggacccgggacattagtctcaggctgctgatggattgatttgacatgaaccaaacacagccaaactcgatacccacaagctgtcagctgaacctgactgagtgttcttcctgagttcacgaggataggctagagtgcatttttactggtggatcagtgtgtgcgaaagagatgaccctttataaagagattttcaagtggatatatataaaagaaacagttgcttgtaaaatatacttttgtaaataatatttaattttttaaataatatatttggtgctgttttctcagatcccctgagagcactttttattttccttttaaattctatggtttcctttgcatttcttgaagtatattttaagggaaacagtgatcaccaatacatgttttcagttttttttttttaaggtctctatcactttaatctggatcaaggctttgaagcaatgcctctctgcattttttccccagtggaacagactctgcagtacattaatcaggttgagaattgaaatattttcttgcatcagtattggctagaaaagaaaataaataaaaccaagttaatttagtagtaacaacttacagtgattcttcctgttggaagaatttgcaacaaatcagaatcacgtttttagttgtgcgtgtgcgcgcacacgtgtgtaaaaagcactttcgattgtgcctcctgttttctcgagtggggacactttaactacagtttacacctcgggcgcataaagtttttcttctctttctctctggttgtttctgtttctgagtggaccaacagcagaacccacgaggatttgttttgagtatggagctgttgcgggtttgctcctttttcttgctttgcgtgctcagtttttacagactgtaaaggagatgtgttgtttgtgaagatggagcagagtcaaatctgtgcttctaactgagatgagagtgtattaatcacgtatcgcagggctccagctgttttagaagccacatcatgttaaacattaactggtttggattaaaagaacattaatattataatacacatatcttagtggtaaacagctttttttttttaaggtcagattgcctcaggtttagaaagaggctgagaaatcaaatcttgaacacaatcaacttacatattttaaaggaatctgcctcaaatgagaaaatatgctagttatctagatagaggaaagagatatttacttttttaaaaattaaaatagttatgaaatctggcagaaaaggtaaagcctagaagaaactatgaaagctattctcatgttaccaaattctatctgcgcatatgtttttgtataacatttcggtgacagtgggagtcggttccctttcccaacctgcagagactatcttccaatacagaatctgtctatttatgcttgtgtttacaaactgtatttgttgggtttgggtttttgttttctttggtggcatttttcaggtcactttgcttctataacaaaggtaattgttttcaaataatttgtcttcaccttttcctgtatttgtacatagtgattcagtattagagaaaagtgcattgtttctgtcatatttccaatctgtgttggtgctcatttgagaaaataaaagttttcaaatattacaaaaaaatctatgtcgggtgcggagaaagaggtaatgaaatggcagg

SEQ ID NO: 4456 - protein, 112 aa, Homo sapien [sequence omitted]

SEQ ID NO: 4457 - DNA, 1442 bp, Homo sapien
gcgtgaggcaccgcggctggcctgagtttcttcttaatactgtatcacaattgtgggctgtcttatgtgttgatatcgattgagctatttgaaataggaatgttaatgggtgtattaaatttttgtaaggatataacaatatctaccttccaaggatgttgtgaggttttccatgattttgtatatgagctaatgttacctttgaggggtggtgtgcattatgttggatgattgtaaattttcagtggaaaatgtaccgtgtcctaaatttaaagacatgaaaaatatcccaagatcatactagatcataatagcaattcctttacaaatgaattatggaggtaactgatctctaacagtttccttcatgttgttttaatgcacaagggcagaggatctgctgacccttggaaccagcgtgagctaaccacgtgctatagacacttcatggtgtcgcacccagggaagtcaaagcgctttgctccctcactgtctgtgagtcctcagccattagtaccccaccccccgctgctccaaaacttgagttatttcaaatgtttctcactgttcatctctccactgaccccactccagaaagcctggagagagtcccaagatgccacccaccttccccaatccctcgccacagatctgtgtctatctcacactctgtaagtgccgctttgcttcttcctctcttgaaaagactgagaacacacattttaacatgttaggaaaatggggcagcctaaaaaatgactgatcccaccgccagtgactcatgtatactccaggctagcagacaaggccctttttggtgggcctgcttctgtgggttcacagaaaccaaattactgtgggttgcaaagaattagcaggtcatttacaaagcagacatcccttcacccagactgtggttttgcatgctcaggttctcagtctatgagctttggtgcaggatcattttggctactggaaaaaccatagcttattttaaatttctggttgccaaagccaccacacgtgtggtctgtggatgaccattgtctgcagaatgacgaggaaggaacagaatgtggtttggggctcagggtggccttcccactgggagggaaggcgggagggagcccttgccctgggttttgacacagcctgtgctcacagcctctcctctcatctgcatttctcagaaatgccctccctgcccagtggtgactttccctcgtcactcctatggagttctacctggagcccagccatgtgtggaactgtgaagtttactcctctgtaaagatggtttaaagaaagtcagcttctgaaatgtaacaatgctaacccttgctggaaccctgtaagaaatagccctgctgatagttttctaggtttatcatgtttgatttttacactgaaaaataaaaaaatcctggtatgtttgaaaaaaa

SEQ ID NO: 4458 - protein, 84 aa, Homo sapien
MTIVCRMTRKEQNVVWGSGWPSHWEGRREGALALGFDTACAHSLSSHLHFSEMPSLPSGDFPSSLLWSSTWSPAMCGTVKFTPL

SEQ ID NO: 4459 - DNA, 10156 bp, Homo sapien
gcggccgctcccccggagcggctaaagcggcggcgaccgaggcgagcaatgggcacggcagtctcggcagagcacaggcgcttcaccgcggctgctcgggctccgcgctgacctgcccgggcggccgcctattgtctttctccgcggcgaaggtgaagagttgtcccagctcggcccgcgggggagccccgggagccgcacgtgtcctgggtcatgaaacttaatccacagcaagctcccttatatggtgattgtgttgttacagtgctgcttgctgaagaggacaaagctgaagatgatgtagtgttttacttggtatttttgggttccaccctccgtcactgtacaagtactcggaaggtcagttctgatacattggagaccattgctcctggtcatgattgttgtgaaacagtgaaggtgcagctctgtgcttccaaagagggccttcccgtgtttgtggtggctgaagaagactttcatttcgtccaggatgaagcgtatgatgcagctcaattcctagcaaccagtgctggaaatcagcaggctttgaactttacccgttttcttgaccagtcaggacccccatctggggatgtgaattcccttgataagaagttggtgctggcattcaggcacctgaagctgcccacggagtggaatgtattggggacagatcagagtttgcatgatgctggcccgcgagagacattgatgcattttgctgtgcggctgggactgctgaggttgacgtggttcctgttgcagaagccaggtggccgcggagctctcagtatccacaaccaggaaggggcgacgcctgtgagcttggccttggagcgaggctatcacaagctgcaccagcttctaaccgaggagaatgctggagaaccagactcctggagcagtttatcctatgaaataccgtatggagactgttctgtgaggcatcatcgagagttggacatctatacattaacctctgagtctgattcacatcatgaacacccatttcctggagacggttgcactggaccaatttttaaacttatgaacatccaacagcaactaatgaaaacaaacctcaagcagatggacagtcttatgcccttaatgatgacagcacaggatccttccagtgccccagagacagatggccagtttcttccctgtgcaccggagcccacggaccctcagcgactttcttcttctgaagagactgagagcactcagtgctgcccagggagccctgttgcacagactgaaagtccctgtgatttgtcaagcatagttgaggaggagaatacagaccgttcctgtaggaagaaaaataaaggcgtggaaagaaaaggggaagaggtggagccagcacctattgtggactctggaactgtatctgatcaagacagctgccttcagagcttgcctgattgtggagtaaagggcacggaaggcctttcgtcctgtggaaacagaaatgaagaaactggaacaaaatcttctggaatgcccacagaccaggagtccctgagcagtggagatgctgtgcttcagagagacttggtcacggagccaggcacagcccagtattcctctggaggtgaactgggaggcatttcaacaacaaatgtcagtaccccagacactgcaggggaaatggaacatgggctcatgaacccagatgccactgttcggaagaatgtgcttcagggaggggaaagtacaaaggaaagatttgagaactctaatattggcacagctggagcctctgacgtgcacgtcacaagtaagcctgtggataaaatcagtgttccaaactgtgcccctgccgccagttccctggatggtaacaaacctgctgagtcttcacttgcatttagtaatgaagaaacctccactgaaaaaacagcagaaacggaaacttcacgaagttgtgaggagagtgctgatgctccagtagatcagaattctgtggtgattccagctgctgcaaaagacaagatttcagatggattagaaccttatactctcttagcagcaggcataggtgaggcaatgtcaccctcagatttagcccttcttgggctggaagaagatgtaatgccacaccagaactcagaaacaaattcatctcatgctcaaagccaaaagggcaaatcctcacccatttgttctacaactggagacgataaactttgtgcagactctgcatgtcaacagaacacagtgacttctagtggcgatttggttgcaaaactgtgtgataacatagttagcaagtccgaaagcaccacagcaaggcaacccagctcacaagatccacccgatgcctcccactgtgaagacccacaggctcatacagtcacctctgaccctgtaagggatacccaggaacgtgcggatttttgtcctttcaaagtggtggataacaaaggccaacgaaaagatgtgaaactagataaacctttaacaaatatgcttgaggtggtttcacatccacatccagttgtccctaaaatggagaaagaactggtgccagaccaggcagtaatatcagacagtactttctctctggcaaacagtccaggcagtgaatcagtaaccaaggatgacgcactttcttttgtcccctcccagaaagaaaagggaacagcaactcctgaactacatacagctacagattatagagatggcccagatggaaattcgaatgagcctgatacgcggccactagaagacagggcagcaggcctgtccacatcctccactgctgcagagcttcagcacgggatggggaataccagtctcacaggacttggtggagagcatgagggtcctgcccctccagcaatcccagaagctctgaatatcaaggggaacactgactcttccctgcaaagtatgggtaaggccactttggctttagattcagttttgactgaagaaggaaaacttctggtggtttcagaaagctctgcagctcaggaacaagataaggataaagcggtgacctgttcctctattaaggaaaatgctctctcttcaggaactttgcaggaagagcagagaacaccacctcctggacaagatactcaacaatttcatgaaaaatcaatctcagctgactgtgccaaggacaaagcacttcagctaagtaattcaccgggtgcatcctctgcctttcttaaggcagaaactgaacataacaaggaagtggccccacaagtctcactgctgactcaaggtggggctgcccagagcctggtgccaccaggagcaagtctggccacagagtcaaggcaggaagccttgggggcagagcacaacagctccgctctgttgccatgtctgttgccagatgggtctgatgggtccgatgctcttaactgcagtcaggcttctcctctggatgttggagtgaagaacactcaatcccagggaaaaactagtgcctgtgaggtgagtggaaatgtgacggtggatgttacaggggttaatgctctacaaggtatggctgagcccagaagagagaatatatcacacaacacccaagacatcctgattccaaacgtcttgttgagccaagagaagaatgccgttctaggtttgccagtggctctacaggacaaagctgtgactgacccacagggagttggaaccccagagatgatacctcttgattgggagaaagggaagctggagggagcagaccacagctgtaccatgggtgacgctgaggaagcccaaatagacgatgaagcacatcctgtcctactgcagcctgttgccaaggagctccccacagacatggagctctcagcccatgatgatggggccccagctggtgtgagggaagtcacgcgagccccgccttcaggcagagaaaggagcactccctctctaccttgcatggtctctgcccaggacgcacctctgcctaagggggcagacttgatagaggaggctgccagccgtatagtggatgctgtcatcgaacaagtcaaggccgctggagcactgcttactgagggggaggcctgtcacatgtcactgtccagccctgagttgggtcctctcactaaaggactagagagtgcttttacagaaaaagtgagtactttcccacctggggagagcctaccaatgggcagtactcctgaggaagccacggggagccttgcaggatgttttgctggaagggaggagccagagaagatcattttacctgtccaggggcctgagccagcagcagaaatgccagacgtgaaagctgaagatgaagtggattttagagcaagttcaatttctgaagaagtggctgtagggagcatagctgctacactgaagatgaagcaaggcccaatgacccaggcgataaaccgagaaaactggtgtacaatagagccatgccctgatgcagcatctcttctggcttccaagcagagcccagaatgtgagaacttcctggatgttggactgggcagagagtgtacctcaaaacaaggtgtacttaaaagagaatctgggagtgattctgacctctttcactcacccagtgatgacatggacagcatcatcttcccaaagccagaggaagagcatttggcctgtgatatcaccggatccagttcatccaccgatgacacggcttcactggaccgacattcttctcatggcagtgatgtgtctctctcccagattttaaagccaaacaggtcaagagatcggcaaagccttgatggattctacagccatgggatgggagctgagggtcgagaaagtgagagtgagcctgctgacccaggcgacgtggaggaggaggagatggacagtatcactgaagtgcctgcaaactgctctgtcctaaggagctccatgcgctctctttctcccttccggaggcacagctgggggcctgggaaaaatgcagccagcgatgcagaaatgaaccaccggagttcaatgcgagttcttggggatgttgtcaggagacctcccattcataggagaagtttcagtctagaaggcttgacaggaggagctggtgtcggaaacaagccatcctcatctctagaagtaagctctgcaaatgccgaagagctcagacacccattcagtggtgaggaacgggttgactctttggtgtcactttcagaagaggatctggagtcagaccagagagaacataggatgtttgatcagcagatatgtcacagatctaagcagcagggatttaattactgtacatcagccatttcctctccattgacaaaatccatctcattaatgacaatcagccatcctggattggacaattcacggcccttccacagtaccttccacaataccagtgctaatctgactgagagtataacagaagagaactataatttcctgccacatagcccctccaagaaagattctgaatggaagagtggaacaaaagtcagtcgtacattcagctacatcaagaataaaatgtctagcagcaagaagagcaaagaaaaggaaaaagaaaaagataagattaaggagaaggagaaagattctaaagacaaggagaaagataagaagactgtcaacgggcacactttcagttccattcctgttgtgggtcccatcagctgtagccagtgtatgaagcccttcaccaacaaagatgcctatacttgtgcaaattgcagtgcttttgtccacaaaggctgccgagaaagtctagcctcctgtgcaaaggtcaaaatgaagcagcccaaagggagccttcaggcacatgacacatcatcactgcccacggtcattatgagaaacaagccctcacagcccaaggagcgtcctcggtccgcagtcctcctggtggatgaaaccgctaccaccccaatatttgccaatagacgatcccagcagagtgtctcgctctccaaaagtgtctccatacagaacattactggagttggcaatgatgagaacatgtcaaacacctggaaattcctgtctcattcaacagactcactaaataaaatcagcaaggtcaatgagtcaacagaatcacttactgatgagggagtaggtacagacatgaatgaaggacaactactgggagactttgagattgagtccaaacagctggaagcagagtcttggagtcggataatagacagcaagtttctaaaacagcaaaagaaagatgtggtcaaacggcaagaagtaatatatgagttgatgcagacagagtttcatcatgtccgcactctcaagatcatgagtggtgtgtacagccaggggatgatggcggatctgctttttgagcagcagatggtagaaaagctgttcccctgtttggatgagctgatcagtatccatagccaattcttccagaggattctggagcggaagaaggagtctctggtggataaaagtgaaaagaactttctcatcaagaggataggggatgtgcttgtaaatcagttttcaggtgagaatgcagaacgtttaaagaagacatatggcaagttttgtgggcaacataaccagtctgtaaactacttcaaagacctttatgccaaggataagcgttttcaagcctttgtaaagaagaagatgagcagttcagttgttagaaggcttggaattccagagtgcatattgcttgtaactcagcggattaccaagtacccagttttattccaaagaatattgcagtgtaccaaagacaatgaagtggagcaggaagatctagcacagtccttgagcctggtgaaggatgtgattggagctgtagacagcaaagtggcaagttatgaaaagaaagtgcgtctcaatgagatttatacaaagacagatagcaagtcaatcatgaggatgaagagtggtcagatgtttgccaaggaagatttgaaacggaagaagcttgtacgtgatgggagtgtgtttctgaagaatgcagcaggaaggttgaaagaggttcaagcagttcttctcactgacattttagttttccttcaagaaaaagaccagaagtacatctttgcatcattggaccagaagtcaacagtgatctctttaaagaagctgattgtgagagaagtggcacatgaggagaaaggtttattcctgatcagcatggggatgacagatccagagatggtagaagtccatgccagctccaaagaggaacgaaacagctggattcagatcattcaggacacaatcaacaccctgaacagagatgaagatgaaggaattcctagtgagaatgaggaagaaaagaaaatgttggacaccagagcccgagaattaaaagaacaacttcaccagaaggaccaaaaaatcctactcttgttggaagagaaggagatgattttccgggacatggctgagtgcagcacccctctcccagaggattgctccccaacacatagccctagagttctcttccgctccaacacagaagaggctctcaaaggaggacctttaatgaaaagtgcaataaatgaggtggagatccttcagggtttggtgagtggaaatctgggaggcacacttgggccgactgtcagcagccccattgagcaagatgtggtcggtcccgtttccctgccccggagagcagagacctttggaggatttgacagccatcagatgaatgcttcaaaaggaggcgagaaggaagagggagatgatggccaagatcttaggagaacggaatcagatagtggcctaaaaaagggtggaaatgctaacctggtatttatgcttaaaagaaacagtgagcaggttgtccagagcgttgttcatctctacgagctcctcagcgctctgcagggtgtggtgctgcagcaggacagctacattgaggaccagaaactggtgctgagcgagagggcgctcactcgcagcttgtcccgcccgagctccctcattgagcaggagaagcagcgcagcctggagaagcagcgccaggacctggccaacctgcagaagcagcaggcccagtacctcgaggagaagcgcaggcgcgagcgtgagtgggaagctcgtgagagggagctgcgggagcgggaggccctcctggcccagcgcgaggaggaggtgcagcaggggcagcaggacctggaaaaggagcgggaggagctccagcagaagaagggcacataccagtatgacctggagcgactgcgtgctgcccagaaacagcttgagagggaacaggagcacgtgcgccgggaggcagagcggctcagccagcggcagacagaacgggacctgtgtcaggtttcccatccacataccaagctgatgaggatcccatcgttcttccccagtcctgaggagcccccctcgccatctgcaccttccatagccaaatcagggtcattggactcagaactttcagtgtccccaaaaaggaacagcatctctcggacacacaaagataaggggccttttcacatactgagttcaaccagccagacaaacaaaggaccagaagggcagagccaggcccctgcgtccacctctgcctctacccgcctgtttgggttaacaaagccaaaggaaaagaaggagaaaaaaaagaagaacaaaaccagccgctctcagcccggtgatggtcccgcgtcagaagtatcagcagagggtgaagagatcttctgctgactctcttcctctctgctgaggcagctgcctcctgatcctggccagcccacctctcctgctgtccccgcgtgcacaagtctcttacactggacgcccactgctcctcagcgtccagtcctcctgggcggccccaggtcctggacaataagcaacagatgatattgagtgtcgggtggggaaggaggcccagactctgcttcggccatgatttgtgactgcccaggactctcaggttgggctggccctactcaggattacactgaaagtaatggcctcgtaagtacaggtgatggttttggacacgtcaggaattcctaaaggctgaaagagtgtatccaagtaaggtctgaacctccgactgccttttatttgggggaacacaaaaccaaacagcagatgttttggacttgatctgtgtacgtacatggggacctgtctgcatatacacacggggaatgccagaagaaggcccagtctgcaccaggcgtctggtcaacttagcacaagggcagtgcctggacggacccggagcccccgcatatcagcagttcacccagtactcctcagagactggtttccctctaaacccatcccgggcacataccacccctgttttgcatgtatttctcatttcattttagggatgacaaacatttgtgaaaccagtgagagaagtcttgatgtgtataaaagacgtgatgtgcaccacctcgatctcggtgtttcaggcactaaagcaacaaaacaacccatagtatctcattttgtcatcagatccagaagaaatatcctggttttccagcatgtttacccacatgttttgggcatggataaagtgaagaggcctactcaccattatccctgcagcgtgacaccttttgattgtcactgaccactcagaaggggccacggcctcctggctgtgttcctgagcccccgtcgtgcctctcccagacagcagctgtctggcccttgctgggtgagggcacaccactgccaggggtcagcctcgcacccaggccaggcagaagctgtgctctgaagctaggacagctggctgagaagtgggttcaggcgaagggtgaagccatgtgtagcagttcctgccagtgcagatctggagaggagctggcccggaaggcgtggttgtgaaagcgcccttcttatgttaggaggccttggcaaaattggatttcttcaaaaatacatgtaaaggtctgttgttgaattgtactctgcccctggaagcagatacagatggctgcctgctgctcggctttgcttttgcttttcccaccgtgttttcatctttgttcacttgaggctttccccagctggtgtgtgcaggacagttcatggtaatgttgccctctgaggccccgtacaccagaagggaggccctggaaaattttgtgcttccagcgtggccttcaattcttgcttttttgcccctcagaagcatggggcttttgagcacacttaaaaaaaaaaaccggaattc

SEQ ID NO: 4460 - protein, 2813 aa, Homo sapien [sequence omitted]

SEQ ID NO: 4461 - DNA, 2346 bp, Homo sapien
  Unsure 308-441, 2200-2281: Unknown base
taaccagtgttcttaatgaagtatttagtcttgggtttcttgtaaatttctctgcattccttagacagtgtactatacatgaaatattcttgttgacctagtaatttatattattccatttaattcttaaacctatggcctttttattgagcacactcttaaatcatttggcttgtaaacattcatctgaattgtggctacaatcctctttaaataatctaggaaaaaagaaagataaagcttacattttcacagttttggctcttaaacacattccacaaatgccattaagaatttatttgttttannnnnnnnnnnnnnnnnnnnnnnnnnnnnnnnnnnnnnnnnnnnnnnnnnnnnnnnnnnnnnnnnnnnnnnnnnnnnnnnnnnnnnnnnnnnnnnnnnnnnnnnnnnnnnnnnnnnnnnnnnnnnnnnnnnnnngtttttcattttttttcatgttatctatccaagcactgttccatggtcagcaagtcatatttcataatgtggattttccaaaataattattgaatacagctattctatggctacttttagtgtttttgtggtatgtggtgtgggagtgtttatggaattaccagtatcttaaattttcaaaggaaccttggaagtctatcactctaaatgaaagtctgtcactctacatgaattatgtgctcaaatttgaccaactcagtttaagacacaaaacagtaatttgaagaaggaaaaatgaagagagtttctagtttaatgggttaaatttttgttgttgcaatagtaagtttagtcttcttataatatttctaaatgaaaaatcataggtatttgttaccatgtgtgaagattagtttgttaaaagcaaaagtggtcgtgtgatatgctaaatgttaattactgattttatatgtttaaatcacgccaaacaaattatgtctgtgccatccagggtctgttgttaatctttttctgagtacttggattgggataaagggcttgtactatgcactttttattaatgaataaatagaaaacgttagtaacactttgtgttttctgtttggcttttgtgtgaagagaagcaagcatcttttgcctagtagatgttaacattgtgtattaaacagtttctttgtaagacctaactaaagacattcctaagagagaacttaagttttaagaaaagttgtgagaaaaatattcataaaatatgcagtatggggccagtattcagaagtagagtttctctcttggaaattagattgcagtcacatttctttggttattttctttctctctctcttcctagaataccaggtaaaatagacatttactttgagggactaatatccaatagtgttaattatttaagcagatatatctagctcaaaaggaaccagacatgtcactgtaccaaaaacacacaaaagtgaaaatttgcttctgttctgtgacctagaatgtgtccagacattaaagatcatgaatactcatatacatgtaaaaatagtaacactgctctggcatgattttgacgtcagtgtttatgtaataacttcagtgttatatttaaaatagataaatttgtgaaataacaatttcttggagacagtcaactttttatgatttaatctaaagattgtcatgtacatgtcaacggatatctgaatcctcagtgaaactgttaagttttcattaaatgactctgctgcaatactagttttcttctcagaaaatggaattcaaataaaataagttttttggtcttggcatttcacctgatgactttctctgttctggatctcaatttgtagagttgttgggggttcccccccctccaaaaaatgctccataaacaccaactacaattatctttcatgatcatattttaaaaattggagttacctgtgtgatcttttcccattagttgcttgtaggggactttagtgtgcgtatctcttctcagacaaatgtattatgttcgttcaataaacacttcaacaaatttttatacttgtttcttaactctctataggctttaaaatggattttattcaggatttgattacagaaactatttcaaaccatcagatgccaaattgtctactgacgttagtgaggagatgtctgggaggcaaggactatgtaggggtgaaaacaatatatatagttttaaagataaagcaactttctttcnnnnnnnnnnnnnnnnnnnnnnnnnnnnnnnnnnnnnnnnnnnnnnnnnnnnnnnnnnnnnnnnnnnnnnnnnnnnnnnnnnggcttatgttttacccaaacaataccttactatgactggctctgtgtccccacccaaatctcatc

SEQ ID NO: 4462 - protein, 130 aa, Homo sapien
  unsure 58-103: unknown amino acid
  Unsure 308-441, 2200-2281: Unknown amino acid
MAFLLSTLLNHLACKHSSELWLQSSLNNLGKKKDKAYIFTVLALKHIPQMPLRIYLFXXXXXXXXXXXXXXXXXXXXXXXXXXXXXXXXXXXXXXXXXXXXXXFSFFFMLSIQALFHGQQVIFHNVDFPK

SEQ ID NO: 4463 - DNA, 2817 bp, Homo sapien
agcggagtgtgagggattttggaagcacttgccccaagcagagtttaaaatggagatggcaaatgaagcacagaaatctctttgctctggaaactggggtcccaccctggggacttctttgggtgagaagttgaagagtcgggatagatgagatgacctttcacatctggtatcctcaggtccgagcccctggacagcagccccaggcgcagctggccatggccctgtgcctgaagcaggtgttcgccaaggacaagacgttccggccgcggaagcgctttgagccgggcacacagcgctttgagctgtacaagaaggcacaggcctctctcaagtcgggcctggacctgcgcagtgtggtgaggctaccacccggggagaacatcgacgactggatcgccgtgcacgtggtggacttcttcaaccgcatcaacctcatctacggcactatggcggagcgctgcagtgagaccagctgcccggtcatggccggcgggccccgctacgagtaccgctggcaggacgagcgccagtaccggcggcccgccaagctctctgcgccgcgctatatggcgttgctcatggactggatcgaaggcctcatcaacgacgaagaggtctttcccacgcgtgttggagttcccttccctaagaacttccagcaggtctgcaccaagatcctgacccgcctcttccgagtctttgtccatgtctacatccaccacttcgatagcatcctcagcatgggggcagaggagcacgtcaacacctgctacaagcacttctactacttcatccgcgagttcagtctggtggaccagcgggagctggagccactgagggagatgacagagcggatctgccactgagcccaggtctggacttttttggccatcagatggacgatctgaacatagggtggctggcagaggggacccccaggagcctgaaggaatctgaaggcactggaatcactccacacacccaaagcctctggacttctggttctcaggagtctgcctacctgtcgccctgaccgcttgtggatggagaaggggagagcatctaggcaggcaaacagaagggaagtggagttaaacctctggcatgaagtctgggagtagggtaggctagggggtttcttctatgacacttgacccttccatgctggttcccaagcctattggaggaatgtgggtgtggccgaggtgatggcaagaaaggtgcaagaaagtgagcagtctgcctgtgagtgagcacagatgccggggtgtgtgtgtgtgtgtgtgattttcactgtggggtgtgtctgtgagagctagctgccttacccctccttggcacatagtaggccttccataaatgttggatggatggataaatagattgggaccatcagaccatgggaccatcagaccatgtccactgtaggagtgatgacagctcagcgtccccactcagtgtatctgaccatgtgtgtaagtgcacaaaaatgtggttgtagatgttgctctacattcaaaccttccaggctacactcttccatcagcatgagtcctggagagctgggggaaggtaggaagaggagccttgccttgagttcctaaaccgacccactgcagacacaggctctgattctcttacccagagatgcccatgagctgacattttactcatccctctgcctccaagaaggcctgtattatacgtgtcctcctgggggttggagatgatccctcaagtacacaaaggtcccctggcccttcatctgggaatcatatactccactctagctcccagaatctacagacctggctcctcggatctgaagcccagcacaaaataatctccccgtccaaggagcttgtggaacttgaattgggaactttggagtcttgtctcccatcccagcacattgaggatgtagttggtgaatggactcttccaggcatggagatcctccatcctaaaagtacctgcctccttcccagccatccctgacacattccagccagttggatctcacagcacagctatccacagggagactgggatgttcacgcagcactccattactcagtacctccatacccagccctatacgcagacccacaggtggggaaactgaggcaggaacagggttctgccctcccagagcctccactctgggatgccagaatggaaagccagagggaacctgagaatcatccagtcttactgtctcaatgtacatacggggaaactgaagccaggagaagaagagggagaaactgtccagggcctcacagggaggcattcatggagctggagaaaccagggatcctgaccgcagggcccatcaattgctacatagagatacacatggaaagagggtttaacagaccctctctaggacacaactgtttctgctttgagcaataatttctaacctgaggccaacatgtcccactgccccttgggttggctggggttgtttcctgagccaagcatccaatatcatgccccactcaatggcctagaagctgcctgtactttggggaaacagatggagctcttgggcccagccagctgggcctgggacttctgcctctgccgcctccagagtggcctggcagctttgccagaggctgtggagcgagggtaggagcttttcccagagtgctgtgacttgcatgatggattctaggctgtggcaagggctgatttctgggatagggggagggttggaaaatttatttttatgaaacagagggaagactttattgttgttatttttggtaaaataaaaggcaaactaaagcaaaaaaaaaaaaaaaa

SEQ ID NO: 4464 - protein, 216 aa, Homo sapien
MALCLKQVFAKDKTFRPRKRFEPGTQRFELYKKAQASLKSGLDLRSVVRLPPGENIDDWIAVHVVDFFNRINLIYGTMAERCSETSCPVMAGGPRYEYRWQDERQYRRPAKLSAPRYMALLMDWIEGLINDEEVFPTRVGVPFPKNFQQVCTKILTRLFRVFVHVYIHHFDSILSMGAEEHVNTCYKHFYYFIREFSLVDQRELEPLREMTERICH

SEQ ID NO: 4465 - DNA, 1567 bp, Homo sapien
cccacgccggcgggagcgcccgttcgcgctgccagcagcttccgcctgctacggtcctggcaagcacctcgggatcccattccttcacagggaccctagccagttaaagctgatacattcctgtgggtcaactatgcaactaactcagattttgagcaaacaaagctctcaagttggtgatcctcaggagtctctgcattagttggacagctcttctggaattatcttctaagtcaactgtgggttgggtaggtggctctgctgatttttcgctggacttccacatttgggaccagttggctgtcatcagctctagaaagggtgtggctgttttacattggctgttttcctcacattcctcaagcaggtactgtaataaagaactggagaaatacagtcagatgggaagtagcccctgctgtcaaggagcttgccatctaatgggggagacaggcaagtaaaccaaagactacacagtgcagtatggtaagtgccatgattttgatgtgacagggcacagtggacgaccttccaaatcaaagcaagtaactaggggttgacaatggtaagtatcatagttgaagtatccttgaacaaggtttcaggaagaagaagaagggaatttcatgcagggaaacagccaaagctcagtgagtcaaaatatcacagcattcttggtaagcccaattgttttttctgttttgctattttggtggagagaaaggaacacataaaggaataacatgagagaaggctatttggggaagtgtagtagttaaggttctggctcaaacaacaactgcagctcataaagttgactttagaggaaggatactggggtatctcatggaatcttgggaactgttgaataaccagggaaactctgggaaactcactggtaggaatccataaactgtcctcctggtgggctgtaaacaactcaccctctatgcatctcacatcaaaattccagtttcttgggaaaacaagtctgtttgcccaatttgggtcatatttccacctccatgttactcaggcatgattcatctgcaagttatgtgtatagatattttgctactgttccacccttacgctgtgctggggagggaggtgtcactgtgagctgtgtcggtgccttaagagatatctgttgtgtcttattacttggttgcttttccccacatgtacaatgacaaaaatgccttcaacctatttgatccagccgttccagtacaactcctatacttgccatctttccaagcccaaaggtacatccagctgatggaaggagcatcttggtgttaatattcttttagtcatggtctctgaaagtaaaatgtctattcttctaattctggcacaatcttatctagctatagttcctcatggtcctgcactccatggactaaattgtaagtataattactaccaatgtactctataaataacttttggggccagggtggcaatagttgctagagaaaaaaaaaaaaaaaaggaaaaaaaatctatgtcgggtgcggagaaagaggtaatgaaatggcaggaattcgatatcgagcttatc

SEQ ID NO: 4466 - protein, 66 aa, Homo sapien
PRRRERPFALPAASACYGPGKHLGIPFLHRDPSQLKLIHSCGSTMQLTQILSKQSSQVGDPQESLH

SEQ ID NO: 4467 - DNA, 5082 bp, Homo sapien
  Unsure 1484-1520: Unknown base
tgaacagtgagtgcagctagttcattgtttgcacaaggaactacagtctaattgcagttcctattttagctgatgaaacaaccagtttgtcatggaaattattttagtgtggtattatgtaccagatttttagaatccataacttgaaattagctttacacgctacatagtaaatagtggactacagaaacaaaagtattaacataaggaccttaatttttttcacctattttatgaccttaaatattcagtatttttttaattccatctgtattttcgttttgtcagtgagtggaataatgtgctccttatttaaaacatcttttcccctaacagtagaacctattaggtcttgtggtttgatcactcactggttttgagaatagatgagtcatctctagtatagatcttcatggtaggccattcaccttcagtctattactcatagcaaaaactccacggacttttttaagtttaaaacccatgaatctgcttaggttttataatctcagtatttgacatttgctcactatttcatctctatttgttggcccggtttttctgtattttctttgcccaaactgctcattatcaagatgaacatttgggatatactctttttgagaccctcaagggcatattgacatgaatttagttaattttagtcatctattgatgttgaagaattgtgaagacagtcactggtagaggtgattctatggaggctatcccatcccagtggaatgttaatgctttaccaaaatgtgttagctgcagtagacagatgtttctgtcttgggggtttagggcacaacatttctgaggaactctgactcaatctgtcccttctcctttcacagggcagcaaggcgaaccccatccctactcactggagctcagctttgatttttaacctcccttccccacccttccagaacacacacattccattccaaaactgattttataaagacattttaaacataatgatgcaacttggtgtgcactacagcaaatgtacaggtgtttttttttttaattgtttccaaaaccgggacctggatttaagatgtaatttttaaaatttctatttctattttttctgcagcagttgggttagaggaggaggagccttttagcctctcataaactgacctctctacttcctcgtgtatttttaagattgattgatgatgtggaaagggctttgcttgtctgctactgaaaactttatccttgcggtttttgtggaaactgcttttggaaagagaaaagaaatgaactttactgacttgacatttttgcacctcccgtttttctaatctgggctatttttatttttgtttttttacagtgagatttttttgatcttcagctacagtaagttattccaatttttttttaacatttttcctgactttccgctgatttcctttttattgttgttactagttactattacttattattattatattaatacnnnnnnnnnnnnnnnnnnnnnnnnnnnnnnnnnnnnngatttttaaccggattaaaatcgagtttttctgaatgtttctaagaatttctccggcctcctgattgactttggagttttgcatcttgggagagaaagcgaaggcattagtatttttaagtggtttgatcacgtaaaccttttctctcccaaccccacccttgccctcatccccttccccacactgaaaagaattttactggctgttaagtctatgaccttatttttcctgatctttaacttaactgttttagagcatctctggacgtctgtatttttaattttttttatttttgtttttttatttttaatctttcatttgttaaatttttaaactgtgctgcaataaaatgtgtgtggtactacttaacacttatgatcgtgatggcattttccctgaaagccatcttcctcctgtttcccttgaaatcccatcctgcttttcctgtacactacccctcacaaaccacaagctgcagcaacatggatgcccagcctggagcagcagcagccaggatgacctggagccaggggggccttcggaacagatgcacacccttcctgggtgatgttttcggctttgtgagaaaccttaccatcaaacacgatggccagcaacgttaccaacaagacagatcctcgctccatgaactcccgtgtattcattgggaatctcaacactcttgtggtcaagaaatctgatgtggaggcaatcttttcgaagtatggcaaaattgtgggctgctctgttcataagggctttgccttcgttcagtatgttaatgagagaaatgcccgggctgctgtagcaggagaggatggcagaatgattgctggccaggttttagatattaacctggctgcagagccaaaagtgaaccgaggaaaagcaggtgtgaaacgatctgcagcggagatgtacggctcctcttttgacttggactatgactttcaacgggactattatgataggatgtacagttacccagcacgtgtacctcctcctcctcctattgctcgggctgtagtgccctcgaaacgtcagcgtgtatcaggaaacacttcacgaaggggcaaaagtggcttcaattctaagagtggacagcggggatcttccaagtctggaaagttgaaaggagatgaccttcaggccattaagaaggagctgacccagataaaacaaaaagtggattctctcctggaaaacctggaaaaaattgaaaaggaacagagcaaacaagcagtagagatgaagaatgataagtcagaagaggagcagagcagcagctccgtgaagaaagatgagactaatgtgaagatggagtctgaggggggtgcagatgactctgctgaggagggggacctactggatgatgatgataatgaagatcggggggatgaccagctggagttgatcaaggatgatgaaaaagaggctgaggaaggagaggatgacagagacagcgccaatggcgaggatgactcttaagcacatagtggggtttagaaatcttatcccattatttctttacctaggcgcttgtctaagatcaaatttttcaccagatcctctcccctagtatcttcagcacatgctcactgttctccccatccttgtccttcccatgttcattaattcatattgccccgcgcctagtcccattttcacttcctttgacgctcctagtagttttgttaagtcttaccctgtaatttttgcttttaattttgatacctctttatgacttaacaataaaaaggatgtatggtttttatcaactgtctccaaaataatctcttgttatgcagggagtacagttcttttcattcatacataagttcagtagttgcttccctaactgcaaaggcaatctcatttagttgagtagctcttgaaagcagctttgagttagaagtatgtgtgttacaccctcacattagtgtgctgtgtggggcagttcaacacaaatgtaacaatgtatttttgtgaatgagagttggcatgtcaaatgcatcctctagaaaaataattagtgttatagtcttaagatttgttttctaaagttgatactgtgggttatttttgtgaacagcctgatgtttgggaccttttttcctcaaaataaacaagtccttattaaaccaggaatttggagaaaaaaaaaaccctggttttttatttttgtattttattattgtttacttcaaactttgttttacagcgtcctccacaaaacctctagaatgcactagatatatttttcttggagtcataatcatgatgcataccaacacaacactactcaaattatatttcattgagatgcatgttgcattgaggagtcaacttgacatagagtggagactttttcaaaatggcttttacatcctaatgaaagtttgggaagtatatcctctctgccttttcatcagtgctttgtggtccagctggcaccctttctgaggtttgtgttttgtgctaaatggttttgtccttaaataggagaggctcaaaaacatcaagatttcaggaaaatggcgacagctgcataatggaacccccctgcttctattttgttcttttaattactatttatagccccagttaccttctgaattctgaagtgtatatacctccatgttcctgaaaacaagaaaactcttacttcctgatattccatagactgccttcccaggtgattgagaacatagagaatgttacacatttattttactctaaatgatcttttacccctgttagctaatctttgtgttttcctcaactttattaattacagtgattgcatttttagcatccagttgtaagatgaatatattaaacagctaccagtgttggtgatacctcatccttgaaaggcttagttcatttgtgttttatacttcagtttttccagcatagcagaaaatgccgcttataatttttgtgcacacaaaccttggattcccctgtaaagttgctattgtttcatagcatgcggcactggccttttttcatcctactcattacaggcaaaactcatgtcttatttatgaggattttatagatcattttctgtaacaggtgacaaaagcagaaaagaatgaagaggctgaagtatgaactacccttggagcccatatacatgatataggcaatttcttttgtatgttaattcagtcaaaaatactacccacttgatgttttctaatctgatgtgagctcatgttacacagacttttagtaagtaacccgtgactagaaaataaactggatgcttaggagagagtgtcagatgtataagatgctaataaaacctgtttaatattattgttagctgtaagtttttgggaaatactgaacaaattagtccacaatcaagtgtctacttttcccttcactgtagggcctctccctgcacagagcagtctgtttagctgtgaacaccacaatctgcagatgttcaagtcccttacataaaatggcatagtatttatatgtaacctatgcatattctcctgtatattttaaatcatctctacattaaaatacctgataaaatgta

SEQ ID NO: 4468 - protein, 293 aa, Homo sapien
  Unsure 1484-1520: Unknown amino acid
MASNVTNKTDPRSMNSRVFIGNLNTLVVKKSDVEAIFSKYGKIVGCSVHKGFAFVQYVNERNARAAVAGEDGRMIAGQVLDINLAAEPKVNRGKAGVKRSAAEMYGSSFDLDYDFQRDYYDRMYSYPARVPPPPPIARAVVPSKRQRVSGNTSRRGKSGFNSKSGQRGSSKSGKLKGDDLQAIKKELTQIKQKVDSLLENLEKIEKEQSKQAVEMKNDKSEEEQSSSSVKKDETNVKMESEGGADDSAEEGDLLDDDDNEDRGDDQLELIKDDEKEAEEGEDDRDSANGEDDS

SEQ ID NO: 4469 - DNA, 1956 bp, Homo sapien
aatcccaatttattttctaactcttttattggatgtatttagaacacagtatacctatagtatacctatgtgtttattatgtttgtaaatggtaactgacatttaattattagaagtacttacccctgccttcctccatttttattcatggctacttgagaaagcaaaaggaaaaaataatagttatcagtagtgtcactggaaagaagagaggagggacaaaactgagcagcagaattcgtatagacatttacgtttaaattctaaaagcccaattgagatgttcagggagggtttgttttgccctttggcctcatgaatgggtttcatgaatgggcttcagtggcttataaactctgtaaaattctattctaaattttgtacatttattttgttccggttaattccagaagacatttcaaacatttttcttacaccatataataaaaatacttaactaaattgacagttataaaaataaatcagtgaaatgtaccttatactttaataaaaaatgttttcagaaatagataagtgaaagctgagtgtttctttgataggttcccctgtactataggagtgataattgcagctattgcaatagtagtaattgttaaatggatactaatgaatagcatagcatagtgggtaagagtttatatagcacaggctctagaatcagattaagtaggttcaaataccagttctgccagtaactggttttagaaccttggggcaagttaaagaatgtctcccagcctcaagtttccctatttgtcaacaatggaaatatggtagctacctcaaacctcattacgaattcaatgagttaaacttgaaaagacttattacagtagctggcacataaagacttgatagtagtttatatggatgctatctcatattagcatatatggaattaatagtgtatcactatactttttttttctttttttttttgaatagagatcagtctatcacccaggcgtggagtgtgcaggggtgacattcatagcttcacgttgtaacttcctcccattactctaccaatccttccgtgcctcagcaatccagacgggcgtgtgatgtgcagggtgtgcaccaccacacccagctacatttttttgtgggataaagagcgggggtctcactagtgttggcccagttcgtggttctcgagctccgcggcctcaagcaatcctcccactggcctcacaagtgtggggattacgggtataagccacggcacacggccttactatgctatcaattccatatatggaaaggtgttttccctttcagagctctttaaagctctgcagaagatttacatgtgtttatagagctaagagaaatcagggcatggaaattgagtgtgtaataaaaattaaactcttcatgttatataatcatgcataacttctatcttcattctctgaagttgcctagagcaccatcacagctaggaagcttccatcatgaattaccttatttccaaaagcaagtactcaaataattgtctcaagagaggaaggacaaaactgttacaagctgaaatatttggggatttgtttgacttgactagggaaccacaagttttcatataatgcctgatttagccctgtgcctaacagtttaaatcttaatgctaatgttaattgcttcccagttggttgaccttataagaaaacactgtgtggtattttaatgtggtaaacatgtgaatgaaggcctgtggctcagttaatcactcccacaactttgagctgtgagttttactggtggaaggaactttaacaggtcttcgctcttgtcattagatatcaaagaactgaaattagttggaattgtaagcagtgaatagatgtgttgttagaatgattccatcacttatacattgtttaaaatgctaataaagtaacttgctttgtaagaaagaaaaaagaagaaaaaatt

SEQ ID NO: 4470 - protein, 28 aa, Homo sapien
IPIYFLTLLLDVFRTQYTYSIPMCLLCL

SEQ ID NO: 4471 - DNA, 2108 bp, Homo sapien
caaattttctatttttatgtgactctagggcataacaaaacagtgacagtttcaagcgttaattttaatgcttcctactagctaaatatcatcttaaaatgattatcagaaaaaaaaaaatgcccccaaaaacttttgggggcattatttggtactgggaggatatttaaattagatttttcatagtctattgttttgaactatggattctgttttatggtggatacctaaggtttatataatagttgctggaaaacttaaagtagctggtgagcttcctgttatgtcactattaaagaatgatggctgatgtaactctgcccctgaaatctacaagggtcatgcccaaattaatacaggttaacctttgtagaggtatatatgttggcattatttattgacatttatgcttcaagcatgtcttattttatgtaattttaagaaatactctatttaacttgtgaaatatacctaaaagcatactagttagctcttagactctcacttagggagggtaaagaaacatcactgatgccaatatgaagatctataaacaaatcctttgtttagaacttttttctcttcgtgcacctcacaacacacttaccatggtacatatttcttaatgccactaagaaaggcaagatagtgaacgcagaattatttatgtggtatagtgtttgttttcctgttttagtgcttttgtagctaaaacttactggaactgcatcacaactacatttgcagtctcagtgggaggtggactagcctgtggttaattttagagcttaaaagtttataagcattaaaaacacatacatgtattagaatcttgtctaacccctcacaaaggatgatggtgatcagcatgccatcttttgaagattaattctaaaattgaggactctggtaggttgttttatttccttcccaaccagccattcatttccaattgttctgcctttgaaactttttgtgaaaattgcctgtaccaattgcattggttgcgttgctctgatttaaatgccaaaaacactaaatatttgtgtagtgctgttaaatgaggtttttgatatttccatcaaaatgaatataaaattcacttgatggattttgtagtgatgttttcacagttgaaacaaacatattgctgtgcggtggacagccacttcacagacatgcagacccatttctttagagatattaggtttaaaacccattttaattttattttgctgaaggtttggaatatataaagtaatggattcacaaaatatgatatcttaaaacatgttgaaagatttgaaagtggtgcatttttacttttaagagcagcaatctttgaaattagtcaacaatgcagtcttttttaaaagtcagttttctcaagtagtatgttgtaacgtaagatgtaactgatataactagattttgactggtaaacttaaagtgctttttatatttgaggttgactttaaaaagccattgagcagtcctcagaggttatggactctcaagcgactaatggaatagtgttctgttgtgaagtctagaactaaagcaccttgtattgtctgcttctaaagtgtcctatagtttttaacttaaagtgtaaagagtaacattttatcttatgtcaattaaagttacatttttcatttgttggtgtacatgtgctacctgttttatggggaatgtttaacacgatcctccaagttggttctatgcataaccattcaccaaatactgctgctgtgattccttgaaggaaatattctgtggtctgctatgatgcattgccatcttgctgcttgacaataggtttataaataattagaattacgtgttttaatagtacctttgtatatataacaagatgtaaaattaaagatgaggaatgtgtgtaaatgatcattcactgtttttgttttaaaactggtcagtactatgaagcttctgtggtttgtatgatgttttaactttcactttaaactgcatagaataaattaaattgaaaacagcaaaaaaatctatgtcgggtgcggagaaagaggtaatgaaatggcaggaattcgatatcagcttatcatccgtcagcctcaggggcc

SEQ ID NO: 4472 - protein, 16 aa, Homo sapien
MKWQEFDISLSSVSLR

SEQ ID NO: 4473 - DNA, 1165 bp, Homo sapien
gcctgggtgacagaaccagaccctgtctttaaaaagggagttggtggggagaggttctagaatgtcatgtagcaaccagtttaaggactgggactcagggatccaactcccacagtttccctgtgtgaccctaggcatttgacttagcctttctgagcctcaggttttttgtttctgaagtaaaaggattggactaggtaatctccaagatcctaggaacccaggagaaagatgagaaaatgtacaagaatgaacactcaggtggaaatgctgcaatcctgagaagctcccaggatgaatgaaaggcacaggacctcttacccctcacccctgcccccctcaagagctggtttctcaaacctttctcttaggccccttcaaagggggaaaactaaaaattatacaagttatagttcaaggactttaaatagattatttatatgattgctcataaggatgaggctgtgaggagggaacaccttatttaatctaatgaaattccataggaaagaggccttttgtatattgaatcaatttatctgccttctcagtgcatctgtcatattctgaaagattctgggttgatcttttgcgataacctctatggctgtgagtgtgtgtgtgtgtttgtgtattttttaacattttgtataatgattggaggttggtaaaaagtaacacaacagtacttttttaatacaaacttggtgtggtcttgagttgtcttccattggagagcgtacgtgtgccacagattggtgcacctgccggcatctctaggattgcaccaactccctctagctcttcttggtggcctgcaggggcctagggcgcattcacttccctctgcttgactttacgtggtgttctagcgtcagacatcaggcgatgccgtgcattacccaagacactggacagctccggatcttcccgtctaaccactaatcaagttaaaaagaggaaattaacgctttcttagtagtctctgaaagaaactagttatttgcgtaaagatgacttggtattgtgttgtttatccctggggagaagggtacagaagaccctcaaactggatttgctgctgaagtgcttttaactcacctgtgcggagagcggacttcaagagagggcgtgccggtgctccggacaaaacctggggaatact

SEQ ID NO: 4474 - protein, 19 aa, Homo sapien
AWVTEPDPVFKKGVGGERF

SEQ ID NO: 4475 - DNA, 2380 bp, Homo sapien
tcggccaccgctcgcttcaatatggctgcccccagggagagacgaggctaccatgaaggagccgagcgcagaccctgagtccgtcacccatggatcgcagcgcggagttcaggaaatggaaggcgcaatgtttgagcaaagcggacctcagccggaagggcagtgttgacgaggatgtggtagagcttgtgcagtttctgaacatgcgagatcagtttttcaccaccagctcctgcgctggccgcatcctactccttgaccggggtataaatggttttgaggttcagaaacaaaactgttgctggctactggttacacacaaactttgtgtaaaagatgatgtgattgtagctctgaagaaagcaaatggtgatgccactttgaaatttgaaccatttgttcttcatgtgcagtgtcgacaattgcaggatgcacagattctgcattccatggcaatagattctggtttcaggaactctggcataacggtgggaaagagaggaaaaactatgttggctgtccggagtacacatggcttagaagttccattaagccataagggaaaactgatggtgacagaggaatatattgacttcctgttaaatgtggcaaatcaaaaaatggaggaaaacaagaaaagaattgagaggttttacaactgcctacagcatgctttggaaagggaaacgatgactaacttacatcccaagatcaaagagaaaaataactcatcatatattcataagaaaaaaagaaacccagaaaaaacacgtgcccagtgtattactaaagaaagtgatgaagaacttgaaaatgatgatgatgatgatctaggaatcaatgttaccatcttccctgaagattactaagctttggttctgatgtgtcttggccgtaatgtttctagtaggttttataaagctgctcttcataagagtattttagtttgttgagtgtatcagccattcataagccagtaatgacaagtgcagagcttcaaactataactttgttgcccagaggatgtgcagttgtcatctaagctctcagcagtacccggcttatcctacgacttcacctgaaatgctatagttatccctacttttttaccagtttctcccagaagcacctgcttaataaatcaaagatgtttgaatggtgtcttattctgaaataacctgacctaagacaggtatttagattattttggatacattttgaaaagggatagcataaatattttaagtaaaaagacctttattttaaataatagtggatattttaatgctggaaattagcattatagttgatatgccagaaattatatctttggttgtgatttaaacttatgctataaactaaattaatgatgtaaatacatagttttaaacattcttttagggacatgtaacttttaagtatcacttcaataatacgtattattataggaacaaagatttgggaataattgattacaggtgaggaagtactggaattccagttcaaggagataccatttcatttaggactaaaaggacaagatacaagttcacatgatgggaaaaatcagaaaacctctcgcagacaaagggtatataatggatatgaggcatcaaaaagcatggtatagtcagtgatggggaatagtccagaaaggctgaaacacagcatgtgatgcgagtcaaggtagttgatgcccaactgtgaagggccgttctaatctagcatggaggtagacagtgtttccttaatatggctgcatatcagaattacctaggtcaggacgaggcatggagatgctactttaataggccctgccgcagatcttccaaaccagaatcttaatcctggagtctaggaatctttatttttcacacaactcatccaagtggttctgataaaatcagtccagcacttttagaacccactgataacagacttattcctggagacagcatttgaggaggaattgaagatttttctaatgaaaagaaaaagggtcacatgaacagatgttgcagtgtacctgtgccagggatttcatgtgtacactttataggagaataagcaagagcttaggtaagttatagtccttaccattgggtctaaggcagtttccaggaaagcatggcaactcgttcagctatgtaagttgaactctgtaccacttgggagggaacattcccctagatgacaatgtcagtggcactcgaagttgtgcagtgcacattcttatctaccaacatatacagcagtccttctgggaaggaaatttgggcaggaaagggaactcacagtgtcggaatgcctggagcatttcttctagtctggtggacagaatatgaaagtatctgcctggcagtgcagtaaatgaaaagag

SEQ ID NO: 4476 - protein, 259 aa, Homo sapien
MDRSAEFRKWKAQCLSKADLSRKGSVDEDVVELVQFLNMRDQFFTTSSCAGRILLLDRGINGFEVQKQNCCWLLVTHKLCVKDDVIVALKKANGDATLKFEPFVLHVQCRQLQDAQILHSMAIDSGFRNSGITVGKRGKTMLAVRSTHGLEVPLSHKGKLMVTEEYIDFLLNVANQKMEENKKRIERFYNCLQHALERETMTNLHPKIKEKNNSSYIHKKKRNPEKTRAQCITKESDEELENDDDDDLGINVTIFPEDY

SEQ ID NO: 4477 - DNA, 1036 bp, Homo sapien
ggcacgaggctatgaccccgagcccgtggagaagctgaggaaactgcagagagctttggtccgcaacgccggctcaggttctgagacgcagcttcgcgtctcctgggacagtgtcttgagtgcggagcagacgggtcgctggtggattgtggggtccgcctggagtggggccccgatgatcgacaacagtcaccatacgcacctgcagaagcagcttgtggggacggtcagttcaaagatcctagaactcgcccggaagcagaggatgaacacagacatccggagaaacatattctgcacaataatgacaagtgaagattttttggatgcttttgaaaagcttctgaagcttggacttaaggatcagcaggagagagaaatcattcacgttctcatggattgctgccttcaagagaaaacttacaatcccttctatgctttcctggctagcaaattctgtgaatatgaaaggagatttcagatgactttccagttcagcatatgggacaaatttcgggacttggaaaacttgccagctacgaatttctctaatttggttcatctggtggcccacttgttgaagacaaaatcgctttccctttccatcttaaaggtagttgaattcagtgaattggacaaacccagagtccgttttttacgaaaagtattaagtatcctattaatggaaacagaagttgaagacctcagtttaattttcacaagagtatctgacaacccaaagctgggggtgttacgtgagggtttgaagcttttcatcagccacttcttgctaaagaacgcacaggcccacagaagcgccgacgaagccaacgtgctgagagagaaagctgaccttgcaacgaagtgtctgcaaggaaaagcttccctgagaatgtagtcagggaaggaaggagggcaggtggccctttgactgtaaaatgtccttggtaaacccaaaggcttattctgttgcctgcgtgtgaatgtttggtagagctatatcattgtctgttaatgtaaaaaaaaaaaaaaaaaa

SEQ ID NO: 4478 - protein, 298 aa, Homo sapien
ARGYDPEPVEKLRKLQRALVRNAGSGSETQLRVSWDSVLSAEQTGRWWIVGSAWSGAPMIDNSHHTHLQKQLVGTVSSKILELARKQRMNTDIRRNIFCTIMTSEDFLDAFEKLLKLGLKDQQEREIIHVLMDCCLQEKTYNPFYAFLASKFCEYERRFQMTFQFSIWDKFRDLENLPATNFSNLVHLVAHLLKTKSLSLSILKVVEFSELDKPRVRFLRKVLSILLMETEVEDLSLIFTRVSDNPKLGVLREGLKLFISHFLLKNAQAHRSADEANVLREKADLATKCLQGKASLRM

SEQ ID NO: 4479 - DNA, 3615 bp, Homo sapien
ggcacgaggccgatatggcggcgactctgggcagcggggagcgctggacggaagcttacattgacgcagttagaagaaacaaatacccagaagacacacctcctgagagtcatgacccctgtggctgctgtaactgcatgaaggcacaaaaggaaaagaagtctgagaatgagtggactcagacccggcagggtgaggggaactccacgtacagtgaggaacagctgcttggggtacaaaggatcaagaaatgcagaaattactatgaaattctgggagtttctcgagatgctagtgacgaagagcttaagaaagcttacagaaaactcgccctgaaatttcaccctgacaagaactgtgctcctggagcaacagatgctttcaaagcaataggaaatgcatttgcagtcctgagcaatcctgataagagacttcgctatgatgaatacggagatgaacaggtgactttcactgcccctcgagccagaccttataattattacagggattttgaagctgacatcactccagaagagctgttcaacgtcttctttggaggacattttcctacaggaaatattcatatgttttcaaatgtgacagatgacacttactattaccgtcgacggcaccgacatgagaggacacagactcagaaggaggaggaagaagagaaacctcagactacatattctgcatttattcagctacttccagttcttgtgattgtgattatatctgtcattactcagctgctggctactaatcccccatatagtctgttctataaatcgaccttgggctacaccatttctagagaaactcagaacctgcaggtgccttactttgtggataaaaactttgacaaggcctacagaggagcttctctgcatgacttggagaaaacaatagagaaggattacattgattatatccagactagttgttggaaggagaaacaacaaaagtcagagctgacaaatttggcaggattatacagagatgaacgattgaaacagaaagcagagtcgctgaaacttgaaaactgtgagaaactttccaaactcattggcctacgcagaggtggctgagaggataatggtcctacgcagggctggggttttgctacttgttcctatttatgttcctgattccattttataatacaaaactaggtaatgatgaacactttactatttgctaacttcgttggttgggcagagtggcaggagcatgggcacgagagccagatgtgtcttcacaggatccttcctggggagtggctccagggaccaggagtagttcatctaagttaaattaatggcaaggcattggattccgtctccctgctccatgcctaccctgcctatgtgaatggagttcagggcatcccagagcagatccatgctttcttccttcttcccttcttcagtgaagtcttaagaaccaggcattcctaggcttagccaaagcttaatattagttatttacactgtctaccaagaattatacctctcccttcattagagtcatcatctccgccaagatttagcctttggaacatgttcctgcccagctttccattttctaggggaatatggagaaatttaaactattgtagtcaatagttttctattattccaatctctgctcagttagtagcattagcaaactgcctaatttgagattcctttatttccttaaccctctctcctttagagagtccagaaattaaaactactgagcagcatctggaggcgggggccagggcgaaggtataatgcaagaccgagcctcatctcctccacgaagcctccctactccatcatagaacccagagaatgtcccttcggtcatttcccctcagtatcatcattggtgtcatcgcacttaggctgagttcctacatcccacagaggcagatggtcagacccaggaggaggcattgccagctctccaggctgtttgctcaagcctagagatagaggagacagatcctctctccttggatatgggggtctagctttggccccagcagccactttgtttaacccagtatcctatagtttgtgatttgagatgatttttcattcattcaacatttattgagtgcctactataaaagcaggggctctcacacatattttcttacttaaacctcctcacaactctgaagtagatgtattatccctggttctatgaatgagaacattggcccagagaggatgacccaggtcttgtagtggcagagcaagacggtaggctgagtgtcaagtagaaagtgggagagcatcctcatgtctcaggtgattctagccagactggcaaagcagaacctttcccgaggatgcctccgtcctccccaaccccatgacccctcatcttttctgtggcaatcttgcatctgttcaggacaacatccctgctgctctttaggaagcaggaccctgtctaacataaattctgtacacaaaataagaggtccctcacaggcaggcagccctccactggtgactaggaagaattcagtcactgcctgggctgtgtggttctgggccttcctgtggagctgagctgcctgaattatcatgactctgaacttggaaggatcattaagtgactgtagcctacactccatgcttccttcatattggaagaaaagtttctggtagagagtcggccgggtgcactggctcaagcctgtaatcccagcactttgggaggctgtggcaggtggatcacctgaggtcaggagttcaagaccagcctggccaacacagtgaaaccccatctctactaataatacaaaaattagccaggtgtggtggcacatgcctgtagtcccagctactcgggaggctgaggcatgagaatcgctgcaacttgcaaggtggaggttacagtgagctgaaatcacgccactgcactccactccatctcaaaaaaaaaaagagtctacattaaacagattccaaagtaaagtttcttcatcccaatgcatggccatgatttacacagacgtgcctagcatggctcatcaacatctgaacggttgttccctaccatgcctctgcaggcattccacagagtcaggagatgggttcacaggtaaagattgggggctttagtggcttgtaggggacaactgctcagttgcagggagagggagcatttctagaaatagccagattttgctgcccaactagatctgtcctcctggttttagggggcccttcttgatcccctctgagtgactgagggaggttacattgtaaaatatgtccatgagccaaacaggcttatggaaagttcttctacacacaaaaaaatcaaagctctcctctccccatccccaaccactgctagaaaattggccataatgaaactgacttgacaggttaaaagaccctgtcctagatgcccaggaatcaggtagtcacacattttatggacttcatggcagcgatgagtaatctgtgatgatactaaatagaagcaataataactaactccattaaatgtcacgctgattgtctgtttttatagcaaaaaaaaaaaaaaaaaaaaaaaaaaaaaaaaaaaaaaaaaaaaaaaaaaaaaaaaaaaaaaaaaaaa

SEQ ID NO: 4480 - protein, 358 aa, Homo sapien
MAATLGSGERWTEAYIDAVRRNKYPEDTPPESHDPCGCCNCMKAQKEKKSENEWTQTRQGEGNSTYSEEQLLGVQRIKKCRNYYEILGVSRDASDEELKKAYRKLALKFHPDKNCAPGATDAFKAIGNAFAVLSNPDKRLRYDEYGDEQVTFTAPRARPYNYYRDFEADITPEELFNVFFGGHFPTGNIHMFSNVTDDTYYYRRRHRHERTQTQKEEEEEKPQTTYSAFIQLLPVLVIVIISVITQLLATNPPYSLFYKSTLGYTISRETQNLQVPYFVDKNFDKAYRGASLHDLEKTIEKDYIDYIQTSCWKEKQQKSELTNLAGLYRDERLKQKAESLKLENCEKLSKLIGLRRGG

SEQ ID NO: 4481 - DNA, 1716 bp, Homo sapien
aagtgcgcatggggacgctatagcaattcgtttgctgtccttcctctccttcgaagatgacaaggcctaccatcgtttcttcctgcctttgggccgtcaggcagttggttgggacccgctccaaccctcggttcttcctgcaatacagtggatacaatttgtcatggctactctgagtgttataggttcaagttcacttattgcctatgctgtattccataatatacagaaatctccagagataagaccacttttttatctgagcttctgtgacctgctcctgggactttgctggctcacggagacacttctctatggagcttcagtagcgaataaggacatcatctgctataacctacaagcagttggacagttctggaggctggaaggtccaagattaagataatcagcagatctggtgtctggggagacggggtttcgccatgtttgccaggctggtcctgaatgcctgacctcaagtgattcaccgcttgggcctcccaaagtgctgggattacaggtgtgagccactgcacctggcctccttaaatgtatctttatggcctaattttcacctttgcacccagttgatattctacatttcctcatttctctacaccgtcaattacatctggtatttgtacacagagctgaggatgaaacacacccagagtggacagagcacatctccactggtgatagattatacttgtcgagtttgtcaaatggcctttgttttctcaagcctgatacctctgctattgatgacacctgtattctgtctgggaaatactagtgaatgtttccaaaacttcagtcagagccacaagtgtatcttgatgcactcaccaccatcagccatggctgaacttccaccttctgccaacacatctgtctgtagcacactttatttttatggtatcgccattttcctgggcagctttgtactcagcctccttaccattatggtcttacttatccgagcccagacattgtataagaagtttgtgaagtcaactggctttctggggagtgaacagtgggcagtgattcacattgtggaccaacgggtgcgcttctacccagtggccttcttttgctgctggggcccagctgtcattctaatgatcataaagctgactaagccacaggacaccaagcttcacatggccctttatgttctccaggctctaacggcaacatctcagggtctactcaactgtggagtatatggctggacgcagcacaaattccaccaactaaagcaggaggctcggcgtgatgcagatacccagacaccattattatgctcacagaagagattctatagcaggggcttaaattcactggaatccaccctgacttttcctgccagtacttctaccattttttgaagctacaatactggaacatccaggaactggagttattctacgctaatggattggaaagaatgttgggaaaggacatcttaaatcttttctaactatgccctaaactgcagaactcaaaggaaatatagtgccattgttagtagtcattctagatgaattgggagtatctctccagttattcccagattcactagtgatccttaaagtctctattcagggagaggaagacactttccatctcagagatagactcgtgttaccttgatggatattggatttgtctaagtctcttctagaaaaaataaattctagattattattt

SEQ ID NO: 4482 - protein, 245 aa, Homo sapien
MKHTQSGQSTSPLVIDYTCRVCQMAFVFSSLIPLLLMTPVFCLGNTSECFQNFSQSHKCILMHSPPSAMAELPPSANTSVCSTLYFYGIAIFLGSFVLSLLTIMVLLIRAQTLYKKFVKSTGFLGSEQWAVIHIVDQRVRFYPVAFFCCWGPAVILMIIKLTKPQDTKLHMALYVLQALTATSQGLLNCGVYGWTQHKFHQLKQEARRDADTQTPLLCSQKRFYSRGLNSLESTLTFPASTSTIF

SEQ ID NO: 4483 - DNA, 2048 bp, Homo sapien
aaactacctgtggggtgatctgggttgctacagaaactaacggacactggcaaggggtcagaggcattcaacccaattctacaacacaggcaggtggtcaaaacaactttcaaccagaatctactgatatggatagatgctgtcccttatggagggacgcagacttcagaactgtgcccatgactgctgactgccaccaccaaggccctcaggtacacagcctgcctcctgcaggatgatgtgggcagatttcagccctagttaacagaagagtcccccaggaggtagggggcccccatcactggagacatgccagcagagcctctggccacctaaccaggaggtcttctgaaatgactatacgaggtaaagaagtagtaccagatggtcccaaagttcccttttagcctgaaagcttttctttgtccctccttagtgaatctgtgttccgagccctactctaaagttcagtggtcaatacaatagtccaccaagagactgggaatgattagaagtgaaattggtccctccttaccaaggaggggcagatgatctccattgcacagggcgattagattctggagctgaggtggggactgcaggaggccacctagtctggtaggtttcaacccaagctgtgtacattagaattcccttgggagcgtgcaggaaatacagatgcccatgccacattccagaccaactgaagctgaatctccagagtagggcctgtatgttcatataagctccacaggtgatctgcagtacagtgaagatggaagactgcatgtgtacctatttgcaataaagatgaagaggacagcaagctccagacaggagctgggactcaacccagatctcttaagtcctgcctggtggctccttaaaagtccagaagtgttgccccaagccctccctcaacatctctgggaaccgcagctgcagcacgatgggggttcagtgcccctgtttgccccttacccagctgtggtttattctgcttgtatgtctgcacaggccggatgctcgtgttccttgtcttattctccatttactcagtcactggggctcactcccgtctgatgcactagccaagattgccttagtgtgctccagaaaagaaggccaaatcccaggcattgtcagggcagcagagctctacaggataggcttacctttcccacctgtgtggctagcacttcacagtttacaaattcctcccacctccactcagtgacacatgctgttctaacacaggtcaggcaggcattacagtccccatgttcagaatcaaagacctagcctcagagaagtgaagaaacatcatgccaaggtcattgactgccaagcggtagaggtggggttgcatccagagagcttcccggtatgcctctgcacaatgccattccttggccagctccctccaccccaagggacccagactgcacacttaacaaacaggacacaggtgtctttgaacaaacttttttgtattattatttttacatctagaataaattatttaaattatttcacagcaagggagagggataggtaatttttatcagatatttttttaaaccatctgttttttaaattacatttttgtttatgttcttgagctgatgtagtggaacttgcctagcacattcaggtcccagccagttggcagagcatgctctcatctccttattccataccctgggcgtcccctttctgttgactcaggaactttctgagaatgaggacagcactaggagatgagctttggcaggtatccaccttaacgctacaataattgtgcttcctgaaacaaaacttgagattgtatcatagaaggaaacaggaagtcagaaatcaaatctatgcttttaattgaaaccgtgcctgaaacagtttgaatgattgttttaatgttgtttctgaaattccttgtacctttgtgaaaaataatgataataaataaaagtgaaaataaatagatgtggaatatgcaatggaaataatgtaacaaaataataaacatctggccattttactacaaaaaa

SEQ ID NO: 4484 - protein, 78 aa, Homo sapien [sequence omitted]

SEQ ID NO: 4485 - DNA, 1210 bp, Homo sapien
agcggctggtagaccccgccaagcgcctcggagcgcgcaggatgcgctgggcggccgccaccctccgtggcaaggcgaggccccgggggcgggccggggtcaccacgcctgccccagggaaccgcacaggcacgtgcgctaagctgcggctacccccgcaagcaaccttccaagtccttcgtggcaatggtgcttccgtggggaccgtgctcatgttccgctgcccctccaaccaccagatggtggggtctgggctcctcacctgcacctggaaggggagcatcgctgagtggtcttcagggtccccagtgtgcaaactggtgccaccacacgagacctttggcttcaaggtggccgtgatcgcctccattgtgagctgtgccatcatcctgctcatgtccatggccttcctcacctgctgcctcctcaagtgcgtgaagaagagcaagcggcggcgctccaacaggtcagcccagctgtggtcccagctgaaagatgaggacttggagacggtgcaggccgcataccttggcctcaagcacttcaacaaacccgtgagcgggcccagccaggcgcacgacaaccacagcttcaccacagaccatggtgagagcaccagcaagctggccagtgtgacccgcagcgtggacaaggaccctgggatccccagagctctaagcctcagtggctcctccagctcaccccaagcccaggtgatggtgcacatggcaaaccccagacagcccctgcctgcctctgggctggccacaggaatgccacaacagcccgcagcatatgccctagggtgaccacgcagtgaggctggtgcccatgctccacactgggaggccaggctgaccccaccagccagtcagctacaactccacatcaactccacatgcgcccagctcgagactgatgagtggaatcagcttccaggtgtagggaccccttgaggggccaagctgacatccaaggctgaggaccccagtggggagtgttctgttccggcatatcctggccgtaacgatttttatagttatggactacttgaaaccactactgagggtaatttactagctgtggcctcccactaactagcattcctttaaagagactgggaaatgttttaagcaaatctagttttgtataataaaataagaaaatagcaataaacttcttttcagcaactacaaaaaaaaaaaaaaaa

SEQ ID NO: 4486 - protein, 255 aa, Homo sapien
MRWAAATLRGKARPRGRAGVTTPAPGNRTGTCAKLRLPPQATFQVLRGNGASVGTVLMFRCPSNHQMVGSGLLTCTWKGSIAEWSSGSPVCKLVPPHETFGFKVAVIASIVSCAIILLMSMAFLTCCLLKCVKKSKRRRSNRSAQLWSQLKDEDLETVQAAYLGLKHFNKPVSGPSQAHDNHSFTTDHGESTSKLASVTRSVDKDPGIPRALSLSGSSSSPQAQVMVHMANPRQPLPASGLATGMPQQPAAYALG

SEQ ID NO: 4487 - DNA, 4257 bp, Homo sapien
ccaactggatggtttttgattgaagcctagaacatctgtagagacaaactctacccagtcttttctagacctcaactatctccagtgttgttgtttaatcgtagccggatcagggagtgagtcttttaggcaaatgttggattatatatcaaaggaaaagcttagtttcagagaggaggaagggaaagagatgtgagggaagcatttcatcaaccagctacgtcccccttagaaggatcactgcagcaggtcaccgagcaggagtccctctgagcgtcccttctgtctcgttctgccctagctggcagcatatgaaccaggcatgatgcagcaggagcagtgaatctggagtcagccacttggcaccctggtttcgctgagaacaaactctgagatcttgggtgacttctcatcactctggacctccattcctgtgaagtgacaggtgtggaccctgagggtgcggtggtgagcacactgtctcctgctggcattcaccccactcatgctggaaaggaagatccagatcgtacaaaaatgagaaaaagaaagaataagaagggtctggtcccagttctgactcggccattcttacagctctttctggctttgagtttgcttgtggaatttcctgggcagttgtgttaaatccgccaggtcacgtgcagacaaagctgtggctgcgagagttggctggcctcttggaccagaagccatctccatatcctcatgagcgattccatatctccactcagaccctgtggactacagtgttccgctgtggtggctgccaagatgccttcttaaacttatgcaaggaaaccaaaccctcccacagttcccaagcagacactggaagcagaggcttctcacccttcctgctttttcaccacaatcaccttgagctcgtcccttggactagagtctccacagttccagtaaaattctgcggtgggctgatgagctgcttgcatttctgtgacatttccagatatgattctcagtgggattttggaaactttgattgctcaagctcacccttcttaacattctgtaatggttacagatgagaatggaaaacacatattttatggatgaggcgttttggtctcccctgcagtcgatttctagaatcaagttttagagttcggctgatgcatctgcctggggacctcagatgggaggagtgtgtcagttgtaccccgacagaaatgtctctgggatctgtggctggcttgccccgggcatctctcctttaagctcaagttttgaactctctgcggttttccacccctgccttctcagccacatgctttggccttaaacgctcagtcttgtggagttcaactctgtcaaacgattggaaagggcatccatttccagatctttggcattttccccgcgctgactctttgatgatccttcactgtggccttttcaagctcagctgttcctgtgtatttgagacgagggtgagggaatgtggtggccacaaaagaacagggacttgcagcacaaatgtcacttctgtctcccttttcaatggtagcacggaggaggaggtgctgcgttggagggaggggatcctccaggagctctctggagcccatctaggaagctagagtgtgtggcccgccaggagctcaggaaggatacagccactgtcgcaggggaaagtgtttgcttcccgtggagccaagcgcccaagactctccgtatccttcaccctgacagtttaacttcagcgtttctctgtgcagttgcggtcaccatgggtgagcactgtctgtgcacgtgccagggaggagatggctgggaccactgcacaggagggcgcagcctggcgtcgccatgaaagttgtctctgtgccatctctccggtccttgaggagagcccagaaagattttaggacccaggaggtgcttttcctccagctgttgccagtgtccttctgagcctggattctccggggatttccgtcgtggtggatggacttcacatcagcagcagttctggtacagaattgtaatgtgttttcatttctctgtaggattcacctctcaccagcgtctgtcttaaaggtagggccaatttcatggagcatttttctgtgtgtgtccttgttgcttttgccagaaaaagtggatttgacatgcgtgccccgatgccaccatagcccctaggccaacaatgtcatggtctaaacaccaaaaagtgatgccccgcattccttccctggatggtaccgtttcttctccgtctctctttgatgattctttgggaccaaagtcctctccttagtgcgcctacttcctgtgggcatcatgccacttggaacttattggaactggcccgggagactctgcagtctgcgccgtttgaaaaccctgagaaagagatgccacctcaacttgaatcatgacagcccatcgctcagtctcaccctaaactcatggagcttgtttcagctcctcacttcttgactgtatttgtactatgttgaaaaaatatcctgtccacaaagacataagcctaacaacctagaaaaacaacagggtactactggcattacagaacttctttgcctttcaaaacaaaagcaaaacacagtgaacttcaccacggagctgcacagcgtggggaactcatccatcactttcaaaattagagtcatttgatccaagttggagtcagacacagtatttgagctgcacggcttctgggttctcccaccttatttgatcatattcgaaagattatttcctgtgtttgctttgatttgttcctcagtacattaaaatgatccacaccttgaacactgccctctctagaaggttgattttgatcagccttttgaagatgggtgtcgtttccctaacttatctcacagaattttgagtgttgtatttggcaagttctgagatttgccttctgtcttatgccaaacacccctttctaagagctgtccccgcttagttttagaagtactaggggttttcatacttattttatagaacacccatttatatttatttctgtatatagaactaaaaaaaacagtagtgttaaaaatctttgttgtggtttgagcatctttgctgcttttggattgagatggcgaatcaaggcttcacttcctctctcttctgtctttagaaagctgtgatcgtgcgtgcaattatttgaaaggcaacatagtcaattaagaaacctgtagttgttaaggaagaaattgttggcaagatatccatactgcccatatctcgttggtgcaataattaaatagcaaaggaaatctgtattggcaactattataattcaataattcttttgtttactgcccttttctgttcaagaattttctggaaattactccctttcacatggttgaactcttaagttgaccagttctcatagctctatcactagaatggtttgcagataccccaaacatactatgataaaatcaaattgtgctacttttgacccatgtaatttacctaaaagttgtaattgctgacagagtactgccttgaattttggtttaaaacctctctagtttcaatgacaagtaacaactcaaataattccatattgtttgaggaagaggccataatccttctgaattgttggcactaagtaatgggatttggcccagtaagtatgacggtcgtgtcgcctaaccaacgcagagcagtgctttttgtgtggctgaagcgatgtgctgacgaaaaaaggaaaattctaggacaatcgttggctaaaaatcaccttaggatgaaaaatttgaggcaaatttttttaaatgacagaaaaagataatcatctcacttgcttgaaacaggagccagcatgatctctggaagcatcaactatccctcgtcgtgattgttgaaagctctttcactgttttgcattctagtttgaatagtttgtattgaaattggattcctatcttgtgtatgtttttggtgcgtaaaagggaaaaattggtgtcattacttttgaaatttgcaggacgaagggcatgcttttggtttgctgtaagattgtattctgtatatatgttttcatgtaaataaatgaaaatctatatcagagttatattttaatttttattctaaatgaaaaaaaccctttttacttcaaaaaaattgtaagccacattgttaataaagtaaaaataaattctgaaaaaaaatctatgtcgggtgcggagaaagaggtaatgaaatggcaggaattcgatatcagct

SEQ ID NO: 4488 - protein, 9 aa, Homo sapien
MKWQEFDIS

SEQ ID NO: 4489 - DNA, 3387 bp, Homo sapien
cgccggccttggcctcccaaagtgctgggattacagacctggccagcctaaacgatttttaaaacaagttagagattttgggttagtcttgttttccaggaataaagtaccatttttagtggccaaggatgtaccagagggtgtggccctgtgacatccagctgggtctgcccagggccccgctcagcgaccgaggctttctaggatttatgctgccagttgcagagaaaatggccctgagtgagggcgttatgactgccccacctgcctcctgtaaccgcgtggctgtgggattcggggctgggaattcgggttcctgtggggccagcacacggccctgtgcttctccctcaggcggagagagggtgggggcagccccgtgcgtctcctgctctaggagggagggacggtgggggccggtgcgccagtgcggtgtctctgctgcaggtggctgggctgacgctgctggctgtcggggtctactcagccaagaatgcgacagccgtcactggccgcttcatcgaggctcggctggggaagccgtccctagtgagggagacgtcccgcatcacggtgctggaggcgctgcggcaccccatccaggtcagccggcggctcctcagtcgaccccaggacgtgctggagggtgttgtgcttagtgtaagtcggtgtgcctgggaccggggaggtgcagggaggggaccccggagctgggctgggctgtggcccttgctagcgctcgtggtggcgcccaggagcttttgggtcctgagatgcaactgcttggactgtgccggggatagataggctgcccacgagctgggcggcttcctgaggagcagagtccgcacccgggcattcccgcagcccctgtcaccgaggcttccgtgggtgcagagtgtctcccccaaacccccgtcttccccggcagcccagcctggaagcacgggtgcgcgacatcgccatagcaaccaggaacaccaagaagaaccggggcctgtacaggcacatcctgctgtatgggccaccaggcaccgggaagacgctgtttgccaagaaactcgccctgcactcaggcatggactacgccatcatgacaggcggggacgtggcccccatggggcgggaaggcgtgaccgccatgcacaagctctttgactgggccaataccagccggcgcgggaggagataagcaaggacctcagagccacactgaacgccttcctgtaccacatgggccaacacagcaacaagtgagggagcccctcgggtcctgagcccccgggcagggctgtgcagccgtcgcccttggttcccactgagggtccctggctcacagtgctgggcaccagctgtggcctcagtgtgcccacctcagatgtcccctgggaacggcccagctcgggacagcacggggtgtcattgaggaacatgcaggggcctcccgggcagagctggggtcagtcctgtcttcacggccctgtgcgccgccgccccagcttgcaggtccctctgcccctagatttctgcggtcctgtgcctgcaagggaggtggtctgattgctgccgcccagaggtccccagtagggtgaccggccctatgtccaggctccctcttccctcccaaatcccttaattttgagttttcttggtctcctgggcccctccagccccagtcacgtgtcacacggaggatcaagtcctgctggtcggccgtggctgactcttcaggcacgttgggctcctgggtcagctgctgccgttcgacgctccctggagccctgactcaggtccttcccagagaggcaaggctggggccctgctgagcctctgctgaacccgggcccccgaggtcctgcttctggctcgcatggccataatcttgacagggactctgggtcccgcatccctgctcccagcacagcggggctcaggtagcaggagggagtggtgttcccggcactgcctatcaggctgggcgagggtcagcggggaagtaccacacagggaaagaacagaggcccgagaagccgggcggggggcagctgggcgtggtggggcaggcaggcgggtgaccagggctgtggctgcgttctccccatgtttcctgtgctcacaagctgccgctttagattctcccaaaaagtctccccgagggggctgaggagcccccgttgccctcggggcatctcagctggcagccccagcgtttccttccccatccctgtcctacagattcatgctggtcctggccagcaatctgcctgagcagttcgactgtgccatcaacagccgcattgacgtgatggtccacttcgacctgccgcagcaggaggagcgggagcgcctggtgagactgcattttgacaactgtgttcttaagccggccacagaaggaaaacggtgagtgtcccgcctcacccggcccccaatccaggcaccatatggcatgggtgtaggccagctgcctgtcttccggcctccacctcatggtgtggggtccgcggccttggctgcctcacttgggaactccttccccaggcgcctgaagctggcccagtttgactacgggaggaagtgctcggaggtcgctcggctgacggagggcatgtcgggccgggagatcgctcagctggccgtgtcctggcaggccacggcatatgcctccaaggacggggtcctcactgaggccatgatggacgcctgtgtgcaagatgctgtccagcagtaccgacagaagatgcgctggctgaaggcggaggggcctgggcgcggggtcgagcaccccctatccggagtccaaggcgagaccctcacctcatggagcctggccacggacccctcctacccctgccttgccggcccctgcacatttaggatatgctcctggatggggactgggctgtgcccagggcctctgtcccccaggatgtcttgtggtggcggtcggccgttctgccccccagggcaccccctgttgtaggcactggctagggaggggcaggcctccttcctgcccctcgagacactcttgggagatgcattttccgtctggctcacagggggagggtgaggctttgtaccccagcccctgcccaggccactgtgagggtgggtgctggctgagcccctggggcagaaggagtggggcaggcggggtctttgttctcggctcccacagcagagccaggtgagggggggcctgccaggactagacagaagtggggcggcctgaaccctgcttccagccatggccaggggccacggaacccggcaggggtgtctgaggccgccctgtcagctggccggtccaagcctgtggctggagctggtgtgtgtttatctaataaagtcccacaggtgcctcgaaaaaaaaaaaaaaaaaaa

SEQ ID NO: 4490 - protein, 177 aa, Homo sapien
MGVGQLPVFRPPPHGVGSAALAASLGNSFPRRLKLAQFDYGRKCSEVARLTEGMSGREIAQLAVSWQATAYASKDGVLTEAMMDACVQDAVQQYRQKMRWLKAEGPGRGVEHPLSGVQGETLTSWSLATDPSYPCLAGPCTFRICSWMGTGLCPGPLSPRMSCGGGRPFCPPGHPLL

SEQ ID NO: 4491 - DNA, 6325 bp, Homo sapien
ctgggttgtcagtcagtgagaggagggggaagatggctcaccgggacccgttctgctaggaagaaggggagcaggtggtgctgctactcgggaggaagcagagcagcctccgtcgctgtcgctgagagcctcacgagtcgaggtcctgcaggtggagctccggcagccgccctgacattaccagaaacatctttaccaaattatgccacaaatttgaaagacaagagttctttagtttcatctctctataaagttatccaggagccacaaagtgagttgctagaacctgtctgtcaccagctctttgaattctatcgcagtggagaggggcagttgcttcaatttacgctgcaatttctcccagaactaatttggtgctaccttgcagtctcagccagcagaaatgtgcatagcagtggatgcattgaagctcttcttctaggggtttacaatttggaaatagttgacaaacagggacataccaaagtattgagttttacgattccatctttatccaaaccatctgtataccatgaaccttccagcattgggtccatggctctgactgagagtgcactatcccagcatggtttgtcaaaagtggtatacagtggacctcatcctcaaagggagatgctgacagcacagaatcggtttgaagtgttgacattccttttgttgtgttacaatgctgccttaacttacatgcccagtgtttctcttcagtcactgtgtcaaatttgttcaagaatctgtgtttgtggatatcctcgacaacatgtaagaaaatataaaggtataagtagcaggataccagtttcttcaggattcatggtgcaaatgttaacagggatttattttgccttttataatggagaatgggatctagctcaaaaagcactggatgatattatatacagagcccagctagaattatatccagagccattgctggttgctaatgcaataaaggcttcattgcctcatggtcccatgaaatctaataaggaaggtacaaggtgtattcaagttgaaatcacaccaacttcctctcgaatatcaagaaatgcagtaaccagcatgtcaataaggggtcataggtggaaaagacatgagcaacctgacaacaataatgatgctactgaattgggcatccttgtcattcctgagattagtgtcacaaatgtggccggagagagaaccgggaatggggaaaaaggcagaacactaggagagattgatgctcagcatatacagggtgtgcaggaaacagccacagatcctagaactgagagcaaaggcttgccagagatcaggaggcaaaaatctgtaagaaaaatgatggaggatggaataaactcacctggcagagtgcagttttagcagagcactttataactgcactccaaggaaatacagaattaacaggtcaagaagaactgatggagatatctgaagttgacgagggattttattccagggctgcgtctagtaccagccagtcgggtttatcaaacagtagtcacaattgtagtaacaagccaagtataggaaagaaccacagacggtcaggaggaagcaaaactggaggaaaagaaaaagaaactacaggggaatcttgcaaagatcactttgctcgaaaacaaactcagagagcccaaagtgagaatcttgagcttctctctttgaagagacttactttaacaaccagccaatccctacctaagcctagtagccatggtttggctaagaccgcagcgactgtatttagtaaatcctttgaacaagtcagtggtgtcacagtcccacataacccgtcatctgctgttggttgtggggctgggacagatgccaataggttttccgcttgtagtctccaagaagaaaagcttatttacgtttcagaaagaactgaacttccaatggagcatcaatcaggtcagcagagacctcctagtattagcattactctgtccacagattaattagtaacatatttttctcccataacctagtgaacctggaaatacaactttgcttctttatgaaagtaccctgggtctttcatccgtattcctgacaggagccctgatgtcttaaattctgaaggctcccctgactttatgaagggaagattgtctaggttgcagtaagttgaaatatggttttgttatttcttgattaagattttttccccttggtttgagtcttttttttccctcctcttatttgttattgttgccctaagattgtcagtgacaataaattttgacaggttgtctaatcaagttggttatgtctcatgtgaggttgtaaggtggtttttcttgttttggtttggtttggttttttaatagctcctattttgatggctgtgtgtttggccttcagagtcaaagggagtctgcatgtatgggaactgttttatagagaatggggcagaggcacaactccaggaattctctagctcctggtcaggaagccaatctgaaaacaggcatgtggaaacacaaaaatgatgtgtatgaaaagcacctgatgaaaatatttgtaagcagatcatctttatgattagaacaatttgctcaaagccctggaaaatgcctggtaacccagtgcctagaatattatatgattccaggggatggctagaggcatttctgttgttatctctgaaacatttttatatcaaaaatcagattgctggtaggtgtgttgttttgaagtgttttatctggatttagcatgtgaagatccctttcaattattaaggtataataggctgtaaagctgatttaccctactgctggactttggaaatcctagttagtttggactcctataattcagagcatacgtcattggaagacttcctggaaatcagtgtaaatcttgcaacatagctctcaagataccactgtataatatgtaattgtttgtctgcaaatgcatttttcatctataaaatgtcatgaaagaaaataaaggtagtgaaatatggacaaaggacatttatatattaactaaagttgtttatgtttgtgttcttaaatttaaaacacgaagaaaaagaaatgtctttcttgttagtgaacaggcctgttttaaatatcttagtatgatatcaaaagaataatcaatttagttacctcccaactaaaaagtaaaaatgaaaaagacgacatggcagaagttgaaacaaacttgtatgtatctgtatgtgacctctagatggaaataaaagtttgatgtttgctagccgtggtccttttggctatggttgcggttcccctgtaaagcaaatgtacttaagtcatcattcagagtgagagagagaaagcacggctgaggctgagtcagttgaccgttgaggaagacctaaggagctgtccagttcttggctctttttcactgtgactgcacagcggtttccttcttcatagtcccttgctgtagtcaccaagagagcatgctagtgttttcctcttgttcctgcttatgcagagctcagatatatgaaaaatttgtatgctttgaaggctgccaaagcatttatactctggacatagttttaactgcaactgctttggctaccagtttaaaccgagttcttcaaaaagcatgaactcgttttcattcattagccctgtttacaatgtggattttgacataaatgaatttgattttcttttagctccagtaacagaatggaataagatctattgccataaattgtagttaagaactgtaaggcaatcgggcagtgaaacttgatattgtattaacttaataggaaccctgtgtacaatttaaaatatttgtaaaatatcactgtgaatttacagatgtctttttgtcattctttaacaatgaatttcccctgtgcatagttattaatagtattggtattattaaaaactaatttggcattttaagattggcattttaagcaagttgaggtgcttaggaaacattgtagaataagtttggggaaatgttagctgacagagctgagagatcagattttcatgttctatcactgtaatggaacctcatttagacctctctagacctttgctagctgtgtggtctgaggaccagtaagtaggattggcattatctggtatcttgttaaaaatgcagaatttcatgccactctaggtctactaaatcagaatttgcattcttaacaaggttcccaagtgatttttatgagaagaaagtatcagagtgcaaacaaattactcgtctaatatgtagaattcccagtggtctcacagccctagatcaaatgtgtcagacactagatcattataatcttcattggttttgacagctaattaattagtttaataatattgacatatggcttcttaagtatttgaattctagattgctaatgatccttatttttgcagtaaaaaagtaacactttatatttttcttgttaactataaatggaatcagagctgtaaatgcctgaaattttaagtgtgaaaaggggtgccacccttttatatactgcacaacaaatttgcatttgtatattctttttaaaaaatctctgaagacttgctcagtgaaatggttctgattttttgcttcaaatgatttgcactaattgattttctggagagcggagttacgttaacaacaaaattcttttatagttcctttgatactatttcaaataaggattacacattgaaagtttttatagaaattatgaaaattggataatcttaactatggtaaccattactattatccatactactttctccccactgaactttcaaatttgaaaattggggtagcttttgtaggtcactttcttataaagatgctgatggtcacagatctcctaagtatccagaataatatttttatcatgagaaggattccacacaaaattggggtcttgcaccccatatttcagaggatctgaacagaaattgtggcttcattgcacattttaaatctctatagattcttgaaatcacccaacctctcacatttgaaaacccaacggcctggagtattctggtggcactggagccagcactagctttttggaatccaagtggggagagaaacaaaaatagacttttcaagggactgtcccagactacccagggcaaatgtcttcccttcccttcctgaagccacaggaaagcaccctggagtcctttgtataccactatggaaatttttaaggcaagctctcaagacttgaagagttggaattctcggcatttaaatgatgcctgaagtttgttttgaaaaagcaatatttcattgctcttttcaattgtgaagcaactgctcagcaaatattactcatttttttaaaaagttgaattaaagggaaatatatttttaaaaccaaaatagatcaaaatgatcccagttttaagggattttgcctattttggaagaataaaactaaaatgttaaaactgttgaattacagagaacagatgtactctgagacataattttaaacaaatatttaaaataaggcaggttaacatttgcgtttaggcacaataaatctgtattaaagggaagcacatcaaggaaatatatacatgttgaataatgtaactgaaaaatattttttaaaaaccacttaaaaagaaaaataatttgatgggtactttaagcattgtagatagaaattaatgtataatagtgtcctcccagtctttgtatgaaaaattaaaactctctagtcctttaatgagcatgaatttatacttctacatttgttgcttagtaaaattatactcagtactttgagttattcagatttatgtttaatattgttaaattcttcatcagagagcataaatatattgtcttctatactttgtaacttgtgcatatctaaagaaactaacaacgaacattttgggagatgtttttgtgtttttttatagtagagttttagagtacatttgtcttaataggaagtttttaccataaacccaagattttatttcacgtattgttgctttctcttatatggaacttattgtgtacctcttacctttatttctaatcatttagtgatactaatcttttcatagtaaatatatttgtttctaattgtattcctagagtttacattcctaaagaataaacgacgactttggctatttttgtgtgttccctaccttcttaaggctatggaaataaactggagtttagttttttgaatttttgtatatttgtgtaaatgttctccatatgtagtactttatacaacaagtgttgcctcttgttttattgaaataaaaactaaaaaaaaaaaaaaaaaaaa

SEQ ID NO: 4492 - protein, 660 aa, Homo sapien [sequence omitted]

SEQ ID NO: 4493 - DNA, 2847 bp, Homo sapien
ggaaattttttaacagagagaaacaaatagaaacatcttcaaatcttcctaagtgaatatttaaaatgcagaattgcttatcttctgtttttctgtattcagacacttatatctgttgtatatattagtttagacactctcactaatatacacagtatttaagactctaaatgagatttcttaagtattttattttattctctgtaaatggttttgtataatctttaaacatctacactttgcctttgtagatatttaagggaaaccatttggggttgtcttgcatgtatatttttgttgtagataagtgttgcttagttatttctgcaaattttggttgaaatgcttacagactttaatacagtatatattttcaaaatataaacttttatatttctgtgataagttaggatatgcgttttaggcaatatttttcattaatatcacttgttcttttgaaaaatagcatactggtttggtgccaattttttcattagaatataatgctcttatattgttggagagcaggttaatcttttttcgaagtaattgcgtttgaagtataatttcaaaatgtattgaatttgtgaataagccttaccattaggatcagtaaatttttcaactttgcaactacataagtagtttaagatctccccgtaaattctcactgtgtggcagttgatggagtttgtgaacagagccttaagcttgttgcaaaaaaatttaaaaagggtaatacgggttgtttcctccatgcaacgtaagccatgctgatggactgaatgcagtctgtaattcatggctaatccgaagagtttgattgagttgatggcggcagggaccagatagacaccttggtgattgtctttggccataagaatagaccaaggataggttttccagagacaccttcatactgtaaacatggtttagacacggtcatagggaaggctgctggtccatcatttgttctgaacaaatggcatttcctgctcctgaccctggcagttggccccagattccttgtcgatgacttggaaacgtccattctgggtaaggtcagcactccctgagagatgttaacaaagtttacctatgagtcttactgtgtagacaatctgaagtcaattttagttacacaatcagcattcccatgtgtcctcagtgtcttatcaatgaactatgtgtatcaagccatactaaactggagtttagcaggacaaaggcaaactaaatgtagaacataacatatcagctgaatatgtctatccaggactgtttttctagaacataaatcatggagctccttgacagtgtatccactgtttttggggtttaataaaaccaactagaatttagacttaaaaagaaattattattccttttggttgtccacataaagtagtccagggctatcatatggctaaaatcaagttatttggttcatctctggtatgtatttataaagtcaacttatcagccattaagatggagatttgctttaaatttttgcagtgtgtgtggcagtcagaaaaacccatatctagttttcaacttcacctctggtgtttttatggcttaaccttatatcattgatccaacatctagcctgatgctggagctcttatttctagcctgatgctggagctcttatatctagcctgatgctggagctcttgaagctgactcttggaagtttggagggtgtagagtttcccatctagtatttaatttgtccctgtgccattagtcccagcttgaagtcatttgccagtgtcgatgttgacaggattgtgacaatattgcctttcataaaaccgagaaccaaagaattccattattctaacaaagcctgagtttcatagattgtgggcacatctagacagatatgtgcatgcttgatggtgcagagaaactgctgacttccaccaacctcatgctccccctggctggccatacagagggattcgttgtcatattgaaaaggctctgaaagatgagtttctaattgaagctcactatctcaggttggtgtttctactgtgtagtcccaagcctgtatccatatcataaaagtggaggcctggtactcctccaggttatctggccagtgtagactcctccatctgaatatgaacctccagggtaagaatttttcagacatgtctatactgaacagtaggatcctgcactttccaaatgtctgcctccttttgttcttcattgacccattctaattcctgttaggtgtgagaagaattgtcttcagttctctctccattctcattcatgatggaatcattgatccattgaccagttgagaaatgattgatgctgaagaagtggtattctattggtaaggcttattaccaaacttccgataatgaagcaggctaccaaaaacttatccagcccaccctaggagtgtttggatttgatcatggatgtagcatacaccaaaatccaccgagacctttgcaaaattaggctacttgttttattttgccagattatcatgggagagtctttaactagttctgaatatttgtaagtctgagtacttcatagaattataaagaaggtacagctgaccccttctcaccatgttgtaaatatttactgagactgggtgcagtactgagggataataatcttctgatttatcaaatcctgactgtctagagcaaattgtacactctctttgtgaatggtcctgtaacgtgtatgaacacatttctgggtgccttagaagttgtatttttcatgtgtgctaatatgcagtatttatacattgtgagaagctgctttgaataaaaaggttgaaacttaaaaaacaaaaaaagg

SEQ ID NO: 4494 - protein, 17 aa, Homo sapien
KFFNREKQIETSSNLPK

SEQ ID NO: 4495 - DNA, 549 bp, Homo sapien
agtgacctcgggcggcgggtcacgtcggccgggcatggctgcatggagcccggccgcggcagcgcctctcctccgcgggatccgcgggcttccacttcaccatcggatgtttgccactcagactgagggggagctcagagtgacccaaattctcaaagaaaagtttccacgagctacagctataaaagtcactgacatttcaggaggttgtggggcgatgtatgaaattaaaattgaataagaagaatttaaggagaagagaactgtccagcagcaccagatggttaatcaggcactaaaagaagaaatcaaagagatgcatggattgcggatatttacctctgtccccaaacgctgaccacgccctggctgcatagatgctgctgcttaagaccttggatgaacttcactgacatcattcttccctaagcagtcaccaaaaaatttatatattttgctcatatacatttccatattataattatagaagatgtataatctatttagatgttaattaaaggaaacaaacaactgaaaaaaaaaaaaaaa

SEQ ID NO: 4496 - protein, 68 aa, Homo sapien
MAAWSPAAAAPLLRGIRGLPLHHRMFATQTEGELRVTQILKEKFPRATAIKVTDISGGCGAMYEIKIE

SEQ ID NO: 4497 - DNA, 4444 bp, Homo sapien
  Unsure 2267-2591: Unknown base
attctattcttcattcaggtcccccagagaaattggctccttatttttctttacctattcctagacttccttttgtctagagccagttttgcaaagggcacttttatccatctcagttattcccagaggtgacagaatgagtaaaccatatggggcaaatagcatatatgagctaaaccagttaactgttaaccaaggcacatggtcaatgccttagtatttttttttttaattctcctaacgttatttctagctgtacattcccaaaaggaatgggtggaagcaaatcagattctgaaaggtttcaatgatctttcaagtttaggatgagaccaagtctcaaggagctgggatcttctttctcttgtcagttgctgaagccagtagcttcgtcaaaaacatatgaattcatataaggaagccctttagatggtacattcactaagacgtgtctgggtgtgatcctgtttgggaaaaacagaatcctaggttctaaacaagaaaagaacgcccttcccaaagggtccgcacactttctgctttgcagcggatcaagtgtccttgtgagggtgagacttccttcaagggaagggaagccattgctctctctgtagatagagcccagctggtaacgggggagccacccaactgcaggggggtgtatgttcaggtgtgaaaaacagaaaactgggtctgaacatgaagagttgcacagcagtagttcgaagaagctggcatctctttggcaaacaccaacctcagcaaatgcaactcctacacttcattcccaaggaccaggtgttgctccttaaggaactctgtatccctctctcctctccagaaccccattcctcccactggctgagcttttcctttcctttccgggtcacccatagaccctctccgtctgtaccagtgcgtctgtgttgtgagcgtgacgaagcctttcctgtgaagagctttcatgaactcattctcatactccttccccatttccacccatggggtgactgttttgctattcaagactatctgtaaaaatgtacaaataaaagtgaaaactgaaaataaaggggagggagattgagattaaacaaatgcaatgatgtagcccttagttttctgaggacttctgtggacggccctaaaatcctgagttagggtgggatctgaagggagggataccattgacacaggaggtttttttctggttgtttctctcacagtcatcagtgtctgcttagaactctctgttctaaaggtttttccctgtaaagtagaatgcacttcccccaaaataaaagtaaatcagcaatgtttgaagggtcatggcaagggtcatgacaaagacctgactctggggtggcatgagtggccctgtcaccggctcactcagggccttgggggagtctcattacctcaccttgtctccacgtcttctcagccaaatggggatcaggggcttccagggctctgggggtgcgcagtccccttgtgtattttgctgctatttctagagagactttgagcccttgctagtgcgtgcttactgcatggaggtaaattaggagatgttttctctctgctactcctggcctctgctttcgcccctcagaaagtgaccttgagctagcagccagtttgcactcagagtccagagccttctatctaccgtttcattctcagattccttttcccacccactttgacgatctcattttactatcagtctctactgactgagctttgctgcactgggctggggtaggagaaagagcatccaaggagatgatgtgtgaattgctttgtaatttatgactcaccatataaatgtggcttgcagtgtcagaagcagggagtctggccaagggttgctaccaaataagactgaagatggtggaggcagtggtggcgtggaggcagtaggcagaagatgtgggttgggagcagaggtaagatgaacggagctttgggaaggacagatggcagaagcaccagaaaatcctcagcaaggcagcagagaaggatcctcaaagcagtaaccctgaagtaataggaagtaggaaagaggagcagggattaggtaaatctgcagcataaacagctgtctccctgcaggactgagaagaccagctgccccagagaggggaggcacgtcgagcttggccagtgacccaacccatgattagaggcaccttcaatcccaactttcctctcctctgctgggtcacagtgatggaaccagcttcaggaaggtagtatagacnnnnnnnnnnnnnnnnnnnnnnnnnnnnnnnnnnnnnnnnnnnnnnnnnnnnnnnnnnnnnnnnnnnnnnnnnnnnnnnnnnnnnnnnnnnnnnnnnnnnnnnnnnnnnnnnnnnnnnnnnnnnnnnnnnnnnnnnnnnnnnnnnnnnnnnnnnnnnnnnnnnnnnnnnnnnnnnnnnnnnnnnnnnnnnnnnnnnnnnnnnnnnnnnnnnnnnnnnnnnnnnnnnnnnnnnnnnnnnnnnnnnnnnnnnnnnnnnnnnnnnnnnnnnnnnnnnnnnnnnnnnnnnnnnnnnnnnnnnnnnnnnnnnnnnnnnnnnnnnnnnnnnacttaggttcttcattaggagactgatggggggggtccttcctggtgggtcactcactgccatagctcttgtcatagctgatgaaggcaggagtgagtcttattatgttggcctagagtagaaagcacagagctatgtcgaggctgctgtctcagcctctggaagttctgcttcacctgcttagtaagaggagatgaccactcctgtggactgcatgtcccatctgcccccagagggtgtcggcgctgccccagtcatgtcccttatgacctgtccaagtcctagaggccaaagcaggtcatattcttcagctgcaggaatgtcagctactgcctcccaccccttaacctgatccccttatcatatagtggggaaggggcaggcaggccttctctctgtcaagaacaaagatctctacaacatttcgtcacctgggccagtcacctgctaatatcatctcaccaatatttggagctgttttctgaatcccttaattttcttaaatatttatcttaaagtcaaatgctataaaggagataccctgggaagggcagtggccacaggcagactgggtctcctaggaggtggtggtgttggtgacaagttctacttggactgggactcaacccaccattgcctacctctcttccctgcctggagaccttccttaggattgaagaaacctcttttgtttgtgaaaaagataggtatcgagatcttaatggagagaacagaataaaatgcaaggagccaacccctgggtattctcaaagcatttcaacggtcagtataacaaggtttgattgatttaaaatataacattctgagccctgtgttactgagcaaaaatgagctgatttggtgagtatgttttatatatggtcattagacagggaccataactgacaaaactctcaaacgcctggagtgtttatggcccaccagattattgctcagtcaatataaatttatttacctttattttaatttgcatagtgctttctgattggtcagacaaggagtggtgtgtactgcaggattctaacaatgcctctgcccttggaggcagcaattcctgtggttattggtgctaaaataagataaaatattatgttaatttgttctgatatgatgtgaataaatgtgttgtttaatcttaacaagaatgctacatcttatcagatctattgtactgtctgttccttctcataattaattaattacaggaaaggcgattcaaaccagatcttgaaactattgtgatgttctgagaggtaaatttaacagggaagtgggaggggggatgaaaagggaaattgccaggttcctgtgactttgaaaggactgaggaagcagagagcatttggggacttcactgaaactgactgcatcttgcaattttctttttcgaattggcagaaatattgtatttccatcgattgaagaaaaacaagtgtctggtaattaattaaatgacttgtttaatcttaacaagaatgctacatcttatcagatctattgtactgtctgttccttctcataattaattaattacaggaaaggcgattcaaaccagatcttgaaactattgtgatgttctgagaggtaaatttaacagggaagtgggaggggggatgaaaagggaaattgccaggttcctgtgactttgaaaggactgaggaagcagagagcatttggggacttcactgaaactgactgcatcttgcaattttctttttcgaattggcagaaatattgtatttccatcgattgaagaaaaacaagtgtctggtaattaattacaatgacttgttcatggacaaaaataaataatctgtcagttgtggaatgta

SEQ ID NO: 4498 - protein, 112 aa, Homo sapien
  Unsure 2267-2591: Unknown amino acid
MKSCTAVVRRSWHLFGKHQPQQMQLLHFIPKDQVLLLKELCIPLSSPEPHSSHWLSFSFPFRVTHRPSPSVPVRLCCERDEAFPVKSFHELILILLPHFHPWGDCFAIQDYL

SEQ ID NO: 4499 - DNA, 1268 bp, Homo sapien
gtgagcggcaacatggcgtccaggtctaagcggcgtgccgtggaaagtggggttccgcagccgccggatcccccagtccagcgcgacgaggaagaggaaaaagaagtcgaaaatgaggatgaagacgatgatgacagtgacaaggaaaaggatgaagaggacgaggtcattgacgaggaagtgaatattgaatttgaagcttattccctatcagataatgattatgacggaattaagaaattactgcagcagctttttctaaaggctcctgtgaacactgcagaactaacagatctcttaattcaacagaaccatattgggagtgtgattaagcaaacggatgtttcagaagacagcaatgatgatatggatgaagatgaggtttttggtttcataagccttttaaatttaactgaaagaaagggtacccagtgtgttgaacaaattcaagagttggttctacgcttctgtgagaagaactgtgaaaagagcatggttgaacagctggacaagtttttaaatgacaccaccaagcctgtgggccttctcctaagtgaaagattcattaatgtccctccacagatcgctctgcccatgtaccagcagcttcagaaagaactggcgggggcacacagaaccaataagccatgtgggaagtgctacttttaccttctgattagtaagacatttgtggaagcaggaaaaaacaattccaaaaagaaacctagcaacaaaaagaaagctgcgttaatgtttgcaaatgcagaggaagaatttttctatgagaaggcaattctcaagttcaactactcagtgcaggaggagagcgacacttgtctgggaggcaaatggtcttttgatgacgtaccaatgacgcccttgcgaactgtgatgttaattccaggcgacaagatgaacgaaatcatggataaactgaaagaatatctatctgtctaacccatttccaatggacagtgatgggcttgtttttgtaaaattaccagaaaactcagtggagatttactgaaaaactcagactttattcagattaagttcctctacaaaaagtagggttctgtcccatgtgtctctgacacatttacaaaataccagttttttaaaattttggtcaaattatgagtggttgatttaaaaacttttccaagaagaagaaaagcatggagtcgtaatttaaagaactcaataaaaacttctattttttattttaaaataataccaaaaaaaaaaaaaaaaaaaaaaaaaaaaaa

SEQ ID NO: 4500 - protein, 314 aa, Homo sapien
MASRSKRRAVESGVPQPPDPPVQRDEEEEKEVENEDEDDDDSDKEKDEEDEVIDEEVNIEFEAYSLSDNDYDGIKKLLQQLFLKAPVNTAELTDLLIQQNHIGSVIKQTDVSEDSNDDMDEDEVFGFISLLNLTERKGTQCVEQIQELVLRFCEKNCEKSMVEQLDKFLNDTTKPVGLLLSERFINVPPQIALPMYQQLQKELAGAHRTNKPCGKCYFYLLISKTFVEAGKNNSKKKPSNKKKAALMFANAEEEFFYEKAILKFNYSVQEESDTCLGGKWSFDDVPMTPLRTVMLIPGDKMNEIMDKLKEYLSV

SEQ ID NO: 4501 - DNA, 2150 bp, Homo sapien
ttgttctcctcacagcaggttcaggagaagtggcacctggtggaggacctgtcgcgactgctgccggagccaggcccgagcgactctccgggccccaagtaccctgcctcccaagcttcgcgcccgcagtccttctgccccggatgcccatgccctggctccccgggccaccaggccccgcggccgggcccctccgtcgtggatgccgcgggactgcgttccccttgccctggacagcacggtgccccggcctccgcccgcagattccgcttccccagcggcgcggagctgtaaccccgacccctgcctccccgaagcctccctggggccccttcaggcctccttactccatcttccagacccctggcgaccaccgcccctctcagtggctccagggcctccctcagaggtccccaaagatggacacacaaccccaggggcagcaggaaaaacatatgggaattttctttctatattttaatctcatccctttaaaatgtctattttttattgtgttttttataatatacataatctattagtatagtatctcttgaatgcgattttttctagaatgtgttctgctgatttgttttagagccatgagtgcaatttatacacatacatctattgggaatgctcagaagttgtttactgatggaagtgccttcagaagagtccgggaaccacttcctaaggaaggaaagagctggccacagttagagcaagcctgcctggggccctgctctgtgttccagctgcaaactgcctgcatcatcccttcctgttactcttccttcacctgagacagtcgaggccacagcgtcagccagggccagagctgggatttgaacccaggcactcgggctccagagccacactgccccagtgtggggcttagtggcggctcctggccctgactgaggggctgactgaagcctggtgagagcgtgctgggtcagcctctccctggcgggaatcctctccgtccagtcttctaacctagcagcctcacgtccacagagctgccttgtgaaactcagcagagccctggcttcctgcagagccgtgttctcccagcctgcttcatggctccctggttgagccaagcttgcggatccgtggggtgaaggtacccgcaccgcctgggccttagtggtatgtacgggcctgcatcgtgagcagcgggcgggggcccaggcaggtgaggcagctggccacaagggcagggcccggcccccctcccaaggctgtgtctcatattcttgagcctgttcgagtttccttttccaagcctcctgttctcccacccccacccctgccatgctgcagtgactaaatctgtggttctcatccttggagaacacctgagtagctgctacaagctggccacagcccagcgactctgatgtggttgggctgggtgtggccagcagccagggcatcgggacttttcgaagctcccaggtgactcaccggcagctggggatgagaactgtcaggagggaaggtcagaagtcccaggatgcacttgaaaagcctctagctccaccagtgaccagctcctggctggactcctggtctggactcagcatcagggaggctctggcctctcgccctcagggctgggggcttcttcacatggtcatcaaagacttggccagttccgcctctcccgcggccgtccttgtctcacccagcatcacgacgcatcagttcaccaacaaacacgattcagtgctgctagtgctgggtcctgttctgggggctggtgatgaggccaagagggaaagagggagctctgtgttccatcgagggggcgacaagcctggaccagatgaaagtgactcatgttgttaattagcggcttagggccaaaggtggcccctggaccagtggcctcagcatcacctgggaaaaggttagaaatgaacattcccaggccccacctcagcctcctgaatcagagcatccctttggcaaaccatactgagaaacaaccacgtgcatcaccaagcgctgtgaagaaggcaagctttgagaccttgaaggaatcatcaaactctgggcctcggtgtgctcacccagggcgagacaaagacgccatgctcctccaagtggcctccaagattaaatgagcaatgactttt

SEQ ID NO: 4502 - protein, 132 aa, Homo sapien [sequence omitted]

SEQ ID NO: 4503 - DNA, 3106 bp, Homo sapien
ctgctgttcacaggacatgccattatgtctttccagtacggatcacagtgctgccatatcacagaccctgccagccggcacagaaccatgcctcgtcacagctctgcccaactcacaggctgccaagatgaggccacaggtccacctagggcggcagatgctggtgctatttgtcacgacttttgccaaaacatgtacactgttgctcacatctttcgtaagaatggttgacactaaggggccatggaaaagcacttttaaaaaattatgtggtggaatcaaactcacagaggcagaaatgttagtgccgtgctctaaccaagtaagcttagtgttccccacagtgatctgtatctggcctgagtctcctcaagcagcaacccccactgtccagcatgtggaaggtagatccttatgacaacaccagacccatagttaccaggaaagaaaaaggaagctgagtgttgtgaaggggaagaaatcctttttataagaagtaatcatttttaggccgggtgcagtggctcatgcctgtaatcccagcactttgggaggctgagacaggtggatcacttgaggtcaggagtttgagacctgcctggccaacatgatgaaaccctgtctctactaaaaatgcaaaaaaaattagccaggcatggtggcatgtgcctgtagtcccaactactcaggaggctgaggcaggagaatcacttgaacctgggaggcagaggttgcaatgagctgagatcgcaacactgcactccagcctgggcgacagagcaagactccatctcaaaaacaaaaacaaaaaaaaaacctttttaaagtaaattgagtgtaaaatgttttcaccatgaagccattgcaccctctcccccaggaaacagtgcctaaggatgatgtcaagttacagccagtttgctctgatcccccaggacctaagaaaactgtgagtgcttcagcatgcaaaggtagagctaccagataaggagaataacttggccatttatagcaaactgcctgactttggagtgagaaaccaagcaccttctaggtcctaggataggtgaattggaggtgcagctgctgaagttcccattttctacatacttcaggagccagggtgtttcatttggttttgtaaaactttgctgtaagtcatcacagttaattcttcgaatggacattttagagtgtaactttttttcaaaattagcagaacagatatctctgctcattctctttatacatttagttttttaaagttcccctagtatacctgttaggcactctaaataggacacagttaaagctaaaagaaggaccagttgctccctagagcctacagttcagaactatcttgttgtcatgtcctggtttggtttggtttgtttttaactcaacaagttggaaaccatgagtttaaagcaaactatttccttttcttaagcttaaagagaatttttttttaatctttagctcctcatttaggtagtgaaggcttccctgaaagacagcagtgcccttctctggaagaagaggctgggaccaaaagcctgagtctatgggttgaggattttgagcattcctttgacaagcttctatgtatttttaatataagactcataaatgaacctgatgtggtgttcatgacccatcccttaagcatgcttgctttttttactttactttttgagtatagtacttgtcttgtttttcctggagccatgctaggatttaattcctatgtgccactacccgcccatgtcctggaagatggccatgcctgcagcaatgctcatgtcttgaggagaagcaatgtgaaaagcatcaggaaagctgaaccttacgttcaagtcagcaaacatttgtgagcattctagtatgcttgcgaccttgacactttttaaaaattatctttttatttgcttcgagtatcaaccgtatagttgactctagtggggcgaagggagcagagatgagagcaaaattcagacttgctgcccctgtgtgtctcagttctcatgtctctctgagaaatgtgttggcccaattccctatctgccactctgagtctcttgagtaaatgtgtgtaaatgagaaaaattatctcaaagatttaacttattatttagatattttcttctttttaaactcaggaataaacctggtttgtagataatataatatggctactagagctataattgagtaggtgactagaagcattttttcaaatatatttcttgtaaagacatctactttgttttaactaggaaaagaaactcctcatattaaaataaacatttccataagcactttctagaagagtgtagcatccatctaccatccatcccagaatgtttgtatcttgctcatagtatttcaaaaatttttatgggtgaaaaaaatgcacttttttatttattggaaaagtgtagagttattgaattaaattctcaagtgggacaatttagtgtaaagggaaacatgggttttggagacaagagcacagggctgtggtccctgttccagcattgactttactatgtgacctcgagcaaatgatttaacttctctgtgcctcagtttctccatatacaaaatggggataatgatactaaccattgcctacctcatagagatgttatggggacaaacgaaataatagagataagcacgaatgctttcaactcttcggaagaaaggtgctatataaattgaagttgtgtttttaatgatccaattattaattatgtttagggtttaaataacaatactgttagtcatgttaagaataagttttgttttgatgcatatttccacttctcttctgtggccagatcttgatcattcaaccagtaatggtacctgaggaactgaaatgggtatttgttttcgtatgtttctgccagtagtatttcaattgaatatccagaaaagactggagtttaacttgtaatatcttatagtttacatgtaataaaacttattcaagctatatataaaagtatgattacatgtaaatagcaggtatgttgtaattaaaggcacttatcaaattgtctttgttcttttttaattgtaataaaagtcagttttacat

SEQ ID NO: 4504 - protein, 133 aa, Homo sapien
MPLCLSSTDHSAAISQTLPAGTEPCLVTALPNSQAAKMRPQVHLGRQMLVLFVTTFAKTCTLLLTSFVRMVDTKGPWKSTFKKLCGGIKLTEAEMLVPCSNQVSLVFPTVICIWPESPQAATPTVQHVEGRSL

SEQ ID NO: 4505 - DNA, 1495 bp, Homo sapien
ggggtgtctagaggatcccaatcagtttgaacaagaattcacccaactttcaagatgccttttcaaaaggatcttgtagtcagttggtatgtacagacaattggcatggaagtggtaggatataaatcggatgacgcctggctgctgaggtgccagctggatcagctggtgcacttcttgtttcttgtaagaggtttctttaaaatgactagtttgatgtatctggtaacatataggcctgactatacattttacattatttcgctattttgtaaactgggattttagaaagcacgtttgccattttgttaaagtacattgccccttaaattttggagtagtttttaaaagtttaaaatggtaatagaggagccagaaactttttaagcattgtaaaatgttttgaattgatattgactttgtttggaagagagtagaggcagggggctttaaagaaacaaagaaatgcattgtaaaaatgtagttttagagcaaattaataatgatggtggggaaagtgttgctaatttgtttatttccctggaagaaatgggaagtgtgataagcagtttaatttttaaggagctggtctcaattttagtactttttaattatgcaaataaatcaatgtttccttaaattttgtcattgctttgtcacagttgtctagggttcatatccaaccttctgtggcaattcaattttatatagtcttttaagaggtaattgtaatgtatttctgacagtataaacaaaaagaatataaggcatagaagaattgtcctctaaaaatatcaatgatgtatcctggaatgtgaagatgtccctttatagttaaaaattgaattattttaatattgtaccattgttagaccttgaatgagtccatgttaccgtgtgtgtctgtatatctatctgtagagaaagaaaaatgacaactgaaatgttacttttaaaaatcagaataaattgggcactgtctgtgttgcaccactactgtatcttttcgaaagaattaacagtatttgcctattgtaaaggttaattctgatgacgttttcacattcaccagactttttttcctgtattatttgcatccccaaatatttaatacaagtagattctgcatggcttgggcattcagagattaatagaatgatgactcaattttaattctaaagccatgaaaagttactttgagactgaacaattctgaattatttatgatacccaatgtccatgtttctttccctactgtaaaagaattgatcagtttcttcattaaagcagcaaaaacttattaaatcttgtaaataccatgtctcttttagatttctgtgtatgctgtgaatgaaatcattttgagatgaaattgtacaaaggcattttaaaaggctctgcatgcatcgtacctccaaacagtacatattcggaaagtcaaagattcctgcaaaataaataaactaaaagcaaacaccaaaaaaaaaaaaaaggg

SEQ ID NO: 4506 - protein, 25 aa, Homo sapien
GCLEDPNQFEQEFTQLSRCLFKRIL

SEQ ID NO: 4507 - DNA, 2546 bp, Homo sapien
gtgaggaggaagctcgcgctgctcttcgccatgctctgcgtctggctctatatgttcctgtactcgtgcgccggctcctgcgccgccgcgccggggctgctgctcctgggctctgggtcccgcgccgcacacgacccgccagccctggccacagctccggacgggacgccccccaggctgccgttccgggcgccgccagccaccccactggcttcaggcaaggagatggccgagggcgctgcgagcccggaggagcagagtcccgaggtgccggactccccaagccccatctccagctttttcagtgggtctgggagcaagcagctgccgcaggccatcatcatcggcgtgaagaagggcggcacgcgggcgctgctggagtttctgcgcgtgcaccccgacgtgcgcgccgtgggcgccgagccccatttcttcgatcgcagctacgacaagggcctcgcttggtaccgggacctgatgcccagaaccctggacgggcagatcaccatggagaagacgcccagttacttcgtcacgcgggaggcccccgcgcgcatctcggccatgtccaaggacaccaagctcatcgtggtggtgcgggacccggtgaccagggccatctcggactacacgcagacgctgtccaagcggcccgacatccccaccttcgagagcttgacgttcaaaaacaggacagcgggcctcatcgacacgtcgtggagcgccatccagatcggcatctacgccaagcacctggagcactggctgcgccacttccccatccgccagatgctcttcgtgagcggcgagcggctcatcagcgacccggccggggagctgggccgcgtgcaagacttcctgggcctcaagaggatcatcacggacaagcacttctacttcaacaagaccaagggcttcccctgcctgaagaaggcggagggcagcagccggccccattgcctgggcaagaccaagggcaggacccatcctgagatcgaccgcgaggtggtccgcaggctgcgcgagttctaccggcctttcaacctcaagttctaccagatgaccgggcacgactttggctgggattgagcagacccgggctatgtaccttacccacgtggcttatctattgacagagattatatcataacatggcttgaagtaaaaggcagtatccaagtccttcacctggtcttgccctgtctactttctgatcattctgatggtctgatgtggctgttgatgtggaactgcagaagagttcagagaagagtatgcaacaaagccataggaaaacacacaggagcttttccctccccttcaggtccccgccctctttccaagctggacaattttttattaagttgtttattccctgccttaaaactgaaacaggaaattttctggtagaaggagggtcatttagtcacgaacactgaagtgggtcaaaattctattctgggtcaaatccttgaattcaaacagatgtccataatcagtactgatggaatagagcaagtttttctatgtaagacaaataaatcaaacatcatgtgcatctcctcataagggtctgcaagggtctgatggtttaaagttcctaacagatctggttgcagcatctgccggagcttgcaccccatcatcggacggtcatcttcctgctgcagaagttaggtaacataagacttagatttcttcctgttctagcaatctgcaagaccaccaggcttaactttttagctgccagaagacaaacccccttttctgtttcggcaatttgtcctggcacgtgttttggacttcctccgatttacacgaaaagctctgatattcattggagtactttattttttttcctcagttttgtttcttttctcatgtaaaaacaaacaaaaaggtcaacaaaaaaaaattgaggtttttcttgtttctatctagttcatgctttctttgcggtgtttgaacagtagtctgttaacttagtaggtggtacctggaaaggtattttaagtatagtgactgtttaataaatacttaattggatgatggaggaggagaaattgttttcttcccaggattctctttgggggtcattttgtgtgacagatatattttagacatttggagaaacagtttcagatcctgccaggatatttttgtaaaaaaggaaaatggaagattccaataaactagaaacagtacgtatctaagatgctgacacagaagctaatgtgacttttcagcttatcaagaggatggccaataaaacttaaaggtgtggttagatgttttctcacttttgtgacattaatttatcactgagtctcattcaaccaagtaatctaaaatactgtgcaaattctagcagtatgtcttcgataacttggatgttaggatagccaatatgtacaaaaaattaaatcaagtattttgtcctatgtataacacaaattaattttacacagagaaagatgtttctaggcaagtgaaattctggtaattcatactatttctttgtatgaacaaataaaatatattttgcc

SEQ ID NO: 4508 - protein, 352 aa, Homo sapien
MLCVWLYMFLYSCAGSCAAAPGLLLLGSGSRAAHDPPALATAPDGTPPRLPFRAPPATPLASGKEMAEGAASPEEQSPEVPDSPSPISSFFSGSGSKQLPQAIIIGVKKGGTRALLEFLRVHPDVRAVGAEPHFFDRSYDKGLAWYRDLMPRTLDGQITMEKTPSYFVTREAPARISAMSKDTKLIVVVRDPVTRAISDYTQTLSKRPDIPTFESLTFKNRTAGLIDTSWSAIQIGIYAKHLEHWLRHFPIRQMLFVSGERLISDPAGELGRVQDFLGLKRIITDKHFYFNKTKGFPCLKKAEGSSRPHCLGKTKGRTHPEIDREVVRRLREFYRPFNLKFYQMTGHDFGWD

SEQ ID NO: 4509 - DNA, 1174 bp, Homo sapien
agcggtgtccgtgtccctgagttaagaatggtttttaggcttgtataggattaaaaaaaaaaaaaaaacccacagaaaaatgtaggcagcccagcataagataccgcctttcacagaaatgtttgctgaccccggaactgtcactctcgggttacaagagtttgtttctttgaaacagtctggctctgtcacccaggctggagtgcagtggcatgatctcgggtcactgcagcctccacctcccgggttcaagcaattctgcctcagcctcctgagtagctgggattacaggtgtgcaccaccacagacagctaattttacaggtgtacaccaccacacccaagaatcgtttgaacccgggaggtgggggttgcagtgagccgcgatcatagcactgtactccagtctgggtgacacactgtctgaaaaataaaagtttagttctaggtacaaattaagtggtctacccaacaggaagctgtgaaattagaagtaattttaaagcatactttacacctctatataatcaaagtaagggcaagataaaacttgttagtaaaacatgttttattattttttagataggtagcctgcaacataaaatatattttgaaagctgttaaggggtgtataatctgttaaaaaataccatgattagtatttcacatttagtgactcagatccctttgtgtaagtcctttgcgttgtgcaaagaggtttttctatgagatgagaattatgaacacttcatataggtaaattccataggttgagctggggcagaaattaatggctcctggagattgcatcttttttttttttttttttgagcttagaattcccatttggacagaatttagcttttgtgctgttgattacttctgtactaaactggtagccaattgttcacttctaaatggaagggaaaaagttacccacacaagttagaaaatgatttaccgaattatttttttgagttagtatgtatatactgttttaaatcagtaatgtttgttccttttgctgcccatttgggagtatgtggcaattcctagtgctcttgtatgacattactcttcttgagacttgtatatgcaagaaagtatatataaaagatgcctggtggtaaaaaaaaaaaaaaaaaaaaaaaaaaaaaagaaaaaaaaaaaaaaaa

SEQ ID NO: 4510 - protein, 86 aa, Homo sapien
MFADPGTVTLGLQEFVSLKQSGSVTQAGVQWHDLGSLQPPPPGFKQFCLSLLSSWDYRCAPPQTANFTGVHHHTQESFEPGRWGLQ

SEQ ID NO: 4511 - DNA, 3233 bp, Homo sapien
agagtttgcgccggttcgcattccccggcctcccgttcgctcccccgcgaaccaggcggccgtgcgcctctcggggcaaccacccaagagcacccgggcgggaggacgccgagcagggggtgttgcgggctgggacaggggcagccacctcccgaagatgcaggatggcagcagagccgcagccgtccagcctttcctaccgcaccacgggctccacctacctgcacccgctcagcgagctcctgggcatcccgctggaccaggtgaattttgtggtatgccagcttgttgctctgtttgctgctttctggtttcgcatctacttacgtcctggtacaaccagctctgatgtccggcatgcggttgccaccatttttggcatctattttgtcatcttttgtttcggctggtactctgtgcatctttttgtgctggtgttaatgtgctatgcaatcatggtcactgctagtgtatccaatattcacagatattccttttttgtagcaatgggatatcttacaatatgccacatcagccgaatatacatcttccactatggaattctcactacggatttttctgggcctctgatgattgtcactcagaagatcacaaccttggcattccaggttcatgatggattaggtcgaagagctgaagacctttctgctgaacaacatcgacttgctatcaaagtgaaaccctcttttttggaatacttaagttaccttctcaatttcatgagtgtcatagctggtccttgtaacaatttcaaggactacatagccttcattgaggggaagcatatacacatgaagttgctggaggtgaactggaagcgaaaaggtttccacagcttgccagaaccttctcccacaggagctgtgatacacaagttgggcatcaccttggtgtctctccttttgtttttgacgctaacgaagacctttcctgtcacctgccttgtggatgactggtttgtccataaagcaagctttccggctcgactctgctacttatatgttgtcatgcaagcctcaaagcccaagtattactttgcatggacattagctgatgcagtgaataacgcagctggctttgggttcagcggagtggataagaatgggaatttctgttgggatctgctttcgaacctaaacatctggaaaattgagactgccacaagtttcaaaatgtacttggaaaactggaatattcagacagctacttggctaaagtgtgtgtgctatcagcgggttcatggtaccccacggtgctaaccttcatcctgtctgctttgtggcatggtgtctaccctggatactattttaccttcttaactggaattcttgtcacattagcagctagagcggtcaggaacaactacagacattacttcctttcttcaagagctctcaaggctgtgtatgatgcaggcacctgggccgtcactcagctggctgtctcttacacggtagcaccctttgtgatgttggcagttgaaccgaccatcagcttatacaagtccatgtacttttatttgcacatcataagtctcctgataatactatttctgccaatgaaaccacaagctcatacgcaaaggcggcctcagactctgaactctattaataagagaaaaacagattgatacctccaagagaagcggaacaagcaaaactgcagaacgttcgaaagatgagatgacaaggcttcaagggctcctccggtggcttagaggcgatgtttacatgcatctttattttgttcttttttaaagtgcagggagtattttttttttttttttttttttttttttgagacggagtctcgctctgtcgcccaggctggagtgcagtggcgggatctcggctcactgcaagctccgcctcccgggttcacgccattctcctgcctcagcctcccaagtagctgggactacaggcgcccgccactacgcccggctaattttttgtatttttagtagagacggggtttcaccgttttagccgggatggtctcgatctcctgacctcgtgatccgcccgcctcggcctcccaaagtgctgggattacaggcgtgagccaccgcgcccggccgggagtatttttataaagcctttttgtacagattaatcggccatgtccaggttattggttttgatattttataggacatttgagtggtgtggcgatgtgtagagaatgtgccagagctgcagagacagtccattctgggctgctggctttttgcccttcctgcatgatttccagctactgtgacctggatgctgggaacccaggcatcggctccaaaaattagaaggcgagtgctgagaagacttgtcacaggtttctcaaatcagaatatactcagtcatagtggttccctgggaagccccagaccctttgacttgtgacattactggtttgcagacataataactacactcagaggaccatggaggcagagggatcatggtttcagggcactgaaaactctacgagccaagaggactagtgcatggactgaaagtcaggcatgccctcaaataggctgtattttctttccaggaatgtaacctttcccctttttcttctgacctgagccaagattggaaatcagaaagtctcctgtacatggagctgaagaggggctgctgttttccgaatgttttccatttcacaggcgccacctgcttgcccggggttggtcttgagaagacacccaaatgttcatgcctcagaaaggcagcagaatgccttttaggaaatttttttaaagtaatttgaagttatatagaagtttggtaagaagaagcagttgtttctctcttttctccctcatttcatggaggtgttaatgatcatggctggccgtgatgtacacatgggctgattttcattttttcagtttcatagctgagaaattcagctttgttttagttgaatcatcatattggaaagcagacattgaaagttttcttttctatctttgttatgaatgtgctatggccccttttggagacttctattgggtaatattctatgtgagagaaggaaacttggtattaaatgttgtggaaaataataatgatgataataataaagtatatgctgcaatggtgtactgccaatcagattgcttgggagaagaaaatttattcaaatccaacgataaaaaattaatttcttattgaataaacagtatgttcccaaaaaaaaaaaaaaaa

SEQ ID NO: 4512 - protein, 371 aa, Homo sapien
MAAEPQPSSLSYRTTGSTYLHPLSELLGIPLDQVNFVVCQLVALFAAFWFRIYLRPGTTSSDVRHAVATIFGIYFVIFCFGWYSVHLFVLVLMCYAIMVTASVSNIHRYSFFVAMGYLTICHISRIYIFHYGILTTDFSGPLMIVTQKITTLAFQVHDGLGRRAEDLSAEQHRLAIKVKPSFLEYLSYLLNFMSVIAGPCNNFKDYIAFIEGKHIHMKLLEVNWKRKGFHSLPEPSPTGAVIHKLGITLVSLLLFLTLTKTFPVTCLVDDWFVHKASFPARLCYLYVVMQASKPKYYFAWTLADAVNNAAGFGFSGVDKNGNFCWDLLSNLNIWKIETATSFKMYLENWNIQTATWLKCVCYQRVHGTPRC

SEQ ID NO: 4513 - DNA, 2318 bp, Homo sapien
ttcaccattgctgtttttctggtgagacatgtggaaaggaaggacaggtggacttttcaactaactagctctctgatttttaataagatacctcagttctttggcctcagtttacttatctgtacaaagagtaagtcatatgcttaatcactaagatctgttagatactgcagttaagattctttatcagcaaattactgaactctagtgttaacatagctagaggtggaaaagggagcaagaccaggtgttgggatgaataattaactaatcgagataacatcagttttcaccataggaacaagtaccatggttgctcttaaagtaagagatgtttcctattttatgtaattttactaagggataatgttttcttttgtcactgatttaaatgtacctggatgtttctcagccatttggctaagatcgaacacaagtaatacctgggccttttatatctaatctaatgtagaccagcctgttaaaagagaaagacaattggttaaactgctgatgtgttgctttgtcttctcaaaagcttgttctataatacaatatgtaaaaagttgttacagtgtagtaactgtagataatccctttatgatttgtacctaatggcgaagaccttttattttctgaaaataacgtgtttgttttcattaccaacattagaagccaatatttattaatctatttctcatcctgacatttcagtcagactcttaaaataatcttgctgtgttttgatttaatgtgcttatcaacttataatattgaattaatgttaatagtgtcattttaggtgaactagacttcattgaaggaggtgggagccttatggagagagagtatatgattatctctatttgtatttaattaccatttcatctaaccattcagaacatatttcaagaataattttaattcaagttgtaggtaaaacttactataccattttcattttgacgctttccaagaatgagatacacggtattttaaagacaaagattgatcttacatgttactattaaaaaaaacacgataattttgttctacatttatacttttaatttttctgtggataataagaaatgccaagagtcgattgtgtccatgctggcaagtggcctaataaattgtccttttatttggtggtcctcagagtggcagttaacatcttgctattctgccttgtggacttgaggtggaaaggttcatggaattatatccttgcttttggatgtgcaaactgaaggctcagagagtttaagacacatagtcactttcaccaattaaatgatgaagctgccatgtaaacgtatttcatcacactcccgagaccttcttctccagtagtgttttcaagctttttgagcatgcagacactaccatcaaaaaattatgtagagacatacttgagagttacagtttaaagaaaaacaaggtgtaattatttggttattagtagcatttacatatgcttgaaaacttctgctatatatacagtaagattaatttattctaacaatgatcttgataatccccctgattcccagactccttggaatagctccacagctatcagtggttctgccacaggttcagagccttcccagtactgccttcttatttgagaggtgtgctaagagctataaagcagaggcttcaattgtacacagtttggaagtttaggcaaaagtcatttcttccctatattttgtcatgcttatctcctgtctctttctgttttacagattagcaataaactccttaaaacccaaaggtttgggcttctgttcctttcacttgcagtcagacatggagttagtggtagaaggaacagaaggggtaacctgcatggtgacagctactgaggggatggataggaaagcaggctgagtccctggggccagtggttaccaaagccaaggagagagcaaggggagcccagtgggcctggccatggactgctctggaattccgagtgtgaactttcagccaggaatgtattgtgaaaatattactgtgaggttttaaaagtacacaaataacaattgttttttgtaaaaaggaaaaaaaaaagttagaaaaagagatatgccaaaaagaagaaagtaaaaaatacatgacttctgtcttctgttaacatattaaaatttattcttttagatttttatgtgtctatatacatgtaaaatatatatgcatcccccaaattgtattatactcttttgagacctcacatttttttcacccaagaatataacattaatttctttcctttagaaaagacatgagactaaagaatgtttattgag

SEQ ID NO: 4514 - protein, 48 aa, Homo sapien
FTIAVFLVRHVERKDRWTFQLTSSLIFNKIPQFFGLSLLICTKSKSYA

SEQ ID NO: 4515 - DNA, 2253 bp, Homo sapien
ctcaaaaacagtcattcctatgaattgaggtgtacaaagtttgaatttgtatcaaagatgtaattattatttttaaaaccttttcactatactgctgctgtaattactttgatttttaaaatgtagattaattttttttttttggcttcaggtgtgtatccaccaagaatttcaaatttatgtggatttattttattggtacataatctgtaaacttcttaaggcattaacatgaaaagtttttttctttttattttatattgtggctcaggttatattttgaagatgttttgagtttatcctccaataggcaatgaagttgacaaggttttatgaaggaataaccaagtccctggagtcctgtggctgttgccacagtaatgcgtcctgctgtaaacaggacaggtgtgtcctgttgagaatgtgagcgggctcttccagcctcctggtccctcctgactctgccacgcccctcacctcactggcacttcgataactgactggacgtgttaatgggtcttttagggttctaaagggtgaaccacacttttaaagccccggctgtggttcggagggttagtgctgtatgccttttatttccctttccctttgaggtactgaaaggatgaaaaggtggtgtcatgttttggggagaatcttacttctcaaatggaaattgcactttttgctgaatcctttgcatttttttggtagtaagcagttcattgagtatcaggtcctcaaaggaatgagttggcccggctagggtgggccctcttgacctaacttcagagggggccttggctcagtaggtgtgaatcagggaagccacattgtcctcagggtgctgtatgaagctgggtgtgggcggattcctcccacaccttcacactggcctgcctccaactcatacagatctcggagcggtcggtacttcattcataggtccctgttcaggcagcagttctgtgggctgtggccctctcccctccaatatgtccgaaaccattgtgatgggtggcaaatcccagggagctcctaagccctgctctgcccacatcactgccacagagaagtcagaggaagggacttgttgctaaaaaatcctttaaaaggttaaatactttaaaagattaaagcaacataactgtaaacatatcgtataaaaatgaaaaacacaggaaccctcttcccttccgcctggtgtgggcttgggaaatgggcaagcggccccagcaatcatgggaggaactcttgcgggggagcggtctgggattccaaatgggcaggtcacacgaaggtcacgatgcttctctgcatcctgaaaagggctggggacagggccagtgggggtggtaagggtatttatagcacagtgcttgaaaagggaagattaatgtgtaaatataaaggacacacaggctgggggttggtcagaggcaagaggagggtgcctctgagcttcaacccctcccaggaacaatgagctcaaattggaagagtccagtggaatcggggggatggtgtgagcgcccctgttcagtctttgacaattgcatacagaaaagcagctggtatgggtttgggtgtcaatgaaagggccaaagactggtggccagctggtttgggggatttgggccattgatagcatctcccaggaacaacgactttttgcctccaaagttggatctagtgatgatcagcaccagcaggaaatgacatttggtgtctgcccactgcagccatactgtgacctccagccagacttccgcctaattgactccactggatttgtgctctgttgagtcagaggctcccgggggttggggatcgaggggcgggggtcagctatgcagcccatcacgtgtgtttttcatctgggatgaaaaagcctggttctcttttgaaatgcttgattgtacttattgagctaaacaagtcttggtgactgttgttgatttgcctcaaaagttttaagtcctgggttttcagactactgtgtagcagctgtgtgtttaacatactgtagctttttctcccttgggggcacatacaaataggatgtgttgatgtggactctaaactgtaattttcctgtaactattttggaatgatgcatatttctaatgtttgttatacttgtacagagtattgctgttggttgctttttttttttttaaggaaaaaatggcctgaaaacatttttttaaagacttacaaataccaaatataaaaaaatgtcaatgcaaaaaa

SEQ ID NO: 4516 - protein, 105 aa, Homo sapien [sequence omitted]

SEQ ID NO: 4517 - DNA, 3132 bp, Homo sapien
ccgcagaacttggggagccgccgccgccatccgccgccgcagccagcttccgccgccgcaggaccggcccctgccccagcctccgcagccgcggcgcgtccacgcccgcccgcgcccagggcgagtcggggtcgccgcctgcacgcttctcagtgttccccgcgccccgcatgtaacccggccaggcccccgcaacggtgtcccctgcagctccagccccgggctgcacccccccgccccgacaccagctctccagcctgctcgtccaggatggccgcggccaaggccgagatgcagctgatgtccccgctgcagatctctgacccgttcggatcctttcctcactcgcccaccatggacaactaccctaagctggaggagatgatgctgctgagcaacggggctccccagttcctcggcgccgccggggccccagagggcagcggcagcaacagcagcagcagcagcagcgggggcggtggaggcggcgggggcggcagcaacagcagcagcagcagcagcaccttcaaccctcaggcggacacgggcgagcagccctacgagcacctgaccgcagagtcttttcctgacatctctctgaacaacgagaaggtgctggtggagaccagttaccccagccaaaccactcgactgccccccatcacctatactggccgcttttccctggagcctgcacccaacagtggcaacaccttgtggcccgagcccctcttcagcttggtcagtggcctagtgagcatgaccaacccaccggcctcctcgtcctcagcaccatctccagcggcctcctccgcctccgcctcccagagcccacccctgagctgcgcagtgccatccaacgacagcagtcccatttactcagcggcacccaccttccccacgccgaacactgacattttccctgagccacaaagccaggccttcccgggctcggcagggacagcgctccagtacccgcctcctgcctaccctgccgccaagggtggcttccaggttcccatgatccccgactacctgtttccacagcagcagggggatctgggcctgggcaccccagaccagaagcccttccagggcctggagagccgcacccagcagccttcgctaacccctctgtctactattaaggcctttgccactcagtcgggctcccaggacctgaaggccctcaataccagctaccagtcccagctcatcaaacccagccgcatgcgcaagtatcccaaccggcccagcaagacgcccccccacgaacgcccttacgcttgcccagtggagtcctgtgatcgccgcttctcccgctccgacgagctcacccgccacatccgcatccacacaggccagaagcccttccagtgccgcatctgcatgcgcaacttcagccgcagcgaccacctcaccacccacatccgcacccacacaggcgaaaagcccttcgcctgcgacatctgtggaagaaagtttgccaggagcgatgaacgcaagaggcataccaagatccacttgcggcagaaggacaagaaagcagacaaaagtgttgtggcctcttcggccacctcctctctctcttcctacccgtccccggttgctacctcttacccgtccccggttactacctcttatccatccccggccaccacctcatacccatcccctgtgcccacctccttctcctctcccggctcctcgacctacccatcccctgtgcacagtggcttcccctccccgtcggtggccaccacgtactcctctgttccccctgctttcccggcccaggtcagcagcttcccttcctcagctgtcaccaactccttcagcgcctccacagggctttcggacatgacagcaaccttttctcccaggacaattgaaatttgctaaagggaaaggggaaagaaagggaaaagggagaaaaagaaacacaagagacttaaaggacaggaggaggagatggccataggagaggagggttcctcttaggtcagatggaggttctcagagccaagtcctccctctctactggagtggaaggtctattggccaacaatcctttctgcccacttccccttccccaattactattccctttgacttcagctgcctgaaacagccatgtccaagttcttcacctctatccaaagaacttgatttgcatggattttggataaatcatttcagtatcatctccatcatatgcctgaccccttgctcccttcaatgctagaaaatcgagttggcaaaatggggtttgggcccctcagagccctgccctgcacccttgtacagtgtctgtgccatggatttcgtttttcttggggtactcttgatgtgaagataatttgcatattctattgtattatttggagttaggtcctcacttgggggaaaaaaaaaaaaaaaagccaagcaaaccaatggtgatcctctattttgtgatgatgctgtgacaataagtttgaacctttttttttgaaacagcagtcccagtattctcagagcatgtgtcagagtgttgttccgttaacctttttgtaaatactgcttgaccgtactctcacatgtggcaaaatatggtttggtttttcttttttttttttgaaagtgttttttcttcgtccttttggtttaaaaagtttcacgtcttggtgccttttgtgtgatgccccttgctgatggcttgacatgtgcaattgtgagggacatgctcacctctagccttaaggggggcagggagtgatgatttgggggaggctttgggagcaaaataaggaagagggctgagctgagcttcggttctccagaatgtaagaaaacaaaatctaaaacaaaatctgaactctcaaaagtctatttttttaactgaaaatgtaaatttataaatatattcaggagttggaatgttgtagttacctactgagtaggcggcgatttttgtatgttatgaacatgcagttcattattttgtggttctattttactttgtacttgtgtttgcttaaacaaagtgactgtttggcttataaacacattgaatgcgctttattgcccatgggatatgtggtgtatatccttccaaaaaattaaaacgaaaataaagtagctgcgattggg

SEQ ID NO: 4518 - protein, 543 aa, Homo sapien
MAAAKAEMQLMSPLQISDPFGSFPHSPTMDNYPKLEEMMLLSNGAPQFLGAAGAPEGSGSNSSSSSSGGGGGGGGGSNSSSSSSTFNPQADTGEQPYEHLTAESFPDISLNNEKVLVETSYPSQTTRLPPITYTGRFSLEPAPNSGNTLWPEPLFSLVSGLVSMTNPPASSSSAPSPAASSASASQSPPLSCAVPSNDSSPIYSAAPTFPTPNTDIFPEPQSQAFPGSAGTALQYPPPAYPAAKGGFQVPMIPDYLFPQQQGDLGLGTPDQKPFQGLESRTQQPSLTPLSTIKAFATQSGSQDLKALNTSYQSQLIKPSRMRKYPNRPSKTPPHERPYACPVESCDRRFSRSDELTRHIRIHTGQKPFQCRICMRNFSRSDHLTTHIRTHTGEKPFACDICGRKFARSDERKRHTKIHLRQKDKKADKSVVASSATSSLSSYPSPVATSYPSPVTTSYPSPATTSYPSPVPTSFSSPGSSTYPSPVHSGFPSPSVATTYSSVPPAFPAQVSSFPSSAVTNSFSASTGLSDMTATFSPRTIEIC

SEQ ID NO: 4519 - DNA, 1038 bp, Homo sapien
acctacacttggagcccaggtccagcgttcccccgaccgctttcccctacctcccggcccccgctcccgccccagcacttttggctctgttgcgtggggatgcggggagatttgagaggggaaaaccccgccaggagggagagagaggcacccctctgggatgcgggtgagggaaggttggctgaagttcctagtctcaggccgtaggtgcctggccagtttcctgtttgtggggcagctggggcctgaggaggaggggttcacttcctcctcccaccccctgggagcggccctgcgctgtcactgacatctcattaaaaaaaaaaaaaaatttgctctcaaggtgtttgaggctttaatgcaaccctttagcccttggttctttttggtgcaagaattctggctgtttacctcagactcagacccctgaaatgttgccaaattcttcaaataactgtttggggggtggggggagatgaaagagagtcgcgttttgtttacagttaaagacatccaatatcttaaaaaggagttttcctttagaaacacacacacccttcctcttgctcaaaagatctcactccatgatactgtgtaaaatatttttgcactgttgtgaagtatttttgacttttttctgtacataactgtgttctcagagctgaatgtttatatcttttgctgtgcaaaagaaacatgtaaaatgttgttcagttgtatatacagaaatgtgtataaaacattttgttattttttaaaagtagcactgttctggttctgtttgcacgccagtggggagagaataaagaggaaaatttaacagaacaggtgagcgtctggaactgctgcgttggggtgggagaggctgtgtctgaccctgggatggtgtcataagacagtctttggcctttcctgtgcttggagagaattagggaaggaaggtccactttatgcgccatctggggccttcctggacctccacaactctgggtgctgtgtctgggaccagccttttcttgtattatcctgtatttttca

SEQ ID NO: 4520 - protein, 29 aa, Homo sapien
MRHLGPSWTSTTLGAVSGTSLFLYYPVFF

SEQ ID NO: 4521 - DNA, 2178 bp, Homo sapien
acttccggtcgctttcggtctctcagcggccggtttctgcgtccgctgccgcaggttccaccgcgctccaggtatttttttttctgaaggaaagctgcttcctcatatgtttcaagaatggctctccctatcattgtaaaatggggtggacaggagtattcagtgaccacactttcagaagatgatactgtgctcgatctcaaacagtttctcaagacccttacaggagttcttccagaacgccaaaagttacttggactcaaagttaaaggcaaacctgcagaaaatgatgttaagcttggagctctcaaactgaaaccaaatactaaaatcatgatgatgggaactcgtgaggagagcttgggagatgtcttaggtccaccccctgacaatgatgatgttgttaatgactttgatattgaagatgaagtagttgaagtagaaaatagggaagaaaacctactgaaaatttctcgcagagtgaaagagtacaaagtggaaattttgaatcctcccagggaagggaaaaagcttttggtgctagatgttgattatacattatttgaccacaggtcttgtgcagagactggggtagaattaatgcggccatatcttcatgaatttctaacatctgcctatgaagattatgacattgttatttggtctgcaacaaatatgaagtggattgaagctaaaatgaaagagctgggagtgagcacaaatgcaaattataagattactttcatgttggatagtgctgctatgataacagtacatactccaaggagaggattaatagacgtaaagcctcttggtgttatatggggaaagttttcggagttttacagcaagaaaaacaccattatgtttgatgacatagggagaaattttctaatgaacccacagaatggactaaagataaggccttttatgaaagcgcacctaaatcgtgataaagacaaagaacttttaaaattaactcagtacctcaaggagatagcaaaattagatgactttttggatctaaatcacaaatattgggaaagatatctctcaaagaagcaaggacagtagttacaagttatactggcagttattgaagatacttaagatccaagaacttcttgcttttatgctagaaatcattatgatagtgctggacactgaagcaaataccatactgcttatacttggtcttccagttttttgtaagtttaattttatattttttgaagatgatagcaatatgctaaaaaatgcttgtcccctatatgaatattctgttacgcttgaaaaatattttctccagcgttggttactgaccaccccaccctcccaccacacacacacacacacacacacacacacacacacacacacacacacacaaagtggagaaaaatgtatactcaacaatgtcattttgtgactttggaaacaagttatgttttgtgtttttgtctcattgtgttattgtctgactaaatctaaaaccaaacccatgttgaaactagtacttttccctttaaaaacaaaccaaaaaaaaaaaacaaaaaaaaactttttaattaaagaacctagtttgctatgcttaaaattaccaagaattttttatttctttgtcatagacacaatttctcttctgtatgccactagttacatttctaaattctgagcggtctcagttaggcctgtatgtgtgtacatgtccaagtaaagctggaaaatgtcagtcttgacacagctgtgtcttagtatgagaaacagaagactgaagaataaaaactaaggaacaagaatgagtctctttttggtggctaagtagaatcttcctaaaaccattgtcataaaagcagttaaaggcaataaatttttaaaagggacatatcactgattcattcctaaaaagcatgaacaaaaagtttttgttctgttccagctatatcttgtctaagtgctaacactgtttcagtgaaaatatctagccataagattaaaaaaatatattatttgcaatgcttaagcctgcagatacgtaatgtgaccactgttttgtgttgacaatattgctttatacagttcttgtatttgaaaggaattgatccttttaaagaaacatggtgtatattgttcttacaggactaatttcagtggtgtaaataataaatatcttttctg

SEQ ID NO: 4522 - protein, 318 aa, Homo sapien
MALPIIVKWGGQEYSVTTLSEDDTVLDLKQFLKTLTGVLPERQKLLGLKVKGKPAENDVKLGALKLKPNTKIMMMGTREESLGDVLGPPPDNDDVVNDFDIEDEVVEVENREENLLKISRRVKEYKVEILNPPREGKKLLVLDVDYTLFDHRSCAETGVELMRPYLHEFLTSAYEDYDIVIWSATNMKWIEAKMKELGVSTNANYKITFMLDSAAMITVHTPRRGLIDVKPLGVIWGKFSEFYSKKNTIMFDDIGRNFLMNPQNGLKIRPFMKAHLNRDKDKELLKLTQYLKEIAKLDDFLDLNHKYWERYLSKKQGQ

SEQ ID NO: 4523 - DNA, 8564 bp, Homo sapien
ggggcggggaggctggcggagagtcggtggtgcgggatgccccgcctccgggccgcgtccgttctccacggctggtacctgtgtcgggtgggtggccaggcggggctcgcccccagccccctcgccagggctagccgactgcgcggcgcccggaggggacagatcaccggtaggggccgcggctagattccgcgctggagaacgccctctcgcggctccctggcccggccaccgcgctccctctccccgcccagagggccccggggcaccatgcaggcgcagcagctgccctacgagtttttcagcgaagagaacgcgcccaagtggcggggactactggtgcctgcgctgaaaaaggtccaggggcaagttcatcctactctcgagtctaatgatgatgctcttcagtatgttgaagaattaattttgcaattattaaatatgctatgccaagctcagccccgaagtgcttcagatgtagaggaacgtgttcaaaaaagtttccctcatccaattgataaatgggcaatagctgatgcccaatcagctattgaaaagaggaagcgaagaaaccctttatctctcccagtagaaaaaattcatcctttattaaaggaggtcctaggttataaaattgaccaccaggtttctgtttacatagtagcagtcttagaatacatttctgcagacattttaaagctggttgggaattatgtaagaaatatacggcattatgaaattacaaaacaagatattaaagtggcaatgtgtgctgacaaggtattgatggatatgtttcatcaagatgtagaagatattaatatattatctttaactgacgaagagccttccacctcaggagaacaaacttactatgatttggtaaaagcatttatggcagaaattcgacaatatataagggaactaaatctaattataaaagtttttagagagccctttgtctccaattcaaaattgttttcagctaatgatgtagaaaatatatttagtcgcatagtagatatacatgaacttagtgtaaagttactgggccatatagaagatacagtagaaatgacagatgaaggcagtccccatccactagtaggaagctgctttgaagacttagcagaggaactggcatttgatccatatgaatcgtatgctcgagatattttgcgacctggttttcatgatcgtttccttagtcagttatcaaagcctggggcagcactttatttgcagtcaataggcgaaggtttcaaagaagctgttcaatatgttttacccaggctgcttctggcccctgtttaccactgtctccattactttgaacttttgaagcagttagaagaaaaaagtgaagatcaagaagacaaggaatgtttaaaacaagcaataacagctttgcttaatgttcagagtggtatggaaaaaatatgttctaaaagtcttgcaaaacgaagactgagtgaatctgcatgtcggttttatagtcagcaaatgaaggggaaacaactagcaatcaagaagatgaacgagattcagaagaatattgatggttgggagggaaaagacattggacagtgttgtaatgaatttataatggaaggaactcttacacgtgtaggagccaaacatgagagacacatatttctctttgatggcttaatgatttgctgtaaatcaaatcatgggcagccaagacttcctggtgctagcaatgcagaatatcgtcttaaagaaaagttttttatgcgaaaggtacaaattaatgataaagatgacaccaatgaatacaagcatgcttttgaaataattttaaaagatgaaaatagtgttatattttctgccaagtcagctgaagagaaaaacaattggatggcagcattgatatctttacagtaccggagtacactggaaaggatgcttgatgtaacaatgctacaggaagagaaagaggagcagatgaggctgcctagtgctgatgtttatagatttgcagagcctgactctgaagagaatattatatttgaagagaacatgcagcccaaggctggaattccaattatcaaagcaggaactgttattaaacttatagagaggcttacgtaccatatgtacgcagatcccaattttgttcggacatttcttacaacatacagatccttttgcaaacctcaagaactactgagtcttataatagaaaggtttgaaattccagagcctgagccaacagaagctgatcgcatagctatagagaatggagatcaacccttgagtgcagaactgaaaagatttagaaaagaatatatacagcctgtgcaactgcgagtattaaatgtatgtcggcactgggtagagcaccacttctatgattttgaaagagatgcatatcttttgcaacgaatggaagaatttattggaacagtaagaggtaaagcaatgaaaaaatgggttgaatccatcactaaaataatccaaaggaaaaaaattgcaagagacaatggaccaggtcataatattacatttcagagttcacctcccacagttgagtggcatataagcagacctgggcacatagagacttttgacctgctcaccttacacccaatagaaattgctcgacaactcactttacttgaatcagatctataccgagctgtacagccatcagaattagttggaagtgtgtggacaaaagaagacaaagaaattaactctcctaatcttctgaaaatgattcgacataccaccaacctcactctgtggtttgagaaatgtattgtagaaactgaaaatttagaagaaagagtagctgtggtgagtcgaattattgagattctacaagtctttcaagagttgaacaactttaatggtgtccttgaggttgtcagtgctatgaattcatcacctgtttacagactagaccacacatttgagcaaataccaagtcgccagaagaaaattttagaagaagctcatgaattgagtgaagatcactataagaaatatttggcaaaactcaggtctattaatccaccatgtgtgcctttctttggaatttatctcactaatatcttgaaaacagaagaaggcaaccctgaggtcctaaaaagacatggaaaagagcttataaactttagcaaaaggaggaaagtagcagaaataacaggagagatccagcagtaccaaaatcagccttactgtttacgagtagaatcagatatcaaaaggttctttgaaaacttgaatccgatgggaaatagcatggagaaggaatttacagattatcttttcaacaaatccctagaaatagaaccacgaaaccctaagcctctcccaagatttccaaaaaaatatagctatcccctaaaatctcctggtgttcgtccatcaaacccaagaccaggtaccatgaggcatcccacacctctgcagcaggagccaaggaaaattagttatagtaggatccctgaaagtgaaacagaaagtacagcatctgcaccaaattctccaagaacaccgttaacacctccgcctgcttctggtgcttccagtaccacagatgtttgcagtgtatttgattccgatcattcgagcccttttcactcaagcaatgataccgtctttatccaagttactctgccccatggcccaagatctgcttctgtatcatctataagtttaaccaaaggcactgatgaagtgcctgtccctcctcctgttcctccacgaagacgaccagaatctgccccagcagaatcttcaccatctaagattatgtctaagcatttggacagtcccccagccattcctcctaggcaacccacatcaaaagcctattcaccacgatattcaatatcagaccggacctctatctcagaccctcctgaaagccctcccttattaccaccacgagaacctgtgaggacacctgatgttttctcaagctcaccactacatctccaacctccccctttgggcaaaaaaagtgaccatggcaatgccttcttcccaaacagcccttccccctttacaccacctcctcctcaaacaccttctcctcacggcacaagaaggcatctgccatcaccaccattgacacaagaagtggaccttcattccattgctgggccgcctgttcctccacgacaaagcacttctcaacatatccctaaactccctccaaaaacttacaaaagggagcacacacacccatccatgcacagagatggaccaccactgttggagaatgcccattcttcctgagttcctctgtactgggatgtatattttcctagccccaaatccattgctggcaatggatgcactgaatgtgccagcactgaggagttaaaatgagaactccaaacactaacgactcttcttcaagatgcagtataagacaatgaattttaacctagatgtaattatacaatggaaatggtattccagtttagaatatggaaagaccgacctagaggaattggacaactgattgcacctgaaaatcataaagggactttttctggccaataggcaggagtcctctttttgtgaagtgatcttttgtgaagtgatcattaaagggatggaaaacacagtctagtgtccagcaggcccacatgacagtttttgtaattcaaattatgcacttttaaaaaaaaacaaacttaaacagggatcttaatatcttcctttgttttcctttgctttactcttctactttagaatattttcttaaaaatcactcaaaggactgtgaggaaaggctgtggtacctgaccttgttgaaatcaaggcccggcactgtactacaggcctgtttacagattattacggtgaactgaatgggtaccgaggcttcaccaaagaggtacttttttgttgttgttgttgttttaggaataattgtaccaattttaagagcattccccccacctgtccccacacacccaaacaaaatgtggtggtgttgccttcaaaaaagagaagttttgtgtcattaacatgacagaagaactttttaaaaaaaaataactgtcaactattctatttgcatttaggagactgttcatctatgctagattgtcattttccctccttctcccacagaagtttactggtagtccatgtcatggctcgtagctatccctctaaccataccatggaaatgcaggcacccaatgtgaaaaggagcacttgctgggcatcactgacaccgctcatgttttacacatagttgagtaatcagcatatctagaattatcttgcattgcctaaatcatatgtatatagtgaatgttatataatatacctggcaggtctgttttaatttaattgaataaagatacaaatactttgtttggctggcatatattaaattattatatgaagaaaatggttgattcttatttcttttagttgaaaaacacacaaaaacactaaacataaaagcacgttttgtggtacgccttggtttctagttctggatatatgtattaatcttaaagaatgatctaaagtcacagcttggcatataggaagatacttggttagaataggatgggtatcttttaagcagaactttgtaagtaagttttaagttcctaagcaacaagtatacagtttgttaaggtttatattgaacattctaccttgcttgaggttttctgctttatcaaaactattcataatagaacatctacctgcatcattactatcataatatggattattcataaagcgtatgtactgttcttctgagtctaacaaatactgtgactgaaatgcatgcaccttgttgaagagaaaacattttattaatctccactataatgtctgtgaaatgtgcagtattccatccttagagagttatctggttcatcagcatctgcatgtatcctctgaataatgaagcaacatttcagcaattctgttaaccacaccattagagacatttttagaagtgctgcaacatggtgggaacctagtactttaataatttcctatgatatttattagagcataaaatgtacatcacgatagtacagtatgtagtcctttaagaccagaaggtatgttaactgcaccatcattaagcagtctatcctgttttcttatttatttgttagaattgaatcctttctcaatatctgtaccattcctatgatggtagccattcttctctttataaaatatttcctctttgaaaagcgtcctaaaacattaatttcaaatcccctcttggatgcaaagtgtccctaagaccatccattcaacagtatttatgtgagccaacttactagagccgctacaactaatcatgatagacagtccagaatctccctggactttatactgggccagcctcattgtccctaagatttctctttttatgtctcatggattacttctctttttaattgccccaggcacattccaaatgagaacctggtaaaagtcacattggacccccttcagtatgtcttcggctaatgtgttagccttcaatataaggtgataaccccttttcaacctatctagtctataaagaggaaaaattcagatttggagttctaatcctatttctcccaaagggaactattcttctaccccatggttctaggagaccacttcactgtgcaacagttttacatgcattgtggatggaggatatttttattctgaactgttacatttaggtaaaaatattttctgcagtggtaactgattagaaaaatgccaattggatgcccttaggtggaggtgagaaaatggcatccttgccttcttctcaatatgaaacattaactagttgacaaatttatccttgtagaaatgaaaatctatttaatcagggaccagaaatggctgaggagataaatgcatcattacaaaattctgcttttgaatcctggacattacaagggggtaaatgcagcatgactttttgttaaccacattccaaaatgtggaacatttcttttagaaatgaaaatatttcaaggctgatgtattttaagactacacattatcaggaaacatacattgagagttcgcttaattaaaggttgttgggcatcaaattatgtttagtaggttactattctctaacaactcaaggatgctttaatggatctgaatttgacaaagagcatgccacactaatactacagtcaacaacagcccagagaacaattactatgtcagctggaggctatattatgattctaaattcttaaaggtttttttccctccataaatcaaaaattaccttatgtaaaccaaaaattagttggtatttatggtcatgatcttaattctcaagtttagcttaatcttgtatttcattgtttgtcttctaatatgacagcttaaattcagatttttaagtgactcagcaaaataggaggagtgtcccaatttattagtgttgtacatattgaagaaaacctttttgttccttcagatttagaaagaaacagtttaaccatttatttcttggtattctgctgctgtgaataggtttacttattcttttaacatatattgtgtgactacgcaagtataggtcctgttgtattgcattaatctttaccagtaactaaacatcacaaggttaatattggtttggctgaaagaattatgcagtaaagttatttataagggaacatgatgactttattcaatatttttcttctttgaaacatctcattactaacttttaagattatttcataatcccttatacatgagccaatgaaatattttgagctctacttaagaagcatgaagtctatattataaacctaaacaacaaaagcacttgtaacttgtttagtaaattccatgccttattttccatttttgacaccgtaaagtgcattttctgtcgactgtgagcaaatttcccttttgcctttaatgaaaatagtgcattaagtagccaattgctgcagaattataaagcaaattagctaacagtgggtcacattggactaccactcaaagaaacaagatgcataacagatgatggaaggtacatgtggtgtggcttagggagagcgcacctgtgccagatgcatgccactttcagtagctgccaaatgtgcctttaattaagaacatctctaatttttttcttcagatcaagtcagcatttggggtcgggatttgggcagggaactctggggtgcaaatatctggtgaaaccaccagagaatttgtttgtcaaagtgacatgtataattttagttgagacgtgtttgtgtatatatgtgtatttgcctttgtttagtagcacggttatttgctaaaataattgtcaaaaaattgctctgtcggtcggtctttgatgtaagaacaaagtgtggtctatacatctaatatggcctttgtacctaaccatgttcataggtaatctttgtactctgtgtgcagcagtatttggtttgcatttaaagtgaaaataacggctgttatttttctggcattactaagataaactgaaaaataataaagaaaaatgccttacatagcccacaagtgtattatttttg

SEQ ID NO: 4524 - protein, 1333 aa, Homo sapien [sequence omitted]

SEQ ID NO: 4525 - DNA, 4281 bp, Homo sapien
ggctcctttattgagaatcaatgtcttctcctaggtaattgatcaccctagacccagggacacccaattcatcgtaatcatcatgaataatcaaaaagtggtagctgtgctactgcaagagtgcaagcaagtgctggatcagctcttgttggaagcgccagatgtgtcggaagaggacaagagcgaggaccagcgctgcagagctttactccccagcgagttaaggaccctgatccaggaggcaaaggaaatgaagtggcccttcgtgcctgaaaagtggcagtacaaacaagccgtgggcccagaggacaaaacaaacctgaaggatgtgattggcgccgggttgcagcagttactggcgtccctgagggcctccatcctcgctcgggactgtgcggctgcggcggctattgtgttcttggtggaccggttcctgtatgggctcgacgtctctggaaaacttctgcaggtcgccaaaggtctccacaagttgcagccagccacgccaattgccccgcaggtggttattcgccaagcccgaatctccgtgaactcaggaaaacttttaaaagcagagtatattctgagcagtctaataagcaacaatggagcaacgggtacctggctgtacagaaatgaaagtgacaaggtcctggtgcagtcggtctgtatacagatcagagggcagattctgcaaaagctgggtatgtggtacgaagcagcagagttaatatgggcctccattgtaggatatttggcacttcctcagccggataaaaagggcctctccacgtcgctaggtatactggcagacatctttgtttccatgagcaagaacgattatgaaaagtttaaaaacaatccacaaattaatttgagcctgctgaaggagtttgaccaccatttgctgtccgctgcagaagcctgcaagctggcagctgccttcagtgcctatacgccgctcttcgtgctcacagctgtgaatatccgtggcacgtgtttattgtcctacagtagttcaaatgactgtcctccagaattgaaaaacttacatctgtgtgaagccaaagaggcctttgagattggcctcctcaccaagagagatgatgagcctgttactggaaaacaggagcttcacagctttgtcaaagctgctttcggtctcaccacagtgcacagaaggctccatggggagacagggacggtccatgcagcaagtcagctctgtaaggaagcaatggggaagctgtacaatttcagcacttcctccagaagtcaggacagagaagctctgtctcaagaagttatgtctgtgattgcccaggtgaaggaacatttacaagttcaaagcttctcaaatgtagatgacagatcttatgttcccgagagtttcgagtgcaggttggataaacttatcttgcatgggcaaggggatttccaaaaaatccttgacacctattcacagcaccatacttcggtgtgtgaagtatttgaaagtgattgtggaaacaacaaaaatgaacagaaagatgcaaaaacaggagtctgcatcactgctctaaaaacagaaataaaaaacatagatactgtgagtactactcaagaaaagccacattgtcaaagagacacaggaatatcttcctccctaatgggtaagaatgttcagagggaactcagaaggggaggaaggagaaactggacccattctgatgcatttcgagtctccttggatcaagatgtggagactgagactgagccatcggactacagcaatgatgagggagctgttttcaacaagtctctgagtggcagccagacttccagtgcttggagcaacttatcagggtttagttcctctgcaagctgggaggaagtgaattatcacgttgacgacaggtcagccagaaaagagcctggcaaagaacatctggtggacactcagtgttccactgccttgtctgaggagctagagaatgacagggaaggcagagctatgcattcattgcgttcacagcttcatgatctctctcttcaggaacccaacaatgacaatttggagccttctcaaaatcagccacagcaacagatgcccttgacacccttctcgcctcataataccccaggcattttcttggcccctggtgcagggcttctagaaggagctccagaaggtatccaggaagtcagaaatatgggacccagaaatacttctgctcactccagaccctcatatcgttctgcttcttggtcttctgattctggtaggcccaagaatataggcacacatccttcagtccaaaaagaagaagcctttgaaataattgttgagtttccagaaaccaactgcgatgtcaaagacaggcaggggaaagagcagggagaagaaattagtgaaagaggcgcaggccctacatttaaagctagtccctcctgggttgacccagaaggagaaacagcagaaagcactgaagatgcacccttagactttcacagggtcctgcacaattctctgggaaacatttccatgctgccatgtagctccttcacccctaattggcctgttcaaaatcctgactccagaaaaagtggtggcccagtcgcagagcagggcatcgaccctgatgcctccacagtggatgaggaggggcaactgctcgacagcacggatgttccctgcacaaatgggcacggctctcatagactgtgcattctgagacagccgcctggtcagagggcggagacccccaattcctctgtaagcggtaacatcctcttccctgtcctcagcgaggactgcactaccacagaggaaggaaatcagcctggaaacatgctaaactgcagccagaactccagctcatcctcagtgtggtggctgaaatcacctgcattttccagtggttcttctgagggggacagcccttggtcctatctgaattccagtgggagttcttgggtttcattgccgggaaagatgaggaaagagatccttgaggctcgcaccttgcaacctgatgactttgaaaagctgttggcaggagtgaggcatgattggctgtttcagagactagagaatacgggggtttttaagcccagtcaactccaccgagcacatagtgctcttttgttaaaatattcaaaaaaatctgaactgtggacggcccaggaaactattgtctatttgggggactacttgactgtgaagaaaaaaggcagacaaagaaatgctttttgggttcatcatcttcatcaagaagaaattctggggaggtatgttgggaaagactataaggagcagaaggggctctggcaccacttcactgatgtggagcggcagatgaccgcacagcactatgtgacagaatttaacaagagactctatgaacaaaacattcccacccagatattctacatcccatccacaatactactgattttagaggacaagacaataaagggatgtatcagtgtggagccttacatactgggagaatttgtaaaattgtcaaataacacgaaagtggtgaaaacagaatacaaagccacagaatatggcttggcctatggccatttttcttatgagttttctaatcatagagatgttgtggtcgatttacaaggttgggtaaccggtaatggaaaaggactcatctacctcacagatccccagattcactccgttgatcagaaagttttcactaccaattttggaaagagaggaattttttacttctttaataaccagcatgtggaatgtaatgaaatctgccatcgtctttctttgactagaccttcaatggagaaaccatgcacatagaatacggcacagtctggtcctttggggcttgggcagggccgtgacacaggttctggccaatgatttgcaagaggaattgatcagtatcactttaagtcctgcatttaattggcagcacaagatcctgcagagcctctttccctctgccacagttatcaagaatgggtcaggagaccgctgcttctgggcataagtcctgcaaggaaagcaacatggaaaacagccccaactcacccatgagggatgaaaagcactcttgagaaaggcatgtgttgtttaagccattgagattttagagctttttgtcactatctgtcaagactgatactactggggcttttcctattgatttgggagttctttacatattaaaaaaatgtgagcctttgtgatacgaattcaatttgttttcctgtcttttgacatttgactttgcataaaagtttatctgtgcataattttaa

SEQ ID NO: 4526 - protein, 1244 aa, Homo sapien
MNNQKVVAVLLQECKQVLDQLLLEAPDVSEEDKSEDQRCRALLPSELRTLIQEAKEMKWPFVPEKWQYKQAVGPEDKTNLKDVIGAGLQQLLASLRASILARDCAAAAAIVFLVDRFLYGLDVSGKLLQVAKGLHKLQPATPIAPQVVIRQARISVNSGKLLKAEYILSSLISNNGATGTWLYRNESDKVLVQSVCIQIRGQILQKLGMWYEAAELIWASIVGYLALPQPDKKGLSTSLGILADIFVSMSKNDYEKFKNNPQINLSLLKEFDHHLLSAAEACKLAAAFSAYTPLFVLTAVNIRGTCLLSYSSSNDCPPELKNLHLCEAKEAFEIGLLTKRDDEPVTGKQELHSFVKAAFGLTTVHRRLHGETGTVHAASQLCKEAMGKLYNFSTSSRSQDREALSQEVMSVIAQVKEHLQVQSFSNVDDRSYVPESFECRLDKLILHGQGDFQKILDTYSQHHTSVCEVFESDCGNNKNEQKDAKTGVCITALKTEIKNIDTVSTTQEKPHCQRDTGISSSLMGKNVQRELRRGGRRNWTHSDAFRVSLDQDVETETEPSDYSNDEGAVFNKSLSGSQTSSAWSNLSGFSSSASWEEVNYHVDDRSARKEPGKEHLVDTQCSTALSEELENDREGRAMHSLRSQLHDLSLQEPNNDNLEPSQNQPQQQMPLTPFSPHNTPGIFLAPGAGLLEGAPEGIQEVRNMGPRNTSAHSRPSYRSASWSSDSGRPKNIGTHPSVQKEEAFEIIVEFPETNCDVKDRQGKEQGEEISERGAGPTFKASPSWVDPEGETAESTEDAPLDFHRVLHNSLGNISMLPCSSFTPNWPVQNPDSRKSGGPVAEQGIDPDASTVDEEGQLLDSTDVPCTNGHGSHRLCILRQPPGQRAETPNSSVSGNILFPVLSEDCTTTEEGNQPGNMLNCSQNSSSSSVWWLKSPAFSSGSSEGDSPWSYLNSSGSSWVSLPGKMRKEILEARTLQPDDFEKLLAGVRHDWLFQRLENTGVFKPSQLHRAHSALLLKYSKKSELWTAQETIVYLGDYLTVKKKGRQRNAFWVHHLHQEEILGRYVGKDYKEQKGLWHHFTDVERQMTAQHYVTEFNKRLYEQNIPTQIFYIPSTILLILEDKTIKGCISVEPYILGEFVKLSNNTKVVKTEYKATEYGLAYGHFSYEFSNHRDVVVDLQGWVTGNGKGLIYLTDPQIHSVDQKVFTTNFGKRGIFYFFNNQHVECNEICHRLSLTRPSMEKPCT

SEQ ID NO: 4527 - DNA, 3639 bp, Homo sapien
ctcgaggctccgcaccagccgcgcttctgtccgcctgcagggcattccagaaagatgaggatatttgctgtctttatattcatgacctactggcatttgctgaacgcatttactgtcacggttcccaaggacctatatgtggtagagtatggtagcaatatgacaattgaatgcaaattcccagtagaaaaacaattagacctggctgcactaattgtctattgggaaatggaggataagaacattattcaatttgtgcatggagaggaagacctgaaggttcagcatagtagctacagacagagggcccggctgttgaaggaccagctctccctgggaaatgctgcacttcagatcacagatgtgaaattgcaggatgcaggggtgtaccgctgcatgatcagctatggtggtgccgactacaagcgaattactgtgaaagtcaatgccccatacaacaaaatcaaccaaagaattttggttgtggatccagtcacctctgaacatgaactgacatgtcaggctgagggctaccccaaggccgaagtcatctggacaagcagtgaccatcaagtcctgagtggtaagaccaccaccaccaattccaagagagaggagaagcttttcaatgtgaccagcacactgagaatcaacacaacaactaatgagattttctactgcacttttaggagattagatcctgaggaaaaccatacagctgaattggtcatcccagaactacctctggcacatcctccaaatgaaaggactcacttggtaattctgggagccatcttattatgccttggtgtagcactgacattcatcttccgtttaagaaaagggagaatgatggatgtgaaaaaatgtggcatccaagatacaaactcaaagaagcaaagtgatacacatttggaggagacgtaatccagcattggaacttctgatcttcaagcagggattctcaacctgtggtttaggggttcatcggggctgagcgtgacaagaggaaggaatggacccgtgggatgcaggcaatgtgggacttaaaaggcccaagcactgaaaatggaacctggcgaaagcagaggaggagaatgaagaaagatggagtcaaacagggagcctggagggagaccttgatactttcaaatgcctgaggggctcatcgacgcctgtgacagggagaaaggatacttctgaacaaggagcctccaagcaaatcatccattgctcatcctaggaagacgggttgagaatccctaatttgagggtcagttcctgcagaagtgccctttgcctccactcaatgcctcaatttcttttctgcatgactgagagtctcagtgttggaacgggacagtatttatgtatgagtttttcctatttattttgagtctgtgaggtcttcttgtcatgtgagtgtggttgtgaatgatttcttttgaagatatattgtagtagatgttacaattttgtcgccaaactaaacttgctgcttaatgatttgctcacatctagtaaaacatggagtatttgtaaggtgcttggtctcctctataactacaagtatacattggaagcataaagatcaaaccgttggttgcataggatgtcacctttatttaacccattaatactctggttgacctaatcttattctcagacctcaagtgtctgtgcagtatctgttccatttaaatatcagctttacaattatgtggtagcctacacacataatctcatttcatcgctgtaaccaccctgttgtgataaccactattattttacccatcgtacagctgaggaagcaaacagattaagtaacttgcccaaaccagtaaatagcagacctcagactgccacccactgtccttttataatacaatttacagctatattttactttaagcaattcttttattcaaaaaccatttattaagtgcccttgcaatatcaatcgctgtgccagggcattgaatctacagatgtgaggcaagacaaagtacctgtcctcaaggagctcatagtataatgaggagattaacaagaaaatgtattattacaatttagtccagtgtcatagcataaggatgatgcgaggggaaaacccgagcagtgttgccaagaggaggaaataggccaatgtggtctgggacggttggatatacttaaacatcttaataatcagagtaattttcatttacaaagagaggtcggtacttaaaataaccctgaaaaataacactggaattccttttctagcattatatttattcctgatttgcctttgccatataatctaatgcttgtttatatagtgtctggtattgtttaacagttctgtcttttctatttaaatgccactaaattttaaattcatacctttccatgattcaaaattcaaaagatcccatgggagatggttggaaaatctccacttcatcctccaagccattcaagtttcctttccagaagcaactgctactgcctttcattcatatgttcttctaaagatagtctacatttggaaatgtatgttaaaagcacgtatttttaaaatttttttcctaaatagtaacacattgtatgtctgctgtgtactttgctatttttatttattttagtgtttcttatatagcagatggaatgaatttgaagttcccagggctgaggatccatgccttctttgtttctaagttatctttcccatagcttttcattatctttcatatgatccagtatatgttaaatatgtcctacatatacatttagacaaccaccatttgttaagtatttgctctaggacagagtttggatttgtttatgtttgctcaaaaggagacccatgggctctccagggtgcactgagtcaatctagtcctaaaaagcaatcttattattaactctgtatgacagaatcatgtctggaacttttgttttctgctttctgtcaagtataaacttcactttgatgctgtacttgcaaaatcacattttctttctggaaattccggcagtgtaccttgactgctagctaccctgtgccagaaaagcctcattcgttgtgcttgaacccttgaatgccaccagctgtcatcactacacagccctcctaagaggcttcctggaggtttcgagattcagatgccctgggagatcccagagtttcctttccctcttggccatattctggtgtcaatgacaaggagtaccttggctttgccacatgtcaaggctgaagaaacagtgtctccaacagagctccttgtgttatctgtttgtacatgtgcatttgtacagtaattggtgtgacagtgttctttgtgtgaattacaggcaagaattgtggctgagcaaggcacatagtctactcagtctattcctaagtcctaactcctccttgtggtgttggatttgtaaggcactttatcccttttgtctcatgtttcatcgtaaatggcataggcagagatgatacctaattctgcatttgattgtcactttttgtacctgcattaatttaataaaatattcttatttattttgttacttggtacaccagcatgtccattttcttgtttattttgtgtttaataaaatgttcagtttaacatcccagtggagaaagttaaaaaa

SEQ ID NO: 4528 - protein, 308 aa, Homo sapien
LEAPHQPRFCPPAGHSRKMRIFAVFIFMTYWHLLNAFTVTVPKDLYVVEYGSNMTIECKFPVEKQLDLAALIVYWEMEDKNIIQFVHGEEDLKVQHSSYRQRARLLKDQLSLGNAALQITDVKLQDAGVYRCMISYGGADYKRITVKVNAPYNKINQRILVVDPVTSEHELTCQAEGYPKAEVIWTSSDHQVLSGKTTTTNSKREEKLFNVTSTLRINTTTNEIFYCTFRRLDPEENHTAELVIPELPLAHPPNERTHLVILGAILLCLGVALTFIFRLRKGRMMDVKKCGIQDTNSKKQSDTHLEET

SEQ ID NO: 4529 - DNA, 3243 bp, Homo sapien
agtagagcctggtgcctgggagcggctggcgcggcggaatccagggccgacccgggccggaccgaccccaggcggcgacggaatcagtccccaatgcctggaaattcctcattggattactgtgttttaaacagaatttcgtgaacagccttttatctccaagcggaaagaaagatgtggaaagcttcagcaggccacgctgtgtccatcgcccaggatgacgcgggggccgatgactgggagaccgaccctgattttgtgaatgatgtgagtgagaaggagcaaagatggggtgccaagacggtgcagggctccgggcaccaggagcatatcaacatacacaagctgagggagaatgtctttcaagagcatcagacccttaaggagaaggaacttgaaacaggaccaaaagcttcccatggctatggagggaaatttggtgtggaacaagaccgaatggataagtcagctgtcggccacgaatatcagtcgaaactttccaagcactgctcgcaggtggactcggtccgtggcttcggaggcaagtttggtgtccagatggacagagttgatcagtctgctgtaggctttgaataccaggggaagactgagaagcatgcctcccagaaagactactccagtggttttggcggcaagtatggcgtgcaggccgaccgagtagacaagagcgcggtgggcttcgactaccagggcaagacggagaagcacgagtcacagagagattactccaaaggtttcggcggcaaatacggtatcgacaaggacaaagtggataagagcgccgttggctttgagtatcaaggcaaaacggagaagcacgagtcccagaaagactatgtgaaagggtttggaggaaaatttggtgtgcagacagacagacaagacaaatgtgcccttggctgggatcaccaggagaaattgcagctgcatgaatcccaaaaagattataagactggttttggaggcaaattcggtgttcagtcggagaggcaggactccgctgctgtggggtttgattacaaggagaagctggccaagcacgagtcccagcaagactactccaaaggattcggcgggaagtatggggtgcagaaggatcggatggataagaatgcgtcaacctttgaggatgtcacccaggtgtcctctgcctaccagaagacagtacctgtcgaagctgtgaccagcaaaacaagtaacatcagagctaactttgaaaacctcgctaaggagaaagagcaggaggacaggcggaaggcggaggcggagagagcccagcggatggccaaggagcggcaggagcaggaagaggccaggaggaagctggaggagcaagccagagccaaaacgcaaacgccccctgtgtcgcccgcacctcagccaaccgaggagaggctgccctcgagccccgtctatgaggatgcggcttccttcaaggcagagctgagctacagaggccctgtgagtgggacggagccggagcccgtgtacagcatggaggccgctgactaccgagaggccagcagccagcagggcctggcctatgccacagaggctgtctatgaaagcgcagaggccccgggccactatcccgcagaggacagcacctacgatgagtacgagaacgatctggggatcacagccgtcgccctgtacgactaccaggctgcgggcgatgatgagatctcatttgaccctgatgacatcatcaccaacatcgagatgattgacgacggctggtggcgcggggtgtgcaagggccggtacgggctcttcccagccaactatgtggagctgcggcagtagggcccccagcccccccccggagctgcgccctggatcctcacactacagatcaggccttctttggttcttgggtggttttgggttttttctgttttttttttttttttttttttttgaaggtggggaggggaatatacacattgcttttatatttaatacttttgctgatgcttttgaaaatgtttatgccacagaatttgctaatatattgtaatcacattccttaggaggactttggtaattggttttatgcattgatggttttttttttcttttttgccaaattgactgtcacgcggcagcttcagggagctcgcattctcttgtgttcgtgttgccctcgtgcccatcaagtgcagtcgggacctcccaggacaagcacgaggcctcaggtcggccctgtggcgggtaggcaggaaggactgtcccagacgaggggcttcctctagagtctcactgctggggaggagaggactgggcctgatggaagttaacccggagctaagtcacccagagcacaggagctgccatgtcagatgggaaatctgcctatgtcataccgtgacagcccgcaggatcaggtgacttctagcagagaccctggtttttttcctgtgcccactccggcttgtcctcatctctacccatcccctgatgcccaggtcaccgggagggctgctgggagcctctcctgtccccgccgggcagtgtcactgagtccttgaaatcctcccctgccccgcgggtctctggattgggacgcacagtgcagttgaggtctgcgtcgggcttggcttttcacaaaggctgatgtcttaactgtcacccatatggtccctgggccaccgggcagcctggggcggtgtgtgtgccatgtcacagcatggcctctcggccttgggaaggaaggcagtgcctgctctgctgtgagccgccaggaaccctcctcctgtcaatgggggtgtagtatttttgccaaaatatcatgttcaatttcagtagtttgatcagttgaaggctagaagtgtgaagtgcagatgagtgtgtgttcttccccaaggtccccccacagctccaggacaccgctgtcctggcatttgtggccactcactttgtaggaaactcatctccttcctgaggagccgggaggctggaccagtcccgtcgtgcagtcaggtgggcggtgtgtctttccagaaggtcacgtggaaatgtctcgggacttgggtcccggagtgcccgtgaagcgtgtttttgctcctgaggtgcattttctcatcatccttgctttaccacaatgagcaatgaggtcgggttttatatgcaacttattgtatctgaattcctgtagcacacctcataggtatgatttttttaaattaaagaattcagaataaacattttttgatccaaaaa

SEQ ID NO: 4530 - protein, 550 aa, Homo sapien
MWKASAGHAVSIAQDDAGADDWETDPDFVNDVSEKEQRWGAKTVQGSGHQEHINIHKLRENVFQEHQTLKEKELETGPKASHGYGGKFGVEQDRMDKSAVGHEYQSKLSKHCSQVDSVRGFGGKFGVQMDRVDQSAVGFEYQGKTEKHASQKDYSSGFGGKYGVQADRVDKSAVGFDYQGKTEKHESQRDYSKGFGGKYGIDKDKVDKSAVGFEYQGKTEKHESQKDYVKGFGGKFGVQTDRQDKCALGWDHQEKLQLHESQKDYKTGFGGKFGVQSERQDSAAVGFDYKEKLAKHESQQDYSKGFGGKYGVQKDRMDKNASTFEDVTQVSSAYQKTVPVEAVTSKTSNIRANFENLAKEKEQEDRRKAEAERAQRMAKERQEQEEARRKLEEQARAKTQTPPVSPAPQPTEERLPSSPVYEDAASFKAELSYRGPVSGTEPEPVYSMEAADYREASSQQGLAYATEAVYESAEAPGHYPAEDSTYDEYENDLGITAVALYDYQAAGDDEISFDPDDIITNIEMIDDGWWRGVCKGRYGLFPANYVELRQ

SEQ ID NO: 4531 - DNA, 3709 bp, Homo sapien
caaaaacacaatagaagtccattatcccttgataattatttcttaaaagcaaatgggagtaagtgttcttatctggaaaaataaataaataaaatgctcaaagggtatcaccacttcaattttatcaagccaccttggacaaagtatccaaattgtggttgccttaataaactaaaacattattgtacataatgtaattataaatctatcagtctgcatggatgcaaactgtgtgtgacaaatcgtcttttaaatggtcaatttcagctgtacatttctcatccaagttgtactctagccattggtttagcgtggacagatactccatctctattatccatttccacagcccaaataaaatatgttaagcaggctcagaatgaatatgaagaattccatttccgtagatgttttctaaaagtcagattgtggaaatttcaaataagtattttcaatttcctccctcactccctcttaccttccccaagacatcaaacacctggcatggtagattatagaaagagacactgagagagagaattaaattttctaatgggaattagaatatctggtttacctccaaattaagtttctttacaggaagttgggaccagctggaaattgtattatcatttcggaacacaatattacttccttagagagagatggatttttgttggcaacataaaagaataagtgatggggtatctatgtgagtaaatttttaaattccaagttaatatgcttgcaaacattactgctgcgttatggcaccaagagttggttgaaattacccacgtagtcatactcctgtgctctgtcaccatggacttcacatcatttgctgcccactagttcaatcgcatttaatcctagcaatatgtaagtttaaaggactgcattcccctctactttaaagcttatatcctagatactcagtttgtgaccttggttgacctttggcatttcacgcaagttgaacagcaaaatcaaagcagccatttttaattcgtcattcccaagccctatctgagtggttccaaagtcacctgagaggaaggtttaaattagtccctctcaccccaccattgctataaaacagcaacgttttcattccaattcagccataaagaggtttctcttcttactgggttttgaaatcatttccttttttctttcgtttgcccttcttccttcctgtgttgtactatctctccaaccacgtctataagcagactcaatcttcttgcagaggaagatgagctggcactctgcaaacttctttaataaggacccaaagtttacttgacattaacctctagtaggtgagaaattccaaaaaagctttggggtacattagaatttccaaagctctgaaagatatttcaggagatttaacagcagagttgcaacttacacgtgaattctggtctatagtggtcatgtgagttaaattcgaatcctctacttgtatgaccctaggaatagattggaatactgcagaggaccaaagctgaggcatgctaaacagctgcttggaggtggaagcaagttcagtcacctactcagcttcctctctccaccacccagttcctccctcagtatcacattatttttttcttctgcttttcattaacctaactcatctcatcagtacaaccattttcttattctctaactacccccaattcctttagcctctccccacctgtccaaactcagctcagccgtgggccaatgcagcttacagacggttgcagagctaggaagaaaacccagctctcccaaccctgatcgtggaggtctctggccccccaacactgccttctgggggctgcatttttttttttttttgagaagaggtcttttgggatgcatggtgctccacatacagcttcacaaaatatttcattataagagaaaccccttgatttttatttctttttcttttgttttctggattacctgccttcagtaagcagatgcagacccacttgtaaggagtctggttagtgatgagaaaaggatgaaatctagatacaaaagtcaccttgaaggtgatgatggatctttaatccacttgactaagtgtctggaagagctacttgctcttccacccctcatctcaaatgagaggagcagaagtttaacttcctcaaatagcccagctctggctaaaacccaaagaagaaaggtcaaaggaagggaaagcatgtcaggggctggtttgtgacttggcaggaccaggaaacagcagccactgacagcccagagaaggtgactaagggctggcagaagattagaatgttaatttggctgctgtccggactaggaggccatgttcaatggcagtcagaatttgtgttctgcgcattgctgggtctataaatatgataagcaagtggtgacagaattatagtataaggtgatgtactacatgcagatcataaaggctttggttttaagacttaagtagaaaatccctctcctagcttattacccaacaatattcagataatgagcttttggagaatatctttttcctatcactagaaagatttacctgggaactgtctaaagtctacacacatatttccaaagcctttaaataccaactgcagcatggagagagaggggtggcagaagctgaaatgcctcaaaagccatttaagtgttacgttgcaggattttcagtccttctcgttatgtaaaagtagataaatatagacgttattctcaacactaccctatagtatcacagtggtccaaatgccagagcttacagataatgtcatcacagtgcctagaaactcgaactgtaatatatcgtagcattttcttggtgtttcttaaagtttctttccacaatacaaggtcctctctgcctcttgtttcttggagagttcaccccactgatgagtcttccttccctgttggactcagtcatttggggaacagtcttagaagcacatatcaaccaaggaagaaacttcctggatatctattgcccacttgcccaggtctaataaacactaaaggggggaaattgaaaggagctgccaactggtcaacgtggaagggcggttccaccctagattggtgtctttctttttcttcctttttttaaaaaaaatctatttcttaaataataataaatgcacatgatgtgttaaatatgtacatatatatttcaaaagaaaaaatggggcacaagattgtcttacaagtcgtgctggctaatttttagtttgtattcataagtggtttttaaaagccttttttaaagtgtaatttgcatgttctactttgattgtatgtaaacatattttagaacaaaaaatgtatttgtattttattgaatatagaggcaagaaaattgtacattgtttgaaatgttccttttgtaacagtttttattcataaagcatttttgtacatttaaaatgaacatggacttgctgttatttgaggcgtagatacatctagcatgcttactgtcatgctcctccatggtcttagatgttgggttttaaacatttttttctaaaagaaagctcagtcttttccgctaccagatcaggttagcacagtatagagcacttaactattaaaaaaaaaaagttaatcctattcatatgttattcattgtgtgaaattaaagacattcaattcagtctaaaaaaaaaaaaaaaaaaaaaaaaaaaaaaaa

SEQ ID NO: 4532 - protein, 27 aa, Homo sapien
QKHNRSPLSLDNYFLKANGSKCSYLEK

SEQ ID NO: 4533 - DNA, 1571 bp, Homo sapien
aaaaaaaaaaagaaattactctccataacagtctatgttatcaccaacatatataaaaacatgatttagatttccatttcaaagttacattacccgattacttccaaataggtgctaagcaaaaacccccaatgtattattgaaccatggacttgcacctcatgtttaatgtgaatatttatttccatgtccctcttaactggttttttcttgtcttccctctagctgtattgttatttcagatatgtgatatctgttttcatactcttgcctttccatcatgaatgcttagttatgaacagagattcctttgtagagctcataggcagtacagagaggtaagtcttgcctcagagggccttgtatcttggtgtagtttttaaatagtgcatagtgtatagtgtatagtgtacattttgttttgcacatagtttgttgccccgaatgggttttttaccaagcctttttttctttcatgtatttacagtccggagcacaagattctcttctttcaaatacaatgtaattcgctttactttacaacactaaatctgggctttgaatttccagtgcattggactgattggattgttgggagttagaggctgttccaaccatccttagtttgggagagtggctccttctgcttgttttctaagcgtacagtcaacgggtgccatttgtggtatttaacatgttaggatgattgttccaaatgctgagttgttttatttctagatgtaattagttcactttatgtaatattcttctctcagactgactttaaaaacaaagttttatcattttcattgtatttgtatttattacagagtgttttagctttgatattctttgtattttcattcatttgttacatgagctttatcagtaacatctgtataaatggtttttaaaaattaactatgtatgtgcccatgccgaagtcgagcaataaaatcaatgctgtttgcactgtcacagcatcaacgtttttaaagaatattgagtttgtaatgaatcgttttgaaaacatttatggttggctctatggagggtgacaacatgagtcacaaaatgaaaagttcaagaacacatgccatcctgagttgatgcctctgtcatgttgcagagctcagctttctgtctcctcgcagagcagggaaggtgcccgttttctccggccgtggtgactgctcagttggtagtacctgttgggggtaccgcataggtggatttctgaggggggtcaggggctagtggggaagagcatcttggtcctgtcaccagtctgcaaccatctttgctataatacatctccgctctgtagggcaggcctatgacaggggctcatatttgccagccctaccttggtatgtcgagcagtaaaattctcaaaatgaaaaggagaaatcaattgtattttttctagaagctgtggattttaaggtttataattcactactgtattaatgatagtggactaaagtccagctaactctatggatagaaaaggaatgaatatggtctgtgtaagtctacacagcatagggtacaacaaaagcatgctcacc

SEQ ID NO: 4534 - protein, 23 aa, Homo sapien
MDRKGMNMVCVSLHSIGYNKSML

SEQ ID NO: 4535 - DNA, 1771 bp, Homo sapien
ccgttgcctggcccagaatgtttttttaaatcagatgtagcatcttcataaggtaaagcctgtcacatcagagtaacaaagctcctggagtacagtgatgctagagtagaatgttccagaagtctggccatagccccagcttctgaattacctgggagagacaagatgctcaggttactattttttctttattctgatagtacagcctctactcagagaccacggtgtgtgtcacacaaccgaggcagctagggcatattctgagggctttttttttttttttggtttccttaatgattctttaacagagtaactggattggccaaggtctgattcaagaggctgtgaggagagtagagaacaaatagactttgcctctcagagttcagagctttaagttgtataagcatggtccatgtccacctcttgtagacacttattccttaaaagtttccatcatgaaaaataatatcatgtcaaaattttataagcacccagaatgtcccagtagtcaaatgtagtgtctttctccagtctctgttttcgataataaataccttgctctcaatttaggatgatcgtaaagcctatgttcatgctgtgagtcattgtctcccacagcttttgaaacatcgttctttgtcttttctatacaacacctgattctttgtgcctcagactcattgctatcaggaagagactttgccaagatccaccaccacatttggccagtagtgtatacacattaaagtgagagctgatgaaatcacaatgctctattttgttccgacaatcagtatgaaggggtaggtcccagtttgccaatgagcaacagcctctgtatgctggtgtccaagacttacacaaaacaagtgtcagtgcagtcacagcattttcttgaatgctgttgtgacagactccagttataaacatctgcgagccatatggcacaactcatagctaaagaggccggtacagggcacatgcacagagctttgaagaacatacacaaacctgttgaatcaagttactttcctcatcctcagagactttgacaattcagagctcacagatggcagggggaattctcaggcttcccttcctcctgattgacactttttaaaggaagtgatgtggaagttgttctagaagttagatggacagtgggagcacattcgtgagtggggcttgggagagctcaaaagtggcactttgattttaggctgggcaggcagaagtctcacagtaaaatatatttcactagacgtccaaaccaacactgcattgtagtaacctcttctgaagtaactggttaaattaataactggtcccataagtcagggtcaagccacatttataacccattcgggccggccatgaagggttctgactcgacattggtatttaaatgctgttactttcccaatgcttagtagcacttgagactttatttccatcgacaaaaactaagaaggccacagaagtagcctaacagtcctccctggtcatactcgtttcaaacaggtctgcctgtctagacatattcaggcaggaggttgcttgctgctatcttgaaaaccactggaagattcagcttcttggggacctcagagcccatattcatatggaagcccacccatataagcctcacagagcaaatcacagcaatgttgaagttgttattttcaagtgcttatttcacgacattaaaaaaaatattttttcctggtgtattaaaattaaaaataaaatcataacttttgatttaaaa

SEQ ID NO: 4536 - protein, 48 aa, Homo sapien
MEAHPYKPHRANHSNVEVVIFKCLFHDIKKNIFSWCIKIKNKIITFDL

SEQ ID NO: 4537 - DNA, 1806 bp, Homo sapien
  Unsure 1722: Unknown base
taccctagcatgttgatcaggctaaattaagttcctctctcaagccttattgatggctcagtgcccattatattttaactacaggtaacagcagtttgtcctaaatgcattagtttgcacttgtccaggttgtagctcttttatgcctctgctttttcccacatggtcttatgagaacatattgcatatattcccttcagctgagcatttcaatacccagacaagtgtttgtcattttaggcctcatcacatacttgaaattccaagtcctttttaaaagaaatgttaagtagctggtgttgctactagatccctggattattccacttgtccatccataaaagttcctgtttattctctaccttctgtttctatttctaagccaatgctttaagacataacatctgctccagcctgttcactatccatgtggttttaaactcttaactttacttcttagcttcatccctgtaagtaagtgctctctacctcacaggggtcttatgagggggaaaaaataagatgtttaagggttgttttaagagagagatccttcttttaaagtgattttatcaaagccccttgggttagaaatgaaaaactctatagctatttttttcctattctcgttttgctatttttatttctgaaaagtgatctgtctgaaaagagccttatatctggttttaacttctcctcattgacccttttcacagtgaaatctctactttatccatgctctgaactttttatttatggagcccaaactaattttcccacaacaaatctcacatacttttactcctatcattaaacaaattaatgtcctccacaaagaaacatctggctcttcctacaagaagtcagaagctaatgaggtctcactctggccctggcaagatctcacagtgtgccttggttctccctgtgtaaactgaggtagtccggctattccccagcgcccaggtgttgtgagtcctaataaatggtgaaaagcattttgcaaatgttctgtactatataaatgcatagtgcctaatatggagagtcttcaagcaaaaatgtgctctagctcaattcagaatactaattcacccattgttttcaaaagaaatgttttactaacctgtttttttttcttttgtaaaattagtttctagtcatttgaactgtttttattttgtgtatagaagtgatcaatagtatatattcttgcttgtcagagaatacccaagttgtattgttaaatgttaaaacaatggggttacataacagtatagttggatagggaggaagattctagctcaaaagttgcaaaatacagaaatacaaagattagctttgaattggagattgtactataaatagtagatgttaatgtggtggtttctagatatatactttatttttaagttacaagaaattgtcttttatttttgcagttttgaactatatgattctttacatgttttaaataaagtttttatcaactaagatttttcatttacattattatcagtaaattaaaatacatgtaaaaattaacctaattacatgactataaaatttaaatttaagatttaaagaacatcttttatggcaactaagtttctatactttagtcctttttaaaaagattttaaaaataatagtagaaatgcttttatgcttcaaggagcattggaaaatttttttaatatgatgttacttattattgtaatnacttacaatgacttaatacctttttagtgaagctacatttattccacttaaataattattgcttattcctgattaatccttagg

SEQ ID NO: 4538 - protein, 9 aa, Homo sapien
  Unsure 1722: Unknown amino acid
YPSMLIRLN

SEQ ID NO: 4539 - DNA, 3516 bp, Homo sapien
  Unsure 1533-1550, 1654-1827, 2666-2767: Unknown base
aggtaggagtcgactcctgtgaggtatggtgctgggtgcagatgcagtgtggctctggatagcaccttatggacaggtaagaattggggaaagtatggtgggaagaatgaaatctaagaggtggtctcagcctgtgatgctttaagagtagtggacagaagggatttctgaaattctattctgaggctttaatgttaacagcatttatatttaacgtgactgctgtgaggttcattctcactgttttgcttgcatcttttgttttctagttgtgtccccaaggaaggatgagaatagctactgaagtaagttgaaaattccctctcaaaaaggtttaaagccattggatgtgccacaatgatgacagtttatttgctactcttgagtgctagaatgatgaggatcttaaccaccattatcttaactgaggcacccaaaatggtgagttggggaacatagagagtacacctaagttcacatgaagttgtttcttcccaggtcctaaagagcaagcctaactcaagccattggcacacaggcattagacagaaagctggaagttgaaatggtaagtgaaactgtatccaagtaagcaggtaactgggcaaacttcctacggcacaaatggctttttagttacctcctagtgctgaatgcattaaataaatggcggattcttgtcttgttatgattaataagaaagtttgtaaatgcagcctggatgatgataagcaaatgctgactgaacatgaaggtcttaattagctctaactgactaaaggcatttgttagttttggcagggggtgaacactcatctgtggctattctaagaccactcttatttcttaggtggagtccaacttgcctggaccagcttaatggttctggtaagtattaatgaaaacagtagatagacttaatgaaaatgctgatggtgatatgcttactgctgagctaatggcttaaggcttggctgatgaatactgactgtattttccttgagcatgtctggaacagtgtttatgtgttttccttgagcatgtttggaacggggtttgtgtaatgatgttgatcaaatgtctgacctgaaatgagcatgtagacaaaggtaacactgaagaaccctgtgacagacaactttgaaaagagtttaatgatgtttagcattttaatggaagtcctcatttgtattccagctcctggtaacgtttttatccatggatgacttgcttgggtaaggacatgaagacagttcctgtcataccttttaaaggtacatgttttattgatgttaacgttaattgattgagctactgttagtgatgattttaaaattaaagcagatgggaatctctctgagaaagaaaatggagattaatcttaaactgaaacagtagttgggaaatcttttagaaatccacctattactacctattggtaaaggagattaaatttctacaggtatggagagtcggcttgactacactgtgtggagcaagttttaaagaagcaaaggtatagcagttccaagnnnnnnnnnnnnnnnnnnagacaagaagtctagctcttgcccagaaagtggagtgcagcggccctatcaagttcactgcaacctcgtgcctcccaggcttcaaggaattctcctggcctcannnnnnnnnnnnnnnnnnnnnnnnnnnnnnnnnnnnnnnnnnnnnnnnnnnnnnnnnnnnnnnnnnnnnnnnnnnnnnnnnnnnnnnnnnnnnnnnnnnnnnnnnnnnnnnnnnnnnnnnnnnnnnnnnnnnnnnnnnnnnnnnnnnnnnnnnnnnnnnnnnnnnnnnnnnnnntcaagtctggtttttaagtgttgtaaagccgatacaatgatgataacatagttcagcagactaacgctgatgagcaatattaagtctttcgctcctatctgatgtatctggcggtaacattctagtttatgccccgaaaaggggaatatagccattctataatgtttggagattttggattactcctaattgtatgcaagttgtcttactgtgtattgtcccttaatttcaggactcagaattcatgattgaagaaatgcaggttagtttaaactttgaaggaaatttttaaggtggcaaaaggttttggtggcatatacaccttaatctgtagatgggagtgattagctgtttaaaagttaaaatgtgactgagaaggaaattgagtagggcaaattttaaatgggtattatttttcatcttcaaacaggcagacctgttatcctaaactaggtgagtcagcttttggtacatgtgatgattttcagtgtaaccaatgatgtaatgattctgccaaatgaaatataatgatatcactgtaaaaccgttccattttgattctgaggttactctactaacaagcatcacacatttgtattttgccctgattaatatgttggcttcgctttcagggtttttaatgaccacaacaagcaagcatgcagcttactgcttgaaaggtgaggattggaaatgttgggactattataattgcagaatacatgatgatctcaatccaacttgaactctctcactgattacttgatgacaataaaatatctgatattctgcattcccatgtagcattttaattgaagtctgtaaatgtggctaaaagnnnnnnnnnnnnnnnnnnnnnnnnnnnnnnnnnnnnnnnnnnnnnnnnnnnnnnnnnnnnnnnnnnnnnnnnnnnnnnnnnnnnnnnnnnnnnnnnnnnnnnagcctcccagtggtctttgtagactgcctgatggagtctcatggcacaagaagattaaaacagtgtctccaattttaataaatttttgcaatccatctggagtgtgtagtgtttacttaaaaaaggacagtgcttttcatctgttcattagctgtaagcataaatcacattcaaaagctattataactccatggtatttgcttcattaacactgcagccagttaaaattttatgggtattttacaaggtgtcttatgcattaaagtgcaatatttcctaattctccatatgagcaaattgtcaggtttcataggcccctgtgctaattggttttgagcttaaagtattgatggagctactttggagaaagtcatgttgagtctgaggctgggaaaataagttatagaaaatactatagaaatgcccaactagtgataggcattaatggaattgggaaaatctacaatccatagccatggtgataggtttttggcaagcactaagtgtttagggatgccaaaagtgggtataaagggcacaactggtttaaggcaatctgtcccagggaaacaggaccaaggggccaaaattccaagatgggtcaaattttaatttcagtgtcagtacagctgtgcttataatgatgtctttgttagcagtaatggttttacaaatctgtttctgggctaaagcactttagtcccattaatgataaaacttcagttactctctgaattttcctttttttg

SEQ ID NO: 4540 - protein, 13 aa, Homo sapien
  Unsure 1533-1550, 1654-1827, 2666-2767: Unknown amino acid
MIKLQLLSEFSFF

SEQ ID NO: 4541 - DNA, 3845 bp, Homo sapien
  Unsure 3011-3032: Unknown base
gcggccgcagccccggccgagcaggcgccgcgggccaagggccgcccgagacggtccccagagagccaccggaggagcagctcacctgagagacggagccccggctcgcccgtgtgcagagcggacaaggcaaaatctcagcaagttcggacctctagtacaataaggcgaacctcctctttggatacaataacaggaccttacctcacaggacagtggccacgggatcctcatgttcactacccttcatgcatgaaagacaaagctactcagacacctagctgttgggcagaagagggtgcagaaaagaggtcacatcagcgttctgcgtcatgggggagtgctgatcaactaaaagagcagatcgccaaactgaggcagcaactacaacgcagtaaacagagtagtcgtcacagtaaggagaaagatcgccagtcacctcttcatggcaaccatataacaatcagtcacactcaggctactggatcaaggtcagttcctatgccactgtcaaatatatcagtgccaaaatcatctgtttcgcgtgtgccctgcaatgtagaaggaataagtcctgaattagaaaaggtattcattaaagaaaataatgggaaggaagaagtatccaagccgttggacataccagatggtcgaagagctccacttcctgctcattaccggagcagtagtactcgcagcattgacactcagactccttctgtccaggagcgcagcagtagctgcagcagtcattcaccctgtgtctcccctttttgtcccccggaatcccaggatggtagcccttgctcaacagaagatttgctctatgatcgtgataaagacagtgggagtagctcaccgttacccaagtatgcttcatctcccaaaccaaacaacagctacatgttcaaacgggagcccccagagggatgtgagcgagtgaaggtctttgaggaaatggcgtctcgtcagcctatctcggcccctctcttttcatgtcctgacaaaaacaaggttaatttcatcccaaccggatcagctttctgtcctgtaaaacttctaggccccctcttacctgcttctgaccttatgctcaagaactctcctaactctggccagagctcagctttggcaactctgaccgttgagcagctctcatcccgggtttcctttacgtctctttctgatgacaccagcacagcgggctccatggaggcctctgtccagcagccatcccagcagcagcagctcctgcaggaactgcagggtgaggaccacatctctgctcagaactatgtgatcatctaaaaaagggggagctggcctccaccctgtgttccatggattcggaacaagatttcagacatctgcatgagtgacaaactttctgaacaccaccaccaccaataatacttatcagcatcataaagtatctcttaaacactgatcttggcagggacggaactcctattcagcagtttttgtggaaagcagtaatgcttgcaaaacgtgtgtgtcattcagcattttaagtggagactatgcatttcatagtatatttgacagattagtactgtgtcctgtgttttgttccagattcttcagtataaataagctctatatcaaaaagttgcctgtctaaatagaaaatgtcttgctgtgttttgtcctatggaaaatactgtaattcaggattatgtttacaattgatccaggtgtttgtttctaacttctgtaatacatacaatgcaaaaaaaaaaaaaaaaatggccacaacagttgcacagtgcccaccctatggcctagcttcaggtacttcagttgaagtctaaactcaggtaacttggaatgtatatcatattgggatattaaatatttcacagctaaaaagctaaagagggaacatcactcttttgcctttccttattttatgcatttccctttcctcattacattccacattcttagaataagaagtgcattcaatcctaggagaatgataatcctggacatgggtgaacatgaggagaaccagcaaaatctgtggtgtttgacatcactttgtcatgtggttacaagtaaaacaactgttgcattcactgtttcaacatgtgtacatgtggcttttttaaaagttcaggtgttgctcagtaaaggactgtgacaatgttgcaaataaagtgttcagtactggactgtacataaacattccacattgtgtgtgatgaaatttaaagacaagaatgtctagagttaatttcaaaataagtgaagtgtttgacggaatggttgagatttttttgtttatgttagccatcagggtcataactgttaccattttatctaaagacatatttatatttagtttctcccttggaaattctttattttgcaggtgaaaaagtgacatactttttgttattgtcttcctcaagcagtttaggtgcatgatcttcatttacatagaatacttgggtctcagaattgatgcaacataagcaggtttttttggtgacttacaagagcaatagtttgaagctatctcatttaagcctctcataatgcataatcatgagtagttttgaaatttgcaacctgtgaggtagagcataaactcaagaaaatagccttgaacttgcagacttttgacacaagttctccacaaagtgtgaagagagccccaggcattcctgattggtcaatgggagagcctaactttcattgttttcttcagtacaaagagtatccaaaagctaagtttttgtattccactactttcagttcaataaaacctagagttgtttcatctgcgcctaaagtgtatggcacaattttcttaagaattaggggaaccaggtgcctacagttaaaggaacgtttcagttcctttcattcattcctgggtttttcttttattttctaagaaggttgaagaaggatgagtgatagagaagaaagcaacaccattgatttttttttttaagaaatgatatatatatgtatatgtttgnnnnnnnnnnnnnnnnnnnnnnagtattctgtgcattattttgtcatgatctcaattctcttctttccaccaaagtttgtcgtaatattttctcctgaaggtgcattctggctcctttaaattagtcagtgttatattgtaggagactgtcatggaaaaaaggactcagtttactttcgtcattttcacaggggaaccttttaaaacaatcttttcagcagcagatacctttaaccctaataatctcaggccttgatgaaaatactatattttgtagattatggttaaagggggaaaattactagttccgtaagataaatatgagctccatttgacttctgatgtctggtttagcattacataatatgttgatcttacactctgcttttgtccaaataaaatgcaatagtatcaatatcaatttcagaaaaatggactgaatatgcttttttggtgatgaaatctcatgtacgatatttatagtgatgtgcttttattttctcatgagatactaaatattaattgtgttgtacatttgttcttagcatatattaaagttttgaaccaaatgtgttaaagcttacgctttgccatgtaaatttcccagaagttgttgagctcaaatgtatcctacatccagctgtagaaatttgtcagaaattgtttaaattttgtatataattgtactgtttaattctagccattgcgctgaacagtatttgagttaccatataatatggctttacacaaggaaatgtgtggcttttgttttgtattttttcagtatagaagttcctgtgtcttatttaaataaagttattagtaaaactgaaaa

SEQ ID NO: 4542 - protein, 435 aa, Homo sapien
  Unsure 3011-3032: Unknown amino acid
AAAAPAEQAPRAKGRPRRSPESHRRSSSPERRSPGSPVCRADKAKSQQVRTSSTIRRTSSLDTITGPYLTGQWPRDPHVHYPSCMKDKATQTPSCWAEEGAEKRSHQRSASWGSADQLKEQIAKLRQQLQRSKQSSRHSKEKDRQSPLHGNHITISHTQATGSRSVPMPLSNISVPKSSVSRVPCNVEGISPELEKVFIKENNGKEEVSKPLDIPDGRRAPLPAHYRSSSTRSIDTQTPSVQERSSSCSSHSPCVSPFCPPESQDGSPCSTEDLLYDRDKDSGSSSPLPKYASSPKPNNSYMFKREPPEGCERVKVFEEMASRQPISAPLFSCPDKNKVNFIPTGSAFCPVKLLGPLLPASDLMLKNSPNSGQSSALATLTVEQLSSRVSFTSLSDDTSTAGSMEASVQQPSQQQQLLQELQGEDHISAQNYVII

SEQ ID NO: 4543 - DNA, 1634 bp, Homo sapien
ccctgctaacaaagggagccacttccttcctctctgcacataccccatgtctcaccacgatgatggagctacagtgggacttggaatccagatgtgtgaaggatggagggttgaagccgcactcagcttcctgccccaccagaggaagtggggagagacggcaggtgcagtgatggctggcggagtcatggacaaggagtacgtgggttttgctgccctccccaaccagctgcaccgcaagtctgtcaagaaggggtttgacttcacgctaatggtggcaggggagtcaggcctagggaaatccaccctcatcaacagcctcttcctcaccaacctctatgaggatcgccaggtgccagaggccagtgctcgcttgacacagaccctggccattgagcgccggggcgtagagattgaggaagggggtgtgaaagtgaagctgacccttgtggacacacctggctttggggactcagtggactgctctgactgctggcttccggtggtgaaattcatcgaggagcaatttgagcagtaccttagggatgagagtggcctgaaccggaagaacatccaggactcccgagtccactgctgcctctacttcatctcacccttcggccgggggctccggcccctagatgtggccttcctccgggcagtacacgagaaagtcaacatcatcccagtcattggcaaagcggatgctctgatgccccaggaaacccaggccctcaagcagaagatccgggatcagttgaaggaagaggagatccacatctaccagttccccgaatgtgactctgatgaagatgaagacttcaagaggcaggatgcagagatgaaggaaagcatcccttttgcagtcgtgggatcatgcgaggtggtgagggatggcgggaaccggccggtgaggggacgccgctactcctgggggaccgtggaggtggagaacccacatcactgcgatttcctgaacctgcgacggatgctggtgcagacacacctgcaggacctgaaagaggtgacgcacgatctgctctacgagggctaccgggcccgctgcctacagagcctggcccggcctggggctcgcgatcgagccagccgcagtaagctttcccgccagagcgccacagagatcccgctgcccatgctgcctctggcggacaccgagaagctgatccgcgagaaagacgaagagctgcgccgcatgcaagagatgctggagaagatgcaggcccaaatgcagcagagccaggcccagggcgagcagtcagacgccctctgaggccacgccccgcccggccttacctcggctccgccttcagtcggcctcttgtccaatccccgcgccccacactgcccagcgccccccgggacctccgcgggtgccgccctcgcgcgggctagggggaggttctcccagcctgagtccgtagccccgccccggcgctggtcccgcccacccagacaccgcccacttcccggcccggggcctgcacaatctccgaccgcatcactgtcttccggagtcccccttcttctcccagactctgtcttcaataaaaactgagcttcccgcggccaaaaaaaaaaaaaaaaaaaaaaaaaaaaaaaaaaaaaaaaaaaaa

SEQ ID NO: 4544 - protein, 367 aa, Homo sapien
MDKEYVGFAALPNQLHRKSVKKGFDFTLMVAGESGLGKSTLINSLFLTNLYEDRQVPEASARLTQTLAIERRGVEIEEGGVKVKLTLVDTPGFGDSVDCSDCWLPVVKFIEEQFEQYLRDESGLNRKNIQDSRVHCCLYFISPFGRGLRPLDVAFLRAVHEKVNIIPVIGKADALMPQETQALKQKIRDQLKEEEIHIYQFPECDSDEDEDFKRQDAEMKESIPFAVVGSCEVVRDGGNRPVRGRRYSWGTVEVENPHHCDFLNLRRMLVQTHLQDLKEVTHDLLYEGYRARCLQSLARPGARDRASRSKLSRQSATEIPLPMLPLADTEKLIREKDEELRRMQEMLEKMQAQMQQSQAQGEQSDAL

SEQ ID NO: 4545 - DNA, 2499 bp, Homo sapien
ggcgggcgtgggggcagttccccagcccaggtcctcctctcacccgggccagttttcaaggcgggctgtaactggtggcatttgtcccgggaccaggtccacagttttatgtgtgagcaagatggaggctgacctgtctggctttaacatcgatgccccccgttgggaccagcgcaccttcctggggagagtgaagcacttcctaaacatcacggacccccgcactgtctttgtatctgagcgggagctggactgggccaaggtgatggtggagaagagcaggatgggggttgtgcccccaggcacccaagtggagcagctgctgtatgccaagaagctgtatgactcggccttccaccccgacactggggagaagatgaatgtcatcgggcgcatgtctttccagcttcctggcggcatgatcatcacgggcttcatgctccagttctacaggacgatgccggcggtgatcttctggcagtgggtgaaccagtccttcaatgccttagtcaactacaccaacaggaatgcggcttcccccacatcagtcaggcagatggccctttcctacttcacagccacaaccactgctgtggccacggctgtgggcatgaacatgttgacaaagaaagcgccgcccttggtgggccgctgggtgccctttgccgctgtggctgcggctaactgtgtcaatatccccatgatgcgacagcaggagctcataaagggaatctgcgtgaaggacaggaatgaaaatgagattggtcattcccggagagctgcagccataggcatcacccaagtagttatttctcggatcaccatgtcagctcctgggatgatcttgctgccagtcatcatggaaaggcttgagaaattgcacttcatgcagaaagtcaaggtcctgcacgccccattgcaggtcatgctgagcgggtgcttcctcatcttcatggtgccagtggcgtgtgggcttttcccacagaaatgtgaattgccagtttcctatctggaaccgaagctccaagacactatcaaggccaagtatggagaacttgagccttatgtctacttcaataagggtctctaaatgccccacttcagcaaggaccagtctattcccatattcaccagctcctccttagctacgtgcacacttgtgtcctccttcccctttgccaacaaggcctgaaggccagggtagattggggggtgggacaatgaatgcctcatacttacaccctggtactggttgattggacctcaggggaaaaaagtgaaaaagggtagcaaaggccaatgtcttctagctgcttcctcaacccctgtcccctggagaccagaagctgaggccctctcagggaggagacatccaagcaaatcatttggaaaagttaggaaacctttaggattctggttccagccagggttgaggaaaagaccttggatcaaaaggaagcttctatacctctttcttcttcgcttcctcctctcccaagcaatggaaacttttacccatgtaattctagctgaactcaggaaaaagaagggggaaaggactctgtccccttggggctcatcacccttccacatcctcctcctcgttgccccctggtcaggcagcttcttttttttttttttcaagatggagtcttgctctgtcgcccaggctggaatgcagtggcgcgatctcggctcactgcaaactctgcctcctggattcaagcgattctcctgcctcagcctctcaagtagctgggattacagggcacctgccaccacgcctggctaatttttgtattttagtggagacggggtttcaccatgctggccagactggtctcgaactcctgacctcaggtgatccgcccgcctcagcctctgaaattgctgggattacaggcatgagccaccacacccagcccggacagcttctttgggagtgctgctaaccttgaaattatcagacacttaggagttattagtgctaaaaaggggaccgtgcaaggcagcagagttacatggttcttcaaatcatgtctgaacctattcttggaatcttctctataataagggaagttctcttaccccactgccacatacctctgttttaaaagataagtccactaactgtgagtaaaaatgatatatataggcattaaccacacactttaatgggtataatttcctggctgcctcccctcctcagcccattaggttaaacaccaaagaaagactggtgtgtactgaataggaaagggaagttttatttggaaccttctaagaggaaatcaaccaggaccaaagagccttaaaggacacacagcaatgcacagccacttcccttccccagcttggctgccctaggtgatttctcaagctccttgggggactgttgtttctcatctggaatcaatgtgtgtatgagttttgtctggtaggattgctgactctgtccaacagatatccctgtgaattgaataaatttgttgaaagagc

SEQ ID NO: 4546 - protein, 322 aa, Homo sapien
MEADLSGFNIDAPRWDQRTFLGRVKHFLNITDPRTVFVSERELDWAKVMVEKSRMGVVPPGTQVEQLLYAKKLYDSAFHPDTGEKMNVIGRMSFQLPGGMIITGFMLQFYRTMPAVIFWQWVNQSFNALVNYTNRNAASPTSVRQMALSYFTATTTAVATAVGMNMLTKKAPPLVGRWVPFAAVAAANCVNIPMMRQQELIKGICVKDRNENEIGHSRRAAAIGITQVVISRITMSAPGMILLPVIMERLEKLHFMQKVKVLHAPLQVMLSGCFLIFMVPVACGLFPQKCELPVSYLEPKLQDTIKAKYGELEPYVYFNKGL

SEQ ID NO: 4547 - DNA, 4052 bp, Homo sapien
gaagtataagtgggattttcaccaaaaccctatccttccccagactccagtgacagtttaacggtcagctgcatcaaggcttgtgtactgtgcagtcttaaaaggcaccactcctgtccatctcggtgaaattgatggtggagcaaaagggagtttaggtggttccggtctggggagaagacgtgcagggtttcagatgcgaaagtcgcacccaaccgcttcactcgggctctaggccatccgcaggggccctgcttccttccacctgcgagctttttctgcagaatgcgggaagccgccgccgccgccacagaggagggggcggaggcagaggcggaggcggcacccaggggccggggcaggggaggccgggaccatcgcagtgacaatttattttcctgcagcagcggcagcagggacggttgctgcaggttcggggtcggccggcctgcgcgtgggcttgcgaggacgctgttcgtcccctgcgctggggtgtccgacagcgaggaggagaacgacgcacggagcccgcgcgactggaaccagcaaagctccatctgtcggcagaggagaagggggaggaggcacggccgaggcaaacgagcggacgcctcgtcgccgggtgccggtatcaccccgctgcaacgccttccagcaaaagccaccgcggcccgggttgcagcagccggacggatgccaaggccacacggcagccacgggggcagccgtcgcagtcgccgtcccacacgggctgcggacaccaagggttgctaatgaagtgattgagaagaaacagtgaacatcctcatttcacagataagacaacatggatcagccttttactgtgaattctctgaaaaagttagctgctatgcctgaccatacagatgtttccctaagcccagaagagcgagtccgtgccctaagcaagcttggttgtaatatcaccatcagtgaagacatcactccacgacgttactttaggtctggagtagagatggagaggatggcgtctgtgtatttggaagaaggaaatttggaaaatgcctttgttctttataataaatttataaccttatttgtagaaaagcttcctaaccatcgagattaccagcaatgtgcagtacctgaaaagcaggatattatgaagaaactgaaggagattgcattcccaaggacagatgaattgaaaaacgaccttttaaagaaatataacgtagaataccaagaatatttgcaaagcaaaaacaaatataaagctgaaattctcaaaaaattggagcatcagagattgatagaggcagaaaggaagcggattgctcagatgcgccagcagcagctagaatcggagcagtttctgtttttcgaagatcaactcaagaagcaagagttagcccgaggtcaaatgcgaagtcagcaaacctcagggctgtcagagcagattgatgggagcgctttgtcctgcttttccacacaccagaacaattccttgctgaatgtatttgcagatcaacctaataaaagtgatgcaaccaattatgctagccactctcctcctgtaaacagggccttaacgccagctgctactctaagtgctgttcagaatttagtggttgaaggactgcgatgtgtagttttgccagaagatctttgccacaaatttctgcaactggcagaatctaatacagtgagaggaatagaaacctgtggaatactctgtggaaaactgacacataatgaatttactattacccatgtaattgtgccaaagcagtctgcgggaccagactattgtgacatggagaatgtagaggaattattcaatgttcaggatcaacatgatctcctcactctaggatggatccatacacatcccactcaaactgcatttttatccagcgttgatcttcacactcactgttcctatcaactcatgttgccagaggccattgccattgtttgctcaccaaagcataaagacactggcatcttcaggctcaccaatgctggcatgcttgaggtttctgcttgtaaaaaaaagggctttcatccacacaccaaggagcccaggctgttcagtattcagaaattcctttctgggataatttctggcactgctttggagatggagcccctgaaaattggctatggaccaaatggattcccactcttggggatctctaggtcatcatcaccatctgaacagctctgagagagacaagaagtggaatggagaaggtgattaggtaatccaagaattgccaggcgaacaattgtgaaaatctttcatagagttcccgatgaaaacaactctttcttgttagccattatctctgcctttcctttctaaagaaaaacacgtcatttcatcttgattatcagtttctcaagtactcatggatgtgaggccaggtaccctgtcaccttggctctgtttgggatgcaatgttgtgtttgtcaccacttcccattccccaaaagcatctttaacatagaccattcattcttcagattcaaaatgcttaagctgaactaacctcaaagggccctcattaatttacagacatttgaataacacccatattcatttctgctactgaaccaaagccttttccaaaaaaatcatctagcaaactgtttttgccaggccaaatattaacaggtatatatatttgcatacataaatatttacctctatgtcttgtgtgtttttgttatgagacagagtctcactctgtcgcccaggctggagtgcagtggcacagtctcagctcactgcaacctccacctcccaggttcaagcgattctcatgcctcagcctcccgagtagcgaggactacaggcgtgcaccaccacgcccagctaatttttgtatttttagtagagatggggttttaccctgttggccagggtggtctcgaattcctgacctctgatgatctgcccgcctggacctctcaaagtgctgggattacagacatgagccactgtgccctgcctctgttttgtgtatttacataaatacatgtctccagagctttaaattcttcttaaattttaaaactagaactaaaccagacattgagaggacccagaaatataccctgactaacgtgggtggaatttcatttggcttgactctttggtgaaaaaaaaaaaaatcaggctctcaaggactcaatttggtgaaccaatgccaaatagaaaaatgttcttgacattttccccaaaatagatgtctaaagattttgcacttcaaattggtactttatgtattaaaagtgatattgaaactaaattcctacccaattagttgaaaaatatgaaaaaagcaattgctagagaatgcaatttattaaatgttggtggtcttttaaaaaatgaattcctcttgtagccagtgagatcagttatttatttatttattttaatagtaacaaggtctcactatattgtccaggctgatcttgaactcctggcctcaagctgtcctcccatctcagcttcccaaagtgctgagattataggcatgagccaccatgcctggctagttaatggttattaagtaatacaaacatttctgtgaattccaccagatcattgactttggcatagttcacttaagactttgtttgataaaataaatctctttcactctaattaggaagcatttttgggatcctgattaatgctctaatattgtggggccaaaaaatatgtggaacgtggccctgcagttagatgagctgagatcactatagtactatatagcgctctaaatcctaaatgctagatcactgtaatactgtacagatcagccacttgctggcttgtgactctgggccatttacttcacctctcaaaaggcatatttaaagtgaggaaaataataagtttattttggaaattcagttagatgatgcaaattgtttactgtaatttctagcatgtagttcgtgctccatgcatttaactgttattacaggttgtattagtatcacattaaattacccactgaagtgaaagtgaaaccagaatgctgtcaacgatt

SEQ ID NO: 4548 - protein, 463 aa, Homo sapien
DNMDQPFTVNSLKKLAAMPDHTDVSLSPEERVRALSKLGCNITISEDITPRRYFRSGVEMERMASVYLEEGNLENAFVLYNKFITLFVEKLPNHRDYQQCAVPEKQDIMKKLKEIAFPRTDELKNDLLKKYNVEYQEYLQSKNKYKAEILKKLEHQRLIEAERKRIAQMRQQQLESEQFLFFEDQLKKQELARGQMRSQQTSGLSEQIDGSALSCFSTHQNNSLLNVFADQPNKSDATNYASHSPPVNRALTPAATLSAVQNLVVEGLRCVVLPEDLCHKFLQLAESNTVRGIETCGILCGKLTHNEFTITHVIVPKQSAGPDYCDMENVEELFNVQDQHDLLTLGWIHTHPTQTAFLSSVDLHTHCSYQLMLPEAIAIVCSPKHKDTGIFRLTNAGMLEVSACKKKGFHPHTKEPRLFSIQKFLSGIISGTALEMEPLKIGYGPNGFPLLGISRSSSPSEQL

SEQ ID NO: 4549 - DNA, 2010 bp, Homo sapien
gcagcggcagcagggacggttgctgcaggttcggggtcggccggcctgcgcgtgggcttgcgaggacgctgttcgtcccctgcgctggggtgtccgacagcgaggaggagaacgacgcacggagcccgcgcgactggaaccagcaaagctccatctgtcggcagaggagaagggggaggaggcacggccgaggcaaacgagcggacgcctcgtcgccgggtgccggtatcaccccgctgcaacgccttccagcaaaagccaccgcggcccgggttgcagcagccggacggatgccaaggccacacggcagccacgggggcagccgtcgcagtcgccgtcccacacgggctgcggacaccaagggttgctaatgaagtgattgagaagaaacagtgaacatcctcatttcacagataagacaacatggatcagccttttactgtgaattctctgaaaaagttagctgctatgcctgaccatacagatgtttccctaagcccagaagagcgagtccgtgccctaagcaagcttggttgtaatatcaccatcagtgaagacatcactccacgacgttactttaggtctggagtagagatggagaggatggcgtctgtgtatttggaagaaggaaatttggaaaatgcctttgttctttataataaatttataaccttatttgtagaaaagcttcctaaccatcgagattaccagcaatgtgcagtacctgaaaagcaggatattatgaagaaactgaaggagattgcattcccaaggacagatgaattgaaaaacgaccttttaaagaaatataacgtagaataccaagaatatttgcaaagcaaaaacaaatataaagctgaaattctcaaaaaattggagcatcagagattgatagaggcagaaaggaagcggattgctcagatgcgccagcagcagctagaatcggagcagtttctgtttttcgaagatcaactcaagaagcaagagttagcccgaggtcaaatgcgaagtcagcaaacctcagggctgtcagagcagattgatgggagcgctttgtcctgcttttccacacaccagaacaattccttgctgaatgtatttgcagatcaacctaataaaagtgatgcaaccaattatgctagccactctcctcctgtaaacagggccttaacaccagctgctactctaagtgctgttcagaatttagtggttgaaggactgcgatgtgtagttttgccagaagatctttgccacaaatttctgcaactggcagaatctaatacagtgagaggaatagaaacctgtggaatactctgtggaaaactgacacataatgaatttactattacccatgtaattgtgccaaagcagtctgcgggaccagactattgtgacatggagaatgtagaggaattattcaatgttcaggatcaacatgatctcctcactctaggatggatccatacacatcccactcaaactgcatttttatccagcgttgatcttcacactcactgttcctatcaactcatgttgccagaggccattgccattgtttgctcaccaaagcataaagacactggcatcttcaggctcaccaatgctggcatgcttgaggtttctgcttgtaaaaaaaagggctttcatccacacaccaaggagcccaggctgttcagtatatgcaaacatgtgttggtaaaagacataaaaataattgtgttggatctgaggtgatatgttctgaatgtaagcaccgtcaacatcagacacctactcatggacatgtggttgccggattttcttaagatgtttccagaaatgactgatattttatatttatacattttagatgacaaagcttgatatttattgctgttgcacattttaaagttttctttttgggttgctctgtgtcaagagaggttacatggtgttaaatcggtacctgataatgtacccaaatactatggccagataataaattgtgctgcaaacaaaaaaaaaaaaaaa

SEQ ID NO: 4550 - protein, 421 aa, Homo sapien
MPDHTDVSLSPEERVRALSKLGCNITISEDITPRRYFRSGVEMERMASVYLEEGNLENAFVLYNKFITLFVEKLPNHRDYQQCAVPEKQDIMKKLKEIAFPRTDELKNDLLKKYNVEYQEYLQSKNKYKAEILKKLEHQRLIEAERKRIAQMRQQQLESEQFLFFEDQLKKQELARGQMRSQQTSGLSEQIDGSALSCFSTHQNNSLLNVFADQPNKSDATNYASHSPPVNRALTPAATLSAVQNLVVEGLRCVVLPEDLCHKFLQLAESNTVRGIETCGILCGKLTHNEFTITHVIVPKQSAGPDYCDMENVEELFNVQDQHDLLTLGWIHTHPTQTAFLSSVDLHTHCSYQLMLPEAIAIVCSPKHKDTGIFRLTNAGMLEVSACKKKGFHPHTKEPRLFSICKHVLVKDIKIIVLDLR

SEQ ID NO: 4551 - DNA, 4059 bp, Homo sapien
gggagctggtggcgcggcgcaggtcccggccgagtgtggcgcagcagtggcggcgcttcccattcgccatgcgccgggggtgggtgcccgaaggttgcatgatggaatttgaacattacttcaagaggttttgtattttggattagttaattgggtttgtcctctgctgactgtttcttcggatgcattttttggtgtgctcttgagggattaaatgcaaagagatcacaccatggactacaaggaaagctgcccaagtgtaagcattcccagctccgatgaacacagagagaaaaagaagaggtttactgtttataaagttctggtttcagtgggaagaagtgaatggtttgtcttcaggagatatgcagagtttgataaactttataacactttaaaaaaacagtttcctgctatggccctgaagattcctgccaagagaatatttggtgataattttgatccagattttattaaacaaagacgagcaggactaaacgaattcattcagaacctagttaggtatccagaactttataaccatccagatgtcagagcattccttcaaatggacagtccaaaacaccagtcagatccatctgaagatgaggatgaaagaagttctcagaagctacactctacctcacagaacatcaacctgggaccgtctggaaatcctcatgccaaaccaactgactttgatttcttaaaagttattggaaaaggcagctttggcaaggttcttcttgcaaaacggaaactggatggaaaattttatgctgtcaaagtgttacagaaaaaaatagttctcaacagaaaagagcaaaaacatattatggctgaacgtaatgtgctcttgaaaaatgtgaaacatccgtttttggttggattgcattattccttccaaacaactgaaaagctttattttgttctggattttgttaatggaggggagctttttttccacttacaaagagaacggtcctttcctgagcacagagctaggttttacgctgctgaaattgctagtgcattgggttacttacattccatcaaaatagtatacagagacttgaaaccagaaaatattcttttggattcagtaggacatgttgtcttaacagattttgggctttgtaaagaaggaattgctatttctgacaccactaccacattttgtgggacaccagagcctcctttttattgccgagatgttgctgaaatgtatgacaatatccttcacaaacccctaagtttgaggccaggagtgagtcttacagcctggtccattctggaagaactcctagaaaaagacaggcaaaatcgacttggtgccaaggaagactttcttgaaattcagaatcatcctttttttgaatcactcagctgggctgaccttgtacaaaagaagattccaccaccatttaatcctaatgtggctggaccagatgatatcagaaactttgacacagcatttacagaagaaacagttccatattctgtgtgtgtatcttctgactattctatagtgaatgccagtgtattggaggcagatgatgcattcgttggtttctcttatgcacctccttcagaagacttatttttgtgagcagtttgccattcagaaaccattgagcaaaataagtctatagatgggactgaaacttctatttgtgtgaatatattcaaatatgtataactagtgcctcatttttatatgtaatgatgaaaactatgaaaaaatgtattttcttctatgtgcaagaaaaatagggcatttcaaagagctgttttgattaaaatttatattcttgtttaataagcttatttttaaacaatttaaaagctattattcttagcattaacctatttttaaagaaaccttttttgctattgactgttttttccctctaagtttacactaacatctacccaagatagactgttttttaacagtcaatttcagttcagctaacatatattaatacctttgtaactctttgctatggcttttgttatcacaccaaaactatgcaattggtacatggttgtttaagaagaaaccgtatttttccatgataaatcactgtttgaaatatttggttcatggtatgatcgaaatgtaaaagcataattaacacattggctgctagttaacaattggaataactttattctgcagatcatttaagaagtaacaggccgggcgcggtggctcacgcctgtaatcccagcactttgggaggctgaggcgggcagatcacctgaggtcaggagttggagaccagcctgaccaacatggacaaaccccgtctctactaaaaatacaaaattggcagggtgtggtggcacatgcctataatcccagctacttgggaggctaaggcaggagaatcgcttgaacccgggaggcggaggttgcagtgagccgagatcgcaccattgcactcctgcctgggcaacaagagtgaaactccatctccaaaaaaaaaaagaaaaagtaacaaaaggaaattatttgtttttgaaataccagttcaactttgtggattatttttcctctgaaggaaaagaaaaggcttaatggttaggatttttaagtattcccaaagatctgaagggtaataaaatgtactggattttttaaggtggtaccaaaaatgaatgtctgtcatatatttatattacaaatacattatatttatgttctattcatcttttgaatgtttagtatgctattaagtcattctgaatctttgtatttgcttttgcaaataggtatttcaaagctcttttcctaactggttaagtaaaataaaaaattgagctttctagaatatttgcctaattgggaattaaaaagtaaaataataggccaggcatggtggctcatgcctataagcaccctgggaggccgaggcaggcagattatttgagctcaggagtttgagaccatcctgggcaacatggcgaaaccctatctctacaaaaaatacaaaaattagccagacatggtggcacatgcctttagtcccagctactctggaggctgaagttggaggatggcttgagcccacgagatggaagttgcagtgaactgaaattgtgccactgcacttttcagcctgggtgccacagcgagaccctagttaagagaaaaaaaaagtaaaaacaaattgtgggtcaaagtaaatgtatacagttttattacaatgtaacaaaagttgaaaatcaggcagatgtgtattcagtatccaattcaatatatcttagaaaaagcacaggaaacagaccttaaaattgtaacctaccaactaacttacatgcttataaaagtaaaggagaataactggccgggcacggtggctcatgcctataaaattccagcactttgggaggccaaggcaggaggatcacttgagcctatgagttcaagaccagcctaggcaatgtagtgacacctcatttctatttattttaaaaaaaagagagagtaactacagaagaactttaaaaaataaaaaataagcttaccttggattcttggcttagagtagaggttttttttaagttatggaggaaacatttttgtaaaagtttaatgacccactttagatgctccaagaacaagcatcccttccatgtatgtcttgagaaagaaatcacagaagcatttctcaccaatactctttggcttaaaatgttcagcagaattgggcagtgggggtgacttttcttatattaataatatttacatccaatacactgaatcttcctttagaggtaagactttaatatctatactgtaaatatttggtttatttggcactactgtaagttttgtttttcacaaagctcttattatgaagcaaaataaaaattctagtttcttgtatgattttttgtactcattcattcctgttaagctgccaaaaattaaagtgcaatattgtatatttttaagaacaaatttaaaatagaattttgatgtttctcagatcacaagaaatacaaatctatatagtataataaaatcagcaaaaagatcaaaaaaaaaaa

SEQ ID NO: 4552 - protein, 397 aa, Homo sapien
MALKIPAKRIFGDNFDPDFIKQRRAGLNEFIQNLVRYPELYNHPDVRAFLQMDSPKHQSDPSEDEDERSSQKLHSTSQNINLGPSGNPHAKPTDFDFLKVIGKGSFGKVLLAKRKLDGKFYAVKVLQKKIVLNRKEQKHIMAERNVLLKNVKHPFLVGLHYSFQTTEKLYFVLDFVNGGELFFHLQRERSFPEHRARFYAAEIASALGYLHSIKIVYRDLKPENILLDSVGHVVLTDFGLCKEGIAISDTTTTFCGTPEPPFYCRDVAEMYDNILHKPLSLRPGVSLTAWSILEELLEKDRQNRLGAKEDFLEIQNHPFFESLSWADLVQKKIPPPFNPNVAGPDDIRNFDTAFTEETVPYSVCVSSDYSIVNASVLEADDAFVGFSYAPPSEDLFL

SEQ ID NO: 4553 - DNA, 4359 bp, Homo sapien
gctgcggctcgccgcgcggctccagctggggcgcggtggtcccgacggtcacccgaatcgcagggagtcgccgctggagaggggctcggcgcccggcggggactgcaggcgatgacccaggatgcagccaggggccacgacatgcacggaggaccgcatccagcatgccctggaacgctgcctgcatggactcagcctcagccgccgctccacctcctggtcagctgggctgtgtctgaactgctggagcctgcaggagctggtcagcagggacccgggccacttccttatcctccttgagcagatcctgcagaagacccgagaggtccaggagaagggcacctacgacctgctcaccccgctggccctgctcttctattccactgttctttgtacaccacacttcccaccagactcggatctccttctgaaggcagccagcacctaccaccggttcctgacctggcctgttccttactgcagcatctgccaggagctgctcaccttcattgatgctgaactcaaggccccagggatctcctaccagagactggtgagggctgagcagggcctgcccatcaggagtcaccgcagctccaccgtgccaagaccctggcagagcttgaggacatcttcacggagaccgcagaggcacaggagctggcatctggcatcggggatgctgcagaggcccggcggtggctcaggaccaagctgcaggcggtgggagaaaaagctggcttccctggggtgttagacactgcaaaaccagggaagctccataccatccccatccctgtcgccaggtgctacacctacagctggagccaggacagctttgacatcctgcaggaaatcctgctcaaggaacaggagctgctccagccagggatcctgggagatgatgaagaggaggaagaggaggaggaggaggtggaggaggacttggaaactgatgggcactgtgccgagagagattccctgctctccaccagctctttggcgtcccatgactccaccctgtcccttgcatcctcccaggcctcagggccggccctctcgcgccatctgctgacttcctttgtctcaggcctctctgatggcatggacagcggctacgtggaggacagcgaggagagctcctccgagtggccttggaggcgtggcagccaggaacgccgaggccaccgcaggcctgggcagaagttcatcaggatctataaactcttcaagagcaccagccagctggtactgcggagggactctcggagcctggagggcagctcggacacggccctgcccctgaggcgggcagggagcctctgcagccccctggacgaaccagtatcacccccttcccgggcccagcgctcccgctccctgccccagcccaaactcggtacccagctgcccagctggcttctggcccctgcttcacgcccccagcgccgccgccccttcctgagtggagatgaggatcccaaggcttccacgctacgtgttgtggtctttggctccgatcggatttcagggaaggtggctcgggcgtacagcaaccttcggcggctggagaacaatcgcccactcctcacacggttcttcaaacttcagttcttctacgtgcctgtgaagcgaagtcatgggaccagccctggtgcctgtccaccccctcggagccagacgccctcacccccgacagactcccctaggcacgccagccctggagagctgggcaccaccccatgggaggagagcaccaatgacatctcccactacctcggcatgctggacccctggtatgagcgcaatgtactgggcctcatgcacctgccccctgaagtcctgtgccagcagtccctgaaggctgaagcccaggccctggagggctccccaacccagctgcccatcctggctgacatgctactctactactgccgctttgccgccagaccggtgctgctgcaagtctatcagaccgagctgaccttcatcactggggagaagacgacagagatcttcatccactccttggagctgggtcactccgctgccacacgtgccatcaaggcgtcaggtcctggcagcaagcggctgggcatcgatggcgaccgggaggctgttcctctaacactacagattatttacagcaagggggccatcagtggacgaagtcgctggagcaacctggagaaggtctgtacctccgtgaacctcaacaaggcctgccggaagcaggaggagctggattccagcatggaggccctgacgctaaacctgacagaagtggtgaaaaggcagaactccaaatccaagaagggctttaaccagattagcacatcgcagatcaaagtggacaaggtgcagatcatcggctccaacagctgcccctttgctgtgtgcctggaccaggatgagagaaagatcctgcagagtgtagtcagatgtgaggtctcaccgtgctacaagccagagaagagcgacctctcctcaccaccccagacgcctcctgacctgccggcccaggccgcacctgatctctgctcccttctctgcctgcccatcatgactttcagtggagctctgccctagtgtgggcccagcgccagactggacagaagccctggggcaacctcctcggccacccctccaggacagtccctctctgtggagaactgaatggccctgtgcagagccatagtcccactgtgggtcctgcaatgagcaggggctgggagtagagggtttctggggcctcagggttctgggaaagcaacagctatcagagagagaagggccagaccccatagcctcttagattcctggcagtagaaggagaaggatgggtaaattgacctctgaagtccctgaccattagcatggtctaggatcctttctagaaggaagatctgaggctctggtgctcagggggatggcttgggccttttctctcaaccttggctgagcctaccccttactttgccaaagacttgaggaccctgtatgtctggagttcagtcccctcctctgtggggctcaggtgattgaaatgtggatgaaacatttctctacttcaagaccacctctccctgcaaacaccacacacacatggcatgcatgtacgcacatgcgcacacacacacgcacacacctcaataatttctctcaagtttcctgagtctccagaaaaacagcactaacgctggacctgtctactctcagaacccggcacagattctctcttgatctccttttggaatctgagattcttagaagacaggatagggttaaatttagtagcagctcagttctagctaaatcactagaggaagttaattaactttaagccttcatttctccagcactaaaatggagtggagagttggggtggaaataagacatccttaaaaggttaaattgtctgcaaagcacctagcccagtgccgagctcccagtaggtgttcagtaaagcttagtgcctgactttctgaacactgattcctcctgtttggagtcactgggatactctcattgccgttgggatgttcctcactccttcccagttcgtggctgaggcagaacccagactgaagagggaagagacattccagaggaggattgccttcgtcagggtaaggggtgggctgctcaggggccctacccttcacccccttctgtatcagattggccctcccactcccatctcactctgcgtgtacaatcttccatatccgcaagttcactggcactcttctggcacctgggcaagatcccagaacagaggatggagtgactggcctcacagagcttagtgcccgactcaggggaaatgggactggtgcatgggaaatggtcagcctaggataggacacgagagtctgaaattcaaagcaaccagcttgaagtggtttgagaagctggaagcaaacatgggctagagagatagggcagaagtcaagacgaggatctggactgatgtggagaaagtagccacggaagcatgaactgtatcctgcacaaagtccctcttccccgcctcctaattcattatgcccaaaaggccttacgtgaaattccagcccagagtactcatgacttgagagacgtggacagagccagcttctaccttgcctggccgtctctcccctgtcttaatgtctgctcttgctctaagctccagaagagtggcgggccatgtatcttcaatatgtttttgctgtatgggcaggttgtcttattatgtgatcaacagatgtccaggaactaatgagtggaatttaatattattgtcaaataaaacttgatttgtcctataaaaaaaaaaaaaaaaaaaaaaaaaaaaaaaaaaaaaaaaaaaaaaaa

SEQ ID NO: 4554 - protein, 494 aa, Homo sapien
MDSGYVEDSEESSSEWPWRRGSQERRGHRRPGQKFIRIYKLFKSTSQLVLRRDSRSLEGSSDTALPLRRAGSLCSPLDEPVSPPSRAQRSRSLPQPKLGTQLPSWLLAPASRPQRRRPFLSGDEDPKASTLRVVVFGSDRISGKVARAYSNLRRLENNRPLLTRFFKLQFFYVPVKRSHGTSPGACPPPRSQTPSPPTDSPRHASPGELGTTPWEESTNDISHYLGMLDPWYERNVLGLMHLPPEVLCQQSLKAEAQALEGSPTQLPILADMLLYYCRFAARPVLLQVYQTELTFITGEKTTEIFIHSLELGHSAATRAIKASGPGSKRLGIDGDREAVPLTLQIIYSKGAISGRSRWSNLEKVCTSVNLNKACRKQEELDSSMEALTLNLTEVVKRQNSKSKKGFNQISTSQIKVDKVQIIGSNSCPFAVCLDQDERKILQSVVRCEVSPCYKPEKSDLSSPPQTPPDLPAQAAPDLCSLLCLPIMTFSGALP

SEQ ID NO: 4555 - DNA, 4476 bp, Homo sapien
  Unsure 752-794: Unknown base
agatttactttctaaagcactcttttcattcccattcaaaggactccagtataagtgccacataaactcgttttctaacttttaaaactcttcctctaaatgcagcccaactcagtaaaaacgtacctaagatctcacagtctaatgtttccagcttttaaagcctttactcctacccttccctctgcctggaaagtgtctccattccctgctgtggacaaaatccctcaaggtcttttataatttcccccaaccccaaatcaacttggattttcttggagttctcacagcattcagtttatgtcctattcttacccttgtgttactgatattcacgaaattgctcagtcctttcaagagattgcttaaggacaaagacttcttactcaactctgcaatattggctacacatagctgacttaataaatagtcccttgactggtataagctgacgttacaaaaactggtaattccgaaaccactcatactggacttattaaataatccctcaactggtacagactgacattacaaaaacggattaattcagagatcactgaacacccaaacactcagattcttataactatgattcagtaaatatgtgtggaatgcctatcttaccaggtgactatgttaggcgctgcatgagatataagatgaaaacaaggttcccattttccagggaagaatactggagtggaaaacgcagaggataccacaacaggagagctatttccgattagcggccnnnnnnnnnnnnnnnnnnnnnnnnnnnnnnnnnnnnnnnnnnntctccgtttctctgtcaaggagagatagaaaaagaacctatttcacaggttcaaacctacctcaagaaaaaatagttgtggggaatgcgtcacgagacctagaaaacggtacaaaaccctcggggggccgctgtttctgacctagcgagtggcccgacccggacaaaatgcctcttcctcgaggaggcggcgacgagcccagcaacagctcgagcacggccggccgggccgcgggaagcccgagaacgcggcgcgcgcagctgggaggcgacccttacccggcgaggctcccgggaccaaacgccgcccgacagccacgcagaacagacgtggcagtgcgacgcctcccccactggggacacgagacagcgacagccacgcggtgagccggtacaaggccctctaggcttcagcgggtctggatactcggtggcattaacccttccctaccgccggggaagacagcagtttctctggcgaggaagtaggccgggctcaggcgccttagccagagggcgggcctgcgccaccctcggaaagcgtcacttccacttccggccggcgctctggctctgtacctggacagggctgcggtaggccagcggtgggctggcggttgcgctcctcagattggcggcctttcgggcggtggcttgcgtttgagcctcagaaagcgaggagcggcctccacggaagccaagctggccgagtgcttttaggaagaagatccttttattgcttttgtacaagaccagacaggatctcatttgttaaacgtggtaccaattgggtgtcttaacacaggagcagaacttcctagagcagaatgatgatggtagatctgaaagtggctgcgtacttggaccctcagatcagggctttgtgggagaccaaggggcctgcaagagagagctccggtcagagtaaaaaatctcctcaaatggactgtctcgatcctaagagctcttgctggcacttcaggaatttcacctatgatgaagcaggtggaccccgtgaggctgtcagcaaacttcaagaattatgtcatctatggctgaagccagagatccactcaaaagagcagatactggaactgctggtgctggagcagttcctgactattctgcccagggagacacagacccagatgcagaagcaccatccacagagcattgaggaggctgtggctctggtagaacacttgcagagggaatctggtcaaacatggaatggggttgcagtccatgagctgggaaaggaggcagtgctcttgggagaaacagcagaggcctcaagtttcgggctgaagccaacagagtcccaaccagtgggcgtatcccaagatgaagaattttggaatacatacgagggtctgcaagaacagctcagcaggaatactcataaagagactgagcctgtgtatgagagggctgtgcctactcaacagattctagcttttcctgagcaaacaaacaccaaagactggacagtgacacctgagcacgtcttgcctgagtcccagagcttgttgacatttgaagaagtggccatgtatttttcccaggaagaatgggagttattggatcccactcagaaggccctctacaatgatgtaatgcaggaaaactatgagactgtcatctctctagcattgtttgtgctccccaaacctaaagtgatctcctgtctagagcaaggggaagagccatgggttcaagtatccccggagtttaaggatagtgccggaaaatctcctacagggttaaagctcaaaaacgacactgaaaatcatcagcctgtgtctctttctgacttagaaatacaagcatcagcaggcgtcatatcaaaaaaggccaaagtaaaagttccccagaaaacagcaggcaaagaaaatcattttgatatgcacagagtgggaaaatggcaccaagattttccagtgaagaaaagaaagaaactttcaacctggaaacaagagctgctcaaacttatggatcgtcacaagaaagattgtgcaagagagaagccttttaaatgtcaggaatgtgggaaaaccttcagagttagctctgaccttattaagcaccaaagaattcacactgaagagaaaccctataaatgtcaacagtgtgataagaggtttagatggagttcagatcttaataagcacttaacaacacaccaaggaataaaaccatataaatgttcatggtgtgggaaaagcttcggtcaaaatacaaatttacatacacaccaaagaactcatacaggagaaaagcccttcacatgtcatgaatgtggaaaaaaattcagtcagaactcccaccttattaaacaccggagaacccacacaggtgagcagccatatacttgtagcatatgcaggagaaacttcagcaggcggtcaagccttcttagacaccagaaactccacctgtgaagagaagcttgtccagtgtcctcattctgaagacattcaccaaatggagcttggcactaaaatttatgtaaaagaaaaatcacaaaccttgaaaaattttacatcagaaaatgggataaacatacatttcacagaaaataatcaagacttgctctgcagccactcagtagtcttctgtggtcacagaagtaaacattgttggctttgtattgatctctccagtcatttttgaacacatccaatagaaacattggcagcatggtcttccaaaacaaaaagcagtaacatgcatgtttaattgcataccattctcttcacagtagcaggcttaccaatttccatagtctcatgaggccgaaatgaattacaatgtaaagtgttccaggaaccaaattggattttctttcttttgtcattggacacggtttgcaaagttggacatcacttgagttccttcttaaacttttcggcaacttctcttggatcctgttatcacagttttttactgtgatgaaatcttgttaaccaccactagggaatctccagatgaactattaatgcactgtcttatgcctctcattggtgatgtttggaaaatagaagacatctctaatggaatcatgggggaaacgggttggaatttgtagccatggaatatatattagatgtaaagaattttctgcaataaaagaaactagacttgttaatccctgccttgcaatgtcagtaggataaagcagctataaaaattagtacttgcccaaggcctgaaagagaattagtgggaattaagatcaacttctcagttttgtttgtttactttttaattggcttttctttgttgttaagaatgagagacttaatttccatgggagttggagtgtgtgtgctgcaggcaggatcctgtggctcatttggcatggagacctggacatgtagtcagcaggagacggttccctaaataaaagatttgggcactggtgctaagtgttgggcgaggatgagcaaatctacatccatgttgttctgtcctgtcctgtaagctctacctgtctttgttctttccagcacagcatttaacagcagcctcaggtgataaatttgatggattgccaaaagtctgtatagcctatggattttcttacaacttgcttgtttagctacagcagtgactcaggtgcattccttttagagctcttaggtatatcaggaaaggggttaaataactgacctcttccaaac

SEQ ID NO: 4556 - protein, 536 aa, Homo sapien
  Unsure 752-794: Unknown amino acid
MMVDLKVAAYLDPQIRALWETKGPARESSGQSKKSPQMDCLDPKSSCWHFRNFTYDEAGGPREAVSKLQELCHLWLKPEIHSKEQILELLVLEQFLTILPRETQTQMQKHHPQSIEEAVALVEHLQRESGQTWNGVAVHELGKEAVLLGETAEASSFGLKPTESQPVGVSQDEEFWNTYEGLQEQLSRNTHKETEPVYERAVPTQQILAFPEQTNTKDWTVTPEHVLPESQSLLTFEEVAMYFSQEEWELLDPTQKALYNDVMQENYETVISLALFVLPKPKVISCLEQGEEPWVQVSPEFKDSAGKSPTGLKLKNDTENHQPVSLSDLEIQASAGVISKKAKVKVPQKTAGKENHFDMHRVGKWHQDFPVKKRKKLSTWKQELLKLMDRHKKDCAREKPFKCQECGKTFRVSSDLIKHQRIHTEEKPYKCQQCDKRFRWSSDLNKHLTTHQGIKPYKCSWCGKSFGQNTNLHTHQRTHTGEKPFTCHECGKKFSQNSHLIKHRRTHTGEQPYTCSICRRNFSRRSSLLRHQKLHL

SEQ ID NO: 4557 - DNA, 1428 bp, Homo sapien
aaacgtggccgggtctgcaagctaggtgccagcggggaaagtttccctgcttcttatcgtctgctttaacgccttaaatagcccgctgaaggctgcagcaggtgctaggtagcagcctcccggccctcgggaaaggcggggtggggaggcgagagcagcttagcctcctcgacctcccttcctggtgacggacgaacagttcccgtagaatttcgcttcaccgagtgaccttgagcccagggcgacggtcagcttgttaattcctggctgcaggaactttgtgagaattttaatgcatggaaaagctgtccatgttccaactgctgtacatccaaaagtctcagtgtaatagcaggaccaaaatattctgtcaatcagctgaccatatacttaatgactcctaaaatctcgtggacttctaagaaagcgccatggcctgtgctgctgttatgattcctgggttgttgcggtgctctgttggagccatccgtattgaggctgcgtcactgagattgacactcagcactttgcgccaccttactctaaccagcataatgaaatccaaaaggaaaactgatcacatggagagaactgcaagtgtccttcgacgggagattgtgtcagcagctaaggtgtgtggagctgccagtgagtcaccgtcagtgaagagcctccgcttgcttgttgctgatcaagacttttcctttaaagctggccagtgggttgatttctttattccaggagtctctgtggttggtgggttttcaatatgctccagtcccagactgctagaacaagagagagtgatagaattggcagtgaaatatacgaaccaccctcctgccctctgggttcacaatacgtgtacacttgactgtgaagtggctgtgagagtgggtggagagttcttctttgaccctcagcctgcggatgcctctagaaacctcgtgttgattgcaggaggagtcggaattaaccctctgctttccatcctgcggcacgcagcagatctcctcagagagcaggcaaacaaaagaaatggatatgagataggaacaataaaactattctacagtgcaaaaaataccagcgaactcctgtttaagaaaaatatccttgatttagtaaatgaatttcctgagaagattgcatgcagtttgcatgttacaaaacagactacacaaatcaatgcggaactcaagccatacatcacggaaggaagaataacggagaaggagataagagatcatatttcaaaagagactttgttctatatttgtggcccacctccaatgacagactttttctccaagcaactggaaaacaaccatgtacccaaagaacacatttgctttgagaagtggtggtaggaggcagacaaaggcagaaaaaataaagaggtgagatctaaaaaaaaaaaaaaaaaaa

SEQ ID NO: 4558 - protein, 312 aa, Homo sapien
MACAAVMIPGLLRCSVGAIRIEAASLRLTLSTLRHLTLTSIMKSKRKTDHMERTASVLRREIVSAAKVCGAASESPSVKSLRLLVADQDFSFKAGQWVDFFIPGVSVVGGFSICSSPRLLEQERVIELAVKYTNHPPALWVHNTCTLDCEVAVRVGGEFFFDPQPADASRNLVLIAGGVGINPLLSILRHAADLLREQANKRNGYEIGTIKLFYSAKNTSELLFKKNILDLVNEFPEKIACSLHVTKQTTQINAELKPYITEGRITEKEIRDHISKETLFYICGPPPMTDFFSKQLENNHVPKEHICFEKWW

SEQ ID NO: 4559 - DNA, 3088 bp, Homo sapien
  Unsure 2955, 2974, 2984-2985, 2991: Unknown base
tggggaggggtctcgctcagtcccgggagcttttcccggtttcccctccccttcccgggtcattcccggcagggaggtgacgaggtaggggcagagcggatggaagccggagatctcaggttcccggaatactccggctggggccttcgggcttctcctgtcccctccctacccccgtgcctcgggtttctccctccgtccacaccgcccggggctactggactgagcggcgcccaggcagtcccgggggcccttctcctgctccccacccggccacactcctggagacctaacttccgcgcgcgagtttcccacgctgcgcccttgcagtgcgcgcctgggaaggggctgcccggggccaccctgccggcaggggcgggagccgtgcgggctccgtgaggcgcctggatcggagcgcgggcccaggagagggcccccggggcagtgggtgccccagtcgctcggcgaaggcaggggagccggggcgggccgggcgcgctggagggttccgggcactcaacgcgctcgcgccttcctctccgcagccccccgggatgcggtagcggccgctgtgcggaggccgcgaagcagctgcagccgccgccgcgcagatccacgctggctccgtgcgccatggtcacccacagcaagtttcccgccgccgggatgagccgccccctggacaccagcctgcgcctcaagaccttcagctccaagagcgagtaccagctggtggtgaacgcagtgcgcaagctgcaggagagcggcttctactggagcgcagtgaccggcggcgaggcgaacctgctgctcagtgccgagcccgccggcacctttctgatccgcgacagctcggaccagcgccacttcttcacgctcagcgtcaagacccagtctgggaccaagaacctgcgcatccagtgtgaggggggcagcttctctctgcagagcgatccccggagcacgcagcccgtgccccgcttcgactgcgtgctcaagctggtgcaccactacatgccgccccctggagccccctccttcccctcgccacctactgaaccctcctccgaggtgcccgagcagccgtctgcccagccactccctgggagtccccccagaagagcctattacatctactccgggggcgagaagatccccctggtgttgagccggcccctctcctccaacgtggccactcttcagcatctctgtcggaagaccgtcaacggccacctggactcctatgagaaagtcacccagctgccggggcccattcgggagttcctggaccagtacgatgccccgctttaaggggtaaagggcgcaaagggcatgggtcgggagaggggacgcaggcccctctcctccgtggcacatggcacaagcacaagaagccaaccaggagagagtcctgtagctctggggggaaagagggcggacaggcccctccctctgccctctccctgcagaatgtggcaggcggacctggaatgtgttggagggaagggggagtaccacctgagtctccagcttctccggaggagccagctgtcctggtgggacgatagcaaccacaagtggattctccttcaattcctcagcttcccctctgcctccaaacaggggacacttcgggaatgctgaactaatgagaactgccagggaatcttcaaactttccaacggaacttgtttgctctttgatttggtttaaacctgagctggttgtggagcctgggaaaggtggaagagagagaggtcctgagggccccagggctgcgggctggcgaaggaaatggtcacaccccccgcccaccccaggcgaggatcctggtgacatgctcctctccctggctccggggagaagggcttggggtgacctgaagggaaccatcctggtgccccacatcctctcctccgggacagtcaccgaaaacacaggttccaaagtctacctggtgcctgagagcccagggcccttcctccgttttaagggggaagcaacatttggaggggacggatgggctggtcagctggtctccttttcctactcatactataccttcctgtacctgggtggatggagcgggaggatggaggagacgggacatctttcacctcaggctcctggtagagaagacaggggattctactctgtgcctcctgactatgtctggctaagagattcgccttaaatgctccctgtcccatggagagggacccagcataggaaagccacatactcagcctggatgggtggagaggctgagggactcactggagggcaccaagccagcccacagccagggaagtggggagggggggcggaaacccatgcctcccagctgagcactgggaatgtcagcccagtaagtattggccagtcaggcgcctcgtggtcagagcagagccaccaggtcccactgccccgagccctgcacagccctccctcctgcctgggtgggggaggctggaggtcattggagaggctggactgctgccaccccgggtgctcccgctctgccatagcactgatcagtgacaatttacaggaatgtagcagcgatggaattacctggaacagttttttgtttttgtttttgtttttgtttttgtgggggggggcaactaaacaaacacaaagtattctgtgtcaggtattgggctggacagggcagttgtgtgttggggtggtttttttctctatttttttgtttgtttcttgttttttaataatgtttacaatctgcctcaatcactctgtcttttataaagattccacctccagtcctctctcctcccccctactcaggcccttgaggctattaggagatgcttgaagaactcaacaaaatcccaatccaagtcaaactttgcacatatttatatttatattcagaaaagaaacatttcagtaatttataataaagagcactattttttaatgaaaaaaaanaaaaaaaaaatgaattcangaatgaaaannatgagnggatgaatgaatggtaatggataatgggctatgaagtcatatttaaaggcactatctcatttaaaaacaatctaaataaataactacaatgataaaa

SEQ ID NO: 4560 - protein, 132 aa, Homo sapien [sequence omitted]

SEQ ID NO: 4561 - DNA, 2485 bp, Homo sapien
aaaaaaaaaaaaaaaaccggctcgcggcgcgtggaggctgctcccagccgcgcgcgagtcagactcgggtgggggtcccggcggcggtagcggcggcggcggtgcgagcatgtcgtggctcttcggcattaacaagggccccaagggtgaaggcgcggggccgccgccgcctttgccgcccgcgcagcccggggccgagggcggcggggaccgcggcttgggagaccggccggcgcccaaggacaaatggagcaacttcgaccccaccggcctggagcgcgccgccaaggcggcgcgcgagctggagcactcgcgttatgccaaggacgccctgaatctggcacagatgcaggagcagacgctgcagttggagcaacagtccaagctcaaagagtatgaggccgccgtggagcagctcaagagcgagcagatccgggcgcaggctgaggagaggaggaagaccctgagcgaggagacccggcagcaccaggccagggcccagtatcaagacaagctggcccggcagcgctacgaggaccaactgaagcagcagcaacttctcaatgaggagaatttacggaagcaggaggagtccgtgcagaagcaggaagccatgcggcgagccaccgtggagcgggagatggagctgcggcacaagaatgagatgctgcgagtggaggccgaggcccgggcgcgcgccaaggccgagcgggagaatgcagacatcatccgcgagcagatccgcctgaaggcggccgagcaccgtcagaccgtcttggagtccatcaggacggctggcaccttgtttggggaaggattccgtgcctttgtgacagactgggacaaagtgacagccacggtggctgggctgacgctgctggctgttggggtctactcagccaagaatgccacgcttgtcgccggccgcttcatcgaggctcggctggggaagccgtccctagtgagggagacgtcccgcatcacggtgcttgaggcgctgcggcaccccatccaggtcagccggcggctcctcagtcgaccccaggacgcgctggagggtgttgtgctcagtcccagcctggaagcacgggtgcgcgacatcgccatagcaacaaggaacaccaagaagaaccgcagcctgtacaggaacatcctgatgtacgggccaccaggcaccgggaagacgctgtttgccaagaaactcgccctgcactcaggcatggactacgccatcatgacaggcggggacgtggcccccatggggcgggaaggcgtgaccgccatgcacaagctctttgactgggccaataccagccggcgcggcctcctgctctttgtggatgaagcggacgccttccttcggaagcgagccaccgagaagataagcgaggacctcagggccacactgaacgccttcctgtaccgcacgggccagcacagcaacaagttcatgctggtcctggccagcaaccaaccagagcagttcgactgggccatcaatgaccgcatcaatgagatggtccacttcgacctgccagggcaggaggaacgggagcgcctggtgagaatgtattttgacaagtatgttcttaagccggccacagaaggaaagcagcgcctgaagctggcccagtttgactacgggaggaagtgctcggaggtcgctcggctgacggagggcatgtcgggccgggagatcgctcagctggccgtgtcctggcaggccacggcgtatgcctccgaggacggggtcctgaccgaggccatgatggacacccgcgtgcaagatgctgtccagcagcaccagcagaagatgtgctggctgaaggcggaagggcctgggcgtggggacgagccttccccatcctgagtccacagggagatccacagctcacggagcctggccgcggacccctcccacccctgccttgccggcccctgcacatttaggatatgctcctgggtggggactgggctgtgcccagggcctctgtcccccaggatgtcttgtggtgcgggtcggccgttctgccccccagggcaccccctgttgtaggcactggctagggaggggcaggcctccttcctgcccctcgagacactcttgggagatgcattttccgtctggctcacagggggagggtgaggctttgcaccccagcccctgcccaggccactgtgagggtgggtgctggctgaccccccggggcagcaggagccaggcaggtgatgtctttgttctcggctcccacagcagagccaggtgagggggcgcctgccagggccagacccaggtggggcagcctgaaccctgcttccccctgtggccggcatgccccgatctttcacacactggtgaccctgagagaggagggaggagggaacctggcgggggtgtctgaggccgcactgtcagctggccggtccaagcctgtggctggagctggggtctgtttacctaataaagtcccacaggtgcctcatt

SEQ ID NO: 4562 - protein, 586 aa, Homo sapien
MSWLFGINKGPKGEGAGPPPPLPPAQPGAEGGGDRGLGDRPAPKDKWSNFDPTGLERAAKAARELEHSRYAKDALNLAQMQEQTLQLEQQSKLKEYEAAVEQLKSEQIRAQAEERRKTLSEETRQHQARAQYQDKLARQRYEDQLKQQQLLNEENLRKQEESVQKQEAMRRATVEREMELRHKNEMLRVEAEARARAKAERENADIIREQIRLKAAEHRQTVLESIRTAGTLFGEGFRAFVTDWDKVTATVAGLTLLAVGVYSAKNATLVAGRFIEARLGKPSLVRETSRITVLEALRHPIQVSRRLLSRPQDALEGVVLSPSLEARVRDIAIATRNTKKNRSLYRNILMYGPPGTGKTLFAKKLALHSGMDYAIMTGGDVAPMGREGVTAMHKLFDWANTSRRGLLLFVDEADAFLRKRATEKISEDLRATLNAFLYRTGQHSNKFMLVLASNQPEQFDWAINDRINEMVHFDLPGQEERERLVRMYFDKYVLKPATEGKQRLKLAQFDYGRKCSEVARLTEGMSGREIAQLAVSWQATAYASEDGVLTEAMMDTRVQDAVQQHQQKMCWLKAEGPGRGDEPSPS

SEQ ID NO: 4563 - DNA, 3490 bp, Homo sapien
ccacgcgtccgtaaaagccaaaatgggaaaggaaaagactcatatcaacattgtcgtcattggacacgtagattcgggcaagtccaccactactggccatctgatctataaatgcggtggcatcgacaaaagaaccattgaaaaatttgagaaggaggctgctgagatgggaaagggctccttcaagtatgcctgggtcttggataaactgaaagctgagcgtgaacgtggtatcaccattgatatctccttgtggaaatttgagaccagcaagtactatgtgactatcattgatgccccaggacacagagactttatcaaaaacatgattacagggacatctcaggctgactgtgctgtcctgattgttgctgctggtgttggtgaatttgaagctggtatctccaagaatgggcagacccgagagcatgcccttctggcttacacactgggtgtgaaacaactaattgtcggtgttaacaaaatggattccactgagccaccctacagccagaagagatatgaggaaattgttaaggaagtcagcacttacattaagaaaattggctacaaccccgacacagtagcatttgtgccaatttctggttggaatggtgacaacatgctggagccaagtgctaacatgccttggttcaagggatggaaagtcacccgtaaggatggcaatgccagtggaaccacgctgcttgaggctctggactgcatcctaccaccaactcgtccaactgacaagcccttgcgcctgcctctccaggatgtctacaaaattggtggtattggtactgttcctgttggccgagtggagactggtgttctcaaacccggtatggtggtcacctttgctccagtcaacgttacaacggaaagtaaaatctgtcgaaatgcaccatgaagctttgagtgaagctcttcctggggacaatgtgggcttcaatgtcaagaatgtgtctgtcaaggatgttcgtcgtggcaacgttgctggtgacagcaaaaatgacccaccaatggaagcagctggcttcactgctcaggtgattatcctgaaccatccaggccaaataagcgccggctatgcccctgtattggattgccacacggctcacattgcatgcaagtttgctgagctgaaggaaaagattgatcgccgttctggtaaaaagctggaagatggccctaaattcttgaagtctggtgatgctgccattgttgatatggttcctggcaagcccatgtgtgttgagagcttctcagactatccacctttgggtcgctttgctgttcgtgatatgagacagacagttgcggtgggtgtcatcaaagcagtggacaagaaggctgctggagctggcaaggtcaccaagtctgcccagaaagctcagaaggctaaatgaatattatccctaatacctgccaccccactcttaatcagtggtggaagaacggtctcagaactgtttgtttcaattggccatttaagtttagtagtaaaagactggttaatgataacaatgcatcgtaaaaccttcagaaggaaaggagaatgttttgtggaccactttggttttcttttttgcgtgtggcagttttaagttattagtttttaaaatcagtactttttaatggaaacaacttgaccaaaaatttgtcacagaattttgagacccattaaaaaagttaaatgagaaacctgtgtgttcctttggtcaacaccgagacatttaggtgaaagacatctaattctggttttacgaatctggaaacttcttgaaaatgtaattcttgagttaacacttctgggtggagaatagggttgttttccccccacataattggaaggggaaggaatatcatttaaagctatgggagggttgctttgattacaacactggagagaaatgcagcatgttgctgattgcctgtcactaaaacaggccaaaaactgagtccttgtgttgcatagaaagcttcatgttgctaaaccaatgttaagtgaatctttggaaacaaaatgtttccaaattactgggatgtgcatgttgaaacgtgggttaaaatgactgggcagtgaaagttgactatttgccatgacataagaaataagtgtagtggctagtgtacaccctatgagtggaagggtccattttgaagtcagtggagtaagctttatgccagtttgatggtttcacaagttctattgagtgctattcagaataggaacaaggttctaatagaaaaagatggcaatttgaagtagctataaaattagactaatctacattgcttttctcctgcagagtctaataccttttatgctttgataattagcagtttgtctacttggtcactaggaatgaaactacatggtaataggcttaacaggtgtaatagcccacttactcctgaatctttaagcatttgtgcatttgaaaaatgcttttcgcgatcttcctgctgggattacaggcatgagccactgtgcctgacctcccatatgtaaaagtgtctaaaggtttttttttggttataaaaggaaaatttttgcttaagtttgaaggataggtaaaattaaaagacatgctttctgtttgtgtgatggtttttaaaaattttttttaagatggagttcttgttgcccaggctagaatgcaatggcaaaatctcactgcaatctcctcctcctgggttcaagcaattctcctacttcagcctcccaagtagctgggattacaggcatgtgctaatttggtgtttttaatagagatgaggtttttccatgttggtcaggctggtctcaaactcctgaccttaggtgatcgcctcggcctcctaaagtgctggaattacaggcatgagccaccatgcctggccaggacatgtgttcttaaggacatgctaagcaggagttaaagcagcccaagagataaggcctcttaaagtgactggcaatgtgtattgctcaagattcaaaggtacttgaattggccatagacaagtctgtaatgaagtgttatcgttttccctcatctgagtctgaattagataaaatgccttcccatcagccagtgctctgaggtatcaagtctaaattgaactagagatttttgtccttagtttctttgctatctaatgtttacacaagtaaatagtctaagatttgctggatgacagaaaaaacaggtaaggcctttaatagatggccaatagatgccctgataatgaaagttgacacctgtaagatttaccagtagagaattcttgacatgcaaggaagcaagatttaactgaaaaattgttcccactggaagcaggaatgagtcagtttacttgcatatactgagattgagattaacttcctgtgaaacccagtgtcttagacaactgtggcttgagcaccacctgctggtattcattacaaacttgctcactacaataaatgaattttaagctttaaaaaaaaaaaaaaaaaagg

SEQ ID NO: 4564 - protein, 303 aa, Homo sapien
HASVKAKMGKEKTHINIVVIGHVDSGKSTTTGHLIYKCGGIDKRTIEKFEKEAAEMGKGSFKYAWVLDKLKAERERGITIDISLWKFETSKYYVTIIDAPGHRDFIKNMITGTSQADCAVLIVAAGVGEFEAGISKNGQTREHALLAYTLGVKQLIVGVNKMDSTEPPYSQKRYEEIVKEVSTYIKKIGYNPDTVAFVPISGWNGDNMLEPSANMPWFKGWKVTRKDGNASGTTLLEALDCILPPTRPTDKPLRLPLQDVYKIGGIGTVPVGRVETGVLKPGMVVTFAPVNVTTESKICRNAP

SEQ ID NO: 4565 - DNA, 3710 bp, Homo sapien
catgtactgcaccctcatctgtcaatctgtctatcctgtataagttgggatgaatcattttcattagatgaacaagtggctgagactttatctgacacatggcatatacacgatcatccagccgtgtgcttgtacccgttctaaatgctttctgtttgagaagggccaaaacatagagaggaaacaacttgagggagcttttttgtttttcttggcaaattttaataactatattttgattatactgtagaatgctatgtcagcataagtaagctaaacttgaagctttcttgtgaagaataaatgcaagatagaatacatcttctattttttgtggtaccaaaaatcaccatcccctcaagagtgttcatgtatagaacattctctaatgctgaagagtaaaacattatagcaacactatgtaaatgtattgaacagtatcaaagaaatagtctctaaattgtttgtaccatatttttttttctaaacttaacataatttttagctttagtttcagtcaaaactttgtcttttctctcccgagagccttagaggttaaaatgcaatcagcctaccgtgtaaggagatgttgtccatgtactttctccagccagttgggggatcattgcagctcaggcctggtgaactcagagattccattcaatattaagaatgggattgttgaattttactcacagagaaatcactgtttcttcatgttgtaagatgttttctgtttgtgtatttgtatcatggttactcatcaaaagctctcattctgcctttgtagaattcagttcccttcctttcatcatagctaaagtgacttttttccctactattaacgtgatcctacatccttaaatctcatcgattacctcacttaggcctgtggaaccttggcccttggtcggtgtccttggtgtcttctaagcaaggctgtgcgttgttcagaaacgtggccagaccacatttcctgctgctcccatgccgcatgccaggtggcctgagacagagctccccatacggctgcaaggtgctttacctgtgggctttggcagtaacccaagagaggatcagaaggtggagaaggtgccacgagtgatttaacaggcctgccacagggagtgccccccgcccagctcgttctcagcacaggttttctctttgggagtacccaggtgatttctagtgacccaattttgtgtcatctccctgttttagccccacttgcctagagacaactgtttccgatgccttttctgcttatcatactagtttctaaccacgcagatttctcaaaatcatttattcaatgtattttatttgagcacttagtgtattgagctaggcaggatatagggtgccggagatacagcgatgaacaagacaggcaaaacttctgctttcctaaaacttgtgatgagagagaacaataaaaaagtgttgctgccacaaagaaaccaaagtgtgtggggaagggcgcgtgtttgcggtttacatctcttctgtcccagaatcacagggatctggtccggtcacctctggtctttcctcttagtcgcctttaggagccctggttcccgtccatcctctggggggtttgtttgaagagatctcgtgtgggtacttgtcatgaaaacaccttgggcatcatctggtgtatccagttctagtctcgagaattctggtttcccactgtgctcagcaagtggaaagttcttttcaggccagaacagctctgcaccatcacatatcgtgttgcggcttagctgtttggtctgtagttcaggttatgggacttctccaatcctggaaggctgttgagctttttagaagtactgtacgctatcttcaagatggagcttggtcacatctgttaggaatccaaaggacactatgacttatttaaatcttgtcttactaaacctctcttgggcacgtgtgccagaatttctcttgttgcttcttgagccaccgcacccggcctaatctcagtttttgaagtgctccacaagtcattaggcaccaaaacattttcacctggggaacactggcatttccctgattagctgtgaagcaatctagtggctaagtgtgaaatcctgggtgcgcaggtgttctcactcccgccgtgttctcagtgcagtggtggtcagaggcccttccaaggagacatcactctgatcagttacagatagatgttctggaagatctgcaggtgagtagatccagcagagtttcttcccaccaactctagaagaaagggccttatcagagttgaccctgagcctttggtaaggttttgtgtgcatgcgattcagttatctttggcaattcttttcttgctgcagtgagagattaattggttgctgatcaaaccgttcatgcagatggggggacctttggattgtacggctttctcctcttggctgctttcttttcaggaagttggactttggccaggtttggctttcccagagccgttcctttctctgtcctttccttgggtcctcatggtgtgcccattggatccttggccttgtgatcctctgggaactgggggccagttccacttttgcagccttctgtgctggaagagaagcccagcgccctggaaggagcctctttaagtcccccatgtcgctttctctctctgctcttttagtgtctgagattgcctttctttgaatttcccagtgtttcttttccttgtcccttccctcaccaacctggagttattttggttgactatgtcctggctttggcttctcctggcaggaagtcatcaggcatcctctccaggtgagccgaaattccaccctcccaggttggacatcatcttttaaacccaatggtctactcccctccttctttatgaaacagtgatttcccgtgagtaactctggttctgattttttgtaccggcgcttaaattctttctgtagacattggaaagccacaaagaacgtgactgcagtgagcctcccactggagcagccttaaccaacactttggccaaagcccccccacctcccctgtgtactgtgtgtgtgtttggtggatacagtattccttttcagtgtccctaaagctgtgatggggagtccccacttacctagaaagcattaccagtcacctactctgcattctcagatgtaaaccttgtgtagtgttctttttgcaatgacctatttatttaacctatttatatttatttaatttttactctgaaatgtatccagttacaattgtacttgcttaaagcacatcagatttgttttggacaacacccttgaccattttaaaactggaaaagtgatactgtatccttccatgggatggatgctttacagtagtcttattattaaagggtgattaatttggtcggggtaaaatgttaatttttaggtgatttttaagaattctgtgccattatgtcttctgtgtggatggttaattgtttaattagtacgtgttaattgtgtgatacagtcttctttgtggaacccaaaatcctctttttagctttatattttataaactgccagattgtacaacttttatgtgcatttttaaagcttgaagacatgagggtcattatctaagttaaacagcctatttttgtgcctcctgtacagttttataattctgctgatggcggcatcttatgtcgagccaaccacaataaaggtagttttagattttgg

SEQ ID NO: 4566 - protein, 47 aa, Homo sapien
HVLHPHLSICLSCISWDESFSLDEQVAETLSDTWHIHDHPAVCLYPF

SEQ ID NO: 4567 - DNA, 4092 bp, Homo sapien
  Unsure 1873-1896: Unknown base
ggaccacctttactctgtggcaaggatggaacagtgggtagaatatgaagatgaatgagactcagtactgccttcaagggagaagcagacatacacagagctctctatcaatatcagctcacatcattgaaaagataattttgaagacatgttttgctgaaaagacactaagaaaaattttacgaatgggatgaacatgctccagttaattgactacctactgcaatttgaatgttaacattacccatctggtacagttacctagtgatgtacctattttcacaataccctgtttcagtgtgcttgtcttgattaaagaattcaaagtggagtaccgcaaacttgatatggaaaataaaaagaaagacaaggacaaatcagatgatagaatggcacgacctagtggtcgatcgggacacaacactcgaggaactgggtcttcatcgtctggagttttaatggttggacctaactttagagttggaaaaaaaattggatgtggcaatttggagaattacgattagggaaaaatttatacacaaatgaatatgtggcaattaagttggagcccatgaaatcaagagcaccacagctacatttggaatacagattctataagcagttaggatctggagatggtatacctcaagtttactatttcggcccttgtggtaaatacaatgctatggtgctggaactgctgggacctagtttggaagacttgtttgacttgtgtgacagaacattttctcttaaaacagttctcatgatagctatacaactgatttctcgcatggaatatgtccattcaaagaacttgatatacagagatgtaaaacctgagaacttcttaataggacgaccaggaaacaaaacccagcaagttattcacattatagattttggtttggcaaaggaatatattgatccggagacaaagaaacacataccatacagagaacacaagagccttacaggaacagctagatatatgagcataaacacacatttaggaaaagaacaaagtagaagagacgatttagaagctttaggtcatatgttcatgtattttctgagaggcagtcttccttggcaaggcttaaaggctgacacattaaaggagaggtatcagaaaattggagatacaaaacgggctacaccaatagaagtgttatgtgaaaattttccagaagaaatggcaacatatcttcgttatgtaagaaggctagatttttttgaaaaaccagactatgactacttaagaaagctttttactgacttgtttgatcgaaaaggatatatgtttgattatgaatatgactggattggtaaacagttgcctactccagtgggtgcagttcagcaagatcctgctctgtcatcaaacagagaagcacatcaacacagagataagatgcaacaatccaaaaaccagtcggcagaccacagggcagcttgggactcccagcaggcaaatccccaccatttgagagctcaccttgcagcagacagacatggtggctcggtacaggttgtaagttctacaaatggagagttaaacacagatgaccccaccgcaggacgttcaaatgcacccatcacagcccctactgaagtagaagtgatggatgaaaccaactgccagaaagtgttgaacatgtggtgctgctgctttttcaaacgaaggaaaaggaaaaccatacagcgccacaaatgactctggacacagacagatcctggggagttacttacatgttcatctgctgtcttgtgattaaaatcatctctgtagtgaccacgtatattttcaaggactcactcttagaaacaaaaatgtcatactatcatacttcattttgtggttgtcttacannnnnnnnnnnnnnnnnnnnnnnnaatttaacctttatggaagctttaaagttttgtcaaaacatgagtgctttgcccatcagtgaatggaatggaccaatgaggtggtatcaatgaatatagttccatagaacattttccagaagttcttctgttgtagaaagcagtacagtatcttaagtgtcaaccagttatatacctaatctggtttttttataacttctgtaagagcataatcaaacaggaattttcttttctcagtggataatacaacagagaaaacagagttgcccaaatatttaaaagaagttattccttgagaagttcatattttgtgacatctgcattgatttcagtattactgatggtactgttattcataagtcatattaacattctctccgtgaaatcatggtacagtcactgcccagaggtactgaggaaaaagcaatatgggttcggcagatggtggtggtaaaatgaatcttaaggagtgtggtaaatatgtgctccgcttttgttgcatcactatgtgaagtactgtgttgcagaagtggcaaaagcgcttatttttaaaaatgcaaaatatttgtacaatgtaactttatgcttccaaataataatgtatgttagacagcaagaaatgaatactttaaaaagtgatatatgttggagttataaagaaatacactaaggagaggtagtaaatgtgaaccttgttgcagtgtataaggtggaagcctaaagaaatctcaccgaaacttactgctgaatgattacattctcccttaagcagaaaactttggatgtgccatgcaatggtgtctgtgtaattattttgctctttgattaaaaaaaagacccccagcaataaaaagtgggtcactctatgccctctgtgcacattagtctcttgtattcaactttgctgattctctggaattttcctactctttagcataattttgatgattgaaaaatattttggaaaggatgggtcaggtgctttgcctccatagtcttttgaagtgcctgcatatgaacaacaaaacaaaagcaaaaaattctgtaaaaaaggaagcccattccacttttcaagtatgctttgttttaagccataaagacacacatgtagttttgtcacattctactagccaaaattttcaagaagggttaaaacaaagactggctagaaagataattattttgaataaatctcatattcatctttcatttatataattgttacttattcctcccatgcagtctcttcgttgtctttaagtgtgtgcctccaggcatgcttatttatttttattgtctcaaggtaacatttaagatgtatattaaagtaaagctacatttttttacttcattattgcatttacagggatttaattgtactttgtaatttatttttcttattagccaaaagtttaatgcatttttttttgatgaattaggcacccacatgaacaccacaaatcaggacattgtttatcattgttgctatgaatcctatgaatgatcttttttttattttaaagacctacacttaacctacaaaacatttgctgtataatttggtcaacagtttctatctatctgtatactgtcatgatgtcttaaactgcaggagttacatactgagtttatatttttatttgctttgagcaaggtagataaacattttggccattataatgtgaaaccacttcttctttctttacagtatttgaccaaacttgtgtgtctatgatatttgtaaatacatgcgaatatctgtatttcttatcataagcctatttagttttattctcagtagggttttttggattgtacagtgtttatatgatctgaactccttatacataagaaggtgtgtatattaatccaattatggacttaaaatattttaaaagtataaatacccttatttgctgcaaagaccagtgtgtaggcatttgctttttagcaatatttttaagtgctccattttaatgccgaggaataagtcttttggcaacacaaactggtcaataataggtaatgcaggtatgttcaggttaagccaacaatgttttgcatttttatgcttattttctgtcaacactaatgaagtcaacattgcctgaatgtctgaataatgaaacacatccctgtttaaaagtatgtaactgaaaaagaaataaaaaaaaataaaagtagtttttttaaaaa

SEQ ID NO: 4568 - protein, 381 aa, Homo sapien
  Unsure 1873-1896: Unknown amino acid
MKSRAPQLHLEYRFYKQLGSGDGIPQVYYFGPCGKYNAMVLELLGPSLEDLFDLCDRTFSLKTVLMIAIQLISRMEYVHSKNLIYRDVKPENFLIGRPGNKTQQVIHIIDFGLAKEYIDPETKKHIPYREHKSLTGTARYMSINTHLGKEQSRRDDLEALGHMFMYFLRGSLPWQGLKADTLKERYQKIGDTKRATPIEVLCENFPEEMATYLRYVRRLDFFEKPDYDYLRKLFTDLFDRKGYMFDYEYDWIGKQLPTPVGAVQQDPALSSNREAHQHRDKMQQSKNQSADHRAAWDSQQANPHHLRAHLAADRHGGSVQVVSSTNGELNTDDPTAGRSNAPITAPTEVEVMDETNCQKVLNMWCCCFFKRRKRKTIQRHK

SEQ ID NO: 4569 - DNA, 2485 bp, Homo sapien
atggcgaacgcgagcgagccgggtggcagcggcggcggcgaggcggccgccctgggcctcaagctggccacgctcagcctgctgctgtgcgtgagcctagcgggcaacgtgctgttcgcgctgctgatcgtgcgggagcgcagcctgcaccgcgccccgtactacctgctgctcgacctgtgcctggccgacgggctgcgcgcgctcgcctgcctcccggccgtcatgctggcggcgcggcgtgcggcggccgcggcgggggcgccgccgggcgcgctgggctgcaagctgctcgccttcctggccgcgctcttctgcttccacgccgccttcctgctgctgggcgtgggcgtcacccgctacctggccatcgcgcaccaccgcttctatgcagagcgcctggccggctggccgtgcgccgccatgctggtgtgcgccgcctgggcgctggcgctggccgcggccttcccgccagtgctggacggcggtggcgacgacgaggacgcgccgtgcgccctggagcagcggcccgacggcgcccccggcgcgctgggcttcctgctgctgctggccgtggtggtgggcgccacgcacctcgtctacctccgcctgctcttcttcatccacgaccgccgcaagatgcggcccgcgcgcctggtgcccgccgtcagccacgactggaccttccacggcccgggcgccaccggccaggcgaccgccaactggacggcgggcttcggccgcgggcccacgccgcccgcgcttgtgggcatccggcccgcagggccgggccgcggcgcgcgccgcctcctcgtgctggaagaattcaagacggagaagaggctgtgcaagatgttctacgccgtcacgctgctcttcctgctcctctgggggccctacgtcgtggccagctacctgcgggtcctggtgcggcccggcgccgtcccccaggcctacctgacggcctccgtgtggctgaccttcgcgcaggccggcatcaaccccgtcgtgtgcttcctcttcaacagggagctgagggactgcttcagggcccagttcccctgctgccagagcccccggaccacccaggcgacccatccctgcgacctgaaaggcattggtttatgagggaggccccgccacatagacccccaacccagcctttccctttggctcggacggtgacgttgtatcttttccttctggcccctgtttaattttctaagctgccttcaaaatgactcgaagtggacagacacttggattgtactgactcctttgggggtggggtgggtgaggagtaggatgctcagcccactccagctccgcacattcgtcctcctaactcgactttcttcctgacaataggccctgcagtctttttgtagcggtactgacgtcttttattccatgtgtggttcctttttttctttttctataaaggctgtactaattttcttcatgcaacgtttcctaaagaccatggccagttttctacagaagctatttttgacaacctcaagtggcattacattttgcagtgaagtagaggaacctagggggacttcttcacaagttagatttcttgaggatcttctgttggaagcaggagaaagtggggggtggggggaagttgtccgaaatgccctctgaattgccggctgcagggtccttgtgctgcgctggttctttgaaagtctcagtgttgatattgaacttaaagagcagagatggagatcagtagcaaggcagtcatttttttaaagcagtaagtaacaagtaagatttggttcccggtttactttctgctgctaaaaaccacgtcagtgacaactgctctctgtattatagcaatcttgaatggaaacatttctgtcaagttgtaagttttaaaagagtaaagtgttttggttagtaatgatgtggagaaaaatacagtattgcatgtgttcgtgtgtatagattgtggttcgaggattgggagggctctgagaagcagagtactacatcaaaattgttttaagtattttttgccaataaaaaattaattttatggaaatggcttgtgctttgagaagcccagttttattctgtcttatgaaactaatttccactttgaaaattgttcttctgttgtttatggtataaatgaatggaatataatgatatcctccttctaggaaacaaagcatttccttaaaatgtttgctaggttaagctgtgctgttctactgatggttgttttaaattaataatgagaactataatttaaataatatttctttgttagacattataatgttaaactgaaagactaaattctgcaagtactatataatatttttggcttataatgctacatttttattaatgtaccttccgttttgaggatttatatctgtatttctctttgcattatacaaatataccagtattttcaaaaaaaatctatgtcgggtgcggagaaagaggtaatgaaatggca

SEQ ID NO: 4570 - protein, 375 aa, Homo sapien
MANASEPGGSGGGEAAALGLKLATLSLLLCVSLAGNVLFALLIVRERSLHRAPYYLLLDLCLADGLRALACLPAVMLAARRAAAAAGAPPGALGCKLLAFLAALFCFHAAFLLLGVGVTRYLAIAHHRFYAERLAGWPCAAMLVCAAWALALAAAFPPVLDGGGDDEDAPCALEQRPDGAPGALGFLLLLAVVVGATHLVYLRLLFFIHDRRKMRPARLVPAVSHDWTFHGPGATGQATANWTAGFGRGPTPPALVGIRPAGPGRGARRLLVLEEFKTEKRLCKMFYAVTLLFLLLWGPYVVASYLRVLVRPGAVPQAYLTASVWLTFAQAGINPVVCFLFNRELRDCFRAQFPCCQSPRTTQATHPCDLKGIGL

SEQ ID NO: 4571 - DNA, 923 bp, Homo sapien
cgctgaggccccacagcctcccaattccgggcagacccctgacacctgctgtctggccccttccggcctgaagctgcagccgcgccatgtccacccctccgttggccgcgtcggggatggcgcccgggcccttcgccgggccccaggctcagcaggccgcccgggaagtcaacacggcgtcgctgtgccgcatcgggcaggagacagtgcaggacatcgtgtaccgcaccatggagatcttccagctcctgaggaacatgcagctgccaaatggtgtcacttaccacactggaacatatcaagaccggttaacaaagctacaggataatcttcgccaactttcagttctcttcaggaagctgagattggtatatgacaaatgcaatgaaaactgtggtgggatggatcccattccagtcgagcaacttattccatatgtggaagaagatggctcaaagaatgatgatcgggctggcccacctcgttttgctagtgaagagaggcgagaaattgctgaagtaaataaaaaactcaaacagaagaatcaacagctgaaacaaattatggatcaattacgaaatctcatctgggatataaatgccatgttggcaatgaggaactaagctgatatttaaatttcctgctttacacatgttataccattgtttttttccctcaagtattttttccctgtgaagaagattatttatctgcttttattttagtcactaaaactaaagtttttatttttacattgtgatttttacattaaaatattaactttttttaatgctattttatgaaagattattgtaataaactttgatggggtttgtattttggttaatcttcatgaattgaataattgtttttttaaagcaaaataaagttttttaaataaatgttaaaaaaaaaaaaaaaaa

SEQ ID NO: 4572 - protein, 178 aa, Homo sapien
MSTPPLAASGMAPGPFAGPQAQQAAREVNTASLCRIGQETVQDIVYRTMEIFQLLRNMQLPNGVTYHTGTYQDRLTKLQDNLRQLSVLFRKLRLVYDKCNENCGGMDPIPVEQLIPYVEEDGSKNDDRAGPPRFASEERREIAEVNKKLKQKNQQLKQIMDQLRNLIWDINAMLAMRN

SEQ ID NO: 4573 - DNA, 1079 bp, Homo sapien
caccttggtaacatactgttgatatcaagaacctgtttagtttacattgtaacattctattgtaaaatcaactaaaattcagacttttagcaggactttgtgtacagttaaaggagagatggccaagccagggacaaattgtctattagaaaacggtcctaagagattctttggtgtttggcactttaaggtcatcgttgggcagaagtttagcattaatagttgttctgaaacgtgttttatcaggtttagagcccatgttgagtcttcttttcatgggttttcataatattttaaaactatttgtttagcgatggttttgttcgtttaagtaaaggttaatcttgatgatatacataataatctttctaaaattgtatgctgaccatacttgctgtcagaataatgctaggcatatgctttttgctaaatatgtatgtacagagtatttggaagttaagaattgattagactagtgaatttaggagtatttgaggtgggtggggggaagagggaaatgacaactgcaaatgtagactatactgtaaaaattcagtttgttgctttaaagaaacaaactgatacctgaattttgctgtgtttccattttttagagatttttatcatttttttctctctcggcattcttttttctcatactcttcaaaaagcagttctgcagctggttaattcatgtaactgtgagagcaaatgaataattcctgctattctgaaattgcctacatgtttcaataccagttatatggagtgcttgaatttaataagcagtttttacggagtttacagtacagaaataggctttaattttcaagtgaattttttgccaaacttagtaactctgttaaatatttggaggatttaaagaacatcccagtttgaattcatttcaaactttttaaatttttttgtactatgtttggttttattttccttctgttaatcttttgtattcacttatgctctcgtacattgagtacttttattccaaaactagtgggttttctctactggaaattttcaataaacctgtcattattgcttaaaaaaaaaaaaaaggg

SEQ ID NO: 4574 - protein, 47 aa, Homo sapien
MFGFIFLLLIFCIHLCSRTLSTFIPKLVGFLYWKFSINLSLLLKKKK

SEQ ID NO: 4575 - DNA, 2594 bp, Homo sapien
aaaagattgaccttgaaaagaatctctctgcttctgaagttgaagtccagctcatcagagagtcgctcaaagtggcgttgcagaagcattctgaggaagtgaagaaacaggaagaaagggtcaaaggtcgtgataaacatatcaataatttgaaaaagaaatgccagaaggaatcagagcagaaccgggagaagcagcagcgtattgagaccttggagcgctacctggctgacctgcccacactggaagaccatcagaagcagagccagcagcttaaggattctgagttgaagagcacagagctgcaggagaaagtgactgagctggagagtttgctggaggagacccaggcaatctgcagagagaaggagattcaactggaaagcctgaggcagagagaagcagaattctcctccgctggacatagcctgcaagataaacagtctgtggaggagaccagtggagaaggtccagaagtggaaatggagtcctggcagaagcgatacgattcgctccaaaagattgtggagaagcagcagcagaagatggatcagttgcgctcacaagtacagagcctagagcaggaagtggctcaagaagaaggaacaagccaggccctgagagaggaggcccagcgaagggattcagccctgcagcactggcgcacagccgtgaaggagctttcagtgcaaaaccaggacttgattgagaagaatctgacactccaggaacacctgcgccaggcccaaccagggtctccaccttcaccagacacggcccagctggcacttgagctgcaccaggagttggccagttgccttcaagatctgcaggctgtctgtagcattgtgacccagaggcccagggccatgaccccaatctctccctgctcctgggcattcactcagcacagcacccagagactcagctagatttgcagaagccagatgtgatcaagaggaaactagaagaggttcaacagctgcgtcgtgacattgaggacttaaggaccaccatgtcagacagatatgcccaggacatgggagaaaactgtgtcacacagtgaggaattctggggattccccagggaggagctgggctgctgagagcctagtccagcaggtttctgccctgacattctcttgtctgctattcccagagaggtctcagaggggaggggagagcctgcatctgggggccaagggctgattagggaactgtgtcctacccacactggcatgttggattacgtttgtcctgttaattcactctcgacggtgagttactaattaacttttggcaggtacaacagataagtcctcacaaactgttcccagccctaggctgacatgagagacgaacaggctgtccacctttcttctccatccaatgggatggatccatgttcattcccacttcacaccttggtcctgctgattagagagctcatcagaggggcctggaaaggctgagcaagtaccagtgacaatggccatttaagaattctcaggccccatgtgccagccttcttgggaactgagctggctttctgggttttctcatgcctggtcttactgcttcttcctcagggctcttgttctcccagaagcctcagggtaatgtgttggttagcacgtaactactaggattggggccctagggattatagccaggactctaatctgcctaccatgccatttaacaagagatcccactctccagctgccttgtgtccctagggtcctggccatgtgtttagtgtgctaaactttctcctttgttctcaggccttccaggtagtccccttcctggacttaagagtgcaaactcttctctgtggttctagccttgggcagaattatatcccagagaccacagagcaactgtcaagctgcttaccccctcacccagggctacagcctgtgcccagccctctaatttgtgcctctcttgtgttgggggtggtgggggttattcctttccctttcctgctctggcctccttgaaagttcagagtacccagtacaagtcagctttaaagtacagcttttagtgtttcctgggttgtttctctggggctttagtgagggacctttgccctctggtttttcttgcctcctggtttagggagcatctcacacttgttagtatctggttgttgggccagccgtgcctcctctagatctggagccaggccaggcaggggccacgtgtgggccagtcagccactacaagatttttgctaagctttgggctgttggcagcatcttggacctcatgcctgggcctgaatgaggctctttcttaagtgtttttacaagtttgtgttttatttatggagtgacttatcccttccattcagagcagccccacccagccagcccttcagcctctgggctcctgctgcttaaaggcagagccgcctggttggtctccaccctgtgcattgggagcccagccaccatgctgacgggtatttttcctcataaagtttataaccagttatttatatgaatctttgttatgtccatttgtttgtattgcgtattttgattataaaataaagtatcttaacagacaaaaaaaaaaaaaaa

SEQ ID NO: 4576 - DNA, 2594 bp, Homo sapien
tggtgcgtcgcggcgtggtcctccggcggctgtccggggcggtaggagttggctgcgggatgtgctcagccggggagctgctgcggggcggcgacggcggggaacgcgacgaggacggggacgcgctggcggagcgggaggcggcagggaccgagtgggatcccggggcgagcccgcggcggcgcggacagcggccgaaggagagcgagcaggatgttgaagactcacagaaccacactggtgagccggttggagatgactacaagaaaatgggaacactttttggtgaactgaacaaaaaccttatcaacatgggcttcacaaggatgtattttggagaacgaatagtggaaccagtaatagtcattttcttttgggttatgctgtggttccttggcctgcaagcccttggactagttgctgttctttgccttgttattatttatgtgcaacagtaaaacatggccgaattgaattgtttgacatttggtagccatatatgtaattgaagaagttatatatttcactttttgacaaccgaaaaagtttgccttgtttcaaatcatgtgctggctgttttgtaagtaaatttatacatggatgtcacttaaaactaaactcttgatcataacagggttgaatatatattttgaatatacattagcttattcaaaactcttgtttcactactgtgatctctgtctcctttatacacctctatccccatgccaaatcttaagtaacaccaccagaaagtgaacagggaaaataacaggacatggaattcaaatcaagcaatatagttcttataaagagttccaataaaacatttcagaagaaaaagtatgaaacaagctaaaagtaagtttcacttagaaaacttctccccactcacactccccaccaaataatctcatattatttgggaaatatttggatttcaattgtccctacccagcctaaactaaggtaaatgataattagcatacactaccttaatattgtgatgaaaatcagtaaagatagaacgttttctaaaggtcgaaaataatatatttattattactggggaaagctcccaggttaaatataacttttttaaaatgtaacatttggacctagacctactttaatatatcatttgaagtttcagacaattttggtgctaattactttttgtgagtttttaaagtctcatagcctagttgactgcaccctatggtaatgccatattttcttgtatctaacaagttgcatattttttcctagagagacattttcagtgtattttttttttagaaatttataattttatagttctttcataacacttattctgagttttgaaacaatgtatttcctatcttgacatggattttttcacaaaaaatttgtattttactgttgttttcaggaaaaaaatcagatcatttttctttgatatctatatcagaaaggtacaatattaacagtataaaaccaaatgcttaaatttggaacttagccaattttgataatctttttctaaggctaaagtcacatcagtaattggctagccatgttattaaggtgtcttaattcagcattttcaggttttatattgaaatacgcatttctttaaatattctttgaaaatggagaatggctttagtgatattttgggttttgttagagaacctaaaatctttacactttcatctcaaagattataaaggaaaggggggtagttaagatttagaattcaagttaaatttcagaaattggggcagtcaggcatttgtatctttggtagggcaacaagtaaaacatgtagagtgcttgctatcccacttcataaagcttttacccaatcttatttctaaacctctgtgcattcttagtgtcttctcattctgaaacagaaaataaggaaaaacatttaacttagttttctaaaatcagataatcctaaacaaaaatgttagtcagggtcactaaaaagtattgcacatttatataaatacagtccttttaaaatttgacttttaaaaaacaaaagactttgtacgatattgtgtttttattgcgtttgcaatatttttatagtagcctttatgaactcagtataagtgcaagttgtttgaaaaggtgtttttattagtgcacaatagaattgtgaggttttcaatagatgtcatgagattttgtatatctacataaaatatcagtacatttttttctaatgctactggaaattttacttttcctttgcaacacataaatgatatgatgtacaaaataacagctctggttccaccagtacctaatgttgaaaacatttttaaagtaatttttaatactaactatttagtatactgtcagtactgtacatctgcacactggtgttaatagggtatatattaaattatataaagaaataagatattttgctgttattctttctacatatattattggtcagtacatcaaataatatttggctttgatatgggaaaaaacaaactttgcctatgtaatggaaataaaatattttcttttatgaaatatattagaatgcagattatactaatatcctgaaataaaactggtaattt

SEQ ID NO: 4577 - protein, 132 aa, Homo sapien
MCSAGELLRGGDGGERDEDGDALAEREAAGTEWDPGASPRRRGQRPKESEQDVEDSQNHTGEPVGDDYKKMGTLFGELNKNLINMGFTRMYFGERIVEPVIVIFFWVMLWFLGLQALGLVAVLCLVIIYVQQ

SEQ ID NO: 4578 - DNA, 1119 bp, Homo sapien
acctttcaggatcctgctcacatatcacctcttctgggaggtcttaccaggttgcagtttgatgtccaggctatccccttagctttgtgacttcaggtaacttgctgcattgttctgatcttcagtgtcattgtctctgaaatgctactgatgctgccctgcctgccttgcaggactgttggcaggcctgattccagaagctctctagaactgtactgtgctggacagataggcagggggcttggcagggtaatttcttggttctagggtgtgtgtttggggagtatgtttggtggtcctgagagctgcagcatttcaggttgtttttctcactgcaggtcatttcatgggcaacaacacagtgctggatgttttgcggcgtgaaggctatgaggtagaacacgcccctgctggacgacccatccacaaagggaagagtaaaaagacctccacacggcccactctgtccaccatctttgctccaaaagtccctaccctggaagtaccggcaccagaagccgtatcctcagggcactcaacgctgcctccccttgtgtcccggcctggaagtgccgacacgcccagtgaggccgaacagaggttccggaagaagcggaggcggtcacagcggaggccgcgactccggcaattcagcgatctgtgggtccgcctggaggagagtgacatagtcccgcaactccaggtccctgtcctggacaggcacatctccactgaactgcggctccctcgccgtgggcattcccaccacagccagatggtggccagcagtgcctgcctgtctctctggactcctgtgttctgggtgctggtgctggctttccaaacagagacacccctcctgtaacgactggaagcaccaggctaagaacctgacccctcggacttgaagaatggccattcctgtactccacattctggtctagccttgttgggcccaatccagaagagactgctcttgaaaaagcggcccagtgttgattcttctctttccaaggaatgtgactttgggttatccaactttgggggcaggtgtacagttttgtaacatagtgagttgtgtgaaaataaattataaatgagttgtatgaaaataaatac

SEQ ID NO: 4579 - protein, 172 aa, Homo sapien
MGNNTVLDVLRREGYEVEHAPAGRPIHKGKSKKTSTRPTLSTIFAPKVPTLEVPAPEAVSSGHSTLPPLVSRPGSADTPSEAEQRFRKKRRRSQRRPRLRQFSDLWVRLEESDIVPQLQVPVLDRHISTELRLPRRGHSHHSQMVASSACLSLWTPVFWVLVLAFQTETPLL

SEQ ID NO: 4580 - DNA, 1182 bp, Homo sapien
gacccacgcgtccggttctatgtactctctaaaatgttatcgttttcatttgtctactaattttcgagcatttgttactactgagtttcttaatatctgactggcctccgcccacgggctctgcagagcataaatactcaggctgatggtagtgcagagactctccctccttgatcagcgcaaacgttggtctgaggcttgagggatggagcaacattttcttggctgtgtgaagcgggcttgggattccgcagaggtggcgccagagccccagcctccacctattgtgagttcagaagatcgtgggccgtggcctcttcctttgtatccagtactaggagagtactcactggacagctgtgatttgggactgctttccagcccttgctggcggctgcccggagtctactggcaaaacggactctctcctggagtccagagcaccttggaaccaagtacagcgaagcccactgagttcagttggccggggacacagaagcagcaagaggcacccgtagaagaggtggggcaggcagaggaacccgacagactcaggctccagcagcttccctggagcagtcctctccatccctgggacagacagcaggacaccgaggtctgtgacagcgggtgccttttggaacgccgccatcctcctgccctccagccgtggcgccacctcccgggtttctcagactgcctggagtggattcttcgcgttggttttgccgcgttctctgtactctgggcgtgctgttcacggatctgtggagctaagcagccttagatagcagcagaaggctttttggattctcctccttgaaaagattctcagttaccaaacgtctccacctagaaaataaaaatacattaagatgtgctttcattgctggttgtcagtttttaaattctctttttcccttatgtttctttcttgtttcgcgtcgcttattactttcagtttccttgtattttaaatattggtatttcattaaatatttcattcgtatctgttttcactttgagaaatctattttacgattgtagaattcttagagtttttggcaaatttaaaatttgtttttttccattgtattttaaaatcttattcctactatttttctaattattgctttttaaatgtattgtttgtttacatttaattttaaaaaaaaaaaaaaa

SEQ ID NO: 4581 - protein, 193 aa, Homo sapien
MEQHFLGCVKRAWDSAEVAPEPQPPPIVSSEDRGPWPLPLYPVLGEYSLDSCDLGLLSSPCWRLPGVYWQNGLSPGVQSTLEPSTAKPTEFSWPGTQKQQEAPVEEVGQAEEPDRLRLQQLPWSSPLHPWDRQQDTEVCDSGCLLERRHPPALQPWRHLPGFSDCLEWILRVGFAAFSVLWACCSRICGAKQP

SEQ ID NO: 4582 - DNA, 2206 bp, Homo sapien
ttttcaacaaagaaccaatttattaatataatgtacaaaaatagttggttcattttctgaattcagtctttgaaataaaactccttgttttggccgtgtttctgaatgtattggtgattcacccccaagctaattttttaaagtcatttttgaagttgggaagtctcatgagagatgttgaagtatgtatttaatcaagagtcatgatttcaaactagttttacatattaagcagttagtgttctaatttaatgggtaaatgtgtgtttggataaatatctgaaaattttatccttaagtatatataattatttgcctcttatatgtcttaaagctatttaaacaaggtgttaaatgagccaaaacaattaagtaattagaacagtacatttttatcagagtgtctgtcatatgcaatgaatgtatgtaatactaaaaaatcatgactacttttatcaaagaaaaaccacacattaatcctattaatcatgaaagcgtagcattgtaaattaaaggttttctttgaggctcttgaaagtgatcccattgctttcctgttttaaaaatattttatgctctttatttccacttctgtgaatgtgatatttctattttgtgattatgttactgaataaacaaacttgctacataaaattcttagcaattaaaaaaattctgattctgccattttgtctcaaatgtaatatacccttttaatatcatatgtttacatatttatgaatgattaatcatttttgtttgcattaaactttatgaaatgtcagaaatgattttactctaatgaaactcaaattttgcccaaagtagcaatattcttaaagatgttgaattttgactggttgaattttatatagtaacacacaagtcgtgatcatcaatattattgcagaccaggactctgcttatatgccttgctaacaaagatttctttcacagaggcttttctcctctcaagacttaaagtaagaattacattttattaagtcagttaaatgcaccatggcttcatatagtaatataaaaaaactctttgaagagagaaatattatatcctaaaacctctaaaccacaaacattcaattgaaagagttctgttgaaggataatgacatactgactgcttacagaccaagttgcttgcattttgtatgtttagccctcctttgccactgcttttagagccttggaaggctaagtgtgatagtaatgctagctctaatgcatatttaaaggagactgcctcgcttttagaagacatctggtctgctctctgcatgaggcacagcagtaaagctctttgattcccagaatcaagaactctccccttcagactattaccgaatgcaaggtggttaattgaaggccactaattgatgctcaaatagaaggatattgactatattggaacagatggagtctctactacaaaagtctttgggtatttgtttcttacatagaaaatgctaacatgaatagaaagatactggtgcaagaccattcccgggaaagtagacatacttacatttttttccttttctgctcatttgaatgaactcaattttatgttaaattgttatatcagagtgacaaataagtgctatggcttgatagaagtgaagctcttcacatatattcaaaatacatatcacaaactttggtaaataggatagtaatctgaagaacttttgccctttttaccccatttactgtaactcttgtttctaggtaatcgttctctctcaacaaacttctcaagcgtctgtgtaacaagccacatgttctaacaaattgtctccatcgcacttcaacagccaggtccctattttttataacgtattaaccttattattttcttattattttaaaagaatctatgcacattagcaaaatttaaaagatagagaaaaatataaacagaaaaaattatgtttacttctaccaccctaaatcaactattatcaattttatacatattttactccatcttttttcaaagtttcttacattttccaatgtcattaaaattctctgtgaatgtaaattttaaaaactgtacctactgttttttggaaatctgtaacaagctatgtgtaatcattcttctaatattaaacatattgtgtccaagaaaaatctatgtcggtgcggagaaagagtaatgaaatggcaggaattcgatatccagc

SEQ ID NO: 4583 - protein, 19 aa, Homo sapien
FSTKNQFINIMYKNSWFIF

SEQ ID NO: 4584 - DNA, 2742 bp, Homo sapien
aggttactatagtgtctgctcctacccctgggacaagatcccctaatgagctggcaggtgggcgtggggggcacaggtacagcttggcttctcagctttgctcccctatcctctgctttgccatgaatctctcatccagccccgcagggatctgcctggccagcagtgagcctgagcccctttcatcctgggacctgccgaccacggctcacatcctcctgggtgaagaatgtcaccttgcttcctatctgcctctttcgtggttggctggggagggggaccggggggtggggtgaggttaacctcattgttgtcttatatggtcatttaaatctcccagggcttcctccaagggccaaaaataatccggagacacagcagctgtgtccagcacacagaggacccggccatctgctttggttcagagccctgtgtctgtcagtcagtctctccctggctctccctccatcctcattcctgcctgaagccatgacccgcttctcctatgcagagtacttttccctctttcactcctgctctgcaccctccaggtccactgcacctcctgagagttcgccggcccgggccccaatgggcttgttccaaggggtcatgcagaaatacagcagcagcttgttcaagacctcccagctggcgcctgcggaccccttgataaaggccatcaaggatggcgatgaagaggccttgaagaccatgatcaaggaagggaagaatctcgcagagcccaacaaggagggctggctgccgctgcacgaggccgcatactatggccaggtgggctgcctgaaagtcctgcagcgagcgtacccagggaccatcgaccagcgcaccctgcaggaggaaacagccgtttacttggcaacgtgcaggggccacctggactgtctcctgtcactgctccaagcaggggcagagccggacatctccaacaaatcccgagagacaccgctctacaaagcctgcgagcgcaagaacgcggaggccgtgaagattctggtgcagcacaacgcagacaccaaccaccgctgcaaccgcggctggaccgctctgcacgagtctgtgtctcgcaatgacctggaggtcatgcagatcctggtgagcggaggagccaaggtggaatccaagaacgcctacggcatcacccccttgttcgtggccgcccagagtggacagttggaggccttgaggttcttagccaagtacggtgctgacatcaacacgcaggccagcgacaacgcgtctgccctctacgaggcctgcaagaatgagcatgaggaggtggtggagtttctgctgtcacagggtgccgacgccaacaagaccaacaaggacggcttgctcccgctgcacatcgcctccaagaagggcaactacaggatcgtgcagatgctgctgccggtgaccagccgcacgcgcatacgccgtagcggcgtcagtccgctgcacctggcggccgagcgcaaccacgacgaggtgctggaggcgctgctgagcgcgcgcttcgacgtgaacacgccgctggcgcccgagcgcgcgcgcctctacgaagaccggcgcagctccgcgctgtacttcgcggtggtcaacaacaacgtgtacgccaccgagctgctgctgcaacacggcgccgaccccaaccgcgacgtcatcagccccttgctcgtggccatccgccacggctgcctgcgcacaatgcagctgctgctggaccacggcgcgaacatcgacgcctatatcgccacgcaccccaccgccttccccgccaccatcatgttcgccatgaagtgcctgtcgctgctcaagttcctcatggacctgggctgcgacggcgagccctgcttctcatgcctctacggcaacggcccgcacccgccggccccgcagccctccagcaggttcaacgacgcgcccgcggccgacaaggagcccagcgtggtgcagttctgtgagttcgtatctgccccagaggtgagccgctgggcggggcccatcatcgatgtcctcctggactacgtgggcaacgtgcagctctgctcgcggctgaaggaacacatcgacagctttgaggactgggccgtcatcaaggagaaggcagaacctccaagacctctggctcacctttgccgactgcgggttcgaaaggccattgggaaataccgtataaaactcctagacaccttgccgctcccaggcaggctgattagatacctgaaatacgagaacacccagtaactggggccacggggagagaggagtagcccctcagactcttcttactaagtctcaggacgtcggtgttcccaactccaaggggacctggtgacagacgaggctgcaggctgcctccctctcagcctggacagctaccaggatctcactgggtctcagggcccagagctttggccagagcagagaacagaatgtgtcaaggagaagaatcatttgtttacaaactgatgagcagatcccagaccttctctaccttcaggaatggcagaaacctctattcctggggccagggcagagcttgaggtgttctggggaaggtggtgctcagagccttccctgtgcccctccacttgttctggaaaactcaccacttgacttcagagctttctctccaaagactaagatgaagacgtggcccaaggtagggggtagggggagcctgggtcttggagggctttgttaagtattaatataataaatgttacacatgtg

SEQ ID NO: 4585 - protein, 587 aa, Homo sapien
MTRFSYAEYFSLFHSCSAPSRSTAPPESSPARAPMGLFQGVMQKYSSSLFKTSQLAPADPLIKAIKDGDEEALKTMIKEGKNLAEPNKEGWLPLHEAAYYGQVGCLKVLQRAYPGTIDQRTLQEETAVYLATCRGHLDCLLSLLQAGAEPDISNKSRETPLYKACERKNAEAVKILVQHNADTNHRCNRGWTALHESVSRNDLEVMQILVSGGAKVESKNAYGITPLFVAAQSGQLEALRFLAKYGADINTQASDNASALYEACKNEHEEVVEFLLSQGADANKTNKDGLLPLHIASKKGNYRIVQMLLPVTSRTRIRRSGVSPLHLAAERNHDEVLEALLSARFDVNTPLAPERARLYEDRRSSALYFAVVNNNVYATELLLQHGADPNRDVISPLLVAIRHGCLRTMQLLLDHGANIDAYIATHPTAFPATIMFAMKCLSLLKFLMDLGCDGEPCFSCLYGNGPHPPAPQPSSRFNDAPAADKEPSVVQFCEFVSAPEVSRWAGPIIDVLLDYVGNVQLCSRLKEHIDSFEDWAVIKEKAEPPRPLAHLCRLRVRKAIGKYRIKLLDTLPLPGRLIRYLKYENTQ

SEQ ID NO: 4586 - DNA, 1027 bp, Homo sapien; identical to SEQ ID NO: 3930

SEQ ID NO: 4587 - protein, 220 aa, Homo sapien; identical to SEQ ID NO: 3931

SEQ ID NO: 4588 - DNA, 2122 bp, Homo sapien
  Unsure 780-1076: Unknown base
acagagaatacccttcagcatggccactctggacccaagaggaggaaaaaacggaagcttttttaggagaaggaggacttgctggaatccaagatgtgaagaactcttggtgactggctggctggccagcgggcaccacacctgcacttgagtgcctcgggcttgcttattaataacgcacagaagaagcatcacttctcaccatctcctggcatgtatggagcagggagcaaggctatgttcccgaaagccctgattagcttgtcttgctctacgctcgacctcgaacaatacagcttgtaagacctcagtcagtcctggtacactggggtaaatcagtgtggtggtggaagaaaagccgggaggcctatttttataggaaaatagtaccattaaaggtgcaatgctgtcattttggacaaaaggaaagaaatttggaagagctgggattattggcaaaaacttgctgaggggtgaatctttagagctaatcactgcagaatcagagttgcagcaatatgattgcaagcaagtctgaatgcatagttttactttaattcggcttgacaatttgaataggtaaccccctcgggactgactgaatcgttatgcatgtgtcaatcaatgggaggtgtgcattctctagaagtagttttaggctgtttggtttggttttggttttgttttttaaatgcagcctgttgaggcactgtcatgtggtgtgaaagatttaaatgtagcaacgctaaagagtaataatttggggataagaagtggggnnnnnnnnnnnnnnnnnnnnnnnnnnnnnnnnnnnnnnnnnnnnnnnnnnnnnnnnnnnnnnnnnnnnnnnnnnnnnnnnnnnnnnnnnnnnnnnnnnnnnnnnnnnnnnnnnnnnnnnnnnnnnnnnnnnnnnnnnnnnnnnnnnnnnnnnnnnnnnnnnnnnnnnnnnnnnnnnnnnnnnnnnnnnnnnnnnnnnnnnnnnnnnnnnnnnnnnnnnnnnnnnnnnnnnnnnnnnnnnnnnnnnnnnnnnnnnnnnnnnnnnnnnnnnnnnnnnnnnnnnnnnnnnnnnnnnnnnncacattccagagagtggtgatgacccaaatgttgaaccaattatgttttggtggtggtgttcttagctgttgaatcctgaatggtttataaagtgaactagctggcttaatgcagccagcgttctgggcagcagaacatattcattcttactgtaaattctatttgctgcttccaaaggtgatgattttcaagcagacatgttctatatggtctgtgttttaggatctggtgcccagcctctatcagagcttgcctacctggcaaagctgcctacccttcaagtgggaaaatataatccactgtttaacaaggctcaccctctccaccctgtcctaacgaccttttgtgaatgtgctgtgatattttcttgctcaatagcaaggtggtagctctgctttcattttaagaaagtggaggctgagggcattgtatcaatactgttgcaactccaagaagttttccttgtaaaattaaaggaaagatcttgttattgattaaccattttcttatgccttgctattgacatattcatgctctttctacgtctagtggctgaaaatgtttgcatttgttcatttgactaatggtgtgatttttgtttctatattattagacctgtaatgttttaaaatgtattttattaaatttggactggatgtatgtctctagcaatacgaggtactttctaaactattaagggaggggttgtatcctcatgttgagataagatgatggtcgtttaaattttgcaattttttttggcctgcagggatattttgtgtttatgtgtccaaaaaaggaataaattggcattcttgtgccaaaagttgtttttcctgtcaattgtctaataagtatgcagtacactgtaatggcaacatacatggttgctttataaaaacagtttcctcagtatgagaaattttacaaagaacagtggaaaaactttgtgtttttaactcttgggtctccctatttttaaaaattgctatttggtatacaattattatgtgtcaattaaaactaaaataaaacttttaaaaaa

SEQ ID NO: 4589 - protein, 134 aa, Homo sapien
  unsure 30-129: unknown amino acid
  Unsure 780-1076: Unknown amino acid
MQPVEALSCGVKDLNVATLKSNNLGIRSGXXXXXXXXXXXXXXXXXXXXXXXXXXXXXXXXXXXXXXXXXXXXXXXXXXXXXXXXXXXXXXXXXXXXXXXXXXXXXXXXXXXXXXXXXXXXXXXXXXXXHSREW

SEQ ID NO: 4590 - DNA, 1754 bp, Homo sapien
tactgggtttttatgagaggaaaatagaaaatgctcttctagaagagagagaacaagagcacaaaataatctggactcacaaaaattcagcaagctccaagaaagggggatggagggaacgctggcaaaaatttaaatgccattaggatatttagcaagttattactgtttggtaaaaatgcatcatcaccctgtgtgcaaaatgcttgcaaagtagtctaaatgtctttggagatgggtgttttactgcttttttccaaaaacaaattgtttattatggttgcagaaatgcagccattacggtcacataaatttctaaaaagcctaccaaaggttgcaagcagtcttctgccactgggcaggccagcagttcagacccagcgaggttgccaggaacaaatccaggaaatactgggaagaacaagacaagagaattacctaaaagagcaaacaattcaagtaaatcctgtagctattaccacttaaaatccgtagctcaagattcctgtttcaccaccttatacacttaagcaattatacttaagcctttttttagtcctaagtgaagaactacatcagaatcaggataagtattttgcctgggaaatttggctgcatatgaatggagaagacatttacatcctatgttctggcactttctgaaagatctaattaaacatgttgatgtgccaatttaatcaagatgagagatccctgctggtgtcaccctctagaacctgcacttggtgttttgactttccagaagaaaaaaatgcaactttggttagggggcagtggttggatcacacagttgtctttcgtttcctaccacagtaattcatatttaaatatgcttttagattagtgtggatactattgctgctgtgttgctacctgacctttttctggggggggtacctcagaaatgagcatttgagggcaagcgaaaaagccctcttcatcctccagaggcaacaaagaggcagcagaaatggggaaagattgtgagaggcagggcttgggtctagacctggacttaggcaagatatgttgccctcaaccctgagttttcttatatgtaaaaagggaaggttgggctggactagatgaggtcaagatttgccattctgggaggctgatattccagagaatcaaaattaatcctaaaccaaagctttatggctgctacagagacatgtcacatttctgagacttgtcaccaagagtttgtccctcagactttggcgctgttgaatgcaaagacaaggatggccaccttctggttcttgcctgttgtcctcagctgagagcagtctcggtaaaggtggcaaagattctgtgacctcagactggggaccaaatgcttgggagtctgatggccgggctgggccaccattctcatagctctcattctgtttggagcaaccaaaggatttgtgtgaagttatttggaaaaggaccttaactgagcagtaatcttttttctgtatatttggaatgtttttcattctgacctgttctgtcagtgattctactgaaaaacaatttaatcaatataaaaatgttcaagctatgcaacactgttattgtctgttgacatttttattctaattgatttctgcaaatcttttcttatttgtgtttgctttttcctttcatttagaaatcaactcttttggaggagagtgctctctgctcatctccaccttccctctggtcaggagcatgaactcccatcttggccttgtcctggg

SEQ ID NO: 4591 - protein, 47 aa, Homo sapien
LGFYERKIENALLEEREQEHKIIWTHKNSASSKKGGWRERWQKFKCH

SEQ ID NO: 4592 - DNA, 1857 bp, Homo sapien
ggtccaaactgtgccaccttccacccctgcgctgggagagcagacatcgcccactcgggctcacagtgccatccgggtgaggacctccgtggagagctctctttgccaaagaaaagcagttgcattaggtctgcgagcaggcagggtggcctcttcctggctccccatccaccaaggaagcttcaagtccctgggacacaggcactttcccacacaggatggagccgggccaccctcacagctcctgccctgcagacgctgagcttgtggagggaggcaggcagcaggagcaggcgatgcccaaagcgtggagaccagcactgctctctccccagtgacaggtgcacgcccagatcacggatgtgtcgggaacagctgtgctcctgctgctcagcgtccgtcactccaggctgggagcgggtccccaagcttctggctgggcctatccgtctccactctcagtgtggggggtggggggcgccaacagcacgcatttgctctctgcacttctcgtctgataatgggcagagggtccttctgcagccccaaaacatccctaggcaggagccctggggccccaagcagccagggaggtgagcaccaaggacctcccagagagcgtcaccttccgtcgagggaggcccagcctgggggcggtgtctgagacttggaatcaacgcttccgttggtggcagtaaatcctgtccctaaccctgcagtatagctgtgccgtgtacaggagggtgttgtctgacgccagacacctggactacagatcgcagcctgattcctggtcattgctccactgaaccccagaccccagcctcgttctgggccctcatcccctagatccagggaccccagccccatttcagcccttgggcccttgtaggatgcgaggccctgggccccagcccccagcccatccgtgttccaggcactggggggctgaggtcctctgagaagggacacagggcctggggggctctctcagcccatcagcaggagaggactgactccagaaaaatcagcgtttgtacccactcaggctgccaagacctgtgtccgtccttccaagctcaaccttcagagttcatgaggccccttgcccagaatgtccacagagttcatgaggccccttgaatgtccacagagttcatgaggctccttgcccggaatgtccacatttgaaacctcccaacaccgagccccatttcaagtataaccaggagggaaaatggtgcttgaaataagcatgccacaaaggaaaacctgctttctcgaaatgggccctggccgcccaggccctgacctccccggccaggatggaacgttccagagacccattagtgccaaaggcaaatgaaaacacaccctgtgaaaatgtctctgctgtctcccaagtatttatttttctgagcgtggggaaggaaggcttaattaagatgccctcaggcgggtacgaggggcaaagtgggagcagggagcgtgcttcctctgtggccttggttcagacaacagccttcagcaaagctttgctctagaggctcataggaagggacagagggcacaggcccagctcagcctttcccctgcctttcttggggcctgggcatggacagcaccgcctggcgacacacaacggtgggctctgaggctgtttgttacgcagcattaatgtggccgtcggtgaccgctacacggtgactgataactgcactgtgggtagagctcagcccgcagggctctggtttgtgacctctgggccaggcaactctcaaggcttcttccagtgcagaatatgattcccgcagcagcgcccagcgagaactgcgaaggaggcaggctccgggcacc

SEQ ID NO: 4593 - protein, 198 aa, Homo sapien [sequence omitted]

SEQ ID NO: 4594 - DNA, 1014 bp, Homo sapien
agcggaaggggcctttcggaacgatttggaacgaaaggaagtggaagaaacgcggaaccatggccgctgtggttgctgtttgcggtggtctagggaggaagaagttgacacacttggtaacggctgctgtcagccttacacatcccgggactcacacggtgctttggagaagaggttgttcacaacaggtatccagcaatgaggacctgcccatttcaatggaaaatccttataaagaacctcttaagaaatgtatcttgtgtggaaagcatgtagattataagaatgtacagcttttgtcccagtttgtttctccatttactggatgcatttatggaaggcacattacaggtctttgtgggaagaaacagaaagaaatcacaaaagcaattaagagagctcaaataatggggtttatgccagttacatacaaggatcctgcatatctcaaggaccctaaagtttgtaacatcagatatcgggaataaattctatcacgttaccactaataaacttattttacagtaagtggttgtatgatgccaatactgactcaaaccaacctttggatagaaaagtgtttgaggagtgaggtaaagaatgacacttccccttcataccaatgtccattaagcagattgcttatttaaaatgttaacactcatcacattttatctatgttgaataaaagtggttctgtgtgattgtcatttatatctgatccccaaatagctcatacaataatccattcaatagaatggaattaaaactgttcagaatgattttccaactagcaaatataagtatgcctggttaagatatcttccctttgtagaaatgttacattgggatggatagtggtgctgtcacagaaggacaaaatattcctagacgagtctatcctcaaaccagtagtgtcttttacatgaagagatgatttacacctaatagacattgaatatgatagacatacatgtatatatgtatcagttctgagttccactggcctatccc

SEQ ID NO: 4595 - protein, 142 aa, Homo sapien
MAAVVAVCGGLGRKKLTHLVTAAVSLTHPGTHTVLWRRGCSQQVSSNEDLPISMENPYKEPLKKCILCGKHVDYKNVQLLSQFVSPFTGCIYGRHITGLCGKKQKEITKAIKRAQIMGFMPVTYKDPAYLKDPKVCNIRYRE

SEQ ID NO: 4596 - DNA, 1150 bp, Homo sapien
  Unsure 540-593: Unknown base
cgggcttcctgcatcttccaccgcaaatgattcttttgagaaaagcacccataatttgctacttgaggattttattccctggattctctggatgctcattgcatgaaaagtggaaaagtttagatctatggaaacagaactgttgcctatatggaaaatcagtgccttgtggcaatacaggtaagaacagtgttgctcttgaaaaagtggacagtgggtggtctgaatgtgtcctggtccctggagtgggtttttagattgatgtggactcttcttagacttgtaagtaaaaaagttgtttcttcccctaaaagggaactgtgcgccttagacctggaattgctgggaaactgaaacattctgtagacttacttgtttccaactgtatcgcagcaagaagtctatgtgccccaggatcctggattacctgaggaagaagagatcaaggaaaaaaaacccaccagtcaaggaaagtcaagtagcaagaaggaaatgtctaaaagagatggcaaggagaaaaaagacagaggagtgacgagnnnnnnnnnnnnnnnnnnnnnnnnnnnnnnnnnnnnnnnnnnnnnnnnnnnnnntcaggaaaatgccagtgaagggaaggcccctgcagaagacgtctttaagaagcccctgcctcctactgtgaagaaggaagagagtccccctccacctaaagtggtaaacccactgatcggcctcttgggtgaatatggaggagacagtgactatgaggaggaagaagaggaggaacagacccctcccccacagccccgcacagcacagccccagaagcgagaggagcaaccaagaaggagaatgaagaagacaaactccctgactggaataaactggcttgtctgctttgcagaaggcatgtttcccaataaagaagttctgatcaaacaccagcagctgtcagacctgcacaagcaaaacctggaaatccaccggaagataaaacagtctgagcaggagctagcctatctggaaaggagagaacgagagggaaaattttaaagaaagaggaaatgatcccagggaaaagctccagtcttttgactctccagaaaggaaacggattaagtactccagggaaactgacagtgatcgtaaacttgttgataaagaagat

SEQ ID NO: 4597 - protein, 180 aa, Homo sapien
  unsure 16-34: unknown amino acid
  Unsure 540-593: Unknown amino acid
MSKRDGKEKKDRGVTXXXXXXXXXXXXXXXXXXXQENASEGKAPAEDVFKKPLPPTVKKEESPPPPKVVNPLIGLLGEYGGDSDYEEEEEEEQTPPPQPRTAQPQKREEQPRRRMKKTNSLTGINWLVCFAEGMFPNKEVLIKHQQLSDLHKQNLEIHRKIKQSEQELAYLERREREGKF

SEQ ID NO: 4598 - DNA, 2153 bp, Homo sapien
gggctctctataatggaatgatgctccttttcaatacttagagccactgtactcagtttaggagtaactgaaggtgtggatgcatgttaatgggaatccaatttttactatttttatattaataacagcgttctgtagaaacagtctctcccttctaaataaaaactatgtgactgctgttactagtgctattctatgcgaatatcctaataataggattcaggaattctaatgaattgtttcttaattaaggtgaacaagtagactcctgatcaagaggagaacactgtgaatgtctcataatcaatagaccttcattctcttgtagaaaatgtggattttcaggaaaagactgattattttcatgaataaattttcttatacaaattccattttgtttgacataaaagaccctgaatcttaagatatttgtaaatcagaatatttaagaatgtaaaatgaatccccaaatctagtttcctccaaagcacttcttaatgtaggaaatagtttttacaaaccctatgtcagtactaatgttcctgggtcaaacccagtaatattgttagtgtatgttgttacaccttatttaagaggcagagtggttttgagcaagtcagttaacgtgatttgatgaagaaataaggaattatatacatttagacagaagaatattttattttgaaaataggatttcgtgcaataatttttcttgcataacttagttcatataaatatgtacatctgtttttctggcagatgccttaaggtcatgtttttcagtatttgagtaaatctgtatgtagcaatgttctcattgatttcagaaaaaaatatattctttatattgttgccaggagaaatgtttttgtttatttaaaattattatggatattgtgttgttgtatcataactaactgcctcagcaacaataaatatgcagtaagaaaatcctgtaccttagattgacaatactgttactttaaaagaaatatatacggtacaaattgctgattctacatgtgtacatttaacagatactcagttctgcaccacctaaatcaaaatggcatttgtatgctgatgattacatatgtggattgtagtatcctttgtgatgaatctttgataagatttataaagggcattgccaatactttttgactgtgtaaattaagttaattttttgtatgatgtacagtttgtttaaccttagagcttctatagatttctactttattatacttgaatgaggcagaaaagcactgtggaaaatctgtagctctggatgcaacatgcagacataccaaaaaaataataataaagcaaggtactgaagagcaatgttaacagaatgctttatatccagaatgctatgtttttttcaagccacattttagttgaatgaagtaaagttattcaatcttttattttaaaatattggaaagtcacaaatgattacctctttgatatgatgaacctataagtctattcatctctgttatttcatttctcaaatgtgagccttgttgaggtccattatcaaatctacactttggttgattatatgatgtttaggacaaggcagaatttaaaacctgcatgtttagtgcatcacatgtcaagtcaccatccttctgacagtgtaacttccataacgttattttgagagccatttaataatcatatttgaaaaagtggatttcttgagtctgttgtagtttagtacttacagcagtgcctaaaacagcaactaatatgaactgcctgagtcctacaacataaatgcataaagcttttttatgtaaaagccacaggaggggttcaaaattgaacttttccaaagtttatttctcttgcgttagatgaaaaactatttaaaaggactgaaaaccctgagctttttgctcgtcttggtagcagatatctgtaaaaacctacccagaattgtgattttacttcattgttcttgcatccttgaggctacagtataaatcatctccaaacttgactactattgggaagatgtgtataaaagcatcgctttgggaattttttaaaaaatatgcaaaaataaatattgaataaaatctacattaccataaaacacccaaaaatgcagttctaaaataaaattggtcacaattaaactt

SEQ ID NO: 4599 - protein, 12 aa, Homo sapien
ALYNGMMLLFNT

SEQ ID NO: 4600 - DNA, 402 bp, Homo sapien
gcggccgcctactactactaaattagcggccggtcgacgtccgagggggaagaggtttgttaatacgttcgccatgtgctacgatcttgggacgaactgagccacgagcgtggctttgagggccgtccgaacgctgcaggccggccaggtccctgggcgtccaggcctggcctacgcaccactttgtcccttagcgtttaaaggtttcttcccgaatctcaggccctcagctacctgcaggtttcgtcgcgagccggctgcaagttttgaacctaagtaaacctcaatccggagggcctagcggtaaggtgggcgctgtgtctattgaggtgcttagcaataaagaaaggtagtgagttgaaataaagacagtaaagtcgaccggccgcgaatttagtagta

SEQ ID NO: 4601 - protein, 32 aa, Homo sapien
RPPTTTKLAAGRRPRGKRFVNTFAMCYDLGTN

SEQ ID NO: 4602 - DNA, 1374 bp, Homo sapien
cggctcgagccgagttccgggcgcgaggcggccaccgtggagagcagagcgcggcggctggaagctgctaagtcagagccgcgatgttccggattgagggcctcgcgccgaagctggacccggaggagatgaaacggaagatgcgcgaggatgtgatctcctccatacggaactttctcatctacgtggccctcctgcgagtcactccatttatcttaaagaaattggacagcatatgaagacaggacatcacatatgaatgcacgatatgaagagcctggttacagtttcgactcctctctgcaagtgaataggcccagaaaggtgtaagagactctttgaatggacataaaattctgcttgttaagaacaagtttggctctggtaactgaccttcaaagctaaaatataaaactatttgggaagtatgaaacgatgtctcgtgatctggtgtacccttatccctgtgacgtttggcctctgacaatactggtataattgtaaataatgtcaaactccgttttctagcaagtattaagggagctgtgtctgaaatggcactgtcttgtcagtcatttctgtttacctttttcttctgcccagagtgtatttgtgaagagtctcttatattatgttttgtggaaatcagcacacaaccacaatgacatttaagcacaggatcattattagtctatgtttttaataaacatatcaattaagatcctgtgcttaaatgtcattgtggttgtgtgctgatttccacaaaacataatataagagactcttcacaaatacactctgggcagaagaaaaaggtaaacagaaatgactgacaagacagtgccatttcagacacagctcccttaatacttgctagaaaacggagtttgacattatttacaattataccagtattgtcagaggccaaacgtcacagggataagggtacaccagatcacgagacatcgtttcatacttcccaaatagttttatattttagctttgaaggtcagttaccagagccaaacttgttcttaacaagcagaattttatgtccattcaaagagtctcttacacctttctgggcctattcacttgcagagaggagtcgaaactgtaaccaggctcttcatatcgtgcattcatatgtgatgtcctgtcttcatatgctgtccaatttctttaagataaatggagtgactcgcaagagggccacgtagatgagaaagttccgtatggaggagatcacatcctcgcgcatcttccgtttcatctcctccgggtccagcttcggcgcgaggccctcaatccggaacatcgcggctctgacttagcagcttccagccgccgcgctctgctctccacggtggccgc

SEQ ID NO: 4603 - protein, 74 aa, Homo sapien
MSCLHMLSNFFKDKWSDSQEGHVDEKVPYGGDHILAHLPFHLLRVQLRREALNPEHRGSDLAASSRRALLSTVA

SEQ ID NO: 4604 - DNA, 1179 bp, Homo sapien
ggcacgaggtgatgaagaagccagttatctcagatttcgaaatagtatatggaaaaatgaagaagagaaagtggaaatttttcatcctttgcgactagttcgggatccactgtcacctgctgtaagacagaaagaaactgtgaaaaatgacctgcctgtaaatgaagctgcaattagaaaaatagctgcccttgaaaatgagctgacttttcttcgctctcagattgcagcaattgtggaaatgcaggaactgaaaaatagtacaaattctagttcctttggcttgagtgacgagcgcattagtttgggtcagctgtcatcatcgcgggctgcccatctgagtgtggacccagatcagcttccaggttcagtgctttctcctcctcctcctccaccacttcctcctcagttttcatctctccagccaccgtgttttcctcccgtacaaccaggatctaataatatttgtgactcagataatccagcaactgaaatgagcaaacagaacccggctgctaataagaccaattatagtcatcattcaaaaagccagagaaataaagatattccaaacatgttggacgttctaaaggatatgaataaggttaagcttcgtgcaattgagcggtcacctggcggtagacccattcataagaggaaaagacagaattcacattgggatccagtttctttaatatctcatgcacttaaacagaaatttgcatttcaagaagatgattcttttgagaaagagaatagatcttgggaatcttccccattttctagtccagaaacttcaaggtttggacatcacatttcacagtcagaaggacagcgaactaaagaagaaatggtcaacacaaaagctgttgaccaaggtatcagcaacacaagccttctaaactcaaggatttaaactcaacttaaggttgagctttaaacttccaaaacttcttcctggatgataaattattcttagaaactgatttggactgttaaaggctaaaagtagatgtatttaaagactcttcttgacacattttgcctacacttgctatgtaaatatgtatgcctgtcatttttgtttcctttgttcctttttacgtttatactctgttcttctgtacatagagcttaaaataaacattctttttgaacttgaaaaaaaaaaaaaaaaaa

SEQ ID NO: 4605 - protein, 224 aa, Homo sapien
MQELKNSTNSSSFGLSDERISLGQLSSSRAAHLSVDPDQLPGSVLSPPPPPPLPPQFSSLQPPCFPPVQPGSNNICDSDNPATEMSKQNPAANKTNYSHHSKSQRNKDIPNMLDVLKDMNKVKLRAIERSPGGRPIHKRKRQNSHWDPVSLISHALKQKFAFQEDDSFEKENRSWESSPFSSPETSRFGHHISQSEGQRTKEEMVNTKAVDQGISNTSLLNSRI

SEQ ID NO: 4606 - DNA, 1230 bp, Homo sapien
gtaaaagcaaaagcaacagctcaagcagcctccttggagaaaacctgaaaattcaacttgttcaagagaaggtcttgtacgtgcctaagttctagagcctcctgacgtgagcatggctgagagtgaggaccgctccctgaggatcgttctggtagggaaaactggaagtgggaaaagtgcaacagcgaacaccatccttggagaggaaatctttgattctagaattgctgcccaagctgttaccaagaactgtcaaaaagcatcccgggaatggcaggggagagaccttcttgttgtagacactccagggctctttgacaccaaggagagcctggacaccacctgcaaggaaatcagccgctgcatcatctcctcctgcccagggccccatgctattgtcctagttctgctgctgggccgctacacagaggaggagcagaaaaccgttgcattgatcaaggctgtctttgggaagtcagccatgaagcacatggtcatcttgttcactcgcaaagaagagttggagggccagagcttccatgacttcatagcagatgcggatgtgggcctaaaaagcatcgtcaaggagtgcgggaaccgctgctgtgcctttagcaacagcaagaaaaccagtaaggcagagaaggaaagtcaagtgcaggagttggtggagctgatagagaaaatggtgcagtgcaacgaaggggcttacttttctgatgacatatacaaggacacagaggaaaggctgaaacaacgggaagaggttttgaggaaaatctacactgaccaattaaatgaagaaattaaactagtagaagaggataagcataaatcagaggaagaaaaggagaaagaaattaaattactaaaattaaaatatgatgaaaaaataaaaaatataagggaagaagctgagagaaatatatttaaagatgtttttaataggatttggaagatgctttcagaaatatggcataggtttttgtcgaaatgtaagttttattcttcctaatttactgtgatttgttaatggatgaattgtattttgcaaagatagttagagaaatacctccttccccttagctttattaaggtatcattgataaataaaaataaaatatgtttaatgtatataatgtgatttttaaatatatatatatatatacacacattgtgaaataatgaaataaaggtaattaacacatctaaaaaaaaaaaaaaaaaaaa

SEQ ID NO: 4607 - protein, 300 aa, Homo sapien
MAESEDRSLRIVLVGKTGSGKSATANTILGEEIFDSRIAAQAVTKNCQKASREWQGRDLLVVDTPGLFDTKESLDTTCKEISRCIISSCPGPHAIVLVLLLGRYTEEEQKTVALIKAVFGKSAMKHMVILFTRKEELEGQSFHDFIADADVGLKSIVKECGNRCCAFSNSKKTSKAEKESQVQELVELIEKMVQCNEGAYFSDDIYKDTEERLKQREEVLRKIYTDQLNEEIKLVEEDKHKSEEEKEKEIKLLKLKYDEKIKNIREEAERNIFKDVFNRIWKMLSEIWHRFLSKCKFYSS

SEQ ID NO: 4608 - DNA, 1772 bp, Homo sapien
agcgggtgcggtccgtcggtggcctagagatgctgctgccgcggttgcagttgtcgcgcacgcctctgcccgccagcccgctccaccgccgtagcgcccgagtgtcggggggcgcacccgagtcgggccatgaggccgggaaccgcgctacaggcggtgctgctggccgtgctgctggtggggctgcgggccgcgacgggtcgcctgctgagtgggcagccagtctgccggggagggacacagaggccttgttataaagtcatttacttccatgatacttctcgaagactgaactttgaggaagccaaagaagcctgcaggagggatggaggccagctagtcagcatcgagtctgaagatgaacagaaactgatagaaaagttcattgaaaacctcttgccatctgatggtgacttctggattgggctcaggaggcgtgaggagaaacaaagcaatagcacagcctgccaggacctttatgcttggactgatggcagcatatcacaatttaggaactggtatgtggatgagccgtcctgcggcagcgaggtctgcgtggtcatgtaccatcagccatcggcacccgctggcatcggaggcccctacatgttccagtggaatgatgaccggtgcaacatgaagaacaatttcatttgcaaatattctgatgagaaaccagcagttccttctagagaagctgaaggtgaggaaacagagctgacaacacctgtacttccagaagaaacacaggaagaagatgccaaaaaaacatttaaagaaagtagagaagctgccttgaatctggcctacatcctaatccccagcattccccttctcctcctccttgtggtcaccacagttgtatgttgggtttggatctgtagaaaaagaaaacgggagcagccagaccctagcacaaagaagcaacacaccatctggccctctcctcaccagggaaacagcccggacctagaggtctacaatgtcataagaaaacaaagcgaagctgacttagctgagacccggccagacctgaagaatatttcattccgagtgtgttcgggagaagccactcccgatgacatgtcttgtgactatgacaacatggctgtgaacccatcagaaagtgggtttatgactctggtgagcgtggagagtggatttgtgaccaatgacatttatgagttctccccagaccaaatggggaggagtaaggagtctggatgggtggaaaatgaaatatatggttattaggacatataaaaaactgaaactgacaacaatggaaaagaaatgataagcaaaatcctcttattttctataaggaaaatacacagaaggtctatgaacaagcttagatcaggtcctgtggatgagcatgtggtccccacgacctcctgttggacccccacgttttggctgtatcctttatcccagccagtcatccagctcgaccttatgagaaggtaccttgcccaggtctggcacatagtagagtctcaataaatgtcacttggttggttgtatctaacttttaagggacagagctttacctggcagtgataaagatgggctgtggagcttggaaaaccacctctgttttccttgctctatacagcagcacatattatcatacagacagaaaatccagaatcttttcaaagcccacatatggtagcacaggttggcctgtgcatcggcaattctcatatctgtttttttcaaagaataaaatcaaataaagagcaggaaacagaaaaaaaaaaaaaaaa

SEQ ID NO: 4609 - protein, 374 aa, Homo sapien [sequence omitted]

SEQ ID NO: 4610 - DNA, 1959 bp, Homo sapien
atcacttggctcttctctgatatgaactgggcagcatctaaatgtatctttcttgattttgttgtctctttgcatagagcatatcttgtgaaaacagaaatatccatgtaatggttttttcttgtagtgaccgctcgaaattgcttgagcaacatagagataatgggcaggggtccctgtgtgaagcacctagaggctggaaagctgatggcaaagctggaggggtgaggcagggagaggataaacacagtggaaatgcaggaggaaagctgtgctctgtggtggcctaattacaaggacctgccctacagccagaatcagccagcaaatgcttttgtaaaggaactaaaagaaagggaaaagaggaagtaaacaaaaggtcccttttcagagagggaaccagtgggagacttaagagcaaggaacaacccatttcgtcgttatggtaagtggagattattccttgggcctgaatgacttgaatgtttccccgcctgagctaacagtccatgtgggtgattcagctctgatgggatgtgttttccagagcacagaagacaaatgtatattcaagatagactggactctgtcaccaggagagcacgccaaggacgaatatgtgctatactattactccaatctcagtgtgcctattgggcgcttccagaaccgcgtacacttgatgggggacaacttatgcaatgatggctctctcctgctccaagatgtgcaagaggctgaccagggaacctatatctgtgaaatccgcctcaaaggggagagccaggtgttcaagaaggcggtggtactgcatgtgcttccagaggagcccaaagagctcatggtccatgtgggtggattgattcagatgggatgtgttttccagagcacagaagtgaaacacgtgaccaaggtagaatggatattttcaggacggcgcgcaaaggaggagattgtatttcgttactaccacaaactcaggatgtctgcggagtactcccagagctggggccacttccagaatcgtgtgaacctggtgggggacattttccgcaatgacggttccatcatgcttcaaggagtgagggagtcagatggaggaaactacacctgcagtatccacctagggaacctggtgttcaagaaaaccattgtgctgcatgtcagcccggaagagcctcgaacactggtgaccccggcagccctgaggcctctggtcttgggtggtaatcagttggtgatcattgtgggaattgtctgtgccacaatcctgctgctccctgttctgatattgatcgtgaagaagacctgtggaaataagagttcagtgaattctacagtcttggtgaagaacacgaagaagactaatccagagataaaagaaaaaccctgccattttgaaagatgtgaaggggagaaacacatttactccccaataattgtacgggaggtgatcgaggaagaagaaccaagtgaaaaatcagaggccacctacatgaccatgcacccagtttggccttctctgaggtcagatcggaacaactcacttgaaaaaaagtcaggtgggggaatgccaaaaacacagcaagccttttgagaagaatggagagtcccttcatctcagcagcggtggagactctctcctgtgtgtgtcctgggccactctaccagtgatttcagactcccgctctcccagctgtcctcctgtctcattgtttggtcaatacactgaagatggagaatttggagcctggcagagagactggacagctctggaggaacaggcctgctgaggggaggggagcatggacttggcctctggagtgggacactggccctgggaaccaggctgagctgagtggcctcaaaccccccgttggatcagaccctcctgtgggcagggttcttagtggatgagttactgggaagaatcagagataaaaaccaacccaaatcatt

SEQ ID NO: 4611 - protein, 384 aa, Homo sapien
MVSGDYSLGLNDLNVSPPELTVHVGDSALMGCVFQSTEDKCIFKIDWTLSPGEHAKDEYVLYYYSNLSVPIGRFQNRVHLMGDNLCNDGSLLLQDVQEADQGTYICEIRLKGESQVFKKAVVLHVLPEEPKELMVHVGGLIQMGCVFQSTEVKHVTKVEWIFSGRRAKEEIVFRYYHKLRMSAEYSQSWGHFQNRVNLVGDIFRNDGSIMLQGVRESDGGNYTCSIHLGNLVFKKTIVLHVSPEEPRTLVTPAALRPLVLGGNQLVIIVGIVCATILLLPVLILIVKKTCGNKSSVNSTVLVKNTKKTNPEIKEKPCHFERCEGEKHIYSPIIVREVIEEEEPSEKSEATYMTMHPVWPSLRSDRNNSLEKKSGGGMPKTQQAF

SEQ ID NO: 4612 - DNA, 1635 bp, Homo sapien
gggggtggcggggacgcgagtggcggccgcggggccccggacaagggtccgcagagctgcagccttcgagggccagccctctccgagtccggggctgggtcccaccagtgacaaggcggcagccccgcgcacaccaaagagaaagcggctgtggcggcagcggcagccccagccatgctgtgttatgtgacgaggccggacgcggtgctgatggaggtggaggtggaggcgaaagccaacggcgaggactgcctcaaccaggtgtgcaggcgactgggaatcatagaagttgactattttggactgcaatttacgggtagcaaaggtgaaagtttatggctaaacctgagaaaccggatctcccagcagatggatgggctagccccttacaggcttaaacttagagtcaagttcttcgtggagcctcatctcatcttacaggagcagactaggcatatctttttcttgcacatcaaggaggccctcttggcaggccacctcttgtgttccccagagcaggcagtggaactcagtgccctcctggcccagaccaagtttggagactacaaccagaacactgccaagtataactatgaggagctctgtgccaaggagctctcctctgccaccttgaacagcattgttgcaaaacataaggagttggaggggaccagccaggcttcagctgaataccaagttttgcagattgtgtcggcaatggaaaactatggcatagaatggcattctgtgcgggatagcgaagggcagagactgctcattggggttggacctgaaggaatctcaatttgtaaagatgactttagcccaattaataggatagcttatcctgtggtgcagatggccacccagtcaggaaagaatgtatatttgacggtcaccaaggaatctgggaacagcatcgtgctcttgtttaaaatgatcagcaccagggcggccagcgggctctaccgagcgataacagagacgcacgcattctacaggtgtgacacagtgaccagcgccgtgatgatgcagtatagccgtgacttgaagggccacttggcatctctgtttctgaatgaaaacattaaccttggcaagaaatatgtctttgatattaaaagaacatcaaaggaggtgtatgaccatgccaggagggctctgtacaatgctggcgttgtggacctcgtttcaagaagcaaccagagcccttcacactcgcctctgaagtcctcagaaagcagcatgaactgcagcagctgcgagggcctcagctgccagcagacccgggtgctgcaggagaagctacgcaagctgaaggaagccatgctgtgcatggtgtgctgcgaggaggagatcaactccaccttctgtccctgtggccacactgtgtgctgtgagagctgcgccgcccagctacagtcatgtcccgtctgcaggtcgcgtgtggagcatgtccagcacgtctatctgccaacgcacaccagtcttctcaatctgactgtaatctaatctgttgtgcttttgttggacttggcatgtttccatgaactgcactattataaactattaaaatgatagatgttggagaaagtaattattccaacacccatctgcccatgcgatgttaaaaaa

SEQ ID NO: 4613 - protein, 445 aa, Homo sapien
MLCYVTRPDAVLMEVEVEAKANGEDCLNQVCRRLGIIEVDYFGLQFTGSKGESLWLNLRNRISQQMDGLAPYRLKLRVKFFVEPHLILQEQTRHIFFLHIKEALLAGHLLCSPEQAVELSALLAQTKFGDYNQNTAKYNYEELCAKELSSATLNSIVAKHKELEGTSQASAEYQVLQIVSAMENYGIEWHSVRDSEGQRLLIGVGPEGISICKDDFSPINRIAYPVVQMATQSGKNVYLTVTKESGNSIVLLFKMISTRAASGLYRAITETHAFYRCDTVTSAVMMQYSRDLKGHLASLFLNENINLGKKYVFDIKRTSKEVYDHARRALYNAGVVDLVSRSNQSPSHSPLKSSESSMNCSSCEGLSCQQTRVLQEKLRKLKEAMLCMVCCEEEINSTFCPCGHTVCCESCAAQLQSCPVCRSRVEHVQHVYLPTHTSLLNLTVI

SEQ ID NO: 4614 - DNA, 1103 bp, Homo sapien
gtcttaatgagcaacagcaacagcagtctccagttaagaaagagagaattaaatacagcagagatttcctgttgaagctctcaagtgtttccatctgcagaaaaaaaccagactttctgcctgatcatcccattgtactgcaaaaaccagaaaacaaccaaagttttaagtagcattttaagaacagatgaatttaagtttggacatctgcaaatgaggtggatctagcaacaataactgtaatggactgtgacaattcaatttattcttaattttgatggttggctatttgacttctctaaaaatgagaaagagctattttaaaatataaagaattttctaatcagtttcagctttgcaggaggtttcctgcataaattgggaagtaacactggaaagtaggaatttggttagtgaagtgggaagactgtatatttataatttgcatactacttgcaattttttgtttttcatcacttgtaataatggaatggaaatgtaagctgtaaagactctcaaatataaaatatttgctacagtgtatatatggtacataattgcttgttgcttttaaagttccttctgttgttctgcttcccactgatttcataccagctcatgaatggatcattacagtctctccagaggcttagaatgattcagaatgttcaatgcatagttctcaataaacaggaggcagaatttttaatgggtatttcttttcagatatatgattggtctctaggtttttgataataatatggtcttaaattcataattactagcagagattgataatttggaaacaatggtagtgaatgaaactgaagttgaaaaacggctgctacttatgtcactaatcagaccatatgaatagcagaagttgagcaatttcaaagtaaaactgatatttttatttccaaaggaatttagacatttgaaaataattgacatacattaagttttaattcgataatttcttatatatggatgaacaatttttgggtttaagcttttaattcctagaaattttatacattaaatctcctgcaatttgtcactctggatgttactgtttaaaaaaaaaaaaaaaaaactcgtag

SEQ ID NO: 4615 - protein, 68 aa, Homo sapien
MVHNCLLLLKFLLLFCFPLISYQLMNGSLQSLQRLRMIQNVQCIVLNKQEAEFLMGISFQIYDWSLGF

SEQ ID NO: 4616 - DNA, 8107 bp, Homo sapien
  Unsure 6034-6155: Unknown base
atgcagaagagcgtgcgctacaacgaggggcacgccctgtacctggcctttctggcgcgcaaggagggcaccaagcgcggcttcctgagtaagaagacggccgaggcgagccgctggcacgagaagtggttcgccctctaccagaatgtgctcttctacttcgagggcgagcagagctgccgcccggcgggcatgtacctcctggagggctgcagctgcgaacgaacgcccgcgccacccagggccggcgccgggcagggaggcgtccgagacgcgctggacaagcagtattactttactgttctttttggccatgaaggtcagaagccactggagctgcgctgtgaggaggagcaggatggtaaagagtggatggaggccattcaccaagccagttatgcagacattttgattgagagggaagtattaatgcagaagtacattcatctagttcagatcgtagagacagaaaaaattgcagctaaccaactccgacatcaacttgaagatcaagacacagaaatcgaaaggcttaaatcagagattattgctcttaataaaaccaaagaacgaatgcgaccttaccaaagcaaccaagaagacgaagatccagacatcaagaagattaaaaaggttcagagcttcatgcgaggatggttgtgcagaaggaaatggaagaccatcgtgcaggattacatttgttctcctcatgctgaaagtatgaggaagagaaaccagattgtgttcaccatggtggaggcagagtcagagtacgttcaccagctctacatcctggtcaatggctttctccggcccctgcgtatggccgccagctccaagaagccccccatcagccacgacgacgtcagcagtatttttcttaacagtgaaacaatcatgtttcttcatgaaatatttcatcaaggactaaaggcaaggatagcaaactggcccactttaattttagctgatctgtttgatattttgctccccatgctgaacatttatcaagaatttgtgcgtaatcaccagtacagcctgcaagttctcgccaattgtaagcaaaacagagattttgacaaactcttaaaacagtatgaagccaatccagcctgtgaggggaggatgctggagacattcttgacctatcccatgtttcagatccccagatatatcatcacactccatgagctccttgctcacacaccccatgagcatgtggaaaggaaaagcctggagtttgccaaatcaaagctagaggaactatccagagtaatgcacgatgaagtcagcgacactgaaaacataaggaaaaaccttgccatcgaaagaatgatcgtggagggctgtgacatcttgctggacaccagccaaacgttcatccgccaaggttctcttattcaagtaccttccgttgagagggggaaacttagtaaagttcgcctgggttcgttgtctttgaaaaaggaaggagagagacaatgcttcttatttacaaaacactttttaatatgtacaagaagttcaggagggaagcttcatctgctcaagacaggtggggttctgtctctaatagactgcacattgattgaggagccagatgcaagcgatgatgactctaaaggttctgggcaagtgtttgggcacctggattttaaaatagtggtggagcctcctgacgctgccgccttcactgttgtcttgttagcaccctcacgccaggagaaagctgcctggatgagtgacatcagtcagtgtgtggacaatatacgatgtaatggtttaatgactatagtgtttgaagagaattccaaagtcactgtgccacatatgattaagtctgatgcccgtcttcataaagacgacactgacatttgcttcagtaaaacactcaactcctgcaaagtgccccagatccgttatgccagcgtggagcgcctcttggaacgactgacagacttgcggtttctgtagtattgatttcctcaacacctttctgcacacctatcgtattttcactactgccgctgtggtgctggggaaactctccgacatatacaagaggcctttcacctccatccctgtcaggtcattggaattgttttttgctaccagccagaacaacagaggtgaacatttggtggatggcaaatccccacgtctgtgtcgcaaattctcttccccgccaccactggctgtgtccagaacatcttccccagtgagggccagaaagctgtctttgacttctcccttgaactcaaagataggagcattggacctgacaacttccagcagtcccaccaccaccacccagagtcccgctgcgtctccaccaccacacactggtcagataccactggatctcagcagaggcctctcttctccagagcaaagcccgggaacggtagaagagaatgtcgataacccacgcgtggatctgtgtaacaagctaaaacgaagtattcaaaaagcagtcctagagtctgcaccagcggaccgagcaggagtggaaagctcccctgcagcggacaccacagaactttcaccttgcagatccccctcaactcctcggcacctccgctatcgacagcctggaggacagacggcggacaatgcccactgctctgtttcaccggcttctgcttttgcaatagccacagctgcagcaggacatgggagtccaccaggctttaacaacaccgagagaacatgtgataaagagtttattatacggagaacggctaccaatcgagttctgaacgtcctccgtcactgggtctcaaagcacgcacaggatttcgaactcaacaatgaactaaagatgaatgtcctaaatttgctagaagaagttttgcgagacccagaccttcttccccaagaaaggaaagccgccgcgaatatcctcagggccctttcacaagatgaccaagatgacatccacctaaaattagaggatataattcaaatgactgactgcatgaaggccgaatgctttgagtccttgtcggccatggagctggcagaacagatcaccctcctggaccatgtcattttcagaagcattccctatcgaggagtttcttgggcaggggtggatgaagctggataaaaacgaaagaactccttacattatgaaaaccagccaacacttcaatgacatgagtaacctggtggcctcccagataatgaactatgctgatgtcagctcccgtgccaacgccatcgagaaatgggtggcagtggcggacatctgccgatgcctgcacaactacaacggcgtgctggagatcacctcggccttaaacagaagtgccatctacaggctgaagaaaacctgggccaaggtctctaagcagacaaaagctctaatggacaaacttcaaaagactgtttcctctgaaggaagatttaaaaatcttagagaaacccttaaaaattgtaaccctcctgcagttccttatcttgggatgtacttgacagacctggcatttattgaagaaggaacaccaaactttactgaggaaggccttgtcaatttctccaaaatgagaatgatatcacacatcatcagagagatacgccagttccagcagacttcctacagaatagatcatcagccaaaggtcgcacagtacttgcttgacaaagaccttatcatagatgaagatacgctatatgagctgtcactaaaaattgaacctcgactccctgcttgaagatctggccttgcccctgagtccacgggatgttcatggaaagcaggacagacagaattgtgtatgccttgcctatcacggtacagcacgaagccaggctcctttctccaccaaagaagatggaaccagactggaattctgtctccagagagaaacccagctgtttgggtcaaagacagatgcttcagacttgggtgggaaggtgaaagatggctatttagaaagctggtggcacgttttacataagggaatgtcagatgggagatgctagttgccattttaacaaagcaggtaaatcggtaaattttaaactctgtccatgttctgatagaactcagggacaaggatccatgaaaaagacctgtgatgtttctctggcgctttactggcctgggcacacctaccaatcttctaggatttgactggttccattacatttccttttggtataagcttcacagaaaagctgacacttcctctacagagatggaccaaaacataagcaatttcagtctacagcatgtgcatggttgtcagtgcattctaaatatttctatgtgaggaatggtaccttctgaaactgcctttccagtctttaggcaatgggataggaaagaaagaatgaaacacaaatggatttgtatgtaacatttccttaattaaatgcagtaggctgtgccccagaggattccagacagtggctggctgaggtgggtggggagcttttccttgagactgttggtcctaagaagccagcccttttggagaggcagctgcaaaaaggtgcacgcccatctcaccgacaaaactgtggaacagaaggccaccaagtgctgtggggaatcatgggtttcagtgctgagtgaaaatctatacctaaaaatcatctctgcaccttgctttgtttgttttctttccccactcatagtactgcaggaatctattctcatttacacagacctttttttaggcttactatgaacattggctgtattttttttaaacagtttagtgaaattttcttttcaaaacccacacttccatatgctgttcgtagatctctttctttaaaaactgatgttgagagatctctgagaatattataagtgcatgggaaatgggcccaaccaccgaacagctcttacattacaaaaccaaatgcaagggttagtcctgctacctgaggctggggaagtgaccttccttttcccaagattgtcagttgttgaagaaatagggctatctcattgtttacctccctcttctcttctcagggagactgctgctttaaaagaaggaagagaaaaaatatagttctatttccctgaacctgttgcacctgacattttctcttagcagcatgaaacttattgatgctgacaatgaaaaatggatctgtctggctgctttccctctttccttgcactttaattatgttgctagagctaacagactaataaattccacctgctggctcttaagactcagtgaaagagctagcattggtaatgcaccatagaggtagagaatgtacactttctgcacggtaagtgccatctctgtatgtaactatatagtgaaatatcaactaagtaaaagaaaatataatatttgaagaccattcccaaaatattttcaatagttcatattagccaacagtgtagcactcaacccaaggagggttccttatggatgctttctttttcttttttaaagttgcttgatggttctctttagtttcaaataagaggttgacgcatcttgatgcatgatgagaagcatgggctgtttggatcctaacaacgcataacttgtgatttatttctcagtgctccagaaactgagggtttgaaataatatgtatcagttgcaccaaacacctcaaggtcttgcagaagaaaagtaaaggttagctttcatggctcaaaagcatagtcctgaagggtgaactaaaaccgggacaaatctgtgagaggaccacacacatactagtttcgggccaaacaacacgtggaaaggtgcatgcattctactctgccttggagttgccagagtccttcagagggaaagggatggttctgtgtgcactttttctggaagttcggactcatttctttgacccaaatgttccagagacactgcagccattcttattaacaaaaaataagacaggagtttccaaatgctccttcccttttggatcgcagcttttcttcaactagtgacaaagcttttgcgcctatttcctgcaggatgttggaactgccccgcactggtcatattaggcactgtcaattgctatgctgacttttaggggnnnnnnnnnnnnnnnnnnnnnnnnnnnnnnnnnnnnnnnnnnnnnnnnnnnnnnnnnnnnnnnnnnnnnnnnnnnnnnnnnnnnnnnnnnnnnnnnnnnnnnnnnnnnnnnnnnnnnnnnnncactagcctttcgcatttttgtttgagaattacaccactttctggagtctgcagccttcctggagctgcaagagggcaagagagagagctccacctctgagggagtgtctgttgatgacctgcactattcgtgtgccagctgggagaggaatgcacattttaaaatcccttcaatttggtcaaattaaaaatccccaagagcaatttgcagtgttttttctggtcgttaaagtacccatcctcttctgcctacacacaaagcatgcattcccagctgcatctgcctctagtccattatggagacccatttctaagaggagatgggaggtcaacctctaacagccaagtagcgaacatgtatactgtaaaattaacctagaaaatcagaagaaaaatccaatttcatgctttcgaatgaatgcccacattttgtactgtcaacgaaattatcttggagcttttaggggatgccttttcgttattaactgagacatctagttttgctacagggacaaatctcttacctaatccaatatattatttgacagattcaggcatgaagtaaaacgtcgtcacttttccttagtgcttttctgaaggaatttaaagacggaattttaaacggccattgcaatattttcaagtggctctcataccaagtcccattactgtttgttaaatttcagtacgtcttaaagtactacttataaacaaatgaaactcagagaaactgaatcacctggaagagaaaaatccattatggtcccatgtggagtgaataatgatggatcagcaccctttctctcatgttattgtataagacgagacttttgggccagcagcgattgggcagcttttaaattcttaactgaaaagagtaatgcaatacagggattattcccaataaaattaacttttatttaaaagcaagagattttacttagcttttttttttcaaagtttgattttatccccttgaaaaaaaatctcttcactttaaagtataaaggtttttaaaaatccaattgcaaaatgtattatttttacaactatcgaaaaggcataaaagagaacatactatttatggctgaagggtatagccaggctaatgtgcacagagggaatcaataaataaaactctttttcatttcagtaagaaatcagattgtaagtttaatggctccattatagataccaccgtgtaatagaagacttaagtcaatgaaatctaatcagtgtgtcatttctcagcggccattggtgacttaaaattaagatgaggcagagccaaaatggaaaacagtcattttgttgtaggtataaacacatgaacgattcagaaaattattcatctcagctgccatgcagcatgacattaacattaggattgatagcactagtctgatctgctcaaggaaaataatagttctattatacttaatgatgttggtttttacacagctcatttcatttttcactagaaagccagttatgaaagagagctggcctaggcatcccggccctgagtcctaggcccagtctccaactggaaaaccttaggctggtgtttacacatccctgagcctcagtttcctcatctgcaaaacggtgtgaatagtaatccctgtgctgcttatctcacagggctattgtgaggaccaaatggattagactgtaaactgcaaagtgctgtccgcacatgaggtcatctgattactgtcctcagatctcttttgtagaggatttcaatgtatttctttatcatttgagtgtgtgtgtgatggacgaatatgtgtgtgagtttgagaagcatatcgttcgtgtccagttactttgcaaatttgtggacatttgtgattggacagaggggtttgtgctgtggcctaacacttgccaagtgaggtgtaggttatgcctatatgcaaattaaacttcacctttcttgaatattc

SEQ ID NO: 4617 - protein, 1035 aa, Homo sapien
  Unsure 6034-6155: Unknown amino acid
MQKSVRYNEGHALYLAFLARKEGTKRGFLSKKTAEASRWHEKWFALYQNVLFYFEGEQSCRPAGMYLLEGCSCERTPAPPRAGAGQGGVRDALDKQYYFTVLFGHEGQKPLELRCEEEQDGKEWMEAIHQASYADILIEREVLMQKYIHLVQIVETEKIAANQLRHQLEDQDTEIERLKSEIIALNKTKERMRPYQSNQEDEDPDIKKIKKVQSFMRGWLCRRKWKTIVQDYICSPHAESMRKRNQIVFTMVEAESEYVHQLYILVNGFLRPLRMAASSKKPPISHDDVSSIFLNSETIMFLHEIFHQGLKARIANWPTLILADLFDILLPMLNIYQEFVRNHQYSLQVLANCKQNRDFDKLLKQYEANPACEGRMLETFLTYPMFQIPRYIITLHELLAHTPHEHVERKSLEFAKSKLEELSRVMHDEVSDTENIRKNLAIERMIVEGCDILLDTSQTFIRQGSLIQVPSVERGKLSKVRLGSLSLKKEGERQCFLFTKHFLICTRSSGGKLHLLKTGGVLSLIDCTLIEEPDASDDDSKGSGQVFGHLDFKIVVEPPDAAAFTVVLLAPSRQEKAAWMSDISQCVDNIRCNGLMTIVFEENSKVTVPHMIKSDARLHKDDTDICFSKTLNSCKVPQIRYASVERLLERLTDLRFLSIDFLNTFLHTYRIFTTAAVVLGKLSDIYKRPFTSIPVRSLELFFATSQNNRGEHLVDGKSPRLCRKFSSPPPLAVSRTSSPVRARKLSLTSPLNSKIGALDLTTSSSPTTTTQSPAASPPPHTGQIPLDLSRGLSSPEQSPGTVEENVDNPRVDLCNKLKRSIQKAVLESAPADRAGVESSPAADTTELSPCRSPSTPRHLRYRQPGGQTADNAHCSVSPASAFAIATAAAGHGSPPGFNNTERTCDKEFIIRRTATNRVLNVLRHWVSKHAQDFELNNELKMNVLNLLEEVLRDPDLLPQERKAAANILRALSQDDQDDIHLKLEDIIQMTDCMKAECFESLSAMELAEQITLLDHVIFRSIPYRGVSWAGVDEAG

SEQ ID NO: 4618 - DNA, 1745 bp, Homo sapien
ggggatgcccgttcgctcgggatcaggaacggtgagctcctgggaccgcaatgccctgagaacgcagccgggtgctgagcctccggagtccggtagctgaatgaaatacgcagggatcaccagccggacccaaatcttgcgtccctgccagcatcctggagtcctaagaggcagggattggagcggacaggatctcagaactctggtcccgggcgcacaacggcggagtcgctgttcctggtgctgaaacgctcagtcctggaagaacgtggccgcctgcccgcctggtaccgcgccgcggccgctgcggggaactgtccagtgctgaaaacggatgcggcccggcccgcagagctcagacccaagcctgccgcacccagcggagctcgaaccgagctcctggaagcgctgacgcagagcgcagggagagccggagcggcgagctccaagcctggcatggacctgcagagacccgattcctaccagggaggagctggccctgacttcaacgaccacgtcctgcataagaccatcctggtgggtgacagtggtgtgggaaagacgtctctgctggttcagttcgatcagggcaagttcatccccggctccttctcggccactgtgggcatcggattcacgaacaaggtggtgactgtggatggcgtgagagtgaagctgcagatctgggacaccgctgggcaggaacggttccgaagcgtcacccatgcttattacagagatgctcaggccttgcttctgctgtatgacatcaccaacaaatcttctttcgacaacatcagggcctggctcactgagattcatgagtatgcccagagggacgtggtgatcatgctgctaggcaacaaggcggatatgagcagcgaaagagtgatccgttccgaagacggagagaccttggccagggagtacggtgttcccttcctggagaccagcgccaagactggcatgaatgtggagttagcctttctggccatcgccaaggaactgaaataccgggccgggcatcaggcggatgagcccagcttccagatccgagactatgtagagtcccagaagaagcgctccagctgctgctccttcatgtgaatcccagggggcagagaggaggctctggaggcacacaggatgcagccttcccccacccatgccctttcctttaacttctcaaacagataccagggcctaaactgctttacctcccctcctactgagtcaggttaggtggtgggaggtcacccatttccgagttaaaccaatgcaatatgagtaaaacaaagtcatgtgggtatgtctggggtagagagaggggtagcaagttcatgtgtcctccttggtcacatatctcccaaagctctgatccctgccatgggaagtggacaggaaacatgaggtcatgacctgcaggcatctttactgcagctctgccggcctggagggggagagggggaggaagaagtatgcgctgcacatttctgaggctactgcatttgctttcaaggcagaaatcttgctctgagcagtcagcggctccagtttgggcccgataaggaagttctccgtggcctccctcaggcagagcagggaggaggctgacattgccagtctcttctggggcccaaggcaggttgcaggagatccaatcccatagacagctctgggcctcttgcatttgagtttttcagaattaaactgcagtattttggaaagcaaaaaaaaaaaaaaaa

SEQ ID NO: 4619 - protein, 216 aa, Homo sapien
MDLQRPDSYQGGAGPDFNDHVLHKTILVGDSGVGKTSLLVQFDQGKFIPGSFSATVGIGFTNKVVTVDGVRVKLQIWDTAGQERFRSVTHAYYRDAQALLLLYDITNKSSFDNIRAWLTEIHEYAQRDVVIMLLGNKADMSSERVIRSEDGETLAREYGVPFLETSAKTGMNVELAFLAIAKELKYRAGHQADEPSFQIRDYVESQKKRSSCCSFM

SEQ ID NO: 4620 - DNA, 5458 bp, Homo sapien
cggatgggtgatgtggtcgagaagagtttggaagggcccctggcaccttctacagatgagccctcccagaaaacaggagacttggtcgagatcttaaatggggaaaaggtcaaatttgacgacgcgggactctccttaattcttcagaatggcctggaaaccctgcgaatggaaaacgctctgacagatgtcatcttgtgtgtggacattcaggaattctcctgccaccgcgtggtgcttgccgcagccagcaactatttcagggccatgttctgcaacgatttaaaggaaaagtatgagaaaaggatcattattaaaggggttgatgctgagaccatgcacactctgttggactacacgtacaccagcaaggcgctgatcaccaagcagaatgtccagcgggtcctggaggctgctaacctcttccagttcctgcggatggtggatgcctgtgccagcttcctcactgaagccttgaacccagaaaactgcgttggaatactgaggctggctgacacacactcgctggacagtctaaagaagcaggttcagagttacatcattcaaaactttgtgcagattctgaactctgaggagtttcttgacctgcccgtggacactctgcaccacatcttgaagagtgatgacctttacgtgaccgaggaggctcaggtgtttgagaccgtgatgagctgggtccggcacaagccatcagaacgactctgcttactcccctatgtcctcgagaacgtgcgcttaccgcttctggacccgtggtactttgtggagacggtggaagcagatcctctcatcaggcagtgcccagaggtcttcccgctgctccaggaagccaggatgtaccacctttctggcaatgagatcatttcggaacgcaccaagcccaggatgcatgagttccagtctgaggtgttcatgatcattggcggctgcacgaaggatgaacggtttgtggcagaggtgacctgcctggaccccctgaggcgcagccgcctggaggtggccaagctcccgctaacagagcatgagctggagagtgggaataagaagtgggtggagtttgcatgcgtgacattgaaaaatgaggtctacatctcaggtggcaaagaaacacagcatgatgtttggaaatataattcttcgatcaacaagtggattcagattgagtatttaaacataggccgctggaggcataagatggtggtgttgggtggcaaggtctatgtgatcggaggctttgacggcttacagagaatcaacaatgtggagacctacgacccctttcacaactgctggtcagaggccgcacccctccttgtccatgtcagttcctttgcagccaccagccataagaagaagctgtatgtgatcgggggagggcccaatgggaaactggccacagacaagactcagtgttatgacccttccaccaacaagtggagtttgaaggcggccatgcccgtggaggctaaatgcatcaatgcagtgagtttccgggaccgcatctatgtcgttggtggggccatgagagcgctgtacgcctacagcccgctggaagacagctggtgcctggtgacccagctcagccacgagcgggccagctgcggtatcgcgccctgcaacaaccggctctacatcaccggcgggcgggacgagaagaacgaggttatcgccacggtgctgtgctgggaccccgaggcccagaaactgacagaggagtgcgtcctgccccggggcgtgtcgcaccacggcagcgtcaccatcaggaagtcgtacacccacatccgcaggatcgtgcccggagcagtgtctgtctgacggcaggatggggagctggagagcccccccgaccctcagcgtacccgcctcacctctcaccctcctccagtcccacttcaggcagcaggctcgagtttgaggccatacatcaggggatccccttgactcactttgggggaaccttggaagtcacagtttggggtcacttgagaccggccaggaatgtttgcatgacctacctcaggaggggaggcgaggaagagtaatatttagcattcaggacccacccaccctatgccggcttctgtgccaggcacttccttttatcggttcatttaacctggtgactggctcttatcacttctagtttacaggtgagggaaccaagtttcacagaggctaagtggcgtgcccctgatcactcagatagcaagtagctaccccaggagtctaaaatccaggtctttcatctccgaagtcaatgctctttccaccatgctgcctatctcagagcaggaaaaacaaacaaaaaacaacaacaaaacctggctcgtgctgggcgtggcggctcacgcctgtaatcccagccctatgggaggctggtcttgaacgcctgaccttgtgatctgcccgcctcggtctcccgaagtgctgggattacaggtgtgagccactgggcccggtcttttttttttaaatgatcataagatggcccattttggaccggaactgtcattgccagacagaattgtacctttagcacattctggtgccctggcctcttagtgttcaccagttgtactgcaatatagacaagatgtctctagagactcaaactactgttttattaaaaaagtaaacacctgagcacagctggcctacacaggagcgacagattctccttgatggtacactttctagtttttacacagtgatttaggtccacgttcctgataccccatcctcctgaagccttcgttttcaagacttttaaaaagcacttctacttggttttttgatcagtgtagctcaattgtgacttaaagaacagaatctgtccttcactgtaagagctacagctttcaaatgagctcactggaaattcattctaatccccaagctggagaaacaggttaagagatcacttgtttcatatgctgtatttaaaaagcaacaatgataacaacatagtaactgcgttacccaatggactttattttcatcatatgatttcaattctctttatagagttttatttcatatccggtgtggcttgttcttttcagcagtttgggaagttagttattagagttgatagtgaattgaattttcattaaacagtcacggttagaagaagctaatatttgaaacagattttaaaaacttgaaaaattacaggtgagatttctgtttatgccagattattgaagataaatataaatgtatgttggtgtgtgaaatgctctgtgccttagaagcgtgacagttcagctctctgctgtggaaagtaacacagggcaatagaaacatatttgtggaattttagaacaaactattgctgactcatgagcactataataaccatcaggaagctcccaactgaagcaatgtaacagtgtaatctagttcaattcagcaagcattcatggagttcttcatgtctgtcaagccttgaggacacccacgaatggcaaatctccactgctagacactcaatacaggtaaataggccaccagttaatattcttgtttttattttcttcaagttagctaaaaatgagatgcgtatgaagtgaggaggctggatccaagtcttgattgcctttcaggggtcaaggtggtaagctgtgcagtgaagtcaaccagtggccatggcttacatgtttgtctctttgagatcgccaccagaaccatttgtgaactgatttgtgaaggaaaagtcagtcttactccaaagactattgcagggaggaacttccagagaggaaatccaatgacaatggtactggcatacacagggagcctcccttcaaaaagacagcgcccctagtcagggaggggatggcggtcctttgataagacccataggcaaacttcgagcccatcagcaggtcaaccctatgctgggaaagtgaggatttgggatttctgtgctataaacctgattctaaatgtaggacccaagtttctggactacttcagaatacctaaatgaatcatggaaacactctttatgattttttacaacaccagatatgcaggtgaattgtggaaaatgtcatgtagctgacactcaagaaatagggattcctaataatgacatgggtagggaacagatacacctggttagaaggtctagggttctgtatatgaagctgccagtctgtagctcttcgagaaagaaagttcaagtcatttgggggaaacttaagaatagtcatcagggttttagcttctaggcaccagccaaggatgagaacttctaaaatctaaaatccatttcaagaaataaagacgaacacatttgcaggaaggtaactgttataacccacaccatcagcagggggaaagccaagctgagaataaacccagagacaaagaaccctcggactcaggcaggacatggcaggatgttctggcacagcagactggagactgaggcagggcctgtgagtggacagagcacccctggctgggaagaagaagatggggtaggaggaggtcaggttccaaggatgcaggtctggaaaatgatatcggaggccctggagtttgtgagcttggctctagtcccaagaagggtgagggagaataagggtaagggagtattctaggcaaggaactaaggaaggaatccccttcttagagcagaggcacaagttagagcaggcccagcatttgggccaacttactgtggggcctctgagctgctcagctgggtctcctgtcctagagggaaggtggcccagagtctttggtggagcggaatctgtagatgaggaagggactccagttgccaaggttgatctgaaacaggcagggagctaagctcatcagaacaccaacagattcatgttctcgtcttagctttcatctattctggtctcaatggcttcgggaaacacacatatacacatacaccatgcccttgaactcaaagcaaactacgctctcagggaaatacaaatatcacgttcttatagctgtaaagtatagcttagctatttatagaagactatgaggtactgttgtgagttatttgcttatcctgttttattctgaaaaatgaaagtgctcaatagaatttttaacgttggcaacaccataaggatttcttatgttaagtcccaacttggggttgcaaaatcattttttcccttaatacctgggtgttgtattagatctcataatttgacaagttaaccttttagaaatccacatatatctcaaatctggctactgcaaaaccagttttgacaggtcagattttcatatgtataggtataaatagccaacactcagtgaacaaaatcctttaagcattttggttacataaagttgtatgttttaagtgatcaaactaagaatattgtttataggttttaaaaaccaaaccaataaaatttttatttattcaataaaatatgcacagaacagaaag

SEQ ID NO: 4621 - protein, 610 aa, Homo sapien
MGDVVEKSLEGPLAPSTDEPSQKTGDLVEILNGEKVKFDDAGLSLILQNGLETLRMENALTDVILCVDIQEFSCHRVVLAAASNYFRAMFCNDLKEKYEKRIIIKGVDAETMHTLLDYTYTSKALITKQNVQRVLEAANLFQFLRMVDACASFLTEALNPENCVGILRLADTHSLDSLKKQVQSYIIQNFVQILNSEEFLDLPVDTLHHILKSDDLYVTEEAQVFETVMSWVRHKPSERLCLLPYVLENVRLPLLDPWYFVETVEADPLIRQCPEVFPLLQEARMYHLSGNEIISERTKPRMHEFQSEVFMIIGGCTKDERFVAEVTCLDPLRRSRLEVAKLPLTEHELESGNKKWVEFACVTLKNEVYISGGKETQHDVWKYNSSINKWIQIEYLNIGRWRHKMVVLGGKVYVIGGFDGLQRINNVETYDPFHNCWSEAAPLLVHVSSFAATSHKKKLYVIGGGPNGKLATDKTQCYDPSTNKWSLKAAMPVEAKCINAVSFRDRIYVVGGAMRALYAYSPLEDSWCLVTQLSHERASCGIAPCNNRLYITGGRDEKNEVIATVLCWDPEAQKLTEECVLPRGVSHHGSVTIRKSYTHIRRIVPGAVSV

SEQ ID NO: 4622 - DNA, 3365 bp, Homo sapien
gaggagaggggctggctctcagtccccgaatcgcgtggggtgcctccaccccctgcgatgggggtccctagagccagggggggaagaggggctggctctcagtctgcgcctcgcggaggatgcctcccccacttgcaatgtgagtcctaagagccagaggtgggaggggctggctctcagttcccgcctcgcggtgtgtgcctgccccgctgcgatggaggtcctaagagcaagggggggaagaggggctggctctggtagattgcaaatgacctgctttttttctgatcccgagctgcgttcggacccctgtcggatagtaaatcccaggtaaggtacctgcggtcggcaggtctgagctttcttcttggacacctaaaacccacagtcctccaggtgggtgctaaggatcttagaatccgcggtgggggtcctaagccagcgggggaagaggggctggctctcagtccccgactcgtgggcggtgtcttccccccttgcgatggggatcctaagagccagggggggaagaggggcgggctctcagtgcccgcctcgctggaagtgcctcccacccatgagatgggtgtcctaagagccaagggggggaataggggcaggctctcgatccccgcctctcggggggtgcctcccccccttgcgatcggggtcccaagggccagggggggaagaggggctggctctcagtccccgtctctcgggtggtgcctcccgccactacgatgtgggtcctaagagccgggggtgggagggtctggctctcagtcaccgcctcgtgaggagtgcctcccccgctgcgatggaagttctaagacacagggggggaagaggttctggctctcagtccccgcctcgcggggggtgccacgcgcctgcattgggggtcctaagagccatgggggggtagaggggctggctctcagtccccgcctcgtggggggtgcttccccccccgcgatggggtacctaagagcgggtggggggggggaagaggggctggttctcagtccccgcctcgcgggggttgcccccccctgcgatgggggtctcaagagcctgggggggaagaggggctggctctcagtccccgcctctccggggtgcgtcccccccctgcaatgggggtcctaagagtcagggggagtgagcggctggctctcagtccccgcctcgcagggggtgcctcccccgcctgcgatgggggtccgaagagcctgggggggaagagaggcaggctctcagtccccgcttcgcggggggtgcctccccgcacagcgatgggggtcccaagagccaggggggaagtggggctggctctcagttcccgccttgcggtgtgtgcctccccccctgcgatgggggtcctaagagccaggggatgaaaaggggctggctctcagtcctcgcctggcgggagtgcctccccccccgcgatgggggtcctaagatcctgggggggaagaggagctctctctcagtccccgcctcgcggggggtgcctccgactcctgcgatgggggtcctaagagccaggggggtaagaggggcaggctctcagtccccgcctcgctgcgggtgcctccgcccctgcgatgggggtcctaagaaccagggagggaagaggggctggttctcagtcctcgcctcgcggggagtgcctccctccactgcgatgggggtcccaggagccaggggggaagtggggctggctctcagttcccgcctcacgaggggtgcctccccccactgcgatgggggacctaagagcaagcgaggggaagacgggctggctccggtagattgtaaatgacctgctttctttcttttcccgggctgcgttcggacccctgtcgattgtaaatcccaagtaaggtacctgccgtgggcagatctgagctttcttcttggacaccccatacccacagtcctccaggccacccttaagtacaatgttctcctacctaagaaggcatctggattttctctttccttggaaatagtaaagaactactctttgactgtttttgacctcacagtgaacctcaaatacactggaattcgcaataaatccagtatggtggttatagatgtaaaaatgctatcaggatttactccaaccatgtcatccattgaagagcttgaaaacaagggccaagtgatgaagactgaagtcaagaatgaccatgttcttttctacttggaaaatgtttttggtcgagcagacagtttcactttttctgctgagcagagcaaccttgtgttcaacattcagccagccccaggcatggtctacgattagtacgaaaaaggtaggcaagctacttctgtggactttgacttaaaaagaggagtggggaatattctgaaatgttaacttaaaaatttgatagattaatttctaaaacatatactaaaatgttgtagagaccatacaactgttccctggaaggttggtactatttatttcttgttgaatgctgtgtgaagtttgtggagtgtttgaattctgtctctatcatttactaatagaatatatttcatcaagtgtcttaaatattattagcatatttctgcataatgtataaaatgggaaagtaattgtctctatttcaaaattattggaaggattagatctaatgtgcttatatcatctatttaataaaaatacatgttccctttattttttcagaagaatatgccctagctttttaccacatcaacagtagttcagtttccgagtgagacaaagcaattactggaagaagtaaagaaattttattacgtcataaaccattgaaaacacatctagtaagaaaatgaaaacctgaataagataggacaatagttgaagaaagaaaagtctctggtacttcattagacttgtgtagctgtgtactgcatgagtaatctgataatcattaagattatattaatttctttaaaaatagctttaaagaattcacagctatatatgtaccttttataaatctctcatttttgttttgtaagttgacaggtcagtaaaaatttaggcatatatatttgtacatatgtgtgtatatgtatatacatgtctatgtgcctatatatgcatgtttttatttctaaatatctatttatatatacatacaaatgtgtttattgtttaaatgatgttttaaatcccaggtggagaagcatttcttttaacaaactgattcttctgtatcaaacctggaaaaaaatcatgaaccatctgacatcgtgaacagtctgcagtgggctatggtttcttgacaagtcttatttccttatcatcccattaaatgttgtcattttgaaaaaaaaaaaaaaaaaaaaaaaag

SEQ ID NO: 4623 - protein, 143 aa, Homo sapien
MKRGWLSVLAWRECLPPRDGGPKILGGKRSSLSVPASRGVPPTPAMGVLRARGVRGAGSQSPPRCGCLRPCDGGPKNQGGKRGWFSVLASRGVPPSTAMGVPGARGEVGLALSSRLTRGASPHCDGGPKSKRGEDGLAPVDCK

SEQ ID NO: 4624 - DNA, 2616 bp, Homo sapien
  Unsure 2080, 2156, 2215, 2270: Unknown base
ctttatggcgtgggagaggccacagcccggactccatcgactcccccggctcttagactaaaatcatgcccaagttcaaacaacgaagacgaaagctaaaagccaaagccgaaagattattcaaaaaaaaagaagcctctcactttcagtccaagctaattacacctcctcctccaccaccctcaccagaaagagtcggtatttcttcaatagatatatctcaaagcagaagctggctaacatcatcctggaacttcaattttcctaacatcagagatgcaataaaactttggacaaatagagtatggtctatatacagctggtgccagaactgcataacccagagtttagaagtattgaaagacaccatctttccatctcgtatctgccaccgagaactttacagtgtaaaacaacagttttgcattttggaaagtaaattatgcaagcttcaggaagcactgaagaccatctcagaaagttcttcctgtccaagctgtggtcaaacatgtcacatgagtggtaaacttacaaatgtgcctgcctgcgttctgatcacccctggagactccaaagctgtgcttcctcccacactgccacagccagccagccattttcctcctcctcctccacctccacctctgccacctcctccaccaccactagcacctgtgttgctcagaaaacccagtctcgctaaagcacttcaggctggaccattaaaaaaagatggacccatgcagataacagttaaagatctgctgactgtaaaattaaagaagacacagagtttagatgaaaagaggaagcttataccatcgccgaaagcacggaatccactagttaccgtctctgacttgcagcatgttaccctgaaacctaactccaaagtgttatcgactcgagttacaaacgtcttaatcactcctggaaaaagtcagatggatctgcggaaactgcttagaaaagtcgatgtagagaggaggccaggtggaacccctcttaccaataaggaaaatatggaaacaggaacaggactgactccagtgatgacgcaggccttaaggagaaagtttcagctggctcaccctagaagcccaactccaactctgccactttctacaagcagctttgatgaacaaaactgatgccaactctgcctcactccatgagatgatccataacaaatacagataaaaacacccagctgggtgcagtggctcgcacctgtaatcccagcactttgggaggctgaggcaggtggatcacctgaggtcgggagtttgagaccagcctggccaacatggtgaaatcccatctctactgaaaatacagaattggccgggtgtggtgtcacgcgcctgtggtcccagttacttgaacctgggaggcggaggttgcagtgagccgagattgcaacactgccactccagcctgggtgacagagcaagagaccctgtctcaaaaaaaaaaaaaaaaaaattaaatgggtagtgacgttaagagatatatatcagcttctagtaaaagtttttttttttaaacctgctagctacatttacattatgtaaaaataaatggaataatcactgagaataaagcagttgagtatttataacaataatattttatggggcgcttataatgtttataatattgtaaaccactgtgtactctattcatttaatgctaaatgacttgaccattcttgtgggataagagatcattaaaaaaatgctagggccgggcaccatggctcacgcctgtaatcccaggactttaggaggccaaggcaggtggatgacttgagctcaggagtttgagaccagcctgggcaacatgatgaaaactccgtctctaccaaaaatcaaaaaaattagccaggtgtgatgttgtgcgcctgtagtcccagctacttgtgaggctgaggtgggaggatggtttgggccccggaggtagaggttgcagtgagctgagattgtgccactgtattccatcctgggcaacagagccagaccctgcctcaaaaaaaaaaaaaaaaaaaaaaaggcctggctttgctacataatgaggccaggcnaaaaaaaaaaagtcctgtggaaatcatatagacaaacatttgcaaagctgctactgccattgtaccagtgttaaantgtgttctaccttgcatcttttactgatttttatgacagattttatattgtaaccattngagaactctgtaagtgctatggcttccttaaactacgatttatcatatgctcccngtgtttactttgagactgaatggcaaccagagaatgtaaacaaccaaggtgcatctggttatgtttgcacagtggctcacgcctgtaatcccagcactttgggaggctgaggcgggcaaaacacttgaggtcagacgtttgagaccagcctggccaacatggtgaaaccccgtctctaccaaaaataaaaataaaaattatccaggcgtggtggcatgtgcctatagccccagctactcaggaagctagagcacgagaattatgtgcatcctggaggtgaaggttgcagtgagccaagatcacaccactccactccagtctggacaacagagtgagaccctgtgtc

SEQ ID NO: 4625 - protein, 360 aa, Homo sapien
  Unsure 2080, 2156, 2215, 2270: Unknown amino acid
MPKFKQRRRKLKAKAERLFKKKEASHFQSKLITPPPPPPSPERVGISSIDISQSRSWLTSSWNFNFPNIRDAIKLWTNRVWSIYSWCQNCITQSLEVLKDTIFPSRICHRELYSVKQQFCILESKLCKLQEALKTISESSSCPSCGQTCHMSGKLTNVPACVLITPGDSKAVLPPTLPQPASHFPPPPPPPPLPPPPPPLAPVLLRKPSLAKALQAGPLKKDGPMQITVKDLLTVKLKKTQSLDEKRKLIPSPKARNPLVTVSDLQHVTLKPNSKVLSTRVTNVLITPGKSQMDLRKLLRKVDVERRPGGTPLTNKENMETGTGLTPVMTQALRRKFQLAHPRSPTPTLPLSTSSFDEQN

SEQ ID NO: 4626 - DNA, 1292 bp, Homo sapien
ggacgtgactgggaggagcctgcccgccccggctcgctgcgccgcgcgcacagggcccgcgccagcgaccatggcggagcccacagtgtgctccttcctcaccaaggtgctgtgcgcccacggcggccgcatgttcctgaaggacctgcgcggccacgtggagctgtcggaggccaggctccgggacgtgctgcagcgcgccgggcccgagcgtttcctgctgcaggaggtggagacgcaggagggcctcggggacgcggaggccgaggcggcggccggcgcggtgggcggtggcggcacctccgcctggagggtggtggccgtgtccgggactataggtgcatgccaccatactcagctaatctttttaggtttttagtagagacaaggtctcactatgttgcccaggctggtcttgaactcctaagctcaagcagtcctcccgccttggcctctgaatgtgctgggattacaggcatgagccactatgcctaaccatattttttccaatattaaaaaatctttttttccccctaaggaatgtgttatataaggtcaacatgtttttagtgcttcagtttgacttgtctacatctaaagttaactctttaaggcttacatttatgattataattctttccatcgagggatttagtctccattattgtcatgtttcttgatttttttcattatacttggttcttctttttgtctaggttttatatataccttaattaattctttcttggctgttttatatctatgttgctgtcagcatgggaatctctattattagaaagctattaacttttaaaatatgtatcttttggtgattttctttgttctaacagttttagatggcctgtttgctctttctaaatataaaatcataggtatttctattttgtttttgtgtttcataaaattgtaataagtttttttgatattttttcattacatatgaagttaattgttggttttaaacaaatgttctttgttaggataacagaaataacatcttctattcttgtttgttggaagctaaaagcttgataaaaggaattggtgtcttttgatacaatcaaatttttatcacttaaattgcctaatatgattataataagggtttttgtaatattaaaacatccttaaattcctgagataaaactctacctggttatagtatatgttcttttaatgtattatctttcctatttgctgtacatctatacattcataaataaaattcatttatattttagaaaaaaaaaaaaaaaaaaaaaaaaaaaaaa

SEQ ID NO: 4627 - protein, 102 aa, Homo sapien
MAEPTVCSFLTKVLCAHGGRMFLKDLRGHVELSEARLRDVLQRAGPERFLLQEVETQEGLGDAEAEAAAGAVGGGGTSAWRVVAVSGTIGACHHTQLIFLGF

SEQ ID NO: 4628 - DNA, 3545 bp, Homo sapien
gggagattcgattggaaggctgccggcgtgctactgagttcggccggtccgagtcactgtgcgtcgcctgggcgcgttcctggtcttctcccccagggtcttgctctgtcacccaggctggagtgccatggcatcatcatagctcactatggccttgatcctcctgccttagcctcccaagcagctggtattacagaccacggtgtgaacacatgaacagaagacgaaaatttcttctagcctcagtacttgctctccagaattcaagttttatatatccatcatgtcagaagtgcttctctaggataatcctggtctccaaaaggtctaattgtccaaaatgtggctctactggtgaatctggaaatgccaattacagatacaaactttccttaaaagttgcagaatcaaacaaattgtttgttattactgtatttggaagttgcttagatacattttttggtcttactgccactggtttgcacaggtacattcaggatcctaataaaattccagaaacactggacaatgatacaactcagaatctattaactaaagcagttgaaacttgctttgttggacaaagctttatttttggagtgacgaattttgaaaaccaacctggacaaggttcagatgccagtaacttcttacagcaatgctctgaccacaaaagaaaagccaaagcactagtggcttgccagattgttctaccagacccaggtattgcaggctttactgtcattgactacttccatcaacttttgcagacttttaatttcaggaaacttcagtgtgactctcaggcacctaacaatcacttacttgctttagatcactcaaatagtgatctcagcagcacatatacttctgacagcacttctgattttttcaagtcctgcagcaaggatactttttcaaaattctggcagccatcacttgaattcacttgcattgtttcacaactaacagataatgatgatttttcagcttcagaacaaagtaaggcctttggtactcttcagcagaacagaaagtccatctccattgcagaggccactggttccagtagctgccatgatcccattcaggattcatggagccttgtttcatatatggataaaaagagtacagcagaaaagttgggtaaagaacttggcttacaagctaaggagctgagtgcagttcacagcagtcatcatgaaattggagttaatgactctaatttattctctttggaaatgcgagagccccttgagtcaagtaatacaaaatccttccacagtgcagtggaaattaaaaataggtcccagcatgagctaccatgttttcagcatcatggtatagataccccaactagccttcagaagagatctgcatgttgtccaccttcgttactcagacttgaagagacagccagcagttcccaggatggtgaccctcaaatttgggatgatctgccattctctgaaagcctgaacaagtttctggcagttcttgaaagtgagattgctgtaacccaggcagatgtcagtagtaggaaacatcatgtagataatgacattgataaatttcatgcagaccacagcagtttatctgtgactccccagagaactactggagccctgcatacaccacctatagctttaagatcatcacaagtaatagtcaaagcaaactgtagcaaagatgacttccttttcaactgtaaaggaaatctaagtcctagtgttgaaaaggagtcacaaccagataacaaagtagaggctgtctctgtaaatcataatggaagagatatgtcagaatattttttaccgaatccttacctgtcagctctgtcttcatcttcaaaagatttagaaacaatagttactcttaagaagactatcagaatctcaccacacagggagagtgaccattctagtctaaataacaaatatttgaatggatgtggagaaatatcagtttcagaaatgaatgaaaagttgacaactctgtgttataggaagtataatgatgtctctgatctttgcaaattagaaaataaacaatattgtaggtggtccaagaaccaagatgacagttttacaatttgcaggaaacttacatatcctttagaaactctttgcaatagtccaaatagaagtacaaatacattgaaagaaatgccttggggacatatcaataacaacgtaacacagagctattctattggttatgaaggtagctatgatgcctctgctgatctctttgatgatattgctaaagaaatggacattgcaactgagattaccaaaaaatcacaggatattttgttaaaatggggaacatctttggcagaaagtcacccttcagagtctgatttttcactgagatcactttctgaagacttcatccagccttcacaaaaattatccttgcaaagcctatctgactctaggcattcaagaacatgctctccaacacctcattttcaatcagattcagaatataattttgaaaatagtcaagactttgttccatgttcacagtcaactccaatttcagggttccaccaaacaagaattcatgggataaacagagctttcaaaaaacctgtattttattcagatcttgatggtaactatgaaaaaataaggattttccctgaaaatgacaaacagcaagccagcccaagctgtccaaaaaatataaaaacacctagccagaaaatcagaagccctattgtatctggtatttcacaaccagacgttttcaatcactacccttttgctgagtgccatgaaactgatagtgatgaatgggtccctcctaccacacaaaaaatatttccttcagatatgcttggattccaaggcataggtctagggaaatgccttgctgcctatcatttccctgatcaacaagagttaccaagaaagaaactgaaacatattagacaaggaaccaataaaggtttaattaagaagaaattaaagaatatgcttgcagcagttgttacgaaaaagaaaactcataaatataactgtaaaagttcaggctggatttccaaatgtccagacattcaagtcttagcagcacctcagctgcaccctattcttggacctgattcttgttcagaagtcaaatgttgccttccattttcagaaaaaggcccaccttcagtgtgtgaaactcgaagtgcttggtcacctgaattgttttcataaaaagtcacctgaacccaattcctgaacttttaaatctgtttggaaatgtttgccttcaggggtacggaaagcattctttacattttgaacacttggagagaagcaaattgaaaacaggactctgctgggagctactgtgccttttaaaatataaagccattgttttccccagggttttatctagaatactatgattaggtagttgagcactttatcttatactgtttattgtactttaataatattgttaagattgtttttgaaagtattaatgtttgttaaaatcacatatacatccagaaataaagactttgcaaaccaaaaaaaaaaaaaaaa

SEQ ID NO: 4629 - protein, 998 aa, Homo sapien
MNRRRKFLLASVLALQNSSFIYPSCQKCFSRIILVSKRSNCPKCGSTGESGNANYRYKLSLKVAESNKLFVITVFGSCLDTFFGLTATGLHRYIQDPNKIPETLDNDTTQNLLTKAVETCFVGQSFIFGVTNFENQPGQGSDASNFLQQCSDHKRKAKALVACQIVLPDPGIAGFTVIDYFHQLLQTFNFRKLQCDSQAPNNHLLALDHSNSDLSSTYTSDSTSDFFKSCSKDTFSKFWQPSLEFTCIVSQLTDNDDFSASEQSKAFGTLQQNRKSISIAEATGSSSCHDPIQDSWSLVSYMDKKSTAEKLGKELGLQAKELSAVHSSHHEIGVNDSNLFSLEMREPLESSNTKSFHSAVEIKNRSQHELPCFQHHGIDTPTSLQKRSACCPPSLLRLEETASSSQDGDPQIWDDLPFSESLNKFLAVLESEIAVTQADVSSRKHHVDNDIDKFHADHSSLSVTPQRTTGALHTPPIALRSSQVIVKANCSKDDFLFNCKGNLSPSVEKESQPDNKVEAVSVNHNGRDMSEYFLPNPYLSALSSSSKDLETIVTLKKTIRISPHRESDHSSLNNKYLNGCGEISVSEMNEKLTTLCYRKYNDVSDLCKLENKQYCRWSKNQDDSFTICRKLTYPLETLCNSPNRSTNTLKEMPWGHINNNVTQSYSIGYEGSYDASADLFDDIAKEMDIATEITKKSQDILLKWGTSLAESHPSESDFSLRSLSEDFIQPSQKLSLQSLSDSRHSRTCSPTPHFQSDSEYNFENSQDFVPCSQSTPISGFHQTRIHGINRAFKKPVFYSDLDGNYEKIRIFPENDKQQASPSCPKNIKTPSQKIRSPIVSGISQPDVFNHYPFAECHETDSDEWVPPTTQKIFPSDMLGFQGIGLGKCLAAYHFPDQQELPRKKLKHIRQGTNKGLIKKKLKNMLAAVVTKKKTHKYNCKSSGWISKCPDIQVLAAPQLHPILGPDSCSEVKCCLPFSEKGPPSVCETRSAWSPELFS

SEQ ID NO: 4630 - DNA, 661 bp, Homo sapien
ggcgcaacgggcggcggaagtaggagcctgggaaggaagagggaacgggtcctggcggtgctttgcaaagggcccgtgtttctgttgcgggaagctcccgggggtcgcacgtgcgtccgagcccaagcccctcccctccactccccttcctgcgtgccccggagccgccaagcggctacgttcttctcggcccgccgagatggcgctcgaccccgcagaccagcatctcagacatgtcgaaaaagatgttttgatccctaaaataatgagagaaaaggccaaagagaggtgttctgaacaagttcaagattttaccaaatgttgcaagaactctggagttcttatggtagtaaaatgccggaaagaaaattctgcattgaaagaatgtctaactgcttactataatgatccagccttttatgaagaatgcaaaatggaatacctgaaggaaagggaagaattcagaaaaactggaattcctacaaagaaaaggctacagaagcttccaacaagcatgtaggcagatactcaaatgacattcaggaactctaatattcatggaagtcattttatagtccttaaataatggactcaagcatatatgtttgctttaccttaattatggaaatattaactttatctgaaataaatattttatttc

SEQ ID NO: 4631 - protein, 172 aa, Homo sapien
AQRAAEVGAWEGRGNGSWRCFAKGPCFCCGKLPGVARASEPKPLPSTPLPACPGAAKRLRSSRPAEMALDPADQHLRHVEKDVLIPKIMREKAKERCSEQVQDFTKCCKNSGVLMVVKCRKENSALKECLTAYYNDPAFYEECKMEYLKEREEFRKTGIPTKKRLQKLPTSM

SEQ ID NO: 4632 - DNA, 2091 bp, Homo sapien
attgtttaatcaaaggaagagtcaaaataagctacacccagattactgagaaaggtgaaatgaaaacaagctcaaaaccaaattccaggaagatgctgtctttgtattgacttaccatttcatgttttcacacatgtcaaagtcttgaagcttcggtcattagtcttccgcttcctaaagcaagaaactaaatgctgacttgtgtcgtttgccccagatgccaccggaaatgtcatcttctccccagacgctggcttgcaagcacagcagcacccagaggctaacctatttcccctatagcccaagctctgagatctcccgtctggtcacaatgatctacaggagaggaagaaagctatctagggacgagatctagaatcaactgagagagatgcttaaaaatcaccagttactttaatgaccatccgcagagccatcctgtgcaaaggaaggagctaggctgtgcgccctgggcgtcatgatccttctgcgggcctccgaagtgcggcagctgcttcacaataagttcgtggtcatcctgggggactctgtgcatagggcagtatacaaggacctggtgcttctgctgcagaaggaccgcctgctcactcccgggcagcttagagcaaggggggagctgaacttcgaacaagatgagctggtggacggaggccagcggggccacatgcacaacggccttaactaccgtgaggtccgcgagttccgctccgaccaccatctggtacgtttttacttcctcacccgcgtgtactccgattacctccagaccatcttgaaagagctgcagtcgggcgagcacgcccccgacctggtcatcatgaattcctgcctctgggacatctccaggtatggtccgaactcctggagaagctacctggagaacctggagaacctgttccagtgcctgggccaggtgctgcccgagtcttgcctcctggtgtggaacacggccatgcctgtgggcgaggaagtcaccgggggttttcttccgcccaagctccggcggcagaaggccaccttcctgaaaaacgaagtggtcaaagccaacttccacagcgccaccgaggcacgtaaacataacttcgatgtactggacttgcatttccacttccgccacgcgagggagaacctgcactgggacggggtgcactggaatggacgtgtgcaccgctgcctctcccagctgctgctggcccacgtggccgacgcctggggtgtggagctgccccaccgccaccccgtgggcgagtggatcaagaagaaaaaacctggcccgagagtcgaagggccgccccaggccaacagaaatcacccggccttacctctgtccccacccttaccttcccccacataccgccccctgcttgggttcccaccccagcgcttgccgctgctcccgctcctgtccccacagcctcctcctcccattctccatcaccagggaatgccccggttcccacagggtcccccagatgcctgtttttcctcagaccatactttccagtcggatcaattctattgccattcagatgtcccctcatcagcccatgcaggtttcttcgtcgaagacaattttatggttggtcctcagctgcctatgcccttcttccccacaccccgttatcagcggcctgccccagtggtacataggggttttggcaggtatcgtccccgtggcccctatacgccctggggacagcggcctcgaccttcaaagagaagggccccagccaatcctgagccaaggcctcaatagacggacctaggccttatttcctctttatgaacatggattggacagatctgacacttcctttccattgcttggcctgaacagactgaccttgttaacttaagcctggagtccatgcctcgtcttccttttgttcattgctgttaccaagaaagccaaggaagagcagcctgactcattcttcttggctgcagcctcttccccacttcctgggagtgacccagcgttattcctgcctcctcactcctattctctttgcctttgtgtaaaaataaaatggaaataaacaagttgcacagaaaaaaaaaaaaaaaaaa

SEQ ID NO: 4633 - protein, 432 aa, Homo sapien
MILLRASEVRQLLHNKFVVILGDSVHRAVYKDLVLLLQKDRLLTPGQLRARGELNFEQDELVDGGQRGHMHNGLNYREVREFRSDHHLVRFYFLTRVYSDYLQTILKELQSGEHAPDLVIMNSCLWDISRYGPNSWRSYLENLENLFQCLGQVLPESCLLVWNTAMPVGEEVTGGFLPPKLRRQKATFLKNEVVKANFHSATEARKHNFDVLDLHFHFRHARENLHWDGVHWNGRVHRCLSQLLLAHVADAWGVELPHRHPVGEWIKKKKPGPRVEGPPQANRNHPALPLSPPLPSPTYRPLLGFPPQRLPLLPLLSPQPPPPILHHQGMPRFPQGPPDACFSSDHTFQSDQFYCHSDVPSSAHAGFFVEDNFMVGPQLPMPFFPTPRYQRPAPVVHRGFGRYRPRGPYTPWGQRPRPSKRRAPANPEPRPQ

SEQ ID NO: 4634 - DNA, 3276 bp, Homo sapien
tgaacatcctcagatttggtgttcgagggcatcctggaatcaattccccatgataccgagggatgactggatattaatcgatttccctcaagcctgcccttgctgtgaactagtgctacaagcacgggaaatccatctgctctctggcttaaaatatgtatctcatctaaaattgttcgttaaagtgtgaataaattgctaagtggttgttgcttagcaataatttttgcctgaccatcagcagagcttttatttacctttgtaattaaaatccaacatagcatgggctctgggcaaaatatttcactgactattaagcatgtagaacaggaaaatgaaatacactatttgtgcccttgacctagaaccagaaccactaattatgagaactttgttttatgtaccaaattcacattgaccattttctgagctctagactgatcgtagtaagttttgtgacttaacaatgaaagaaagtagaaagatgctttgggttttcaaaatgttgttttttaaaattgttctttgggtgaatttactcagtgctgctttgatttgtatacagaaacaaatgttgggaattgctcctcagaaatgtgttcctaagttgtgttttcaactttacatcatgaggtgaagcattagggaaagagattctttcgatttgtttaataatctaattatacagaccaaagtgctttacgtttctgctctatgttaatgttttagaatggtgattttgctgattaatttagacctggaattgaaataatgtgctcagaataataacatggttatagttcttgtatgataaagtattcaatttcagaatagtgttggaatcctgagtttgaataatgtgttgtatttagaaacatagccctatctgttttaaacaaataatttgttggccgattgtccatggttgagcatgacaaaaatacctcgtcgaaaggcaagcttaggtaactgctggcaaaacactgggtgcactatttttctggataaaatttatagttattttctatattacccttcaaaagggatctcttcaggttaaaaatcacgcttatgctgaagtctttatctggtgttaactaaaaatctcatatgggttcataaccgaggtcactaataattcatttttatcacttgtaaaaatttgctcaaaattccaaaaaaatattgatttgttttttagtgattttgcaggctgacccccaacctaagttttgataacatctggtaagtcagtatagttctgtgacttcatgttttaactaagaaggaaaattcatagatattcctattagattttataaaccttcaaaagtctgaaacttaattttgagtctaaattttctgacactggccccttttaatatttaagtttttgttcactttcttaagtaaaaaaaacatttaattactagttagcccttaactgggaaactcaggtaatgaactgctgacttttctaaagttctttaactgatcaattctgtatagagggatatttatctaaccactttccgtattttacaagtgctctttctaaaaaggaataactattatagctctatttccccaatctctataggactcatgagagattgcttgtgtaaatataaaagcaccatatgtgttcttaactcctatggctgcttgaagctcatgatgaaaaagtctttttgtcagttttaattgttaagtacagaacaaacaattgtttggtgatggcctggttgaaagagagcatataaatatatcccagtggaactcaccaaagaagaccacacctcagaaattattgcattttctcattatgtgttgggtttgatttgcttttgtttttaatgcagctcttttaatataaagattcttgatacagtgaaatctcttatttcaagtgtaagttattcttcacccaccccttcccctgccattgtatttcccatctgtttcaaggagtttcaacaatttacattgcatcgtatgcagtaggtactgctttttcagaaagacctggaaaacatacctgctatgaatattttgttcagatgtagccatttacctggctctcaagttgtctttgtggagagggtcttagacaaaaatcttccttgtatttacttgggttaagtgaagtccaaattcttacagtatgctatttcaggatttctgatattaaaaaagaaaaaacaaaatctttatatctcttattaacacttcccccaagaagggttgtgctgttatttattttctattataagaaaagttcattctttaagtagtttcttttacctctaatctaatttcataccaaatacctgatcaatagaaatgatatatttaagcagcaaagattcctaatccatcattatgaaaagtgtcagcatacttagtagtgaacagataaagtcaatttgaatataattccactttgtttttagagactaaattaagattcaattaacattatcctatgaattctgaatgtgataatgtgattcaaacagtcaaattttattaagctcttagtaactcaggatagcattccatactaacctcaagttagcaaaacaaattagttaaacagcttggttcttagcagactgcttaaaagatcaagaaaattttctcatcttttctttctacttagaaacattgcaagaaaccttggacagtcttcaccagacctgccatgattttataagatttaggcctcagtgacatgctcctgaaagtttcctgccagccatccaaactaagcatccactcattccatcttcccaaagtcactcaccgataaaggtagcatccttaagttcatttttgaaaggtggaggaggatctccccctgcccaaaggaatttttttatcagaataccttgaaaggggggtatataaatttggaaaacttaatttcttggctgtgtttgataacagttcctatgcatggtttttaatgtgaggtaaatttgtttctttcttcagaatacctctctccaccccccaccttattcttcctctttaatgaatatttttattggagctcaaactccatgacttacgtgctcactaagttttcttttttccccttgtttactctgtctgtatgtatgtcaaaagctggcaaaacctctaaaactgtcaagaaaatgcttgaaagttgatttgtcatagtgcaaattcatgataaaatgtcttaatgttatttggatatgtagtacatagaaacagaaaaataaagtcatttttataacttaaaataaa

SEQ ID NO: 4635 - protein, 62 aa, Homo sapien
EHPQIWCSRASWNQFPMIPRDDWILIDFPQACPCCELVLQAREIHLLSGLKYVSHLKLFVKV

SEQ ID NO: 4636 - DNA, 4274 bp, Homo sapien
ttccacgtttcttctagatagatgttaaagtagcttaatcacaaaattataattccaagagctgaaagggacttaaatcaactggattttcaggtgaagataacacttttattcacgtaagagatatgagtccaccggtgactatgttctgaggctgcagttggaatcagacagacatgacctcctacgcagcaccagtatgcatgagcgggtgaaccgaacagaaagacagtttcgatcacttccagctaaccaacagaaactacttcctcagtttcttcttcacttggacaagatccggaaatgcattgatcataatcaagaaatactactgaccattgtgaatgattgcatacatatgtttgaaaataaagaatatggagaagatgggaatggaaagattatgccagcatctacatttgacatggataagttaaaatccacgctgaaacagttgtgagagactggagtgaaactgggaaagcagaaagggatgcctgttaccagccaatcattaaagaaattttaaaaaattttccaaaagagagatgggatccttctaaagtaaatattctggtacctggtgctggactaggaagactggcctgggaaatagctatgctaggttatgcttgtcaaggaaatgaatggagtttttttatgctcttttcttccaactttgtactcaacagatgttctgaaattaataaatataaactttatccttggatccatcagtttagcaataaccggagatcagctgatcagattcgacccatctttttccctgatgttgacccccacagtcttcctcctggttctaacttttctatgacagcaggagattttcaagagatttattcagaatgcaatacctgggactgtattgctacctgtttcttcatagacacagctcacaatgtaattgattatattgatacaatatggaaaatactcaagccaggtggaatttggataaatctaggtcctctgctgtaccactttgaaaatctggcaaatgaactttccatagaattgagctatgaggatataaaaaacgttgttctgcagtatggattcaaggtagaggtggaaaaagaatctgtattgtcaacatatactgtgaatgatctctctatgatgaaatactactatgaatgtgtcttgtttgtggtccgtaagccacaataatggtctcaagtgataccacctggaaaaaagtttagtaagaacaaatgctgaaatcaacgactcaaaatcaactatcagtgatgacaggacacaacctcaaatcagtggtgccttcttattcctaacgaaatttagaaatagtgtctattttcttaatatgtctattgctttttcagaaatatactatgccatgcagatttgtactacacaagtaaaaatggaggaaatgtcttgaagtatactttttccttgaagcccagaattgtgtttcagtaggaaaaaaacctaatctccagtgtcttcatgatgctgtccattgcaagtctgccgaattaatgactaatagtattgaagtacataataatcttcctttttttgttgttttgtatgcattgcacatgtaacttttagaagagtctaaggatcctcagtcatattcaacatctggagttgggactttgttcactttcaatctaagaaaactatgtgtaaaatatgtctttttttttttttccttctcaagaaaacgggattcccgcctcgtgttcctcccaggccggagttgcaggggcaacgactcatagcctcacttgtaacctcaaacctccgtggactcaagcgatctatccgtgccattagccttagccctccgtgagtatagctaggacgtggtaggcatgtgtaccaccgcgcctgggcctgtgtctattttatcattcagattaatttaattttgtattttctggctcagatgaacttaaagaagcatcaaacatttcttttttatgaaatgttaaatttaatagcatcacaggccggtaaaatatattcaagtaacagaaatatcaaagtcttttggccacaataaactgaacactttatgaaagcatactcatcatggatcactttgaaatatacgagatctcaacattcaaagtgagaaataaaaagcctttattaaaagtagtgctaggaaacagagaaaataagaataaaatttacccatttgaaatatgtgattttcagactctaaatgaatacagagtttgacagtgtgatgtttacaataatgtcttttctttagaatatctggattatgaaagcaagcacttttttcattaaaaaaattatatactaggaaaaactgtcataatagtattaatgtggggaattttgattatgaaattcagggatatattactgcccgtggtctgtgtcttcaatattgtaagcagcagccatcatgtaatttcagattaataccaattttgttccctgatagatggagcttaaacagtatatgctgctttaaatttctacctctagcagatctttattggagggagttttcctttgtattttttaatgtatgatattctgtttccagtagcttggaaagtagagatgactaatgttttagccttttcttggagaaaaggaagaactcttcttgaatattttcacagatgattgtgattgctttaaatgacctctgtggcaatttaaattagatggatttaatctcagtaatgtgctggtcgcataaatgtcatgttttaataggaaaagttacttgtaaatctttagacctttgttgtcacttaggctggggagtcactaccctatttggcatcttactagttggggggaccttttccgtgtacagtgatgggacttttgtgacctttactctcactatgcaatagagggtttcatgtagttaatctgacatgtcaaaattgggaagactgtaacctttttttttttttttaagatttctcttttttgtgtccctcaatacttagcagatgttcatttggtggaaattcttattacttacatgaatgagtttgaatttagtggcaaggaagaaaaaaaaaactcaaattattgttttaaaagaagaaaacttgcaaagtacataagtattttttaaaaatcaatcgaacagaaaggaatgcatgctgtttttcaatggcttagacatgctttttattcactgactagtattcacttttttacaacttgtatcaaaacaaatgatctttgtttttgtcacaggcaaaaacaggttgacactggtgggttggctttattaattaattttttttctattaggttttctttaataatgttaaatttctaaattatagcatatgttttagttaattctgaaatcagttacttcatttgttaatttatccctcatatcatgaatattgttttttaaatgttctatacaaatttgcatcacttcttttcttacagcttttgcagttaatatattctaaacttgaaaatgtggtatcaatcaataatagaagtatcactggaggatttatttagctttgtatttcttaattttagtcctagctactaaagtatgtaagccttaaagtttaaaatgtttttcttaaattagctttatacacaaacattttcatttactttatgaaatgggaggagatagtccactgtgcttatgtttttttgtttaatttctatattctgaagcagtgcagatatagggtatgctaatcaagtgagcaaggtggaacatgtacaatataaggagaagctgtaaaaatcacagtataaaattatgaagtttggtaactgtaaaatgtactgtatttatatgtaactctcattctaaaagttgccacaaaagctgaattggaagcttcatgtctgcatgaaatttcctatatttttaatgtgtatgatgaaattaatttttcttgaatattaaagtctgccaatgtttgggagtgcagcctatcttctagaaccctgaagcttggcattcattgttcataaactcagctcgaaggcagtgccttccaaatgtggttaaattgccatgggaaagaccagggttagttgcagggcatcattttccaagcagaaccatttcaaatgctaaaactggcccctgaggttacattgagcctcccttcctgagtgagatgtttggaaatgaggtggctgtggaaaccactgttacagacaagcttagttccaaagccacctcatgtcgtaagagatgagtcaggaagggcggcggctctagactcgagact

SEQ ID NO: 4637 - protein, 190 aa, Homo sapien [sequence omitted]

SEQ ID NO: 4638 - DNA, 510 bp, Homo sapien
atgggttggtctcaggatttgttccgcgccttgtggagatcgctgtcaagggaagtgaaggagcacgtgggcacggaccaattcgggaacaaatactactacatcccgcagtacaagaactggagaggacaaactattcgagagaaaagaattgtagaagcagcaaataaaaaagaagtagactatgaagcaggggatattccaacagaatgggaagcttggattagaagaacaagaaagactccacctactatggaggaaatactaaagaatgaaaaacacagagaagaaatcaaaataaaaagccaagatttttatgaaaaagaaaaactccttagtaaagagaccagtgaggaactcctgcctccaccagttcaaactcaaattaaaggccatgcctctgctccatactttggaaaggaagaaccctcagtggctcccagcagcactggtaaaacctttcagccaggatcctggatgccacgagatggcaagagccacaatcaatga

SEQ ID NO: 4639 - protein, 169 aa, Homo sapien
MGWSQDLFRALWRSLSREVKEHVGTDQFGNKYYYIPQYKNWRGQTIREKRIVEAANKKEVDYEAGDIPTEWEAWIRRTRKTPPTMEEILKNEKHREEIKIKSQDFYEKEKLLSKETSEELLPPPVQTQIKGHASAPYFGKEEPSVAPSSTGKTFQPGSWMPRDGKSHNQ

SEQ ID NO: 4640 - DNA, 2917 bp, Homo sapien
ctagaatgctaattgcacttaggcctcatggttctagtaaacggcagctgtgggcccttttgcctcttcccctgttcttggcctcacatctccagctgagctgccggtcttggcttcctggtcgcctctgtcccagagatggtcccagggagccatcctagggcaggtagcactgaggctcctgtggaaacaggagccacctgctcaggagacccctttcctgaggaagtccttacctctccccttgagatgtaaaaatggtccagcagagacaagctcccgtggaaaacagacaggagcatgggggcagctgtcatggctgtggcgggcacttttcctcagagtttctgccttgcgctggtccaggagccattttgcaccaaggacttggtaggcagaggcagccccactgtaaagaagggtcagattaaaacaaaaaactgccaaaagcatcccctctgccccccatgtggcactggcatcattctctgcttccctgggaggaattttttcaccatgttattgaaggggatggttcattaaggactccacccctcagagctcactcagaccccaaggacagaggtgactggggcttggtgacttgttcactccttttttcccaggtatactgaaggggtgacagagagaggtcttcatggcagaccaggccttcacagctaatggggagaggaactcatgttacctctgcaggcctggggtcctgagggggtcttttggcttcagcctgttcccccagaggcttgatcatcccacattgtcccttcagctcagctgctcttctcccccacccaccctgggatgtgggtgctctgggctgaaccaaggctatgacttctggagagaggctcaggggttggtctgagaggcctgccatccacccctcagggagctaggttttctcagaggctcagctggacagcactttttagaaaagtttgtagcattaagctggtttaaaatatgaagttggttttgttggatggctcctgagctgactgactgatgtctgaagtttgagacgagggattatttcagggtggggcccaatgtgatctaatgcccagctggggacaattgtgcctcatcatttgctcaaattcctgggcccccaagttagccccctcccaggagtggtcagcgggtcacagctgcccccactctataagcagggctaattgtgtaccctttgcagaaatgcttttggtctcctacccaaatactcacaagggtcttatcagacgcccgtcttaaagtccagcatgctcagggaccctgtgtaggatctcgtttgtggtgagtgggctgctctgaggtctccactgggctgccatttagccatgtgccatctctgaagtcagaggtgtttgactcccattccttgggctctggagctttccccaagaattacatcagagaaaaggaagaaggggcctgcaggacccattgggaatgagtttaatactgaagtctggaatgtaagctcatgccctagaggcctctccatatggctggtcaggggagctgccttcaggcttgtgccccgtgtgctcagcagctgcctctgtccccctctactgtccctttcacaccttgcctggccaaggggctagacctcccaggctaagcctcagattcagtgcaggacacaagctcatgcccccgtcttgccagtgacacttgaagcctcccgacttccacagagtgcttcaggacacattttgagtggtattttcttttctttttttcttcttttttttttttttgagatggagtctcgctctgttgcccaggctggagtgcagtggcctgatctcggctcactgcaacctctgcctcccaggttcaagcgattcttctgcctcagcctccagagtagctgggactatagacatgcaccaccacgcccggctaattttgtatttttggtcgagacggggttttgccatgttagtcaggctggtcttgaactcctgacctcaagtgatccaccacctcggcctcccaaagtgttgagatgacaggcacgagccaccaggcccagcctgagtggtattttctttagggaccaggtagactttaaaacgagggtaagagaaaagccagtgtctttctgaggtaaataatttctgccaggaaacttcccagccccaccagcagcccccctaaaaaaatcactcgtgtccccagggacttctaaagcttggggctccaggaaatcatccagtagagttggagattcagagatttcttgaagccagggacatgctcctaactcctttcccattaaaggtgttagaatagaccagagggtgtcccttttccacagtaatgggatcggctggtgtgccttcagggaggaagagggaggtggtcaagcttgaaaaactggctttaggatggttctgactttgttctccctccccaagtgttctcaacctccattctgcagtgttcagagttttagggaaagggtttgggtgccccagcatccaggtgttgtgtggcttagcgcatgtgaagtgaaaaccttctggggttgtttggaagcagctttctggttcttgtgattgtatcctgaggtcccagaaccctattctcccacgaggatcctcagtgaccatggtggccacacgcctggccagcctgctggctcctgggtgagctgaagaaccttgcctgtggcacttttcgagggtgagctggaaccgagagaacatggtccccgtgctgggactcatgcgggtcatttcctgccggcctggtttcgcctggtcgtgtctttatgagcaccatgtaagcctccttgtattgagataattgggcattaaacattaaactgcagctctgggaaaaaaaaaaaaaaaaaaaaaaaaaaaaaaaaaaaaaaaaaaac

SEQ ID NO: 4641 - protein, 83 aa, Homo sapien
MESRSVAQAGVQWPDLGSLQPLPPRFKRFFCLSLQSSWDYRHAPPRPANFVFLVETGFCHVSQAGLELLTSSDPPPRPPKVLR

SEQ ID NO: 4642 - DNA, 602 bp, Homo sapien
gtgagactccctctcaaaaacaaaacaaaacaaaaaaattagacaaatgctacattaatgtttgggtggtcagattctactttgaatctgaagtttgcagatatgcctatagatttttggagtttaccactttcttattctgtatcattaatgtaatattttaaattactatatatgttaccatttttctggatttagtaagaaatttgcagttttggtttgatgtaacaagggttttaatgtaatttatgttagattttgcatttttttcattactgttatattttaacctgactgactgatctaattgtattagtattgtgaataatcatgtgaaatgttttgagacagagtactatatttgtgaatataattttatggtttttttcacttagaacctttctgtgtggaaaactaagaaaattgctttctgctgtataatctggcattcattgtagattaaagcttatttttctgtgaataaaacgtattcaataaaatactattctttaaaattaaaaaaaatctatgtcgggtgcggagaaagaggtaatgaaatgcggattcgatatcagcttatcatacctcacctcgaggggccc

SEQ ID NO: 4643 - protein, 53 aa, Homo sapien
ETPSQKQNKTKKLDKCYINVWVVRFYFESEVCRYAYRFLEFTTFLFCIINVIF

SEQ ID NO: 4644 - DNA, 1491 bp, Homo sapien
tggctgatcagagcgcgtagggcttcgccggggccgggagctgggcgcggtcctgctcagcccagctcaccgcgcgccggccctcggcgccctggttctgcggatcaggagttgaaaccagcaccttccctttctctgagtcctgcctccttctgcggaagggagctcaaaagaactttgttgttttgccttttactctggggtgaaagcggcaggaggtatgtgagatggtgaaatgatttgcttctgccatgctggggtcacgggtggatcgccctaaactctcggtggccccctcagtagttttggaagaggaccaagtccttgtctctccagcagtggacctggaagaaggatgccggctcagggacttcactgagaaaataatgaatgtcaaaggaaaagtaattctgtcaatgctggttgtctcaactgtgatcattgtgttttgggaatttatcaacagcacagaaggctctttcttgtggatatatcactcaaaaaacccagaagttgatgacagcagtgctcagaagggctggtggtttctgagctggtttaacaatgggatccacaattatcaacaaggggaagaagacatagacaaagaaaaaggaagagaggagaccaaaggaaggaaaatgacacaacagagcttcggctatgggactggtttaatccaaacttgaaggaatccgaataactaaactggactctggttttctgactcagtccttctagaagacctggactgagagatcatgcggttaaggagtgtgtaacaggcggaccacctgttgggactgcgagattctcaaggggaaggactgggtctcatttctcccatctcagcgcttagcaggatgacctggtatagagcagggaactgggaaatgtgggtcaggggatcagacactccagttgggtcttttatataaattaaatggcaaaaggctccatacccttctccttctttcctaccctccactttatctgcaaaatgggaatgatgataacacccacttcatagaatggtcatgaagatcaaatgagagaataaaagtcaagcacttagcctctggtgcacaataagtattaaataagtatacctattcctccttttccttttttaaaaataatattaccaaatgtccagcttatacacatttacaagacttagctagtgggctatgttagagctactaaaagatctttgacaagctaaaactaagatgcaatgaatgaggtgtaacgaacaagagagttttaagttcagaaatggttacagaagtataagacagctgtgtgggtgttttttggtttttggtttctggtttacaatctcgtcattcaacaaagatgggagttttatagaactaaaagcaccatgtaagctactaaaaacaacaacaaaaaaggctcatcatttctcagtctgaattgacaaaaatgccaatgcaaataaaaatgattactttttatttttcaacg

SEQ ID NO: 4645 - protein, 145 aa, Homo sapien
MLGSRVDRPKLSVAPSVVLEEDQVLVSPAVDLEEGCRLRDFTEKIMNVKGKVILSMLVVSTVIIVFWEFINSTEGSFLWIYHSKNPEVDDSSAQKGWWFLSWFNNGIHNYQQGEEDIDKEKGREETKGRKMTQQSFGYGTGLIQT

SEQ ID NO: 4646 - DNA, 2116 bp, Homo sapien
cccaagagagatgggctggtgggtcactgacataaagcagtccacaagatctattttagaaaagtatcaatgacatttccttagttggtttgattctcttgagaatacatgagtttaaaagaactgaggtcaaattgctttatgtggaaagcaataaaaacaagtatttttgacttgcaaattagaggtaactgtaagcaatttttgctattgaagcctatggcccaaattattccacctgcaaaataactttcacccttgcaaggctgatagacggctcttcattggtctttttttatggttttgttttgtttttttaagtcattggtcttaaatctgtatggtgacaaatctatttgagtttgattgagactttcttggactcctttggacaagaggtcagagcacaaaggctagtcaccacttctttgacttcttgaggtatgagccaaaattttacttttccattgatttaaagcagaatttttggagatgctgtgttctagttcctgacggaatcggtggtggttgctgactttgacactttggagagtgatgtggggagttatatagaaggggaaacactagtttaggtgtgaggagttctagtatgccacaaattagctgaggctttagacgaagcacaatatttgagcatcaatcttctcatctatgagatagacctgtcaggattattgtgaaaattagatgagataagttgaaagtacagtgcttggtaaacagttagcactcaaatattagttctttttcactttaattaagagcagactttgaatggtctgatgccaagtgtagatccttaagagacaaaacaaagaaactttcctggcttcaaagaaaagaactccatttctgaaagggtgccttaaaaggaattcatttgtctgatccatccttttgcctttgggcattactactgtcaccctccatttctttacaaacttcaggcaaggtggtctctctctctctcccaataggcaattccagggttgtaaactcattatcaggaagcttaatcttagaactgaaatacctcacagagcaatttaaacctctttcttcttgttcctattcttcatgggaagaaaactgggttgatccctatcttctttttaaggagccacatttgccatttattattgctcttttgcctatttaaaaaaaataacagtcagaaaaaataatgattattaaaatgatagtcattatttacttagtgaatgtcaggataggtatttattactcttagcttcttattggtatcagatgtagatcacggtcttactgttgattaactcttcagttatatatacatactttgattctttagttacataattgataacaaagtgtgcttctgaagaattattctggctgtatggctcttgtttcctccccttggtaaaaatggaggcatgaatctcagttttgtgatctgcttttaatttcatatatgacattatttgatatacataattaccaacatccaaaagcgtttcttcccctttctacgtgtgcactaaattctaaaacaaaaattggaatacaaaatgcctaataaagaaaaaattcatgtacagaaaagcaaaagataatctactttgttaagataatttgtcactagctggttgaataatgcacagtttttgtttaaggttacacatttatgcctggattaaataacaatagtaaaacttgacaagtcttttgaaaaacagctgctaaacatattgctttctggaatgtaatcattagcaacaaatattctcttattctatacaattgcagaatgctagtggaactttcttgtaggttatttgacaatgaatgttaattgatttattttttaaaaatgtaaaatcctcttatccctttaaggccggtttaggctttcatgtccctgtggtagaaaatttcaaatgctggcttctaatttctactcactgaagtgtcttccagacataccagatggttggagctcctttgatagtatataagggagctacataaatgtatttgaactaactcgtgagcaaaatttctgtttcccgcaaaaaaaatctatgtcgggtgcggagaaagaggtaatgaaatg

SEQ ID NO: 4647 - protein, 23 aa, Homo sapien
PREMGWWVTDIKQSTRSILEKYQ

SEQ ID NO: 4648 - DNA, 5035 bp, Homo sapien
  Unsure 359-427: Unknown base
ggtcgacgaacacttacatgaagataatggtgaagttgaagtgcgtcgaagttgtaggattagaagtcgttatagtggtgtaaaccagtccatgctgtttgacaaacttataactaacactgctgaagctgtacttcaaaaaatggatgacatgaagaagatgcgtaggcagcgaatgagagaacttgaagacttgggagtgtttaatgaaacagaagaaagcaatcttaatatgtacacaagaggaaaacagaaagatattcaaagaactgatgaagaaacaactgataatcaagaaggcagtgtggagtcatctgaagagggtgaagaccaagaacatgaagatgatggtgaagatnnnnnnnnnnnnnnnnnnnnnnnnnnnnnnnnnnnnnnnnnnnnnnnnnnnnnnnnnnnnnnnnnnnnngaagaagatggagaagaagagaatcagaagcgatattatcttagacagagaaaagctactgtttactatcaggctccattggaaaaacctcgtcaccagagaaagcccaacatattttatagtggcccagcttctcctgcaagaccaagataccgattatcttccgcaggaccaagaagtccttactgtaaacgaatgaacaggcgaaggcatgcaatccacagtagtgactcgacttcatcttcctcctctgaagatgaacagcactttgagaggcggaggaaaaggagtcgtaatagggctatcaataggtgcctcccactaaattttcggaaagatgaattaaaaggcatttataaagatcgaatgaaaattggagcaagccttgccgatgttgatccaatgcaactagattcttcagtacgatttgatagtgttggtggcctgtctaatcatatagcagctctaaaagagatggtggtgtttccattactttatccagaagtctttgaaaaatttaaaattcaacccccaagaggttgtttgttttatgggccacctggaactggaaagactctggttgccagagcacttgccaatgagtgcagtcaaggggataaaagagtagcatttttcatgaggaaaggtgctgattgtctaagtaaatgggtaggagaatctgaaagacagctacgattgctgtttgatcaggcctatcagatgcgcccatcaattattttttttgacgaaattgatggtctggctccagtacggtcaagcaggcaagatcagattcacagttctattgtttccaccctgctagctcttatggatggattggacagcagaggggaaattgtggtcattggtgctacgaacaggctagattctatagatcctgctttacgaaggcctggtcgctttgatagagaattcctctttagcctgcctgataaagaggctcgaaaagagattctaaagattcacaccagggattggaatcccaaaccactggacacatttttagaagagctagcagaaaactgtgttggatactgtggagcagatattaaatcaatatgtgctgaagctgctttatgtgctttacgacgacgctacccacagatctataccactagtgagaaactgcagttggatctctcttcaattaatatctcagctaaggatttcgaggtagctatgcaaaagatgataccagcctcccaaagagctgtgacatcacctgggcaggcactgtccaccgttgtgaaaccactcctgcaaaacactgttgacaagattttagaagccctgcagagagtatttccacatgcagaattcagaacaaataaaacattagactcagatatttcttgtcctctgctagaaagtgacttggcttacagtgatgatgatgttccatcagtttatgaaaatggactttctcagaaatcttctcataaggcaaaagacaattttaattttcttcatttgaatagaaatgcttgttaccaacctatgtcttttcgaccaagaatattgatagtaggagaaccaggatttgggcaaggttctcacttggcaccagctgtcattcatgctttggaaaagtttactgtatatacattagacattcctgttctttttggagttagtactacatcccctgaagaaacatgtgcccaggtgattcgtgaagctaagagaacagcaccaagtatagtgtatgttcctcatatccacgtgtggtgggaaatagttggaccgacacttaaagccacatttaccacattattacagaatattccttcatttgctccagttttactacttgcaacttctgacaaaccccattccgctttgccagaagaggtgcaagaattgtttatccgtgattatggagagatttttaatgtccagttaccggataaagaagaacggacaaaattttttgaagatttaattctaaaacaagctgctaagcctcctatatcaaaaaagaaagcagttttgcaggctttggaggtactcccagtagcaccaccacctgagccaagatcactgacagcagaagaagtgaaacgactagaagaacaagaagaagatacatttagagaactgaggattttcttaagaaatgttacacataggcttgctattgacaagcgattccgagtgtttactaagcctgttgaccctgatgaggttcctgattatgtcactgtaataaagcaaccaatggacctttcatctgtaatcagtaaaattgatctacacaagtatctgactgtgaaagactatttgagagatattgatctaatctgtagtaatgccttagaatacaatccagatagagatcctggagatcgtcttattaggcatagagcctgtgctttaagagatactgcctatgccataattaaagaagaacttgatgaagactttgagcagctctgtgaagaaattcaggaatctagaaagaaaagaggttgtagctcctccaaatatgccccgtcttactaccatgtgatgccaaagcaaaattccactcttgttggtgataaaagatcagacccagagcagaatgaaaagctaaagacaccgagtactcctgtggcttgcagcactcctgctcagttgaagaggaaaattcgcaaaaagtcaaactggtacttaggcaccataaaaaagcgaaggaagatttcacaggcaaaggatgatagccagaatgccatagatcacaaaattgagagtgatacagaggaaactcaagacacaagtgtagatcataatgagaccggaaacacaggagagtcttcggtggaagaaaatgaaaaacagcaaaatgcctctgaaagcaaactggaattgagaaataattcaaatacttgtaatatagagaatgagcttgaagactctaggaagactacagcatgtacagaattgagagacaagattgcttgtaatggagatgcttctagctctcagataatacatatttctgatgaaaatgaaggaaaagaaatgtgtgttctgcgaatgactcgagctagacgttcccaggtagaacagcagcagctcatcactgttgaaaaggctttggcaattctttctcagcctacaccctcacttgttgtggatcatgagcgattaaaaaatcttttgaagactgttgttaaaaaaagtcaaaactacaacatatttcagttggaaaatttgtatgcagtaatcagccaatgtatttatcggcatcgcaaggaccatgataaaacatcacttattcagaaaatggagcaagaggtagaaaacttcagttgttccagatgatgatgtcatggtatcgagtattctttatattcagttcctatttaagtcatttttgtcatgtccgcctaattgatgtagtatgaaaccctgcatctttaaggaaaagattaaaatagtaaaataaaagtatttaaactttcctgatatttatgtacatattaagataaatgtcatgtgtaagataactgataaatattggaactttgctagaacaagaccctgtagtaatagtaataatagttgaagtttggccaactcttaataaagttattttggtaactaatgttttatggcacttaagaataattagcagcgttaaattttgtttgtattaagcacttttaattttatccttcctaaaaatagtttattgtatctgacaagaaacttacttaaccattgtgtccttcccatcttttttgtcatctttgttttcttcaaatgccctcctcccatctgccttgagattcccttgtcttcacttaaaagccagagtgcaagtcatgatttgcgggagggctcttgaaccacttctggctgcaccacaattctgtacttgagtatcacagtcattgtttttgagacaaacatttttataattctaatttgggttaataaagattttaaatatttcttggtttacttttgtaattatatacacaacaaatgtattaataactaccttgttaaacaccttttaatagcacaaggtttttatatttgcaagctgttgatatctttctaaaactgtttaggttatagtctattgatactttttatatacaattttataaatataaatattataattttatattaatggtaccaaaaatacatttcttaaggttaaaagcatgcacttccatgcatacttgcttttggggagagtggggagaagacattctaataatcagtttgtgaaatagcttctgttggaaaccttttgaggggaataaggaatggtcatctaaaatgagagattctggattttaatgcagttcaaagttgagctgtatttttgttgttgatttatctggattttttttaaagccttctaaaacccagtgaattcaataccttaattagtacatactatcttatgtaatgcataaagcaatgccagtcactgagaacatttaaatatatttatattcctggagatacacattctcatttttgttggtttattataaattattcttctagatgcatcttttataactaggatttcattttgtgtgtatagcttatgtaataaattttaaaggtgaaaactctctt

SEQ ID NO: 4649 - protein, 1250 aa, Homo sapien
  unsure 120-142: unknown amino acid
  Unsure 359-427: Unknown amino acid
VDEHLHEDNGEVEVRRSCRIRSRYSGVNQSMLFDKLITNTAEAVLQKMDDMKKMRRQRMRELEDLGVFNETEESNLNMYTRGKQKDIQRTDEETTDNQEGSVESSEEGEDQEHEDDGEDXXXXXXXXXXXXXXXXXXXXXXXEEDGEEENQKRYYLRQRKATVYYQAPLEKPRHQRKPNIFYSGPASPARPRYRLSSAGPRSPYCKRMNRRRHAIHSSDSTSSSSSEDEQHFERRRKRSRNRAINRCLPLNFRKDELKGIYKDRMKIGASLADVDPMQLDSSVRFDSVGGLSNHIAALKEMVVFPLLYPEVFEKFKIQPPRGCLFYGPPGTGKTLVARALANECSQGDKRVAFFMRKGADCLSKWVGESERQLRLLFDQAYQMRPSIIFFDEIDGLAPVRSSRQDQIHSSIVSTLLALMDGLDSRGEIVVIGATNRLDSIDPALRRPGRFDREFLFSLPDKEARKEILKIHTRDWNPKPLDTFLEELAENCVGYCGADIKSICAEAALCALRRRYPQIYTTSEKLQLDLSSINISAKDFEVAMQKMIPASQRAVTSPGQALSTVVKPLLQNTVDKILEALQRVFPHAEFRTNKTLDSDISCPLLESDLAYSDDDVPSVYENGLSQKSSHKAKDNFNFLHLNRNACYQPMSFRPRILIVGEPGFGQGSHLAPAVIHALEKFTVYTLDIPVLFGVSTTSPEETCAQVIREAKRTAPSIVYVPHIHVWWEIVGPTLKATFTTLLQNIPSFAPVLLLATSDKPHSALPEEVQELFIRDYGEIFNVQLPDKEERTKFFEDLILKQAAKPPISKKKAVLQALEVLPVAPPPEPRSLTAEEVKRLEEQEEDTFRELRIFLRNVTHRLAIDKRFRVFTKPVDPDEVPDYVTVIKQPMDLSSVISKIDLHKYLTVKDYLRDIDLICSNALEYNPDRDPGDRLIRHRACALRDTAYAIIKEELDEDFEQLCEEIQESRKKRGCSSSKYAPSYYHVMPKQNSTLVGDKRSDPEQNEKLKTPSTPVACSTPAQLKRKIRKKSNWYLGTIKKRRKISQAKDDSQNAIDHKIESDTEETQDTSVDHNETGNTGESSVEENEKQQNASESKLELRNNSNTCNIENELEDSRKTTACTELRDKIACNGDASSSQIIHISDENEGKEMCVLRMTRARRSQVEQQQLITVEKALAILSQPTPSLVVDHERLKNLLKTVVKKSQNYNIFQLENLYAVISQCIYRHRKDHDKTSLIQKMEQEVENFSCSR

SEQ ID NO: 4650 - DNA, 4731 bp, Homo sapien
cccagctggaggaagcggcggcggcggccacgatgagtgcgggcgacgcagtgtgcaccggctggctcgttaagtcgccccccgagaggaagctacagcgctacgcctggcgcaagcgctggtttgtcctccggcgaggccgcatgagcggcaaccccgatgtcttggagtactacaggaacaagcactccagcaagcccatccgggtgatagacctcagcgagtgtgcagtgtggaagcatgtgggccccagctttgttcggaaggaatttcagaataatttcgtgttcattgtcaagactacttcccgtacattctacctggtggccaaaactgagcaagaaatgcaggtgtgggtgcacagcatcagtcaggtctgcaaccttggccacctggaggatggtgcagattccatggagagcctctcttacacgccctcctccctgcagccatcctctgccagctcccttcttaccgcccatgctgccagctcctctttgccaagagatgacccaaacactaatgccgtagccactgaggaaaccagaagtgagtcagagcttctcttccttccagattatctggttttgtccaactgcgagactggaagactgcaccataccagtctacccaccagatgtgatagctggtcaaactcagaccgttcattggaacaggcttcatttgatgatgtttttgttgactgcctgcagccgctcccctccagtcatttggtccacccctcatgccatggcagtggagctcaggaggtgccatcctcgaggcctcaggctgccctgatctggagtagagaaatcaatgggccacccagggaccacttgtcttcttcaccattgctggaaagttccttaagttccaccattcaggtagataaaaatcaaggttccttaccctgtggagcaaaagaactagacattatgtccaacactccacctccccgcccccctaagccaagccatctgtctgaacggcgccaagaggagtggagtacacacagtggtagcaagaagccagaatgcactctggttccaagaagaatctccctctctggtttagacaacatgagaacctggaaagctgatgtagaaggccaatccttaagacaccgagacaagcggcttagtttgaatttgccatgcaggttctccccgatgtaccccacagcttcagccagtatcgaagacagctatgtgcccatgagcccccaggctggtgcctctggtcttggaccccactgcagccctgatgactacattccaatgaactcaggaagcatctcaagcccgttgcctgagctgcctgcaaacctggaacctcccccagtgaatagagatctcaagcctcagaggaaatcacggccacctcctctggacctgagaaacctctcgatcatccgggaacatgcatctcttaccaggacccgcactgtgccttgcagtcgaaccagctttctctctccagaaagaaatggtattaattctgcaagattttttgctaatcctgtttccagagaagacgaagaaagctacatcgaaatggaggagcaccgaacagccagttccctgagcagtggtgcccttacgtggacaaagaaattcagcctagattatttggccctggacttcaattcagcatcaccagcccccatgcagcagaaacttctcctttcagaagaacaaagagtagactatgtccaagtggatgagcagaagacacaggctctccagagcacaaaacaggagtggacggatgaaaggcaatccaaagtatgagaggtgcgggcttgtgccatgtgtgaaacagggaagcttggggctcagtttgagttttttcttttttttttttttttgtccactaaaaacacactgatggtcaacacaggtcaaaaccaagagagaatgtgtagttttcaaggtcttggccagaacctttaggaaagaagacctgtttatacattgaaggaagaaaagaaggaagcagttgccttccggagggggctctgagagaatctagcctcccctctgtcctattggagcaaagattggagtgagtgttgccaccaacaggattttatcgtttgactccaatacctgaaattctgacttctctcctgtgcttcaatgagaatgataaattatcctagcaaaggggcctctggagaccatcttgttccagcctctgaagacagttgaggagatcaagcccagcaatggtggcagaatcttactccacagacttcagcagactagtcatttcaatacccaaagaaagacaagtgacaggggcaatggatctcaggctctgagataagtatatcagatgacactggtggctctaaggatattgcaattaagcagctacctgtagccaggtattctgctgctcttggccttttcccacgcatcgtctcgtgtcttctccgaaagaccttggaagataggcctggaagagactgttgatgccactttgaagaaaagaacactgagaactagaggagggaacactttgcccaagattactcacaaagccaagacccagagtccagcttagagaatagagttgttcaggctgccaattgcaagctcattcctctacctcatacttcctctgaggattttgacaaaatggattaattgggtgagccttggagacatgtgggaaacacctgcagacacaaaatgagtagtcatcctgtctccctttcaatagggatctgaacaggtgttttgatacttgaaagatgtgcatgtcaagtgagggtttctttctgcgatgttcaactggaactctcccatcagtagttacaattagaaatacctactgatggttagtctgaaggccattctcatggtcacctatacagtgtgtttccctgtgagctagcagacacaatgaccaggaaaaaacctatgaattccattcttaggtttcccagccaattgctcccttctgctttagaagtgactaggtactgagagtacaaacactcccactttataatgaaggcgtcatgtcaccccttcctttacaggtcctggggtccaggagacccagaatgaaggtgtcagttgggcatgaagtgttatttagtgtccattcttgatccttctgagcacctacagctggaaactaagcagatactggtcctgcattctgactgagattgtgtcttctttatgaggatagatcaaattggcagtcaggcccatgatagtcagtgcagttggggcagttgtagactttgctacaggatttcagggtttccaatcaccccacaggtaagtgaatgccaaagtcttcttttttcagaccatacaagaagtcattttgattttcaaagaagccgttttgattttcaaagaagcaggttctggtgacattattttcttccttggacaaagtggggggaaatttctaagtattttaactgagttcagggtccttagtgagcctggacagagcaaggagagggctccccactccctaagccccacagccagttctgcatcaccacacacagccagagcctgtgaggagctgccttcttccccatgtgacttgcaaagagtctcaggcaagaaaccagggcttcaaactgctagttcccatggagggtagttccctcgtgtggagcacttgtgttaggatcactgattatctgacaaaggctggtgcagaaaaaaaattgtaggcccaagtgtcaagaaccacaccagattggagatagaaaagaatagctgaaattatgtcagtggtgaaatgtcactccattgacccaccgaaaaaagaaaagaaatctgtttctaccaaacatttccagaaacgtatttatagcatgaagaaacacacatgggtagtgtgacctgtttggatgtgattacttaaaaatggaatgctctgaataggcactctctacattaaaggtatggaaggcgataggggtcagaattttaaaaatttaattttgaaaaaggtgactcacccctcatttccagagtgtaggcaattatgtcctgctttgataaaactgctagaggatggctatgcaaaagcataacgattcaaggaaacaaagtacaggtagtttttgagctgacagcagcaaaggcaccataagtcaaaatattggttttggtggagatgatcgatgtgtgtgtgtgagagagagctatgtttctaaccaagggcctaatgtttgttacagaaatgatcccagagacctacaagatgtgggaatcagcataacagggcaatgcagcaattaaccccacatcgttttctgtagttcctttttgtttcattttcttctgtctcacctcgttagaaaattcctcccagtcaggggtcgtccagtgcaggacgggggacccaagggtctcaagcctgcaagtccagaaggtgacaaacccaggagcactgggagttaagctttccttggggagggaagagccttgatgtccagcacacagcctggctataaagacacgaagcgacctacccactgtacagtccacttcacaggatcagctgaatcatgacctttaaaagttccgagttgaaactgaaggctctcctcagacctggctttttcctcagtccctgttcataccatctctgcacccacaatcacactgatttttcaaattcattttgtttttgctgtttcatttctggcattaataaaagtcttataaggaaaaaaaaaaaaaa

SEQ ID NO: 4651 - protein, 586 aa, Homo sapien
MSAGDAVCTGWLVKSPPERKLQRYAWRKRWFVLRRGRMSGNPDVLEYYRNKHSSKPIRVIDLSECAVWKHVGPSFVRKEFQNNFVFIVKTTSRTFYLVAKTEQEMQVWVHSISQVCNLGHLEDGADSMESLSYTPSSLQPSSASSLLTAHAASSSLPRDDPNTNAVATEETRSESELLFLPDYLVLSNCETGRLHHTSLPTRCDSWSNSDRSLEQASFDDVFVDCLQPLPSSHLVHPSCHGSGAQEVPSSRPQAALIWSREINGPPRDHLSSSPLLESSLSSTIQVDKNQGSLPCGAKELDIMSNTPPPRPPKPSHLSERRQEEWSTHSGSKKPECTLVPRRISLSGLDNMRTWKADVEGQSLRHRDKRLSLNLPCRFSPMYPTASASIEDSYVPMSPQAGASGLGPHCSPDDYIPMNSGSISSPLPELPANLEPPPVNRDLKPQRKSRPPPLDLRNLSIIREHASLTRTRTVPCSRTSFLSPERNGINSARFFANPVSREDEESYIEMEEHRTASSLSSGALTWTKKFSLDYLALDFNSASPAPMQQKLLLSEEQRVDYVQVDEQKTQALQSTKQEWTDERQSKV

SEQ ID NO: 4652 - DNA, 2734 bp, Homo sapien; identical to SEQ ID NO: 3633

SEQ ID NO: 4653 - protein, 251 aa, Homo sapien; identical to SEQ ID NO: 3634

SEQ ID NO: 4654 - DNA, 8848 bp, Homo sapien
  Unsure 5780, 5782, 5784, 5786, 5788, 5790, 5796: Unknown base
ctcgcaggagcaacacgtgatgtgtctacttatcagggtgagagggggagagcgagactccgagcgtgcgggcgaggaagctgggcggggggccgagacgggggccgggacgacggctggggcgccggggtcgccagctcctcgcccacctccctccctgtgggagaagaggaggaggggaagtgactgcggagttgatgaactttgcacatccagaaacgccattttgattccttttccggaacaagtttgcatctctcctcggtctctccctgaagcccaccggtccccaacgcatcatgccagggagccaagcgtcctgcccggccgtaagttgctccgactgtgtgttccaggagtggtggctctgaggtgtgaccctgcccacgtttgggcccagccaggttcagccccccaataaggagggcagcttgataacacaaagaaaacagtgtcaacgagtactaccaagagaagaagacaagaggtcaacacagactcattttctactccgtgtgaatgatagctacagcaggggaaagtttcatagtctatcagtgggtcagaaaatggagttttatagcagaggcttcttagaagcttaaacccctgtcccaatgacgtcaagttcgcccgctggcttggaaggttcagacctatcttccatcaacaccatgatgtcggcggtcatgagtgtagggaaggtcacagagaatggcgggagcccccaggggatcaagtccccctcgaagcctccaggaccaaatcggattggcagaaggaaccaggaaacgaaagaggagaagtcttcctataactgccccctgtgtgagaagatttgcactacccagcaccagctgaccatgcacattcgccagcacaacacagacactggaggagccgaccactcatgcagcatctgcggaaagtcactgagctcggccagctccctcgatcgccacatgctggtgcactctggcgagaggccttacaagtgcactgtgtgtggccagtcatttaccaccaatgggaacatgcacagacatatgaagatccatgagaaggaccctaacagtgccacagccacagcccctccatctcctctgaaacgtaggcgattgtcctccaagaggaaactgagtcacgatgccgagtcagagagagaagacccagcaccagctaaaaagatggtagaagacgggcagtcaggtgacttggagaagaaagctgatgaagtctttcactgcccagtatgtttcaaggagtttgtttgcaagtatggactggagacccacatggagacccattcagataacccactaagatgtgacatttgttgtgtcacctttcgaacacatcgaggactgctgcgtcacaacgcgcttgtccacaaacaacttcccagggatgcaatgggcagacctttcatgacagaacaacccttcaattcctgctggcttccacgacttaggattcacggacttctcctgtaggaagtttcctcgcatttctcaggcctggtgcgaaacaacctgcggaggtgcatcagcgagcaacaccgttttgtctgcgacacctgtgacaaggcgttccccatgctctgctcactggctctgcacaagcagacccatgtggcggcagaccagggtcaagaaaagccgcaggccacgcccctgcctggtgacgccctggaccagaagggcttcctggccttgcttggcctgcagcacaccaaagacgtcaggcctgcccccgccgaggagcccctgccggatgacaaccaggcaattcagctccagacactcaagtgtcagctacctcaggaccccggctgcaccaacctgctgagcctgtcacctttcgaagctgcttccctaggcggttctctcacagttctccccgcgaccaaggacagcataaagcacctgtccctgcagcccttccagaagggcttcatcatccagcctgacagcagcattgtggtcaagcccatctctggcgagtcggccatcgagctggcagacatccagcaaattctgaagatggcagcctcggctccccctcagatcagtcttccgcccttctccaaggcccctgccgccccactgcaggcgatcttcaagcacatgccccctctgaagccaaagcccctggtcacaccacggacggtggtggccacctccacgcccccgcctctcatcaacgcccagcaggcttccccgggctgtatcagccccagcctgccgccaccgcccctgaagctcctcaaaggctcagtggaggcggcctccaacgcccacctgctgcagtccaagtccgggacccagccccacgcggccacgcggctctccctgcagcagccgcgggcggagctgccgggccagcctgagatgaagacgcagctggagcaggacagcatcatcgaggccctgctgccgctgagcatggaggccaagatcaagcaggagatcacagagggggaactcaaggccttcatgacagcgcccggcggcaagaagacgcccgccatgcgcaaggtgctctacccctgccgcttctgcaaccaggtgtttgccttctcgggggtcttgcgtgcccacgtgcgctcccacctgggcatctcgccataccagtgcaacatctgcgactacatcgccgccgacaaggccgcgctcatccgccacctgcgcacgcacagtggggagcggccctacatttgcaagatctgccactaccccttcactgtcaaagccaactgcgagcggcacctgcgcaagaagcacctcaaggccacccgcaaggatatcgagaagaacatcgagtatgtgagtagcagcgcggccgagctggtggacgccttctgcgccccggacaccgtgtgccggctgtgcggcgaggacctcaagcactatcgtgccctgcgcatccacatgcgcacgcactgcggccgcggcctgggcgggggccacaagggccgcaagcccttcgagtgcaaggagtgcagcgccgcgttcgcggccaagcgcaactgcatccaccacatcctcaagcagcacctgcacgtgcccgagcaggacatcgagagctacgtgctggccgccgacggcctgggccccgcagaggcgccggccgctgaggcgtcggggcgcggggaggacagtggctgcgctgcccttggtgactgcaagcccctcactgccttcctggaaccccagaacggctttcttcacaggggccccacccagcctccacctccccatgtctcgatcaagttggagcccgccagtagctttgcggtggacttcaatgagcccctggacttctcgcagaagggcctggccctggtccaagtgaagcaggaaaacatctcctttctgagcccttcttccctggtcccctatgactgctccatggagcccatcgacctgtccatccccaagaacttcaggaaaggggacaaggatttggccactcccagcgaagccaagaagcctgaggaggaggcggggagcagcgagcagccctctccctgcccagcacccggcccttctcttcctgtaactttggggcccagcggaatcctggaaagccccatggcccctgctccggcggccaccccggaacccccagcacagcccctgcagggccctgttcagctggcggtcccaatctactcctcagccctggtcagcagccctccactcgtgggcagctcagccctcctgagtggcacagccttgctgcgtccactgcggcccaagcccccgctgcttttgccaaagccccccgtgacagaagagctgcccccgctggcctccattgcccagatcatctcatctgtatcctcggcccccaccctgctgaaaaccaaggtggcggacccagggcccgcaagcactggcagtaacaccacggcttcagacagcttaggaggttctgtccccaaagccgccaccaccgccacccccgctgccaccaacagcccaaaagagtctagtgagcctcccgctccagccagcagcccagaggctgcctctcccaccgagcagggcccagcgcggacgtcgaagaagaggggccggaaaagggggatgaggagccgaccccgcgccaacagcggcggggtggacctggactccagcggggagtttgccagcatcgagaagatgctggccaccacagacaccaacaagttcagtccgtttctgcagacagcggaggacaacactcaggatgaggtggccggagcccctgccgaccaccatgggcccagtgatgaagagcagggcagtcccccagaagacaagctgctgagggccaagcggaactcgtacaccaactgcctgcagaagatcacctgtccccactgtccccgggttttcccttgggccagctccctacagaggcacatgctcacacacactgacagtcagtcggatgcggagactgcagccgccgcgggcgaagtgctagacctcacctcacgggacagagagcagccgtcggagggcgccactgagctccgccaggtcgcaggggatgcgcctgtggagcaggccacggcggaaacggcctcgcgcgtgcaccgggaagagcacgggcgtggggagagccatgagccggaggaggagcatggcactgaggagagcactggggacgccgacggcggaagaggacgcgtcgagcaaccagagcctggacctggacttcgccaccaagctcatggacttcaagctggcggagggcgacggcgaggcaggcgccgggggcgcggcctcgcaggagcagaagctcgcctgcgacacctgtgggaagagcttcaagttcctgggcaccctgagccgccaccggaaggcgcacggccgccaggagcccaaggacgagaagggagatggcgccagcactgcagaggaggggccccagcccgcccctgaacaggaggagaagccccccgagaccccggcagaggtggtggagtcggccccgggtgccggggaggccccggcggaaaagctcgcggaggagacggagggcccctccgacggggagagcgcggccgagaaaaggtcctcagagaagagcgacgatgacaagaaaccaaagacagactcccccaaaagcgtggccagcaaggcagacaagaggaagaaggtctgcagcgtgtgcaacaagcggttctggtcgctgcaggacctgacccggcacatgcgctcccacacaggggaaaggccatacaaatgtcagacctgcgagcgaaccttcaccttgaagcacagcctggttcgccaccagcggatccaccagaaagccaggcatgccaaacaccacgggaaggacagcgacaaggaagagcggggtgaggaggacagcgagaatgagtccacccacagcggcaacaacgccgtctcagagaacgaggctgagctggctcccaatgccagcaaccacatggctgtcacccggagccggaaggagggcttggccagtgccaccaaggactgcagccacagggaggagaaggtcacggcagggtggccgtctgagcctggccagggtgaccttaacccagagagcccggcggccctggggcaggacctgctggagccgcgcagcaagaggcctgcccacccaatcctggccacagctgatggcgcctcccagctcgtggggatggagtgacagcctcagtccccctcagcacagacaaaagccagcagagcaaagcgtctatacttcatggggtttcctcagtgccctttggctgttgaggagtgagagananananananagaganagagagagacaagcaggagcgtggctgctcgctcagtgccatagccttaccgcagcctgcgcgggaggccacagcccgtgccgattccagtgccttaactacttaccggatccctccatattatcatgggtgttgtatttttccaaaatgacttcttaaacaaaacaaatattataatgatattgtctggagaggacctcttcatttgagcattagcgttattttgtattggtgtgtgtgagcttgttcttgtgaatctgtgatagcaccgtttgttctgtgagctggaaacagaaggaaaaaacatacccttgggtacccatagccaataactggaagaaaatgatgtgaatttcatgtaaatgaccagaggaaagatggataagatgataatttcttaaatagacattttccctttttctttgtgcttcatggtggagctgtcatctggtccttggtattacaggatgtggttgatgaaggtttccaatatggtttcaggccaaaaccagggaagattctagcttcagcctcatgtccatttccagtctgtcagcattagacatggtcactgttcaagtttcaagacatccattcttaactatagagaagagtactcccctggcgtcttaacctatggaaaacatgcacggataggatatatttgattgcctcctcttccctttcagtatatgtattattaatattattattattattattattattagttcatcagtttgctgttctctgcagtgagcagaatcaaatgggcaatatttgtcctgggagacctgtgccgcacccaggtccccgtgttaacgtgtgcctgcggttgtggttggcaccctcgggtggtagctcttctactgtaatgagacaagcctttcttctgtcactgcagaatttagaaggggccgtgagcagtcttcccaagcatggtccaggagcagctcagagagggtggagtgaggatgcatgcatccagggaacaggcatcaagaagccagggccgtgcctggagcactgcagagatgactttggagaaagcaaagcagtgacccagtgaccaggcacattactcgtgagcgaggtattcccagtcttcctgctaagcctaatccaagccttacccagctgtgctactgtcatttgcaaagcaaggaaatactactactggtaataaaactacacatgcaagatgtcagataagaaataggtttatatttaccttcctgcgatgtggggttggtgcttgaagataaatgtgctgtttctagtttcttaaatagcccacacccctggatgcaaaaaggcagggttatttttacccatgagcatcctgtgcaggcaatagacttccctcactgtctccgcctgcagggaggagaatgtaccccactgcacctgagctcctggtccctcagccaagacctcaggggtccccagccagcctgctgctggggacccctgtgcttgctgcagtgtatggagcctcttgccttcccctggggaggcacccctgtaccccagcttccttcccctggccttttctggccccagtgctcctcctttacatagacttgttcacacagaaacgtgcacgcccccttttctccgccacttcaccagtttctgaaatccaacctcccagacttcacaggaagatagatattcttgagataatgaaaagtgatatcttcgcatacgaaaggaaaaaaggttgaggtatatatgatttttaactgtattaggggtgtatgaaccagtttaaaaacgaggttttatttactgtagagatgaatgcaaatcagaaccaatgatcccttggcctacttagttaaaaccagttcatacatcccttagggtttttattattattattattattattacagttgttattgttgtttttgttgttattattatttggggtttcttgtgttttttctttgcgactctccacactaaacttgcaatattgtggggagaagctgtgactaaactctacgctgcggtgagatgtagcagtaatcagctcccagcgacgtgtgtagctggggctgccgctcgcaataatcactattgatttaaagctttacttagccttgatctgtaccctcgtagtcaataaggtcttgccacattttattagtgaggtggagaaacgtattatttgtttgttgtttttgcccttcccccaccccccaatattaaactgtgaaatttgtgatttgtttaaactctgggtgaatcatagcttagtttgcatgtccagctaatttgtttctatacattttgtttgattctctttctccttctctcagggcttttacaaaaaaatatatatatatggatcttctgaaaagttttttgaggtgcaagttttttctcttgtttttttttcttttttttttctcattgattaatggacatgatgctgagattcaatcactacatgaaacacctggctgtgaaaacaaaacaacccagagggctgtgttccaagcagcgctggggaagctacgtaacagtcggatgccagttttggaagattcaccatgcgttctgaccctctgttcgtctctttcctctcctctttcttcaagaaggaaattgatcctagtgatttcagcccatgcattaaacaggaaacaataataaatttgtagaattcatatttttctaaagggaacttaaaaactgctgctacatgttatgtacaaaactggtttatgccacatgaacagagaatcacaagtttggttttggtactttttgttcctctttgtattcagttgtatagaacttccaaattcagaatgagaagaaagctgttctgtatcaaaccatttaagcaataaatgttatattttaaaagctgcagattgccggtcacgtggccgtcctgtgattttttgtgatcccatccccaaacccacagcccacttggggcaggtcccaggtgtgcagtaccattggggggagtcacaggtgcccaggaaagctcttgtcacccaggcagcatttttatttgcgctggaggctgtgg

SEQ ID NO: 4655 - protein, 1418 aa, Homo sapien
  unsure 272: unknown amino acid
  Unsure 5780, 5782, 5784, 5786, 5788, 5790, 5796: Unknown amino acid
MSAVMSVGKVTENGGSPQGIKSPSKPPGPNRIGRRNQETKEEKSSYNCPLCEKICTTQHQLTMHIRQHNTDTGGADHSCSICGKSLSSASSLDRHMLVHSGERPYKCTVCGQSFTTNGNMHRHMKIHEKDPNSATATAPPSPLKRRRLSSKRKLSHDAESEREDPAPAKKMVEDGQSGDLEKKADEVFHCPVCFKEFVCKYGLETHMETHSDNPLRCDICCVTFRTHRGLLRHNALVHKQLPRDAMGRPFMTEQPFNSCWLPRLRIHGLLLXEVSSHFSGLVRNNLRRCISEQHRFVCDTCDKAFPMLCSLALHKQTHVAADQGQEKPQATPLPGDALDQKGFLALLGLQHTKDVRPAPAEEPLPDDNQAIQLQTLKCQLPQDPGCTNLLSLSPFEAASLGGSLTVLPATKDSIKHLSLQPFQKGFIIQPDSSIVVKPISGESAIELADIQQILKMAASAPPQISLPPFSKAPAAPLQAIFKHMPPLKPKPLVTPRTVVATSTPPPLINAQQASPGCISPSLPPPPLKLLKGSVEAASNAHLLQSKSGTQPHAATRLSLQQPRAELPGQPEMKTQLEQDSIIEALLPLSMEAKIKQEITEGELKAFMTAPGGKKTPAMRKVLYPCRFCNQVFAFSGVLRAHVRSHLGISPYQCNICDYIAADKAALIRHLRTHSGERPYICKICHYPFTVKANCERHLRKKHLKATRKDIEKNIEYVSSSAAELVDAFCAPDTVCRLCGEDLKHYRALRIHMRTHCGRGLGGGHKGRKPFECKECSAAFAAKRNCIHHILKQHLHVPEQDIESYVLAADGLGPAEAPAAEASGRGEDSGCAALGDCKPLTAFLEPQNGFLHRGPTQPPPPHVSIKLEPASSFAVDFNEPLDFSQKGLALVQVKQENISFLSPSSLVPYDCSMEPIDLSIPKNFRKGDKDLATPSEAKKPEEEAGSSEQPSPCPAPGPSLPVTLGPSGILESPMAPAPAATPEPPAQPLQGPVQLAVPIYSSALVSSPPLVGSSALLSGTALLRPLRPKPPLLLPKPPVTEELPPLASIAQIISSVSSAPTLLKTKVADPGPASTGSNTTASDSLGGSVPKAATTATPAATNSPKESSEPPAPASSPEAASPTEQGPARTSKKRGRKRGMRSRPRANSGGVDLDSSGEFASIEKMLATTDTNKFSPFLQTAEDNTQDEVAGAPADHHGPSDEEQGSPPEDKLLRAKRNSYTNCLQKITCPHCPRVFPWASSLQRHMLTHTDSQSDAETAAAAGEVLDLTSRDREQPSEGATELRQVAGDAPVEQATAETASRVHREEHGRGESHEPEEEHGTEESTGDADGGRGRVEQPEPGPGLRHQAHGLQAGGGRRRGRRRGRGLAGAEARLRHLWEELQVPGHPEPPPEGARPPGAQGREGRWRQHCRGGAPARP

SEQ ID NO: 4656 - DNA, 5601 bp, Homo sapien
ggcccggctgcgaggaggaggcggcggcggcgcaggaggatgtacttggtggcgggggacagggggttggccggctgcgggcacctcctggtctcgctgctggggctgctgctgctgctggcgcgctccggcacccgggcgctggtctgcctgccctgtgacgagtccaagtgcgaggagcccaggaactgcccggggagcatcgtgcagggcgtctgcggctgctgctacacgtgcgccagccagaggaacgagagctgcggcggcaccttcgggatttacggaacctgcgaccgggggctgcgttgtgtcatccgccccccgctcaatggcgactccctcaccgagtacgaagcgggcgtttgcgaagatgagaactggactgatgaccaactgcttggttttaaaccatgcaatgaaaaccttattgctggctgcaatataatcaatgggaaatgtgaatgtaacaccattcgaacctgcagcaatccctttgagtttccaagtcaggatatgtgcctttcagctttaaagagaattgaagaagagaagccagattgctccaaggcccgctgtgaagtccagttctctccacgttgtcctgaagattctgttctgatcgagggttatgctcctcctggggagtgctgtcccttacccagccgctgcgtgtgcaaccccgcaggctgtctgcgcaaagtctgccagccgggaaacctgaacatactagtgtcaaaagcctcagggaagccgggagagtgctgtgacctctatgagtgcaaaccagttttcggcgtggactgcaggactgtggaatgccctcctgttcagcagaccgcgtgtcccccggacagctatgaaactcaagtcagactaactgcagatggttgctgtactttgccaacaagatgcgagtgtctctctggcttatgtggtttccccgtgtgtgaggtgggatccactccccgcatagtctctcgtggcgatgggacacctggaaagtgctgtgatgtctttgaatgtgttaatgatacaaagccagcctgcgtatttaacaatgtggaatattatgatggagacatgtttcgaatggacaactgtcggttctgtcgatgccaagggggcgttgccatctgcttcactgcccagtgtggtgagataaactgcgagaggtactacgtgcccgaaggagagtgctgcccagtgtgtgaagatccagtgtatccttttaataatcccgctggctgctatgccaatggcctgatccttgcccacggagaccggtggcgggaagacgactgcacattctgccagtgcgtcaacggtgaacgccactgcgttgcgaccgtctgcggacagacctgcacaaaccctgtgaaagtgcctggggagtgttgccctgtgtgcgaagaaccaaccatcatcacagttgatccacctgcatgtggggagttatcaaactgcactctgacagggaaggactgcattaatggtttcaaacgcgatcacaatggttgtcggacctgtcagtgcataaacaccgaggaactatgttcagaacgtaaacaaggctgcaccttgaactgtcccttcggtttccttactgatgcccaaaactgtgagatctgtgagtgccgcccaaggcccaagaagtgcagacccataatctgtgacaagtattgtccacttggattgctgaagaataagcacggctgtgacatctgtcgctgtaagaaatgtccagagctctcatgcagtaagatctgccccttgggtttccagcaggacagtcacggctgtcttatctgcaagtgcagagaggcctctgcttcagctgggccacccatcctgtcgggcacttgtctcaccgtggatggtcatcatcataaaaatgaggagagctggcacgatgggtgccgggaatgctactgtctcaatggacgggaaatgtgtgccctgatcacctgcccggtgcctgcctgtggcaaccccaccattcaccctggacagtgctgcccatcatgtgcagatgactttgtggtgcagaagccagagctcagtactccctccatttgccacgcccctggaggagaatactttgtggaaggagaaacgtggaacattgactcctgtactcagtgcacctgccacagcggacgggtgctgtgtgagacagaggtgtgcccaccgctgctctgccagaacccctcacgcacccaggattcctgctgcccacagtgtacagatcaaccttttcggccttccttgtcccgcaataacagcgtacctaattactgcaaaaatgatgaaggggatatattcctggcagctgagtcctggaagcctgacgtttgtaccagctgcatctgcattgatagcgtaattagctgtttctctgagtcctgcccttctgtatcctgtgaaagacctgtcttgagaaaaggccagtgttgtccctactgcatagaagacacaattccaaagaaggtggtgtgccacttcagtgggaaggcctatgccgacgaggagcggtgggaccttgacagctgcacccactgctactgcctgcagggccagaccctctgctcgaccgtcagctgcccccctctgccctgtgttgagcccatcaacgtggaaggaagttgctgcccaatgtgtccagaaatgtatgtcccagaaccaaccaatatacccattgagaagacaaaccatcgaggagaggttgacctggaggttcccctgtggcccacgcctagtgaaaatgatatcgtccatctccctagagatatgggtcacctccaggtagattacagagataacaggctgcacccaagtgaagattcttcactggactccattgcctcagttgtggttcccataattatatgcctctctattataatagcattcctattcatcaatcagaagaaacagtggataccactgctttgctggtatcgaacaccaactaagccttcttccttaaataatcagctagtatctgtggactgcaagaaaggaaccagagtccaggtggacagttcccagagaatgctaagaattgcagaaccagatgcaagattcagtggcttctacagcatgcaaaaacagaaccatctacaggcagacaatttctaccaaacagtgtgaagaaaggcaactaggatgaggtttcaaaagacggaagacgactaaatctgctctaaaaagtaaactagaatttgtgcacttgcttagtggattgtattggattgtgacttgatgtacagcgctaagaccttactgggatgggctctgtctacagcaatgtgcagaacaagcattcccacttttcctcaagataactgaccaagtgttttcttagaaccaaagtttttaaagttgctaagatatatttgcctgtaagatagctgtagagatatttggggtggggacagtgagtttggatggggaaatgggtgggagggtggtgttgggaagaaaaattggtcagcttggctcggggagaaacctggtaacataaaagcagttcagtggcccagaggttatttttttcctattgctctgaagactgcactggttgctgcaaagctcaggcctgaatgagcaggaaacaaaaaaggccttgcgacccagctgccataaccaccttagaactaccagacgagcacatcagaaccctttgacagccatcccaggtctaaagccacaagtttcttttctatacagtcacaactgcagtaggcagtgaggaagccagagaaatgcgatagcggcatttctctaaagcgggttattaaggatatatacagttacactttttgctgcttttattttcttccaagccaatcaatcagccagttcctagcagagtcagcacatgaacaagatctaagtcatttcttgatgtgagcactggagcttttttttttttacaacgtgacaggaagaggagggagagggtgacgaacaccaggcatttccaggggctatatttcactgtttgttgttgctttgttctgttatattgttggttgttcatagtttttgttgaagctctagcttaagaagaaactttttttaaaaagactgtttggggattctttttccttattatatactgattctacaaaatagaaactacttcattttaattgtatattattcaagcacctttgttgaagctcaaaaaaaatgatgcctctttaaactttagcaattataggagtatttatgtaactatcttatgcttcaaaaaacaaaagtatttgtgtgcatgtgtatataatatatatatatacatatatatttatacacatacaatttatgttttcctgttgaatgtatttttatgagattttaaccagaacaaaggcagataaacaggcattccatagcagtgcttttgatcacttacaaattttttgaataacacaaaatctcattctacctgcagtttaattggaaagatgtgtgtgtgagagtatgtatgtgtgtgtgtgtgtgtgtgtgtgtgcgcgcgcacgcacgccttgagcagtcagcattgcacctgctatggagaagggtattcctttattaaaatcttcctcatttggatttgctttcagttggttttcaatttgctcactggccagagacattgatggcagttcttatctgcatcactaatcagctcctggattttttttttttttttttcaaacaatggtttgaaacaactactggaatattgtccacaataagctggaagtttgttgtagtatgcctcaaatataactgactgtatactatagtggtaacttttcaaacagcccttagcacttttatactaattaacccatttgtgcattgagttttcttttaaaaatgcttgttgtgaaagacacagatacccagtatgcttaacgtgaaaagaaaatgtgttctgttttgtaaaggaactttcaagtattgttgtaaatacttggacagaggttgctgaactttaaaaaaaattaatttattattataatgacctaatttattaatctgaagattaaccatttttttgtcttagaatatcaaaaagaaaaagaaaaaggtgttctagctgtttgcatcaaaggaaaaaaagatttattatcaaggggcaatatttttatcttttccaaaataaatttgttaatgatacattacaaaaatagattgacatcagcctgattagtataaattttgttggtaattaatccattcctggcataaaaagtctttatcaaaaaaaattgtagatgcttgctttttgttttttcaatcatggccatattatgaaaatactaacaggatataggacaaggtgtaaatttttttattattattttaaagatatgatttatcctgagtgctgtatctattactcttttactttggttcctgttgtgctcttgtaaaagaaaaatataatttcctgaagaataaaatagatatatggcacttggagtgcatcatagttctacagtttgtttttgttttcttcaaaaaagctgtaagagaattatctgcaacttgattcttggcaggaaataaacattttgagttgaaatcaaaaaaaaaaaaaaaaaa

SEQ ID NO: 4657 - protein, 1036 aa, Homo sapien
MYLVAGDRGLAGCGHLLVSLLGLLLLLARSGTRALVCLPCDESKCEEPRNCPGSIVQGVCGCCYTCASQRNESCGGTFGIYGTCDRGLRCVIRPPLNGDSLTEYEAGVCEDENWTDDQLLGFKPCNENLIAGCNIINGKCECNTIRTCSNPFEFPSQDMCLSALKRIEEEKPDCSKARCEVQFSPRCPEDSVLIEGYAPPGECCPLPSRCVCNPAGCLRKVCQPGNLNILVSKASGKPGECCDLYECKPVFGVDCRTVECPPVQQTACPPDSYETQVRLTADGCCTLPTRCECLSGLCGFPVCEVGSTPRIVSRGDGTPGKCCDVFECVNDTKPACVFNNVEYYDGDMFRMDNCRFCRCQGGVAICFTAQCGEINCERYYVPEGECCPVCEDPVYPFNNPAGCYANGLILAHGDRWREDDCTFCQCVNGERHCVATVCGQTCTNPVKVPGECCPVCEEPTIITVDPPACGELSNCTLTGKDCINGFKRDHNGCRTCQCINTEELCSERKQGCTLNCPFGFLTDAQNCEICECRPRPKKCRPIICDKYCPLGLLKNKHGCDICRCKKCPELSCSKICPLGFQQDSHGCLICKCREASASAGPPILSGTCLTVDGHHHKNEESWHDGCRECYCLNGREMCALITCPVPACGNPTIHPGQCCPSCADDFVVQKPELSTPSICHAPGGEYFVEGETWNIDSCTQCTCHSGRVLCETEVCPPLLCQNPSRTQDSCCPQCTDQPFRPSLSRNNSVPNYCKNDEGDIFLAAESWKPDVCTSCICIDSVISCFSESCPSVSCERPVLRKGQCCPYCIEDTIPKKVVCHFSGKAYADEERWDLDSCTHCYCLQGQTLCSTVSCPPLPCVEPINVEGSCCPMCPEMYVPEPTNIPIEKTNHRGEVDLEVPLWPTPSENDIVHLPRDMGHLQVDYRDNRLHPSEDSSLDSIASVVVPIIICLSIIIAFLFINQKKQWIPLLCWYRTPTKPSSLNNQLVSVDCKKGTRVQVDSSQRMLRIAEPDARFSGFYSMQKQNHLQADNFYQTV

SEQ ID NO: 4658 - DNA, 924 bp, Homo sapien
cctcaaagaggaagcctaccgttgagtttagtaagatctttgctacacacaatgtgatgctggcagtggcaggggcagtaatctttatttcgtcatttttgaaacatagaagccgtaacggaagcaagtgaaatgctcagtcttagacgactgcgtcgtgctatgaccggactttttcttgaaaggggatgacagcatgggaggcaatggctccacatgtaaacccgacactgaaagacaaggcactctctccacagcagccccaacaactagccctgcaccctgtctctctaaccaccacaacaaaaaacatttaatccttgccttttgtgctggggttctactgacactgctgctgatagcctttatcttcctcatcataaagagctacagaaaatatcactccaagccccaggccccagattcctcactcagatcctccagccaagctttcatccatcccaggggaatcacttacctatgccagcacaactttcaaactctcagaagatgctcaaattaaagtaacaaactaactcagcttttccaatgaggcttgaatccatttcctctcatctcagccctatcttcacacatcactttcacttttttacaaattttggaccaccacctgtgtgaaactgcagtcggagttgtttagatgtgatctggcaatgctatccagcatctttggagaccaatggtcagtcttttcctggccagaggaaagattgatggccctcccacttgaactgacagcctgtgagccccttgggggcatagactgccttccttggacccttccaaagtgtgtggtacagagctcagtgcacagagtattcacccagcatcatgaatcaacttgggaggagtcaaccaaatgaacaatctaccaaaaatttcaaataaagtcaaaccccccac

SEQ ID NO: 4659 - protein, 42 aa, Homo sapien
SKRKPTVEFSKIFATHNVMLAVAGAVIFISSFLKHRSRNGSK

SEQ ID NO: 4660 - DNA, 1828 bp, Homo sapien
agattttttaaagataaaataccatctctactggacctgtttagtggctcaggctgccctcacaggacatccctgagaccaccctgtcactcttgatgttggaaccagggcccaggcctgctcctcattgtctcctgccctcctagtccccaggagaggaaaagaaatactgttttagagaaataacattttcaacaaaacatccctggagtcagattttgagttggggtgggctaatcagggagtcggggctctctgcgtgatgtcagttctatggctaactggtttttctaaaccagccagctgcctatcaaaacagtacaacttttctaggaaatgcaattggcaaagacacttacgatgctgagaagtacacaaggtgaaactgctccagtttttctcatagcagggtcagcaggaaagcaagtggtgcccctggctcccatctcacacaggtgagactgcaccgagaggtaacgtggccctcacagcccaccacgcctggccttcgcccaattctgaaacttcgtaggatagagctggaaagtgccacatggtgaagcgagatccagctgtctgggtggatgtcggagtccataggctgagcagagatggttcttagtgaggttctcgctgccagttgacggtgaaatcatagctgccatttacattttgtgagattatgaaaaacataagactaaagaaactaaatgtgttattcctgtggacacaaaaatgtgtgtttttcagatggggaggggaccaaaaaggaaaaacatttcatcttaaaactttcctaagacaagggaaaacaaaaaaccatgctctacaacttcaaatttttcttacaaagaaaaatttaatattcgatgagaggttgaaccaggcttaaagcagacatactaggaaatggtgcagcctgtaagaatgccagtttgtaagtactgactttggaaaagatcatcgcctctatcagacacttagggtcctggtctggcaattttggcctgatgtgatgccacaagacccaacagagagagacacagagtccaggataatgttgacagtggtgtagccctttaggagaaatggcgctccctgcggctggtattaggttaccattggcaccgaaggaaccaggaggataagaatatccataatttcagagctgccctggcacagtacctgccccgtcggaggctctcactggcaaatgacagctctgtgcaaggagcactcccaagtataaaaattattacacagttttattctgaagaacattttgcattttaataaaaaaggatttatgtcaggaaagagtcatttacaaaccttgaagtgtttttgcctggatcagagtaagaatgtcttaagaagaggtttgtaaggtcttcataacaaagtggtgtttgttatttaccaaaaaaaaaaaaacacacacaatttaacgggttgtctgtatactattaaaaattttggaccaaaattgctacctatcatctatctttttgattgcagggaatccctgccaaggtaacttgacagtcggcctaattctgttgacagaaaatgaagccttgacggttctaattatccaaaagtgggttttcatcaggacgtacagtcagagtgtgagtgcattctaatgaaaacttcttcagccctcattcaattgcatacaaaagccctcaaagagaacatacagtacagcagttttgtaaaaggcaacaatacgatttgtacagaccccgacactccaatcctatagatcaccacgttgctcctctgtccccagcaccccttatttcttaagcagcaccaccagtcc

SEQ ID NO: 4661 - protein, 69 aa, Homo sapien
MKNIRLKKLNVLFLWTQKCVFFRWGGDQKGKTFHLKTFLRQGKTKNHALQLQIFLTKKNLIFDERLNQA

SEQ ID NO: 4662 - DNA, 1370 bp, Homo sapien
cttgcagtgagtttatcagcatactcaaaatttttttcctggaatttggagggatgggaggagggggtggggcttacttgttgtagctttttttttttttacagacttcacagagaatgcagttgtcttgacttcaggtctgtctgttctgttggcaagtaaatgcagtactgttctgatcccgctgctattagaatgcattgtgaaacgactggagtatgattaaaagttgtgttccccaatgcttggagtagtgattgttgaaggaaaaaatccagctgagtgataaaggctgagtgttgaggaaatttctgcagttttaagcagtcgtatttgtgattgaagctgagtacattttgctggtgtatttttaggtaaaatgctttttgttcatttctggtggtgggaggggactgaagcctttagtcttttccagatgcaaccttaaaatcagtgacaagaaacattccaaacaagcaacagtcttcaagaaattaaactggcaagtggaaatgtttaaacagttcagtgatctttagtgcattgtttatgtgtgggtttctctctcccctcccttggtcttaattcttacatgcaggaacactcagcagacacacgtatgcgaagggccagagaagccagacccagtaagaaaaaatagcctatttactttaaataaaccaaacattccattttaaatgtggggattgggaaccactagttctttcagatggtattcttcagactatagaaggagcttccagttgaattcaccagtggacaaaatgaggaaaacaggtgaacaagctttttctgtatttacatacaaagtcagatcagttatgggacaatagtattgaatagatttcagctttatgctggagtaactggcatgtgagcaaactgtgttggcgtgggggtggaggggtgaggtgggcgctaagcctttttttaagatttttcaggtacccctcactaaaggcaccgaaggcttaaagtaggacaaccatggagccttcctgtggcaggagagacaacaaagcgctctgcccctgcctagatgagtgtcttcctgtacatcctggcggcccgggcctcctgtgctgcccagcggcagggctttgagaagaaaggtcctgtctcgggcctgcagccctccttcgccgtcctcctgctgctgagcgccacgtggctgctggcactgctctctgtcaacagcgacaccctcctcttccactacctctttgctacctgcaattgcatccagggccccttcatcttcctctcctatgtggtgcttagcaaggaggtccggaaagcactcaagcttgcctgcagccgcaagcccagccctgacctgctctgaccac

SEQ ID NO: 4663 - protein, 101 aa, Homo sapien
MSVFLYILAARASCAAQRQGFEKKGPVSGLQPSFAVLLLLSATWLLALLSVNSDTLLFHYLFATCNCIQGPFIFLSYVVLSKEVRKALKLACSRKPSPDLL

SEQ ID NO: 4664 - DNA, 2661 bp, Homo sapien
cagcagtaggccttgcctcagatccaaggtcactcggaagaggccatgtctaccctcaatgacactcatggaggaaatgctgagagaagcattcagatgcatgacacaaggtaagactgccaaaaatcttgttcttgctctcctcattttgttatttgttttatttttaggagttttgagagcaaaatgacaacacccagaaattcagtaaatgggactttcccggcagagccaatgaaaggccctattgctatgcaatctggtccaaaaccactcttcaggaggatgtcttcactggtgggccccacgcaaagcttcttcatgagggaatctaagactttgggggctgtccagattatgaatgggctcttccacattgccctggggggtcttctgatgatcccagcagggatctatgcacccatctgtgtgactgtgtggtaccctctctggggaggcattatgtatattatttccggatcactcctggcagcaacggagaaaaactccaggaagtgtttggtcaaaggaaaaatgataatgaattcattgagcctctttgctgccatttctggaatgattctttcaatcatggacatacttaatattaaaatttcccattttttaaaaatggagagtctgaattttattagagctcacacaccatatattaacatatacaactgtgaaccagctaatccctctgagaaaaactccccatctacccaatactgttacagcatacaatctctgttcttgggcattttgtcagtgatgctgatctttgccttcttccaggaacttgtaatagctggcatcgttgagaatgaatggaaaagaacgtgctccagacccaaatctaacatagttctcctgtcagcagaagaaaaaaaagaacagactattgaaataaaagaagaagtggttgggctaactgaaacatcttcccaaccaaagaatgaagaagacattgaaattattccaatccaagaagaggaagaagaagaaacagagacgaactttccagaacctccccaagatcaggaatcctcaccaatagaaaatgacagctctccttaagtgatttcttctgttttctgtttccttttttaaacattagtgttcatagcttccaagagacatgctgactttcatttcttgaggtactctgcacatacgcaccacatctctatctggcctttgcatggagtgaccatagctccttctctcttacattgaatgtagagaatgtagccattgtagcagcttgtgttgtcacgcttcttcttttgagcaactttcttacactgaagaaaggcagaatgagtgcttcagaatgtgatttcctactaacctgttccttggataggctttttagtatagtatttttttttgtcattttctccatcaacaaccagggagactgcacctgatggaaaagatatatgactgcttcatgacattcctaaactatcttttttttattccacatctacgtttttggtggagtcccttttgcatcattgttttaaggatgataaaaaaaaataacaactagggacaatacagaacccattccatttatctttctacagggctgacattgtggcacattcttagagttaccacaccccatgagggaagctctaaatagccaacacccatctgttttttgtaaaaacagcatagcttatacatggacatgtctctgccttaacttttcctaactcccactctaggctattgtttgcatgtctacctacttttagccattatgcgagaaaagaaaaaaatgaccatagaaaatgccaccatgaggtgcccaaatttcaaataataattaacatttagttatatttataatttccagatgacaaagtatttcatcaaataacttcatttgatgttccatgatcaagaaagaatccctatctctattttacaagtaattcaaagaggccaaataacttgtaaacaagaaaaggtaacttgtcaacagtcataactagtaattatgagagccttgtttcataaccaggtcttcttactcaaatcctgtgatgtttgaaataaccaaattgtctctccaatgtctgcataaactgtgagagccaagtcaacagcttttatcaagaatttactctctgaccagcaataaacaagcactgagagacacagagagccagattcagattttacccatggggataaaaagactcagactttcaccacatttggaaaactacttgcatcataaatatataataactggtagtttatatgaagcagacactaagtgctatagacactctcagaatatcatacttggaaacaatgtaattaaaatgccgaatctgagtcaacagctgccctacttttcaattcagatatactagtaccttacctagaaataatgttaacctagggtgaagtcactataatctgtagtctattatttgggcatttgctacatgatgagtgctgccagattgtggcaggtaaagagacaatgtaatttgcactccctatgatatttctacatttttagcgaccactagtggaagacattccccaaaattagaaaaaaaggagatagaagatttctgtctatgtaaagttctcaaaatttgttctaaattaataaaactatctttgtgttca

SEQ ID NO: 4665 - protein, 297 aa, Homo sapien
MTTPRNSVNGTFPAEPMKGPIAMQSGPKPLFRRMSSLVGPTQSFFMRESKTLGAVQIMNGLFHIALGGLLMIPAGIYAPICVTVWYPLWGGIMYIISGSLLAATEKNSRKCLVKGKMIMNSLSLFAAISGMILSIMDILNIKISHFLKMESLNFIRAHTPYINIYNCEPANPSEKNSPSTQYCYSIQSLFLGILSVMLIFAFFQELVIAGIVENEWKRTCSRPKSNIVLLSAEEKKEQTIEIKEEVVGLTETSSQPKNEEDIEIIPIQEEEEEETETNFPEPPQDQESSPIENDSSP

SEQ ID NO: 4666 - DNA, 2353 bp, Homo sapien
agcggctctctctggccctcactcttactctcttgcactcttgctctccccctccctcccttactctaacagctgaatacacagtacttgttgatgtaccaaaaaggcattcaaccatttcgttattgatcgtcttttatttcctttttttattttttttcaaaataacactgctgtaatacatactggtgcttttatttatataggttggattcccagaaatactatgtaggcatatgtttcagaaatattacaagattactatccaaaatgaaagcgcccgttccagcgtcctctccagcactctttaatgcttgaaaatatgaaaggctaaaaattgcattgtattgcttgttagtttaattgccttttgtctgagttcaaagaggtttgttgttgttgctgtccttgtttctgtttggatttttctctgatttgcctgttcttaccctttgctcatgtatctattgatgtttttcattataaatttgtagaaattcttactacatagtgcatattaatcatttgtagctctaatgtgttatgacgttttcatcttgactttattgatgatatattttcctttaaaatttttaaactttttaggtagacccttatctcttttatagattttggtttcctttttttatcacatggatgcccccacccaaagtcatacaaatattcacctacattttcttctaataactttattatttttaatgtttaaatgtttgatccatctgaaatttatttttgtatatggtgtaagatggggatccagctataacattttgttcacattggatacctgattgtgacatttatttaaaatgttacccattttcaaatttctgagccaatatcatgatttaattatagtggcttcatcgtaagttttagaatccgataaagcaagtcccacttcattagttttttttttctttatataatatgtcctagacattcattttttcatgtgaaaaaatgaaatgcagaattttaataaaattctaattatgatggctgacatcacaattaaaatcctgcatttttgtttagagggctctttaataatattaaatcttagcactcaagagtcttcgtacatcattgaaatcttttggtcttgttattggaatattcttcacgtaagtatatcatagctaactgaatttatttctaagtatttttacagttttatttcatattttgacattgtgaattggtttttttcttctcatttgtaattagctatttttgacaatatagacaacctatagatttttgtatttttatcttctgtctaatgagcttatttaatcattgaaattacagtagatttttaagaatataatattttgggttttctagatatgaaattatttcacctggacatatagatcattttatttcctcttaatgtttatactgattactgttacattagctggatttttcaaaacaatgttgaagagtgatgacagacgtgactgtcttgttcttaattttcatggaagtaagaatgcaaaatattaatagggaatagtattccctattagtatgacatttacttttggttattagtaggtagtcattaacatgtttaagagtttccgctattcctgttttatagtgttattgctagaagtggttcctgaattttataaaatgccttttcagcatctattgataaaattgtatgattttttttctctttaatttgttgatgtaatgaattagaatggtaggcatttgatgtggaaccaaacttgtatttctggaacaaatactacttggtcattgtgaaataatgatttgctacatgagtggattttatttaccagtatttaatttagaattattgcattttcattccaaagtaaaattgtattttgtccttctgatgctatctttatcaagttttgttattgaagttgtgctagctttaaaaaaatatgaatatgtgagttttcaatttttttcctgtggtctggaataatttaaatagcattagaattatttgtttgttaaaagttagctaggacaaagtgtaaaacaatctaatcctgatgacacttttaatagtagatttttaatcagctttgtgatttctttaatagttattggtttattcaggctttttattaaaaaggtatatacattctctgtgacatacaaagttaaaagttctctattattgctgattgtactggttgttgcttgttgactgtactattcagatggctttatgcttttgtgtattttatgtcacctagatctaattctgaaaacattgtaataaaataattagctataatggtaaaaaaaaaaagaaaaaaaaaaaaaaaaa

SEQ ID NO: 4667 - protein, 58 aa, Homo sapien
RLSLALTLTLLHSCSPPPSLTLTAEYTVLVDVPKRHSTISLLIVFYFLFLFFFKITLL

SEQ ID NO: 4668 - DNA, 4266 bp, Homo sapien
  Unsure 2862-3212: Unknown base
catgggcgctgcagcagctacaaagacgacgccggctgcgctcgcgggaccagagggagggaggctgcggacgagtgcggggaggagtttgagatgggaggcgcttgcaggggctcccccagttctgcgctgtgagccggggcacaaagagccctctgcactagcgccgcaggaccgcggacccgagttggaggcatctgtccacccatgtggttccagacacgttcatgtggccaccatgaccccgtcggcatcacaggggtaaccaaggtccacagaacgaggggaaagggtcactgtggatcaagccaggctcctctgagcagtccagggtctatttacagagagcagcaagttcctgggacagaggagacagaagggaatttccaggttcttcaggacgttcacaaccacactgagaagcatctttgcagataagtatttaaacttaccagcccatagcctaccagcctgccctcttctggtctgtgcaggaaagtgtagtatcctagaatgccaaagtgggaggggaaatgggtgatgtagctcattctcttttctacctctatggaagaaagaaagagcctgtccccattttgtggggtcccagaaagggtgattttcacacttcacatttggcattagggctagtatttcacaaacattaccgtctggaacttttgaaggctgagttaaatgacttcatcttgtgtacttgtagaactgctattagaaggaggctggggactccctgatgatgtgaaccagcccttctcttctcagttttagcactttgtgatcatatttataaaccttggacagggctccttggccttagagttaagtgaagagttaacactgtgactttagatgcatttttctcagtgcaagtgtctgagctcatctccagttctggactcgtgcccccactcccgggtgctgacagcaagctctgaagatatgctgagagagctccctgactctcctgactcaggtctgccagttgatgaagacagcacagttgttaccaaaaacaaaacctggcagatggtcctaggtcaggattagtggtcattctctggtcttctccagactggtgacacagggtggtcttaaaagagtcctagtccagcctctggctccccgaatttcctctggtgcatggggcatcaggaaagggcaggggagaaggagggggagcagaaaaataactgaggctgggcagaagggtcccttccatttcccatccattgcttcaaacaatgggtgattaccgtgcaccttgagtgaatgtcaaggcaggaagggttccagggccacccagtgtggcaggagcagagctgggatcagaattctggattcctgactctccgttcagctgctattcagctatcaccaagctgctgagtttgtcctactttctcctgggtcacattctgctgttgttgggaaacagggagtgagtgaagggaacctgggaacccttctcccctcaccttttaaggatgttctggggtggaataaagagaggtggagggtggggtgcctgggcccagcctccctggctcctggtccttctttcttcagcagggagttctggcaaggcctgggcctggggagggggcctgggtgcagttttctcctgcggtgtggttggctcttttgtcttccaggatgggcctgtggggtctgtgtggggaaggaaggagctgggagcctgggctgcctgtgtgtcggctggatgctgccaggtggctccatctgggccgcatctccaggactcctggcctggacttctctttggacctcgggtgaccttggattctggccacagtgacttagcggtcagactccggtggttttctagcccgctgggtgactccctgaagatctcatcctcttcacacctgttgggatggagcctcccatggataggaactcttcctggttgatgctcagcagatgactgatctggctctggaggacagctccaggggtatgagggaggcctggcagcccactactccctcctcacctgctcgggccctgcctgctgggccctattgtctgggtctgggggccctttcctgccccatgtgaacttgattcctcctcgcgtttctgtcggtgaccagacagagcctggcctgggccaagtccccactgaccacactttccccaaggctgggtctcaaaggaccctacaggatggggacaggaacaaggatgggagtcggggaggggctgtcaggcagagggcagatgcagctcctcgggtgccgctggctggagtcctttgtctccatttgctcagtgcgtaattgtcattttgtgggggacttccttggtggggcttttccatgcttttcctctccctgatggttacaaagaggagacagtcaggatctgggaggagctggagccttccccctgtgctgttgaactctgggaggggcagccagaggggctgagagtgcaccatcctgaaaagagagggtctttaagagataagatttaggctagggaaattcactagaaagagacaggtggccctgggttttttttcctgccatccaaagggaaccagtcttacccaaaggcttaaggggtcaccttagcccagtctcaggacactcttctccaatcagatcgctgcttctagttgcactgctcctggattctgttcttggggaacagaaggtggcaggacaggccccacaatctgcaattccagctccctccagaggggacagtcccagcgtttgcaagagagcagcttgtggcctcccttaggcaagtttaaaagccagatgtcctttttcccagaatgcggagtggtgtgtactattcatcagcttgggnnnnnnnnnnnnnnnnnnnnnnnnnnnnnnnnnnnnnnnnnnnnnnnnnnnnnnnnnnnnnnnnnnnnnnnnnnnnnnnnnnnnnnnnnnnnnnnnnnnnnnnnnnnnnnnnnnnnnnnnnnnnnnnnnnnnnnnnnnnnnnnnnnnnnnnnnnnnnnnnnnnnnnnnnnnnnnnnnnnnnnnnnnnnnnnnnnnnnnnnnnnnnnnnnnnnnnnnnnnnnnnnnnnnnnnnnnnnnnnnnnnnnnnnnnnnnnnnnnnnnnnnnnnnnnnnnnnnnnnnnnnnnnnnnnnnnnnnnnnnnnnnnnnnnnnnnnnnnnnnnnnnnnnnnnnnnnnnnnnnnnnnnnnnnnnaggggacaccattcagttcttaacagggtggtcaccgcaaacatggaaagtcagagccttctccccttcagaattcccgcccccacccagggatggggaagaggagcagagaggtatgggaagcagacacggagagtggcaggtaccatgctggggtggctcaggagtgcttcggaggacatatggaactggcagggctcagtgcagggaggcggaggccctgggagagccgtgtcctgagaagggcctgggctacaaccctgggcaagttacttcacctctgagcctccgatgctctgtgaaatggaaggaatgtgcttgcctgtcaggtgcagggagaattcagtgagattgtgtgcctagcacagtgcctgactcccagtaggtgctcagcaaatgctcccatccatctgggagtatagacttagggtttatctattttttttttttggctctctggactttaaaactcagcatcttctgaaccagaggcatttctgattagcccttccctacctattttcctagtatcactctttaatcagcttggggaggtggcagcatttcatggcctccgtagtaactcacaatgcttcctggggtatttaaattctactctctcatcagcactgagcacctactttgggccctttcccgtgctagccatttgggggaaatataggtgaagagtggctggggtttgaacctttaggatttcacagccatgctggatgggataaaaccagctcacatggagaatcagagaatgggacagtgccacaaaacagtctactgaggcacaagttctgagtgcctgggaagtggtagagagaccccagagagggctgctgcagtctggaacagcttcctagcaagctgtaccaaacagggccttgaaggatgagaaagatctggctgagatgatacccgaccctctagggaaattcttagagtaacttctaggaaatgtcattgctcctttaaaaaaaatctatgtcggtgcggagaaagaggtaatgaaatggcaggaattcgatatcagcttatcatacct

SEQ ID NO: 4669 - protein, 213 aa, Homo sapien
  unsure 18-134: unknown amino acid
  Unsure 2862-3212: Unknown amino acid
MSFFPECGVVCTIHQLGXXXXXXXXXXXXXXXXXXXXXXXXXXXXXXXXXXXXXXXXXXXXXXXXXXXXXXXXXXXXXXXXXXXXXXXXXXXXXXXXXXXXXXXXXXXXXXXXXXXXXXXXXXXXXXXXXXXXXRGHHSVLNRVVTANMESQSLLPFRIPAPTQGWGRGAERYGKQTRRVAGTMLGWLRSASEDIWNWQGSVQGGGGPGRAVS

SEQ ID NO: 4670 - DNA, 3264 bp, Homo sapien
tttgatgtttacattgcctctaactcggtgcctcagatacctctgtgaccaaatttgtctccaaccacatagctcatttcctataatgttatatcataggaagccctcacagagacactaacacagctaaagatcttctgatattatcagcaagggatgcaaggactttattggaatctggagagtttaactgccttctcttggtctcctcacttacttcttaagaagttggcattacctgagactcttagctgtgattaggtacaagcttaccttttagggtagaaaaagaaagatcatttgaaaaatgtatctaaaataatccagagaacataatgtttgtcttggtctgataatgataagaagtcaaggattggcagagaaaatactaaacgccaagagttgagcctgtgggtctctccataagagttttaaaactcttgccagttaccactttatccaatttgctatcattttcgtattatcagctatcgccctgtaaaatattcaaaactagctatttctaaagtaaacattttatctgttacttttaaccagataggtgtctttgtcatccttctactataaattgttctttgccaacctgtacaggtagatgaaccaggcgagagttttaatcagccttttcttgtcccctttgtaagaaagagatgcttgccatagagaaggacatgagtacattaaaaataatttaatagccacaatatgatgttctttaagctgcaaattgagtacactgggaatcaacaaatttgatgaagcctgtctgtctcttcaccagtggagtgagtgcagcagttagaaagagaagcaatattgtgcaactggtgcagtggtgagttaatcatagtgtataaccttgtgttcatgaaacaggtgttcattgttctgcatctctcttcatttaaaaaggatacacaattctttcctcattgcatattacaccaaacgtttgagggaaaaatcctcattcgtaaaggattttggatttataatctaaaactcaacaataaagaaataatattccaagtctctggtttcctaagatacataataactgtttataaagaaggtctaagagctgatatttgccaaagtgatagaagagttgttttttcctctctactaccaagctttaagacattaaaagaagtctagtgtatttgaatattttagagaaagctttatcattttttaagatgccaagatgctgcctacgtttgcaaaagttgtctaagaattcaccatgagctatattttcttctggatctttgaccaaggtgatgtcagcttatttctggggaaggtgttgagctcttatacatgaaaatggatataggctattctctgggatgagtgtcatttcaatgctttataaatccatgaagctgcttgtctcataaagtagaactgatacaaattttggttggatatatagagaattttataaatgtattgccttagaatttctgggtggagacccaactacaatgacattgtcatgcaagaactataaagataattagagttaaaagttgtttaaattgtgcccttaaatacagcagaacctggagaaggtcatacttcaaaggtcgattttgagtccgaataaagaaagacctagtaacagatagtttttttttgttcattttcttctaccaagtagaggtttatgccctcagaactaaactagtaaaaatatctgaacaaaaaacctttcgttgttggcataaaaatgtgatacacttagagacattttgtttattgcatataaatctaatttttccataaattagatttatgatattttcataaagcacttgattagtttttcaaggcgtaccatcacaaagatgctttcctgcagagttctttgtatcaacagcctatggttgagatgttttctcatttcctgtagagagagaataccactaacaaacaagcaaaaactttagtgccaaaatagtggaactattttgtcatcttttgagaaaaaaatatacaaagaagtcatcttttcattaagtggattccctggttcctttccagctggttgtggaagtaatggctaacatccttcagctgactttgtctacaaggattattagcaaattctgtaggagcaagcatgtctgaccttaacttaatggatcccttattcaatcagtggcttctgtctttatgtctgttggcatatcaaaatggtttctgttcctagaaaagtaataacatatgcttatctttattctttttccaggtgattttgttttcaaatgctccttgtgaaaacacctagtgttgtagaaaggaaagtggccagaaagaacaacttgggaccatgagtaggtcattaaatagcttagtgatttatcctcatatagggcttataaaccctgtatgtgtttatatgtgcttcacagagttcgtgtcaggctcaaaggagatatgtataagaaagtggtttgtaaattatgttccatttcataaatagacactattcacaaactaaaatctaataaaaaaccacagttgtaatttaaactgcttgatataaaaagaggtatcatagcagggaaaacacactaattttcatacagtagaggtattgaaaactgaaaatgggaaggcaacttgaagtcattgtatttgattgaaaatgtttaatacatctcattattgacaaaatatgtcatcttgtatttatttcaaggaaaccaatgaattctaggtagtatattacaagttggtcaaaatattccatgtacaaatagggcttctgtgtccatagccttgtaagagatactgattgtatctgaaattattttttaaaaaaataaattatcctgctttagtgtgttaaaagtagacgatgttctaatataacactgaagtgcttcattgtatcccaacagtttaccttcaagtaatattatctttatttttaggctaagcacgtttgattattttgtctgtctcctatatagatctgttttgtctagtgctatgaatgtaacttaaaactataaacttgaagtttttattctatatgccccttaatagactgtggttcctgacgcacactgttaggtcattattttgttgtaccaaagttctagtggcttcagaaatcatagcatccaatgattttttggtgtctggctatgaatactatggttgagaattgtattcagtgattgtttctgcacacttttcaaataaaaaatgaatttttatcaattaaaa

SEQ ID NO: 4671 - protein, 96 aa, Homo sapien [sequence omitted]

SEQ ID NO: 4672 - DNA, 3895 bp, Homo sapien
caaaacctggaaaccaaccccaagtgtccttcatcgggataatccttaaggataaacgggtgcgtccacacaggggaataccactgagcagtgaagaggagccagttattgaaacaggtaatttggaggaaccccagaaacggtacagtgagtgaaagaaacttgtcttgaaaggttatgtactgtttggttccatttgtatgatattctcaaaaagacacaagaccatggggatggagaccagatcggtggctggagaggctggggtcggggagggcatgaccaccagagaaaagggtgaagagtgttttgggtggcagagctgtgtgtatgctggctgtggttgtgaggacaaaatccacacaagcgctcaagttcgtaggctgtacgccagaaaagctgtttcactacataactgaaaaaataagattgaaaaataagatgtatatattttttgtgtgcgtgtgtagaaaaatacttgaaggtaaactgcagagtgataacagtggtttcttctaggtactgggttaatatgtgatttttatgtttgtttgagcttttctaagttttctacattttccgtacaaaacatgtattacttctgtaataaaagcagcttgagattatttaaggaagcaaaacacttctgttgtttctcatcaactacaggatgaagtgcaggctccctgggtggtttgcaggggccacaggccttggccccacctcgctggtgctccctctactcctttctgtgtttgaagcaagttctggttcagacagaaagcctggcctttgagggcgttgggtccccacttcctcagtcatagatgtgatgtgcttcccttgacttgggaccttctgagggatgcaaggtggaccaaaggacccgtgaatggccagggcatgcctgcgtggctttcggtttcttaagcagtgatttcagtccacttaaagggtgtgaaaattctgagaatgctacggaccaaatatattttatgtaacagttgggacccggcaacacttcagggctctttcaaaatctggtagctacgagctcttccgtgactgagatgggacaagagtgaagatttgtccttgcttttagctctgctccagttcatagttctaatgggaaattatgtgacttaaacccaggctgtgagatgcatcagtgacgtgtgggcataaaataaaccctcgagatgttctcttgcatggtacactggcctaggcaggaatattcttgaggctaaaactgtagaactgtcagactagtgttacgaatgtggtggtgagaggcctgtgcagccgcggggcctgtgatgtgtctcctgtgtgtctttcactcctatgcagtttgagttcatgatcgagtccatcctgtatgcccgggatgcctggctgaaggaggacggggtcatttggcccaccatggctgcgttgcaccttgtgccctgcagtgctgataaggattatcgtagcaaggtgctcttctgggacaacgcgtacgagttcaacctcagcgctctgaagtaagtgtccacagctgggactggcaccgtcttgtggggcctcctggtccacagtctgcaggtgggccaaggccctgggagatcccatacgacggttggataaatgagggtacctgtgcacccagataggacaatctgttgtagcattggagtaattaaagcagtatggtgctataacaagacagatgggcagagcagggtagaatgcaaggaacaaaaattttcgtatgtgaaaaaggtggcattacgattaggagggagtgagggccaagtcagcaaattattctggagcagttgattagcccttgttctctcacgccatacgtgaaaacttaattctgcatggaatcagcgtcagcgacagacatccatgggggcctgtgtgcaccatcttaggtggagaaatgagcagcaacaatggatggaatggaccctgggctagatagaatctggcagtctatgtggcagaaatcagcaaaaacacgattgtaaaagcaaacaagtaattagagaaatcacgtgctgtcaggtcttggaatcaattagaaagagatgactagccagatggaattgcagcccaatcatgtgaacaggcaaaccgcaaaaaataaataaaattaccaataaatacatgaaaaattataatgttgttagtagttaaaatgcgaattaaaatacatgctgttttccctaccagacaagcaaagagtaaattaaaatagtagcccaggcttgcctggcagtggcagggaggtgtggctgccagggccttagaggttggcatcaggctgcccaccccagtcactgccagagcctcccacctgagtgttcctcccggcactggaagccagtggccgtccagaggaacgtgattgaattgctgtatatccatctggtggagcactgctgtgtgtctgttaaaaaagaaaccataggtttttagggatatgtaatgatatttagaaagggtttaagagacagtaaagcttggcagaataaaccgtgtatacagaatggatgtttgcttgcataaataaatttatataaatatgtctgggggataaaaataagtatatcacaatgctaagacaggcatatggggaatttaagcttttctttatacttgtccatagtttccaatttttaaatttgtaattttttatcagaaaaataaatgtgtaaatatagtggaatctttattaaaacattcacttttatttgctatttcagaagttactgctttgcttattttttacaacatttctgtggtaaataatcggtgacttacaagcctagtgcagccagtgatgggggttggcaaacggtgacatgcaggggccatgcggcgtctagtgtctgtttctgtgttgaatttgtgtagcaacagagcaagtatttctcctgaaactcagactcactcaggccacctcagcccttctagttcctttcgtttattatagagtaacctacagcaggaataccgcgttcatttactgttaatagaagatccacaaaagattttgaaatcaaatacattctaaaactaggcaagacacgctgcaactccccttgtcctctgggttatgaggggtgagcgttggtttccgtgtgctcagatcccatgaatgagacctcacagggaagcgcccagtgactggcaggctccttaatgcctccaggtcaggctcaggaagtctctggatgcctgggtagagtctgggtcttctcagagcgggaggcacccagggcctgtggaggcctgagggctgctctggggttccagggccccagatagtggcttagcatcctggtgacacagaagggagagcactcaccgcggtcccacgtgtgtgttttgaagcctaagatgtttgcaatgactctcaacagtcgctttgaccttttcccctagatctttagcagttaaggagtttttttcaaagcccaagtataaccacattttgaaaccagaagactgtctctctgaaccgtgcactatattgcagttggacatgagaaccgtgcaaatttctgatctagaggtgagaaaaagatgaattgctccttacattcgataatcagtgaccacgaaacactcagaccagagcctggcttatcaaaaaccttcagtgagtgctgggggtgtgagtgaataactaattattttattatgcaaataagtgaatttataaaacgtttgctactgattttttccagtcttttttcttttttacgttctattttgattctttcatattgtacaccattttatgtctccagcgtcttcattttagatttatgtttaatattctcagcatcttcaaaatcaaataaattatatttcgtttcattatggtaaaaaa

SEQ ID NO: 4673 - protein, 50 aa, Homo sapien
KPGNQPQVSFIGIILKDKRVRPHRGIPLSSEEEPVIETGNLEEPQKRYSE

SEQ ID NO: 4674 - DNA, 1243 bp, Homo sapien
caaggaagtggagtctagttttagggtgggcaagtcagcaattacaaaagtgcaattaggtttgagcagaggaagcatgagagcacctaggaaaggagtctttagcattgtcttaaatttcagttatattaattatacagtacccatctcttttccactcctgaataacatctaacatctagaaactttatgaaaatcattattgatttgagcatttttaacattaacttgttgccttagacaccaactctacaacattacctgtcatatactgaagaatctcttcttccagttatgcagcacctggctaagaatgtagtcatggtaaatcaaggacttacaaagcacatggtgagtcaatatagtggcattgtaagatgctgaaaagtgtaataattcaaacttaatgcctgcaaatgcctggtttatttttaatgagttaatgttttaaatgaatacctgtatcattgcatcttgtgattttttttcttttgcctctttaattgctatctttttgtcttccagactgtcaagaacaagtatgccacatcgaagcatgctaagatcagcactctaccacagctgaattctgcactagttcaagatttagccaaggctgtggcaaaggtgtaacttgtaaacttgagttggagtactatatttacaaataaaattggcaccatgtgccatctgtacatattactgttgcatttacttttaataaagcttgtggccccttttacttttttatagcttaactaatttgaatgtggttacttcctactgtagggtagcggaaaagttgtcttaaaaggtatggtggggatatttttaaaaactccttttggtttacctggggatccaattgatgtatatgtttatatactgggttcttgttttatatacctggcttttactttattaatatgagttactgaaggtgatggaggtatttgaaaattttacttccataggacatactgcatgtaagccaagtcatggagaatctgctgcatagctctattttaaagtaaaagtctaccaccgaatccctagtccccctgttttctgtttcttcttgtgattgctgccataattctaagttatttacttttaccactatttaagttatcaactttagctagtatcttcaaactttcactttgaaaaatgagaattttatattctaagccagttttcattttggttttgtgttttggttaataaaacaatactcaaatac

SEQ ID NO: 4675 - protein, 57 aa, Homo sapien
KEVESSFRVGKSAITKVQLGLSRGSMRAPRKGVFSIVLNFSYINYTVPISFPLLNNI

SEQ ID NO: 4676 - DNA, 2533 bp, Homo sapien
cgcagccctggcgcagacgcgtgggctccgtggcgatgcggggtgttgcctgaggctccactgaagctatggcataatttgcagaatttgcacttcattacttttctgaaattcaaacaaattctgaaactgcacgagttctggctgagagctgtggatctgtgcattttgatggtgacagtgcctacgtggggatgagtgacggaaacccagagctcctgtcaaccagccagacctacaacggccagagcgagaacaacgaagactatgagatccccccgataacacctcccaacctcccggagccatccctcctgcacctgggggaccacgaagccagctaccactcgctgtgccacggcctcacccccaacggtctgctccctgcctactcctatcaggccatggacctcccagccatcatggtgtccaacatgctagcacaggacagccacctgctgtcgggccagctgcccacgatccaggagatggtccactcggaagtggctgcctatgactcgggccggcccgggcccctgctgggtcgcccggcaatgctggccagccacatgagtgccctcagccagtcccagctcatctcgcagatgggcatccggagcagcatcgcccacagctccccatcaccgccggggagcaagtcagcgaccccctctccctccagctccactcaggaagaggagtcggaagtgcatttcaagatctcgggagaaaagagaccttcagccgacccaggaaaaaaggccaagaacccgaagaagaagaaaaagaaggaccccaatgagccgcagaagcctgtgtcggcctacgcactcttcttcagagacactcaggccgccatcaagggtcagaaccccagtgccactttcggtgacgtgtccaaaatcgtggcctccatgtgggacagcctgggagaggaacagaagcaggcctacaagaggaagacagaagcagcaaagaaggaatatctgaaggccctggcagcctaccgggctagcctcgtctccaagagctccccagatcaaggtgagaccaagagcactcaggcaaacccaccagccaaaatgctcccacccaagcagcccatgtatgccatgccaggcctggcctccttcctgacgccgtcggacctgcaggccttccgcagtggggcctcccctgccagcctcgcccggacgctgggctccaagtctctgctgccaggcctcagtgcgtccccgccgccgccaccctccttcccgctcagccccacactgcaccagcagctgtcactgccccctcacgcccagggcgccctcctcagtccacctgttagcatgtccccagccccccagccccctgtcctgcccacccccatggcactccaggtgcagctggcgatgagcccctcacctccagggccacaggacttcccgcacatctctgagttccccagcagctcgggatcctgctcacctggcccatccaaccccaccagcagcggggactgggacagcagctaccccagtggggagtgtggcatcagcacctgcagcctgctccccagggacaaatcgctctacctcacctaatcccgcctccctaccatccctgaggctcgctggaaggcactgctcagagcctgaagggctgacagcagaaaagaggccctggccagaggcagggtggcccatcggagagagcagtgacacacccattgcccgggggctgagtctcttcctcaacctcccaccagactctgcagaggcagcccactgcccaccaccagcccaaagaacctgcaggaaccttccgcccgctgacctgcttgctccagggtaactgtggaccctgtcctcgccctgcgcacggtaccctatgtctggacacccggccccagctccagccccagcccaggtgggccgcccctggcggggtcgcttaccaacggacacccaccccagatgcatgggccagagggccggcccccggcatagatgtgcacatcggttttccagtgtgaacaaaagattacgaaacctagaaactgttggttccgtgtaagtagttgactacgtgttttagaactgtgctgaagacatctgtaagactattttgtgggggaaaaaagtagtttcctttaaggtaaaaagcattttatatgatccttagcacatttttaagttttatcttaagggagacgcgcacaaaagcggctgccaaaccgtttcgtcatcctcacagcaaggaccggacgcttgctagccaccccggagcactgctctccttttaatcatgtattcatctattttaaattgccggcgacgacttttgtctatttatgaagaaaccttgagaacgaagttacagcttatcctaccgtgtgtgtggttttggggtttcgtttgggtttgggttcttgacgtcgtttgcagctgtttcctggccctggcgagtgtctgtcttggtgcccagtgcttctctcaaatctctttataataaaacttctgaaaagctgaaaaaaaaaaaaaaaaaa

SEQ ID NO: 4677 - protein, 464 aa, Homo sapien
MSDGNPELLSTSQTYNGQSENNEDYEIPPITPPNLPEPSLLHLGDHEASYHSLCHGLTPNGLLPAYSYQAMDLPAIMVSNMLAQDSHLLSGQLPTIQEMVHSEVAAYDSGRPGPLLGRPAMLASHMSALSQSQLISQMGIRSSIAHSSPSPPGSKSATPSPSSSTQEEESEVHFKISGEKRPSADPGKKAKNPKKKKKKDPNEPQKPVSAYALFFRDTQAAIKGQNPSATFGDVSKIVASMWDSLGEEQKQAYKRKTEAAKKEYLKALAAYRASLVSKSSPDQGETKSTQANPPAKMLPPKQPMYAMPGLASFLTPSDLQAFRSGASPASLARTLGSKSLLPGLSASPPPPPSFPLSPTLHQQLSLPPHAQGALLSPPVSMSPAPQPPVLPTPMALQVQLAMSPSPPGPQDFPHISEFPSSSGSCSPGPSNPTSSGDWDSSYPSGECGISTCSLLPRDKSLYLT

SEQ ID NO: 4678 - DNA, 2101 bp, Homo sapien
ggagggttttgctctttgtgtgggtgtgtgagtggctatgatcctagttgtccagctgctgcgtggagaataagtaaagcaggtctgaatgacaccaggtcgctgctgtcttgcggctgacattcaggtagagacgttcatcttcactgacggggaagatgaggccctggccaggcacacgggcaacgtggtcatcacaaactgctcggccgcccacagccgccaggcgctgtcctgcaagatggccgtggagtatgaccgcttcatcgagtccggcaggaagtggttctgccacgtggacgatgacaactacgtcaacctgcgggccctgctgcggctgctggccagctacccgcacacgcgggacgtctacgtcggcaagcccagcctggacaggcccatccaggccatggagcgggtcagcgagaacaaggtgcgtcctgtccacttctggtttgccacgggcggcgctggcttctgcatcagccgtgggctggctctgaagatgagcccgtgggccagcgggggtcacttcatgaatacggctgagcggatccggctgcctgatgactgcaccatcggctacatcgtggaggccctgctgggtgtgcccctcatccgcagcggcctcttccactcccacctggagaacctgcagcaggtgcccacctcggagctccacgagcaggtgacgctgagctacggtatgtttgaaaacaagcggaacgccgtccacgtgaaggggcccttctcggtggaggccgacccatccaggttccgctccatccactgccacctgtacccggacacaccctggtgtccccgcactgccatcttctagtggccatggctgagacccaatccctgggcgcccctggtatccaaagggcccagggaccctgttgcgctgccctggcctcggcattcgaggctcccctagggccgtgcctgtgcgtgtgcgtgtgcatgtgcgtgtgtgtgtgtgtgtactgcatgcccacccgggtagcaggctgctgggcagttctgctctgtggaggggcgggcaccagcgccacttatgtgcctctgctccgagggccagtgggctgcagggcctgcttggaggaaggatttgtgtgtcggaggccactccgagggcaattctgttaggatttttggatctttctacagctacggggctccgggctactttgcagggatgcgatgcgtaggtgcctttctcttcctgctgaccacaagctctgtgctgggggtacctgtgccctgaagtcctggcccctgtgtcatagccccaagtacgactcactgagccatgctcattgcaggggaggctgggtctgggggtgcgtgacccaatccccttcctcctggcctggacgctgtggcttaagagtaacagcagccaccgcccagttccagtggccccacgaagcccccagtggctggctgtccagctgggcaaacagtggcacccctcccagctcttctgagtggggagtcttccaggcctcctcagaggtcttccctttgcctccccaggacagggtgagtcagagctcagcatttaatctcctctccaaagtagagagcaagtcgcccacagtgggcgtgtctgtaaatattgtgacagtatttttttactgtgctgttttttttgaaaggggatgggtaaaaagtagggtgttcttgttttttgcttgggagggtgggggtgggggagggtcttattttatcttatcttttctgtggatcagaaaaaacagaagccaaactcggggtcatctttgtttttaaagctgaagtgggactgtctggcactctgtgtatttatgcgttccagcatctggaacctcccatccctgccctcctcctgtgtagctgccacctccccgctgggcccagcatggctcacctgtcccgtgggctgtgtttcttgttgtttttctctttgcaaagacatagctaggaaagcgaatgataagggaaaagttctcagggaattgaagtgttgttgctatggtgacgtccttttgctgtgaataaaggtgctctttgcagcaaaaaaaaaaaaaaaaaaaaaaaaaaaaaaaaaaaaaaa

SEQ ID NO: 4679 - protein, 250 aa, Homo sapien
MTPGRCCLAADIQVETFIFTDGEDEALARHTGNVVITNCSAAHSRQALSCKMAVEYDRFIESGRKWFCHVDDDNYVNLRALLRLLASYPHTRDVYVGKPSLDRPIQAMERVSENKVRPVHFWFATGGAGFCISRGLALKMSPWASGGHFMNTAERIRLPDDCTIGYIVEALLGVPLIRSGLFHSHLENLQQVPTSELHEQVTLSYGMFENKRNAVHVKGPFSVEADPSRFRSIHCHLYPDTPWCPRTAIF

SEQ ID NO: 4680 - DNA, 2191 bp, Homo sapien
gggcgttgctgacagtgtggagagcagtggctgggggaaggggcttagtgaagtgtgcacccagaggggtggagaggagatgtctgactgagggccatctgaggtcacggtgcatcctgaggacagagctgagattggatatcaacgatgtgggctcagcagccctggagtaggagctgggaaggtcagtgccttggtggcggcagggccagggcactgagagtattggcagggcacagcaggggaaagggaagagaagcagagggtgggactctccctctgtgctggaagagggctaacaccagcccggactctccactctggctaggccaagggggccctctgtcctctgtgttgccctagggctcggtgacctctgtcatagcactgaccacatggtatcctgcctgtgccttcctctagctgtccccgccctactccggaccgccccaaagactccatgggatggacctgagtcagccgaatcccagccccttcccttgggcctgctgtggtgctggacatcagtgacagacggaagcaggagaccatcaaggctacgggaggcccggggcgcttgcgaagatgaagtttggctgcctctccttccggcagccttatgctggctttgtcttaaatggaatcaagactgtggagacgcgctggcgtcccctgctgagcagccagcggaactgtaccatcgccgtccacattgctcacagggactgggaaggcgatgcctggcgggagctgctggtggagagactcgggatgactcctgctcagattcaggccttgctccaggaaacggggaaaagtttggtcgaggagtgatagcgggactcgttgacattggggaaactttgcaatgccccgaaggacttaactcccgatgaggttgtggaactagaaaatcaagctgcactgaccaacctgaagcagaagtacctgactgtgatttcaaaccccaggtggttactggagcccatacctaggaaaggaggcaaggatgtattccagaatccatagaggttcagctggcgaatgaaactcgtcaagttgtctgttttgaagatcctctctgcacctttccgttgaagaacctccctctggaagagatccttgtcgatgatcacggcgtctccatcatcgttccagctcacagacttgaatgtgtcttcctccacaatcgtccaaagctttcttgggaaggagagcctaaaaaggttgtggttgtcttccacgttgaccacgcgttggtttcggtcttctggtggtgagttatcttgggagcctggatcttggctcatggcttggtcctcgtgcctgtccaaaacctcgctggaatctggatttggatcaggtgaagaaccagatgggcccccgcttgttggctctccaccaacagatggggccagcttggcttcatattcctgttcagtgttctgactcgccatggagctacaccagaatcaggagcattttgtacccaaggcccttatcactgtcctagcaagtccaaaatgccttcagtcagagtaggcgtgcccaataaatactgtccacaaaattctagagtctcggtatcagggcaaccagtggcttaactcatcatctgctgtatttgtcgcatgatgtcacaaaggtggctctcagccaatctggagagggggccctggccaggtgttgggggagtagacaggtggcatggccttcagcttctccctcttctaaaagtataaacaggcatggttcaagttcccagaaaagtctcccatcttctgacagtcacattgtgtcaaagggccaggccccagatgagctgagaaaccatggctctatggccactcccaaccctgaagacaggggaggccatttgctggcctctaatttgctcaagagccagcccctagttatccctagcttgggtttcaccaagactgcctgactcagatggacccctcatgggtgactgccttctaggagatggtggtccctaccaggctgtttggcctgatctgtgtggtagcacccctcttttccaatccccccatctcctttctgctttggtctcttccaggtactcctaatgattggttgcatgtgctccagtgggcccagataaagtgtttcttattccccttggtcaagttgtccccagagtggtgctgtgcctgagcatggtgggagc

SEQ ID NO: 4681 - protein, 56 aa, Homo sapien [sequence omitted]

SEQ ID NO: 4682 - DNA, 1249 bp, Homo sapien
cttctcattagcattaactagttatgcccagcttgggagagccttctttgggcttatcatttattataagcccagaaataggtgactaatcagagataaatgtatgggttgtctgtatctagttttatgcctttttttttgcctaagacgtagtcaaattaatattttaactaatacatcttagcagagtttagttaagcacaaagttaacagtgggtaggattgaatcttgaaagtaatcatgtctgtaatgtttttcatgcatgcaaaaagcacagacaaaaccactcatgccctattaataaacaaaatacagatcaaagttttcaaaagtaatcactctatttattctaaatgtctgtggctttaggaaaataccaccagctagtacttacctatttaaagatgtagaatttattatcctctaatattcttatcagttgtttccacaactttagtttactattggactttcaaaaatttaaagaattacaagtaaaattcattaaacacttgtgtgtgaatagtaatacacagtaattagtacagcatgttgcttcttcaacaaattgagttttcagggaaatcagcaagtaaatgaaatataaatttttggtaaaagtatcaaacattcatcttgcccatttttcctcttaaactttattatctaatcaaacatagttttccataagatgtaataaaatatagataaggttggaatatttgaggatccatttgtggaactgaatttaatgagacttcattggtgatacactcaatttttactgggtaattagctaataatgttggtcactgtctcacagttcaagtagctttaagatgatgtggcaaggaaaacacaaagcttttgggtaaccagcgttcttaaatgtatggtttttgaccaggtgaaccctttagaagtgatttctgttttaaaagtatgtacttaaaatacctttggctgtgatgaatgtagatcccagcagaataccaaaatcctattttttttgactgagtatttgtagatgcttaatgactgaaatgaatttggaggcactgatgaaagtgatttttttaaagttctcaggtactgttcaattatttaatgttaagtttagtatcaagatacagttgtttttaaaatgccaaaatgctgtttattatacagaatattttattacatttgcaatatctttgtatatagtgatttttttcttgataataaatggaaaaattctaaaacaaa

SEQ ID NO: 4683 - DNA, 2938 bp, Homo sapien
  Unsure 1299-1507, 2016-2062: Unknown base
cgggcgatcagaagcaggtcacacagcctgtttcctgttttcaaacggggaacttagaaagtggcagcccctcggcttgttgccggagctgagaaccaagagctcgaaggggccatatgacactcctcccggacccctggacacacacagccctggagactggagccttggagcatggcaagtccagagcaccctgggagccctggctgcatgggacccataacccagtgcacggcaaggacccagcaggaagcaccagccactggccccgacctcccgcacccaggacctgacgggcacttagacacacacagtggcctgagctccaactccagcatgaccacgcgggagcttcagcagtactggcagaaccagaaatgccgctggaagcacgtcaaactgctctttgagatcgcttcagctcgcatcgaggagagaaaagtctctaagtttgtggtgtaccaaatcatcgtcatccagactgggagctttgacaacaacaaggccgtcctggaacggcgctattccgacttcgcgaagctccagaaagcgctgctgaagacgttcagggaggagatcgaagacgtggagtttcccaggaagcacctgactgggaacttcgctgaggagatgatctgtgagcgtcggcgcgccctgcaggagtacctgggcctgctctacgccatccgctgcgtgcgccgctcccgggagttcctggacttcctcacgcggccggagctgcgcgaggctttcggctgcctgcgggccggccagtacccgcgcgccctggagctgctgctgcgcgtgctgccgctgcaggagaagctcaccgcccactgccctgcggccgccgtcccggccctgtgcgccgtgctgctgtgccaccgcgacctcgaccgccccgccgaggccttcgcggccggagagagggccctgcagcgcctgcaggcccgggagggccatcgctactatgcgcctctgctggacgccatggtccgcctggcctacgcgctgggcaaggacttcgtgactctgcaggagaggctggaggagagccagctccggaggcccacgccccgaggcatcaccctgaaggagctcactgtgcgagaatacctgcactgagccggcctgggaccccgcagggacgctggagatttggggtcaccatggctcacagtgggctgtttggggttcttttttttatatttattccttatactattattcagttattctggaggacagtcttgcatctgtcacaccatgactgaagtgcaggtggcgtcacattatgtnnnnnnnnnnnnnnnnnnnnnnnnnnnnnnnnnnnnnnnnnnnnnnnnnnnnnnnnnnnnnnnnnnnnnnnnnnnnnnnnnnnnnnnnnnnnnnnnnnnnnnnnnnnnnnnnnnnnnnnnnnnnnnnnnnnnnnnnnnnnnnnnnnnnnnnnnnnnnnnnnnnnnnnnnnnnnnnnnnnnnnnnnnnnnnnnnnnnnnnnnnnnnnnnncacacagtgtgagccaccacccctggcctggggttcatttttaatgggaaaagccactgggggctctaactcgctgggtgactttggacaagcccctcctctggtcctcaatttctccatctgtattggacagaggtgctcctgggaccccttggaagcctctgcttgtgtcccacgtcctcttgatgccagggccacttcatctccaaaacacaaaaccaactgccaaaaccgtccagagcagtgtccaccccaccagtgtctttgtgggaagctggagaagaagtttacctcacacattctagacaaaacttagtccatttccttgaagacagttctctccagctgctccaaggcttttctctctgttccttccaccttggaattgctttaaaatatttccatccattatcctaatactatcttagtattctagcccttcccccttaccatgtagacctgacaaagcaaaacaaaagctcacctattgccctcaagaacagcctctnnnnnnnnnnnnnnnnnnnnnnnnnnnnnnnnnnnnnnnnnnnnnnncacggtgggagttgtatgccatccttttgaagggtgggaggaccctggaccagaaagcaataatggcataagattctgtgataccaggcatttttggcaagggaagttgccaacaatttttctggctgggatggcatagcacattgtctaggggtggattttcattcataaggcagctgttccctgaatggcttccctgggttatgtagaaacagcctggggaggaggtgatacaacatacttaatggggcctctgggcagaaaacagactgaatcctcaacactgccccttttgagggtctgtgatcctggaacttctctgatggactgggatgcccttaactgaggtctgctgtctggaaaggacaccacaggcccagaatgaaggggcatctggaccaatgacctagattcaacacagggcttggagctggtggtacaggctggttttggcccaatgtgtgttggaggctggaagcccctgaagacctaaactgcctggatgagcttattagggtgaattaatgagtctgtaatttgggaaccttaatgtgagacaccacttaaggagaggaacttggcccagcaagtgatcactctagaagtggacagctatgcactagactgcaccagaatctgttcaacagcgacaccttgtggtaaaaactgtagacgccccatcaggctggatgggaaactagaaacagactgtctcatctttggacagatatccctcaaatctcccaatctactccagggaaaagacacttcaagtgagagatattggacttcttgaaaatctaggcctatggaaaattaaagtgttaaatggaaaaattaaagagctatgagtctatttgtaatgatgaaacagaa

SEQ ID NO: 4684 - protein, 316 aa, Homo sapien
  Unsure 1299-1507, 2016-2062: Unknown amino acid
MASPEHPGSPGCMGPITQCTARTQQEAPATGPDLPHPGPDGHLDTHSGLSSNSSMTTRELQQYWQNQKCRWKHVKLLFEIASARIEERKVSKFVVYQIIVIQTGSFDNNKAVLERRYSDFAKLQKALLKTFREEIEDVEFPRKHLTGNFAEEMICERRRALQEYLGLLYAIRCVRRSREFLDFLTRPELREAFGCLRAGQYPRALELLLRVLPLQEKLTAHCPAAAVPALCAVLLCHRDLDRPAEAFAAGERALQRLQAREGHRYYAPLLDAMVRLAYALGKDFVTLQERLEESQLRRPTPRGITLKELTVREYLH

SEQ ID NO: 4685 - DNA, 935 bp, Homo sapien
gcaggttccgggaggtcaggttgtattcctggcgggtcgtctggctgggtgggccccggaggtcgtggctcgggagcagggaggcgtaggggggccggcctgctgtgatgacattccaattaaagcacgtgttagactgctgacgcgggtgatgcgaactggagtctgagcctgcccgagcggagctgggagggggctggcgggcgggcgcgcgcacacccgctgatctatcactctcgttcttgtagctcccagccgaggacgtcggatgtcatcgtccttgctgctttgccaccccattcccgtcaataaagtggtttgaacccaaccctggtgtcggtgtgtgtcgttggcgacgcgctgtctttgagcccccgccgagcttcctcgtggcgccgggggtcaatctgcagcgctagagcatgtgcttgcgcataactggggccgcctggcctcccgcgggcggcctttttaaccgcgagcgacaagaagtaacctgactgtccggctgctaggctgggcaattttccagctgttttgccacgacaggcctcaatccgtaataccaaggctggaatggcgtgttaggggggcggtggctgacggggatacgcggactcttgatgcgtaaggagtgcccctctgctcccatacgttccccagcccagccttccctgagtgtatcgcgcgcgctgtgccttcgccgtgagttcgacataagtcccaggctgtcgcgtctgccatcagacgcgcagatttagttgaaggcagcgtggaatggcgtctgcagggctgttgtgtacttgacataaacagattcggtgtggaactgcattgagttaactcctgactaaagggtaatcgacctgtttacaaataaccatgcaggagtactgacaagcatgggactaaagcgttgggcaggttcatctgtc

SEQ ID NO: 4686 - protein, 55 aa, Homo sapien
QVPGGQVVFLAGRLAGWAPEVVAREQGGVGGPACCDDIPIKARVRLLTRVMRTGV

SEQ ID NO: 4687 - DNA, 901 bp, Homo sapien
cttgggggcatggcacagagctggtcctgtattctccagggtccggagctggccaggggagggaagggcgttagataaggcactctgggctgtcaggagactgcctactgggtgggtcaacttatttcccactatgacatttatatctttatttttcacaattatattgaaggcagtgggagaggggagagggtgggttttacctgatattaaggggtggcaccccttccccaggcctgatgcaggtccatctagacagctcagattagcctaggccatgccctagggacacggcctaggggagctgggctggagggggtctgcctgggtaaggggatctggcttggccctgagctgcttagggacaggtgagtccttgggggcatggcacagagctggtcctgtattctccagggtccggagctggccaggggcggggaggaggaggatggcttctcctgggagaaggtgggctggcctttcttggcaagcggtcctctggcccctggggagtggggtgggtgaggctgtgccttgtagggggagaggggagggggctttgtgtgcaccattctgtaaaacacactcaagattctaagactattaaagaggatttataacagtctagtctggaatggtagggatgctgcttcctggggcaggggaggacccagggcagagggtgtgagcagagtggctgggtctgctggagactgctggacccctcactgctctgccctccccgcaggcatctgcttctgcagcctgaaccttaggaccgtgatgggccaggctctgatgggcctgcctgcatgccggggtgcctggagtttgatttggtgctaagagaggtatagattgtacctctcaattcctgcttctgaaacgtggggtaggaggt

SEQ ID NO: 4688 - protein, 90 aa, Homo sapien
LGAWHRAGPVFSRVRSWPGEGRALDKALWAVRRLPTGWVNLFPTMTFISLFFTIILKAVGEGRGWVLPDIKGWHPFPRPDAGPSRQLRLA

SEQ ID NO: 4689 - DNA, 1110 bp, Homo sapien
attttatagtcttcggggaaaaccggctgtggagaaggaaatagggcccggcgctgagtgagcgtggttgcgtgtcctttgcagacactttctggggcgaggtgacatggcgagagtcttggatcggtggacgtagacggtagacagttcgcgtgcgtttccttcgcctacttggcctacatgccttctgcccgtgaagcgatgtttcccctcgaaaggccgtaggctacgccgtcagaatcggtttttcagtgagttttgacccctccgacgctccgtcgcctgacagaatcgcggcgttcttcgtacccgcccatcctccgcggacgcccgctgccatggcgactctgctgcgccctgtcctccgtcggctctgcgggctcccgggcctacagcggcctgcggcaggcaagtggcgccgggttctgggcgcaggcgggaaggagcctgagggcgcccggctcctctgacctcggcctttttcttgccccgcagaaatgcccctccgggctaggagcgacggcgccggcccgctatactcgcaccacctccccacctccccgctgcagaaagcgctgttggccgccggctccgcggcgatggcgctctataacccctaccgccacggtaaggccgcccgcgcctcgcccccgtggggggcggcttggagccgtttcctgtgggtaactggaacatagcctaggtcggggtacccaaacctggttgcagctcgtaaccactcggaacgtttatgaaaatgcagattcctggatcccacctaaacgcactgaatctgaatctgaatctgcagtggagggagaaatgggcgtgaaaccgaaagtctgtctttaaactacttgggagaatctgtcatgcagccatattgagaacatctagactaaatagatgattcataagtaccgatcagtttataatatcctactagaaagtcaactccgaggtcgaggaccatgtctgcctcgttccactgcatctgcagccttctggatagtgcctggcacatagttcagcgtctgacgtcagacgctgaactatgtggtgagaccaagagacaagcagatgctgctggagacaagccatccatgcctg

SEQ ID NO: 4690 - protein, 46 aa, Homo sapien
MSASFHCICSLLDSAWHIVQRLTSDAELCGETKRQADAAGDKPSMP

SEQ ID NO: 4691 - DNA, 2059 bp, Homo sapien
gcagtgatataaatatatttttttcttagactaaatatgagctgactatctcttttgatgtgtgtacataggtgtgagtgtgtgtgtatgcgtgcctgtctgtgtgcgggtgtgtgtatgtgcatagcctcatgcttaggactacccatgaatgttgtggaatgctacacctggagagttctggttttccaccagtttcaagatgaagaactacatgatacagtggacctggagaccatccccttggaaagacaacccagagatgttcagcatcctgtatctacacgcatcctgtatctacacgtgtattttgtagctgtcacactaaccttaataagaattctacagctttggacagaggcattttcaccttaatggtgaagtaatttaaaatataaatccattcaggtgacaacccatcatcaaaattacaaattttctgattgaactcatctgaatcatcagttccttgatggagagagagaaggagatggaatgtgtctggtaaccccaaatggagtacaagtagcctttgttttcctgcataaatggacttgttgaatgcgaacgaatatatgcaattcatatacttttggagatgaacgtagatatgtgtgtcagctttgagatggtgtgtcctggattaatactttgtctcccaatatcacagaaaaatacatgccagtgactcttgaggttaaggtagttgggatgaaatggcctcaggcaatttcacattccctaattacctggaaagttctacagtaattaatatgcagctaactcctgttgccctcacaagagcatcagccttctagaatcggagctccggagtgtgaagattcagtattgatatgatatgtataccaaactccagccaacttactgccatttttcataatctgagtggctgccttgcttatcctaagctgtggttgcagaaaccgtggccatttatataagctataacatcaaatcagggaaaaatgaggaaaaaaaatagattctgaaccatttattgttgaataagtagagaaaatcatcaataaatatttattacattctgacagggtgtgtggcattgtgttctatgccagagtgacaaagttgattcacccctttttggggaccttaatatattttttaagggatgtgcctatgcattgatgcctgaaaaatatgtataaagaaatgaggttgactcttctgagcagttcatcttttccagaggtaagggtaggaggccaacttcaggatctgggtctaagcccgtgggcaagccctggccgagtgagctccaatgctaactcatgtgccgatctctagagcagtgggaaactaccccgctgcaccaaatcaagtagcttcaccttgtgtatgcaggccccaagttattttttagcaatcttacgagtgaaatgttctggtgggttgaaaaacgttcttattttaaagaaaggttgtgctcgctacactgctggtgtgtgcgttctgagacctcttgtattcaatctgtgaaggatatgtgtattaatccgtacacccgtatagcctcaatatttgtctgaagacacttaaattctgacccataaaggaaagttctagaagcaatattttcacttatttaacattctccaaacaacatcaagcattgatacacactgaagagtgcgtttattttttgtatcactctaagtatgttggaatatgcaaggactgtggttcaaattagaatgtataaggcatattataatttagttcatactgaaaaagaaattaacagaacattgttcggttcacacgttccaaaatttgagtgatttctggagttagacatagattttctattttgttttaatttgtcaaggtatttttcttcccttcatgaactttaggtacacataacttatgtcatttatttatggtcttttatacctagtttgtaaaattgtaaaatagcaaactaaatgcaaagagtttgcatttgaaaataataaagtagttaccgtatacaaaaaaaaaaaaaaaaaaaaaaaaaaaaaaaaaaaaaaaaaaaaaa

SEQ ID NO: 4692 - protein, 105 aa, Homo sapien [sequence omitted]

SEQ ID NO: 4693 - DNA, 4675 bp, Homo sapien
cagtagcatcgcccatttgccattcactgcagtagcaaaagtagtactctgtggtgggttaatcggtttgaggcagctccttaaatgaacatttgtgtttcatttttctgttattttcccgaacatgaaaagacgataaaactgaaatggaaaagatctattccagaggggagcttcaccacttcattgacggctttaatgaagagaaaagcaactggatgcgctatgtgaatccagcacactctccccgggagcaaaacctggctgcgtgtcagaacgggatgaacatctacttctacaccattaagcccatccctgccaaccaggaacttcttgtgtggtattgtcgggactttgcagaaaggcttcactacccttatcccggagagctgacaatgatgaatctcacacaaacacagagcagtctaaagcaaccgagcactgagaaaaatgaactctgcccaaagaatgtcccaaagagagagtacagcgtgaaagaaatcctaaaattggactccaacccctccaaaggaaaggacctctaccgttctaacatttcacccctcacatcagaaaaggacctcgatgactttagaagacgtgggagccccgaaatgcccttctaccctcgggtcgtttaccccatccgggcccctctgccagaagactttttgaaagcttccctggcctacgggatcgagagacccacgtacatcactcgctcccccattccatcctccaccactccaagcccctctgcaagaagcagccccgaccaaagcctcaagagctccagccctcacagcagccctgggaatacggtgtcccctgtgggccccggctctcaagagcaccgggactcctacgcttacttgaacgcgtcctacggcacggaaggtttgggctcctaccctggctacgcacccctgccccacctcccgccagctttcatcccctcgtacaacgctcactaccccaagttcctcttgcccccctacggcatgaattgtaatggcctgagcgctgtgagcagcatgaatggcatcaacaactttggcctcttcccgaggctgtgccctgtctacagcaatctcctcggtgggggcagcctgccccaccccatgctcaaccccacttctctcccgagctcgctgccctcagatggagcccggaggttgctccagccggagcatcccagggaggtgcttgtcccggcgccccacagtgccttctcctttaccggggccgccgccagcatgaaggacaaggcctgtagccccacaagcgggtctcccacggcgggaacagccgccacggcagaacatgtggtgcagcccaaagctacctcagcagcgatggcagcccccagcagcgacgaagccatgaatctcattaaaaacaaaagaaacatgaccggctacaagacccttccctacccgctgaagaagcagaacggcaagatcaagtacgaatgcaacgtttgcgccaagactttcggccagctctccaatctgaaggtccacctgagagtgcacagtggagaacggcctttcaaatgtcagacttgcaacaagggctttactcagctcgcccacctgcagaaacactacctggtacacacgggagaaaagccacatgaatgccaggtctgccacaagagatttagcagcaccagcaatctcaagacccacctgcgactccattctggagagaaaccataccaatgcaaggtgtgccctgccaagttcacccagtttgtgcacctgaaactgcacaagcgtctgcacacccgggagcggccccacaagtgctcccagtgccacaagaactacatccatctctgtagcctcaaggttcacctgaaagggaactgcgctgcggccccggcgcctgggctgcccttggaagatctgacccgaatcaatgaagaaatcgagaagtttgacatcagtgacaatgctgaccggctcgaggacgtggaggatgacatcagtgtgatctctgtagtggagaaggaaattctggccgtggtcagaaaagagaaagaagaaactggcctgaaagtgtctttgcaaagaaacatggggaatggactcctctcctcagggtgcagcctttatgagtcatcagatctacccctcatgaagttgcctcccagcaacccactacctctggtacctgtaaaggtcaaacaagaaacagttgaaccaatggatccttaagattttcagaaaacacttattttgtttcttaagttatgacttggtgagtcagggtgcctgtaggaagtggcttgtacataatcccagctctgcaaagctctctcgacagcaaatggtttcccctcacctctggaattaaagaaggaactccaaagttactgaaatctcagggcatgaacaaggcaaaggccatatatatatatatatatatatctgtatacatattatatatacttatttacacctgtgtctatatatttgcccctgtgtattttgaatatttgtgtggacatgtttgcatagccttcccattactaagactattacctagtcataattattttttcaatgataatccttcataatttattatacaatttatcattcagaaagcaataattaaaaaagtttacaatgactggaaagattccttgtaatttgagtataaatgtatttttgtcttgtggccattctttgtagataatttctgcacatctgtataagtacctaagatttagttaaacaaatatatgacttcagtcaacctctctctctaataatggtttgaaaatgaggtttgggtaattgccaatgttggacagttgatgtgttcattcctgggatcctatcatttgaacagcattgtacataacttgggggtatgtgtgcaggattacccaagaataacttaagtagaagaaacaagaaagggaatcttgtatatttttgttgatagttcatgtttttcccccagccacaattttaccggaagggtgacaggaaggctttaccaacctgtctctccctccaaaagagcagaatcctcccaccgccctgccctccccaccgagtcctgtggccattcagagcggccacatgacttttgcatccattgtattatcagaaaatgtgaagaagaaaaaaatgccatgttttaaaaccactgcgaaaatttccccaaagcataggtggctttgtgtgtgtgcgatttgggggcttgagtctgggtggtgttttgttgttggtttttgttgctttttttttttttttttttttaatgtcaaaattgcacaaacatggtgctctaccaggaaggattcgaggtagataggctcaggccacactttaaaaacaaacacacaaacaacaaaaaacgggtattctagtcatcttggggtaaaagcgggtaatgaacattcctatccccaacacatcaattgtattttttctgtaaaactcagattttcctcagtatttgtgtttttacattttatggttaatttaatggaagatgaaagggcattgcaaagttgttcaacaacagttacctcattgagtgtgtccagtagtgcaggaaatgatgtcttatctaatgatttgcttctctagaggagaaaccgagtaaatgtgctccagcaagatagactttgtgttattctatcttttattctgctaagcccaaagattacatgttggtgttcaaagtgtagcaaaaaatgatgtatatttataaatctatttataccactatatcatatgtatatatatttataaccacttaaattgtgagccaagccatgtaaaagatctactttttctaagggcaaaaaaaaaaaaaaaaaaaaaagaacactcctttctgagactttgcttaatacttggtgacctcacaatcacgtcggtatgattgggcacccttgcctactgtaagagaccctaaaaccttggtgcagtggtggggaccacaaaacaaccagggaggaagagatacatcattttttagtattaaggaccatctaagacagctctattttttttttgccactttatgattatgtggtcacacccaagtcacagaaataaaaaactgactttaccgctgcaatttttctgttttcctccttactaaatactgatacattactccaatctattttataattatatttgacattttgttcacatcaactaatgttcacctgtagaagagaacaaatttcgaataatccagggaaacccaagagccttactggtcttctgtaacttccaagactgacagctttttatgtatcagtgtttgataaacacagtccttaactgaaggtaaaccaaagcatcacgttgacattagaccaaatacttttgattcccaactactcgtttgttctttttctccttttgtgctttcccatagtgagaatttttataaagacttcttgcttctctcaccatccatccttctcttttctgcctcttacatgtgaatgttgagcccacaatcaacagtggttttattttttcctctactcaaagttaaaactgaccaaagttactggctttttactttgctagaacaacaaactatcttatgtttacatactggtttacaatgttatttatgtgcaaattgtcaaaatgtaaattaaatataaatgttcatgctttaccaaaat

SEQ ID NO: 4694 - protein, 691 aa, Homo sapien
MEKIYSRGELHHFIDGFNEEKSNWMRYVNPAHSPREQNLAACQNGMNIYFYTIKPIPANQELLVWYCRDFAERLHYPYPGELTMMNLTQTQSSLKQPSTEKNELCPKNVPKREYSVKEILKLDSNPSKGKDLYRSNISPLTSEKDLDDFRRRGSPEMPFYPRVVYPIRAPLPEDFLKASLAYGIERPTYITRSPIPSSTTPSPSARSSPDQSLKSSSPHSSPGNTVSPVGPGSQEHRDSYAYLNASYGTEGLGSYPGYAPLPHLPPAFIPSYNAHYPKFLLPPYGMNCNGLSAVSSMNGINNFGLFPRLCPVYSNLLGGGSLPHPMLNPTSLPSSLPSDGARRLLQPEHPREVLVPAPHSAFSFTGAAASMKDKACSPTSGSPTAGTAATAEHVVQPKATSAAMAAPSSDEAMNLIKNKRNMTGYKTLPYPLKKQNGKIKYECNVCAKTFGQLSNLKVHLRVHSGERPFKCQTCNKGFTQLAHLQKHYLVHTGEKPHECQVCHKRFSSTSNLKTHLRLHSGEKPYQCKVCPAKFTQFVHLKLHKRLHTRERPHKCSQCHKNYIHLCSLKVHLKGNCAAAPAPGLPLEDLTRINEEIEKFDISDNADRLEDVEDDISVISVVEKEILAVVRKEKEETGLKVSLQRNMGNGLLSSGCSLYESSDLPLMKLPPSNPLPLVPVKVKQETVEPMDP

SEQ ID NO: 4695 - DNA, 4060 bp, Homo sapien
agcggggggggagggggggccgacttcctggggccgcccgtgaggatgtcgcgaccgcccccgggtgcccctcagccccagagacgccgccgcggcggagtccgcagcctccctgcctgaggcgtccgcggccgggatccggcccctcccctcgcctcctctcctaggtgccggccgggagggcggccgcagcagattttatcatgtgggcaacctgctgcaactggttctgcctggatggacagcctgaggaggtcccaccaccccagggagccaggatgcaggcctattccaaccctgggtacagctccttcccttccccaacaggcttggaaccaagctgcaagtcctgtggggctcactttgcaaacacggccaggaagcagacctgcttggactgtaagaaaaatttttgcatgacctgttcgagccaagtagggaatgggccccgcctctgccttctctgccaacggtttcgagctacagcctttcagcgagaggagctcatgaagatgaaggtgaaggacttgagggactatctcagcctccatgacatctctaccgaaatgtgccgggagaaaggagagctggtgctcttggtccttggccagcagcctgtaatctcccaggaggacaggactcgtgcctccaccttgtccccagactttcctgagcagcaggccttcctgacccagcctcactccagcatggttccacctacctcacccaacctcccctcttcatctgcacaagccacctctgttcccccagcccaggttcaggagaatcagcagtctattgactcagaggacagctttgtcccaggccgaagggcctctctgtctgacctgactgacctggaggacattgaaggcctgacagtgcggcagctgaaagagatcttggctcgcaactttgtcaactacaagggctgctgtgagaagtgggagctgatggagagagtgacccggctatacaaggatcagaaaggactccagcacctggggggagcagtaccatcaggcttggaggagaacctgtgtaagatctgcatggactcacccattgactgtgttcttctggagtgtggccacatggtaacctgtaccaagtgtggcaagcgcatgaatgaatgtcccatctgccggcagtatgtaatccgagctgtgcatgtcttccggtcctgagagcttgcatcggtttcttcagtgccttacagggaaatagcctggggtgtctgggctcagggttggccagcttgcagaggagcaagctagtagaaatattgcagggttcccaaaaccaggtcaagcaagatgccatgtcacccctgagcatgcctgtcttcccaggggtgtacctcttggctggcaaagcccaaggccagtgggaacttgtataaatcacatgggtatgttcttggttcagtgatcttggagtgatgatggtaactgatgaacagagaactttccagaacttgggtcctgtcttcctccctgaacctagacagtttcacccctcctcctgtacccaacccatccccaccccatatgggagatgcttgcccatgtgtttcatcaatcagaagtcctcctccccagcacattcggatttaaatttctggtctctccggctttctgtgctttaactatctttgctaaagtctcttgctacattgcctaaatccatttgtttctttggaccaaaaatgttagtttaccagaccgatagtggtccttaggacagattttagaccagtaaacttatctttggtgagaaatgaaatacaaatgctatagaaaaatttcaaagttgttaaaagccacttcattaaatgctgggattggaagctgttggtctcctgacctgactctgggagccaacaaaacatcaggctcccaaactgctgggaaatttgtttctgtctgcaagggatagtgcgtgcataatccctgctgctgcttctcttgggacctgatttgcaccatccttagtttatgcggaaaggggaagcaatgggtggaggcagtggccttctccttaattttggcttggcttctgatccttttcccaactagaagtcttaagccacttttcgctgaaaatgaaatccctcccttatccatggtagttttaaatttggtttcattgaagaaatagatttaggcaaagagcctgtgctcttctctggccagactgctgttgaagttcctggagagcaaatgttaagacagagcacttaagagctttcaggaggtactgaatgagactggattctgttgtaagccgacagttcaagtctttatttcccaggttggtggggagtgaggagaccctactttcattccctttcctagcccactgatttttgggggcaggtcagggagaaagcatttttttttttttttttgagtctcactctgttgcccaggctggagtgcagtggtacagtcttggcttactgcaacctccacctcccaggttcaagctattctcctgccttagcctccagagtagctgggattataggcgcccaccaccacaccaggctaatttttgtatttttagtagagacggggttttaccatgttcaccaggctggtcttgaaatcttgaccttatgatccgcccgcctcagcttcccaaagtgctgggattacaggcgtgagccaccacacccagcaggagaaaccattttctaggctctttaggaaggaccatgcaatgagtaggtgatgtatttgagccctcacagtctttacacccctagaggagctggaggacttaagagtttgctgcagaagcgtggccaagcacaaaacacatgatcaggaaagcagagtgttttcccattaccaatggatgaactatgcaaaccctaaacgccttggcagacacctcccaccccttacccctcccatgcagctgaaaaatctgagactagaaccaatcatgactctggatggcagagggaaacctctaaagggacttattacattggtacagacatatttatgctttcttccatcaccaaccactaaacccctttggaggaatgaaataactgcataaactagtcaactgaacactgggccacttacctcaatgttatacaaagtcctggatgatttgattctgaaccacagcctttgcaggagttgggggaatcagatttgctcatgaagacatccctttccacttttgtcatgggcagtaaatactatagtttacaatgcctaccaattagcaaaggatcattccttcagctactcagttcctctgtaaaacaggtctatgtatgtgcaattcagctaagatctagcagtaacttaagggcagaagctggctctctacttacaacctgctttctctgctgaagccttacctcctcttcagtttccctcctagacacaaatcgaaaataatatactgatagctggttagtaacctcagtaagaattaaaactgaggttgtttactcattttgcctttaaatcttttatccccttttggtgaaggtttccctttaggaaaaaaggtgtcaaacaaccctgattttttttttttttgcatcatttttattacaccaaattaaagttgggagttccaagatcccattccagttaatatttaaccaaggtctaaaatttgattttttttaaatctttgaatcctcccttctgcccctcatggatccttggttttaatgatatggaaacatctaattcttagaattattccgtagcttttgctgattactctgagatttcagttaggacttgtttcaaaagacagatagctgactggttcataatacattggaatagttggatccaaactaataagaataagctgtacaggaactagtgctcaatatacattgtataaatttgtggaaatctcttggatgtgaattgttacttcaagtggcttttattaagattttctcagacttacttggaggttaaagcaaacccaaatgtgtattattttgttacagagctctgctttataattttgtaataaagtttcaatacagacaccaaaaaaaaaaaaaaaa

SEQ ID NO: 4696 - protein, 327 aa, Homo sapien
MWATCCNWFCLDGQPEEVPPPQGARMQAYSNPGYSSFPSPTGLEPSCKSCGAHFANTARKQTCLDCKKNFCMTCSSQVGNGPRLCLLCQRFRATAFQREELMKMKVKDLRDYLSLHDISTEMCREKGELVLLVLGQQPVISQEDRTRASTLSPDFPEQQAFLTQPHSSMVPPTSPNLPSSSAQATSVPPAQVQENQQSIDSEDSFVPGRRASLSDLTDLEDIEGLTVRQLKEILARNFVNYKGCCEKWELMERVTRLYKDQKGLQHLGGAVPSGLEENLCKICMDSPIDCVLLECGHMVTCTKCGKRMNECPICRQYVIRAVHVFRS

SEQ ID NO: 4697 - DNA, 1320 bp, Homo sapien
caggtaaaaaacaaacaaacaaaggtttagatgttagatatattttacaattaccacaccagtctttttactacagcatctagtaacacatttaccatagatttagatggaaattttcatcccataagcctttgttagtatttttaaaattgaatactcaataaatagtggccaagttgaatctcttagaggaatctcactcaaactacagtcatattttccaataggccccacaaaaatcattgctctagagtaatttaatatatttatccacctctttagacacttaggtaagtataataatacaagttttgtgcgtgtgtgtgtattgtgtaccttgtggcttcttgcccagtttctgcaacacctgaagctgatgcatgtttaatgtaaataatgtccagcaatgttacaaatgttgacttttatgtgcccatcagggaaaaaaaagatgaatgttattgtagaggaaattttcattctggaaaaaatgcatactatttgaatattattttcatgatttccacagatattacacacagatattatattccaaggattatgtttcaaagtcatcaaaaatagaaaatacatctatatttctaactgaaaataataacagtaagtagcccagctttggggaaatgtgataaaaatattaatgaccatcacaactcattaaaagcataaattgtgcaatgatttaaactacatgttcttcatatgaatgtgtgtagaaatatagacacattggataaatgctatttaaagtctgagtgcgttggtaactgattcagtcatctgtaggttgaagtgattacttttatctgccttcatagtgagaattagatttctattctttgtaaagcagggaatatagattgtgcatggagtaaaagaattcaatccttattaataatgatggtagctgcgctgcagaaaagaaagcctgtcagagtaacttattcagttttacatcataatcagaggtgtgtccatctctgttgaaggcagaattaaaaaccccttcaacatttttaaaataatagatgaaaaacatctcaaagtctcctttaaaatttgaattgacgattccacataaaaggaagggaccaaaaatatcttaaagaaatacttcacgatggaagtgatgttttaagtgaaatttcatcaaggagaagtttttccaaaaagtatttttacctcaggaagaatctcattagtttattctgtaaatagttcctagtaaaatgataaagacttgatttttcaaaaacaataaaaaacttacacggtttaatctaaaaaaaaaaaaaaaaa

SEQ ID NO: 4698 - protein, 26 aa, Homo sapien
GKKQTNKGLDVRYILQLPHQSFYYSI

SEQ ID NO: 4699 - DNA, 4395 bp, Homo sapien
ggcgaggatggggagcaatgcaaagctctgctcgccccccatctcaccccccaagcggatactggtcttctcgtcggattgcccatgcacttgttgcagaaacagccaaggccctggctgtggagaatgctgaaggaagaagacgcagaagcaggacgaccctgaaagattcagcctcttcatcctcaaacaggaccaggcctcctcttcccacctgtccagcagcatgaaagcagcatgattggccgaccgcaggagaagcccccagaaccaggcccccaactcagccatctgcggaggtcaaggtgtgagcgacgtctcctcaccacagtgctgtgtggtctatacctcagccagggagaggatgtgaaaccccccgccctgcacatgagtggtacaggccaacaggaacacctggctccagccacgttcacagacatgtcagccgtggagtagtgctgacacttttctctcagcttctcagggtttcagtccttttgggtttgttttatttaccttttttatggttttgtggctggacgttcacaaccaaggcagacagcatgggtgaccagcaactgtacaagaccaaccatgtggcccatggtagtgagaaccttttctaccaacagccaccacttggcgtccacagcgggctgaaccacaactatgggaatgcagttacagggggcggaatggatgcccctcaggcctcgccaatctccccccacttccctcaagatacacgggatggtctgggcttgcctgttggctccaaaaaccttggccaaatggatacctcgaggcagggagggtggggaagtcatgcagggcctggaaaccatgtccagctacgtggaaacctggccaactcaaacatgatgtggggggcaccagcccaggctgagcccactgatggctaccaatacacctactcccaggccagcgagatccggacccagaagcttaccagcggtgtcttacacaagctggactctttcacccaggtgtttgccaaccaaaacctgcgaattcaggtcaacaatatggcccaggtgctgcacactcagtcagcagtgatggatggagcccctgacagtgctctccgccagctgctgtctcagaagcccatggagcccccagcaccggctatcccttcccgctaccagcaggtgccccagcagcctcaccctggtttcactggtgggctgtccaaaccagctcttcaggtcgggcagcaccctacccaagggcacctgtattatgactaccagcagcctctggctcaggtgccagtgcagggaggacagccactgcaggccccacagatgctgtcacagcacatgcaacagatgcagcagcaccagtattacccaccgcagcaacagcagcaagccgggcaacagcgtatctccatgcaagaaatacagacgcagccgcaacaaattcgcccatcacagccacagccgccgccacagcagcagcagccgcagcagctacagctgcagcagcggcagggttcaatgcagatacctcagtattatcagccccaacccatgatgcagcacttgcaagagcagcagcagcaacagatgcacctgcagcctccttcttatcacagggaccctcaccagtataccccagagcaggcacacactgtccagctgattcccctgggctccatgtcccagtactactaccaggagccccagcagccctacagccaccccctctaccagcagagccacctgtcccagcaccagcagcgtgaggacagtcagctgaagacctactctagtgacagacaggcccaggccatgctgagctcccatggggacctggggcctcctgacacaggaatgggagacccagcgagctcagatctgacccgggtcagcagcaccctcccccatcgccccctcctatcccccagtgggatccacctcaacaacatggggcctcagcatcagcagctgtctcccagtgccatgtggccccagatgcacctacctgatgggagagcccagccagggtcccctgagtcaagtggccaacccaaaggagcgtttggggagcagtttgatgccaagaacaagctgacatgctccatctgcctgaaggagttcaagaacctgcctgccctgaatggccacatgcggtcccacgggggaatgagggcctcccccaacctcaaacaggaggaaggagagaaggtcctgccgcctcagccccagccaccactgccgcctccgcctccgcctccgccgccaccacagctccctcccgaggcagaaagcctcacgcctatggtcatgcccgtgtctgtccctgtcaagcttctcccgcccaagcccagctctcaggggttcaccaacagcaccgttgccgccccctccgccagagacaagccagccagctcgatgtcggacgacgagatgcctgtgctcgaaatccccaggaagcatcagccgagtgtgcccaaagccgaggagcccctcaagaccgtgcaggagaagaaaaagttccggcaccggccggaacctctcttcatcccgccgccgccctcctacaacccgaaccccgctgcctcctactcgggcgccaccctgtaccagagccagctgcgctccccgcgcgtcctcggggaccacctgctcctggaccccacccacgagctgcccccttacacgcccccacccatgctgagcccggtgcgccagggctcggggctcttcagcaatgtcctcatctccggccacggccctggcgcccacccgcagctgcccctgacgcccctgacgcccacaccacgggtgctgctgtgtcgctccaacagcatcgatggcagcaacgtgacggtcaccccagggcctggagagcagactgtagatgttgaaccacgcatcaacattggcttgagattccaagcagaaatccctgaactccaagatatctctgccctggcccaggacacacacaaggccacactggtatggaagccctggccagaactagaaaaccatgacctccagcaaagagtggagaatcttctgaatttgtgctgttccagtgcattgccaggtggagggaccaattctgaatttgctttgcactctctgtttgaggccaaaggtgatgtgatggttgctctggaaatgctgctactgcggaagcctgtcaggttaaaatgtcatcctttagcaaattaccactatgccggttcggacaagtggacctccctagaaagaaaactgtttaacaaagcactagccacttacagcaaagactttatttttgtacagaagatggtgaagtccaagacggtggctcagtgcgtggagtactactacacgtggaaaaagatcatgcggctggggcggaaacaccggacacgcctggcagaaatcatcgacgattgtgtgacaagtgaagaagaagaagagttagaggaggaggaggaggaggacccggaagaagataggaaatccacaaaagaagaagagagtgaggtgccgaagtccccggagccaccacccgtccccgtcctggctcccacggaggggccgcccctgcaggccctgggccagccctcaggctccttcatctgtgaaatgcccaactgtggggctgtgttcagctcccgacaggcactgaatggccatgcccgcatccacgggggcaccaaccaggtgaccaaggcccgaggtgccatcccctctgggaagcagaagcctggtggcacccagagtgggtactgttcggtaaagagctcaccctctcacagcaccaccagcggcgagacagaccccaccaccatcttcccctgcaaggagtgtggcaaagtcttcttcaagatcaaaagccgaaatgcacacatgaaaactcacaggcagcaggaggaacaacagaggcaaaaggctcagaaggcggcttttgcagctgagatggcagccacgattgagaggactacggggcccgtgggggcgccggggctgctgcccctggaccagctgagtctgatcaaacccatcaaggatgtggacatcctcgacgacgacgtcgtccagcagttgggaggtgtcatggaagaggctgaagttgtggacaccgatcttctcttggatgatcaagattcagtcttgcttcagggtgacgcagaactataaagccctgtgtgtcacttagagacagtgaaaacccacggcctccatcttcattaatcaggaaacctggactgcctgcttgttttgtaacccttttaaactacctgttttaaaagtggtcattttattcaggtttagaaaaaaaaatcctatttcttttcttttatttaaaaaaatttgtttttgtggggggttgggggaataaataattggcacaactaaaaaaaaaaaa

SEQ ID NO: 4700 - protein, 1200 aa, Homo sapien
MGDQQLYKTNHVAHGSENLFYQQPPLGVHSGLNHNYGNAVTGGGMDAPQASPISPHFPQDTRDGLGLPVGSKNLGQMDTSRQGGWGSHAGPGNHVQLRGNLANSNMMWGAPAQAEPTDGYQYTYSQASEIRTQKLTSGVLHKLDSFTQVFANQNLRIQVNNMAQVLHTQSAVMDGAPDSALRQLLSQKPMEPPAPAIPSRYQQVPQQPHPGFTGGLSKPALQVGQHPTQGHLYYDYQQPLAQVPVQGGQPLQAPQMLSQHMQQMQQHQYYPPQQQQQAGQQRISMQEIQTQPQQIRPSQPQPPPQQQQPQQLQLQQRQGSMQIPQYYQPQPMMQHLQEQQQQQMHLQPPSYHRDPHQYTPEQAHTVQLIPLGSMSQYYYQEPQQPYSHPLYQQSHLSQHQQREDSQLKTYSSDRQAQAMLSSHGDLGPPDTGMGDPASSDLTRVSSTLPHRPLLSPSGIHLNNMGPQHQQLSPSAMWPQMHLPDGRAQPGSPESSGQPKGAFGEQFDAKNKLTCSICLKEFKNLPALNGHMRSHGGMRASPNLKQEEGEKVLPPQPQPPLPPPPPPPPPPQLPPEAESLTPMVMPVSVPVKLLPPKPSSQGFTNSTVAAPSARDKPASSMSDDEMPVLEIPRKHQPSVPKAEEPLKTVQEKKKFRHRPEPLFIPPPPSYNPNPAASYSGATLYQSQLRSPRVLGDHLLLDPTHELPPYTPPPMLSPVRQGSGLFSNVLISGHGPGAHPQLPLTPLTPTPRVLLCRSNSIDGSNVTVTPGPGEQTVDVEPRINIGLRFQAEIPELQDISALAQDTHKATLVWKPWPELENHDLQQRVENLLNLCCSSALPGGGTNSEFALHSLFEAKGDVMVALEMLLLRKPVRLKCHPLANYHYAGSDKWTSLERKLFNKALATYSKDFIFVQKMVKSKTVAQCVEYYYTWKKIMRLGRKHRTRLAEIIDDCVTSEEEEELEEEEEEDPEEDRKSTKEEESEVPKSPEPPPVPVLAPTEGPPLQALGQPSGSFICEMPNCGAVFSSRQALNGHARIHGGTNQVTKARGAIPSGKQKPGGTQSGYCSVKSSPSHSTTSGETDPTTIFPCKECGKVFFKIKSRNAHMKTHRQQEEQQRQKAQKAAFAAEMAATIERTTGPVGAPGLLPLDQLSLIKPIKDVDILDDDVVQQLGGVMEEAEVVDTDLLLDDQDSVLLQGDAEL

SEQ ID NO: 4701 - DNA, 3579 bp, Homo sapien
gagaccatatggactgcaaagcctaaaatctatctggacccttacagtaaaacaatgaccctgggttttcatggcaccccaatgcctttttggtgacttgcaggaatacagattcctatattcccgtttgtttttttttttttctccttagcttaaggttcgtattcccatttgcttctgagaaagttaggaaaattttgttttatgttgcagatgctctcacaacataattgtgctggagatagatacacttagtgaaattttcctacagaactaaaaacgcaaattgcatcactcctaaaaaaaagaaatttagagtatgaattgagttggttgagagtagaattaaaaagatttctagcactttgagcatgttttaagaaatttgatccttacatttaaaattatgtaaatgacatctttcactggcatttgctcacatttaagtcaatctacagctgttacttactaagctaagaaataagaagatccctatggttctgaatctctcataatattctgaagtaatttatatcaattgaattttcattaatcattttaggaaatattatgttttattttgtggcattatatgacaatgactttctcaacaatagctcagggaatacgcaaacagccagctcttttatgtaagaaagccattttctaatccccacgctttcctgagtgttacgtattttatttctttgaaaagagagggccttgagtaaatgctttcgtttgctttccttacatatttagaaatccaagaagggcccttgtcttagtctatttctgtcacagagaaattgttcattccaaaatatccaccttaagggaagctagtgaccgagatatggagaaaaacataggcattcatgacctttgtgtttccgtttgactttcaacatctgtaaccaaaaggtcacaaatgaaatatttagtagaaagtgcaatatcaatttattaggagtacctaaaattataactctaaataatatacagcaatattattgctctattattacagcaatcaataatataatatagccactaggatacactcgctgtagaactcagaacaaaagatatcaatcttctgccagtccgcatcattatgtgtagcagagactttactggaatgagtgaggggaaagataacaaaatgtagattaggattccacattctcccctgcccatcttcttgattgctcagtttgaagacgatcattgatggacaaatactttagaaatgaatgaagtcaatagctaatgtttctcccagaaactaaacaacatagtttaggggatattaggcctacattctaatcacattgtaaggaagtgattttctaattttgaagcttcccaggagcagccccctccaggaacaattttccctgtgaactttcactgagaaactattatatgccatggaggagtcaaagatgaattaagtccaatgctatcctccaggagtgagctttgtagttggagagaaaagccaaccttatagatacaacctgtacatatataacctatgctgcatttaggcagatgataagccctaggaatggaaagagggaaaagctccctttcgccaggaatgatgaaggaaagctttatggaaacacaggctgtatgtgaaagatgggtgaatctttgcaggtagggaagaagtagggggcatgtctggctgagaaccggcctgatcatagagtggaaaaatgaaaggcagaggtgaaggaagaatactaaatgtgaaaggctgaaatacacagggaagtgttgccagtgtgcaacagaatctcatctcgtgcaaaattgaattagacttccttactccttccttactctgggtaggtccatgtgcagcctttcctcagagcatctagcctgacatacttggctcatctgctgtgcttctaagccaaataaaaatcatcaaacacatcgaagatatttttgggagtcaccaggttaaagcaaagcctcagtcactgaaagcaaaaactgaattggccaggtctccactgacaaaacagagtaaatgatagtatgacagataatttcaagttttccaagactccaatttctgaaaaatgtctcatgactccaaaaaatcacgtacttcctaaaatgttgccagtggaggaccgaatcaaggttattgctgacctcattttttcaaccttttcagttatttgacctgaataggcaatcccccaggatttctgattgaattctacctgaaagtttagattttaaaagacaacctgtaggaagctaagtctcaggcaacaaaatttaaaaccatcagaacttgtttctccaaacatcaacctgctcctgtcaagtcctttttcatctctcccttttgtccctttacatactgttttgtaagttccttttgatatcatttattgcaggcagtatttttacatccatcttcaagaaacttgggagacatttagacatttagtatgtgtacttttagttgtcttgcctctttatttcagataatgcctgtgattagtgaatggcggcattattcctgaagacaaatgaaggaagatagggagcaagattgactgtcatttgaatgatggaagagaagtagaattactgtgaggttacaaaaatcgtaagttagcagacattgagaaaggaaaacttcctacttgggcttttcaggcttatgtgacattatctggatgtgttttctagtctttcctaaaggagaaatttttattcctgggttgctgaaagctttctggactaaaaggatataagcagctcaatagcagcatagaggattagattaatggaacagcactgcatacaggaaagctacatctccaatagtttaggctgcaagtcagtagccaaacacaagagcatgtaagatttggaggacaaagtataaatattttaagtttacacaaccaagattataggctaccttcccaacttctaatttgaagagcactgaaaatggagctgtgaacacttcatttttaaaacctgacaatatggtgctattgactacttaatacaaagatatattacaatatttttaggtaaatgtattaagtctggcctgggcataaatgtacatacagaaaatgtttgtagagaattcatcaaaatcatgcccatttgctgttgtagagctacagtattcttcaatggtggtgactgaccagtgagtttctacttcttacagatgggacacaacagtcatgggctgtctcagctgcccaaagcctgaggcagaccacatgagagctgtggcttcttcttggattcaggttggataacccaattcagtaattaaatatgtaaattttggggggggttggggggtgttttctaggaacttgaagagtacgtgacattataaaaaatgggtgttggaagactaattgtagaaatttgacctgagggccaatgttacttggtgtaagttcactcagacagacatgtcagaacatgcccaaagaagcctatatcttgctgctgggaaatgtaaagcagttggcatgtagaatacgataataaatcatttaagaaaccacc

SEQ ID NO: 4702 - protein, 31 aa, Homo sapien [sequence omitted]

SEQ ID NO: 4703 - DNA, 1173 bp, Homo sapien
ggcacgaggcagctccctttgaaggcggatccatacaaacaggctgaccatcagggctggtcccaggccaccaggctgggtgcaatgcagaaatggagatctgccccggggaaggcaggtttctgcccaaacggagccacgtgaggacgtctttggggatgtgtctccaagaaaagtgtgggctgccttcctcaccctggatgcctgtgggctgccttcctcaccctggatgcctgtgggctgccttcctcaccctggatgcctgtgggcagccttcctcaccctggatgcctgtgggctgccttcctcaccctggatgcctgtgggctgccttcctcaccctggatgcctgtgggcagccttcctcaccctggatgcctgtgggctgccttcctcaccctggatgcctgtgggcagccttcctcaccctggatgcctgtgggctgccttcctcaccctggatgcctgtgggcagccttcctcaccctggatgcctgtgggcagccttcctcaccctggatgcctgtgacttggtttccatgggggcttcctaagctcagggaccccaagcctccatcaaatctaatgacccgccctgtctctgaacacacctgtgttgtccccgagcccctcaccaaccccctctgcaacccggcccacgcatttcccatcctgaagggtccagctcataggccggcccatgtgttccctttacccctgctttgtccctacctggtggggagctgtcccttctgggccctagtgtggcacttcacacacaaatgtgtcctgtgggtggtatctgggcctccccctgcagtgaggggatgaccaatgtgcagagctcactgggcctggatatgggctcgggtggcacagaacagagagaaagtgctccgtaaaagtgagctgcgatgcggaggtgggcaagctcttccctggagggggaagagctctcaacccagagggatctgaccaggaaggttcaccccccctccacccaggaagcccctgcagacagtatgtgttttaggctttgctggccaaatggtctctgccgtgactactcagctctgccattgtggctgcagagtgaccatagaccttctgaaagtgaatgagtatgactgtgttccaataaaactttattgacagaaaaaaaaaaaaaaaaaa

SEQ ID NO: 4704 - protein, 190 aa, Homo sapien [sequence omitted]

SEQ ID NO: 4705 - DNA, 2938 bp, Homo sapien; identical to SEQ ID NO: 4683
  Unsure 1299-1507, 2016-2062: Unknown base

SEQ ID NO: 4706 - protein, 262 aa, Homo sapien [sequence omitted]

SEQ ID NO: 4707 - DNA, 2893 bp, Homo sapien
taaaagcggcccggggcggccggcgcggcgcagaccctcggtgggcagcgcactccagtcttcccaggctagcggctgcagggagctccggcccgcggcccctccgcctcaagtctgggagctgccggtcccactctgtctttgcctatggggattcgagagtttcccagcggcgcacccaggggcaagagcattgccgttggcatgaggaggtcaccggacgtcagcccccggagactgtccgacatcagcccccagctccggcagctcaagtacttggtggtggacgaggcgattaaggaggatctgaaatggtcgcgctccgtggaggatctcaccagcgggccggtggggctcacgtccatcgaggagcggatcctgcgcatcactggctactatggctaccagccctgggcagcgagctgcaaaagggaggagcgcccccgggactccccgggcccggcggaggcccaggcaccggccggggtggaggccggcgggagagcgagtcgccgctgctggacgtgctcccgggcgcaactcaagaagatcttctggggcgtggcggtcgtgctgtgcgtgtgctcctcgtgggcgggctccacgcagctcgccaagctgaccttcaggaagttcgacgcgcccttcaccctcacgtggtttgccaccaactggaactttttattcttcccgttgtactacgtggggcacgtctgcaagtccacagagaagcagtctgtgaagcagcgatacagggaatgctgtcgattttttggagacaatggcttgactttgaaggtgttttttaccaaggcagcaccctttggtgttctttggacactcacaaactacctgtacttacatgcaataaagaaaataaacactacggatgtctccgtgttgttctgctgcaacaaagcttttgtgttcttgctctcatggatcgttctcagggacagattcatgggagtgaggattgtggccgccatcctcgccatcgctggcattgtgatgatgacctacgctgatggcttccacagccactccgtcatcggcatcgcactggtggtggcctcagcatcgatgtctgccctctacaaggttttgttcaagctcctcctgggcagtgctaagtttggagaagccgccttatttttgtccatcttgggtgtgtttaacatcctcttcatcacctgcattcctattatcctctactttaccaaagtggaatactggagctcttttgatgacattccatggggaaacctttgtggattttcagttcttttattgacattcaatattgtattaaattttggaattgccgttacatatcccactctgatgtctcttggaatcgtcctcagcatacctgtgaatgcagtgattgatcactacaccagtcagatcgtcttcaatggggtccgggtcatcgccatcatcatcatcggcctgggttttctcctcctgctcctgccagaggagtgggatgtctggttgatcaagctgctcacccgactcaaagtgaggaagaaggaggagcctgcagagggcgctgccgacctgagctcaggacctcagagcaagaacagaagagcccgcccttccttcgcccgctaacaccactcctctagaactcggtggtaatgactgggaggtctattcctgccgggaggaacctcagttgggtaaggtgtacatacctgtacagttttggtcatctgcggtaagttctatggtatttattggcatgtccaatttgcttgcacttttccacatcagaccttccacttaagggtaccaattcaatacaaaagagaaaagaagaacctctcagtgcttttccaacgaatgtaaagtgggtttaaaagttccctgcgtagatcgttttggatggctgacgttcttgacaagccagccatcagggcaagtgttttgaatcttagcaagtgttttgaatcttagcaactgaacatgacattgcacactgtgattatttttcagctatggtaggtcatattttgttttataccagagctgtactcttaattttaaggaatttcaatgaaccaaaagataactgtcaatttatttggatggatggatggagggatggaaggagggagggaaggatgtctgggatgtgaagaggcaaggcagaaatggatgatgaacatcaaaaactgtcagaggacaggtctgtgccaggtaccaggaaggacaagataagtccaagccccggctggcctgctctcacgtgtctgtgtaagatcatgcaagagaaatcacagtgccttctacagaattttcgtctttacctatgtgaagcgaggtgacgtgatacgtcactggcgccgtcttataatttagatgtaaaaatctttagaaacaaataaaactctctatatatgtgtatgtctgtgtacaaaaaaatgacagagctgatggccagtgtatacagagcgtggcccgcggtgtacaatacccatataaggtacattgtgcaggaggggaattgctggctgcttttacttcctgaccaagactgaaaaattatttactgaaatctgtaaacctttttatgaaacttttaagcaccaggctgtttacttacacaatttaggtctgccagaaaattctatctgtgatagatctgtaaagagggtcaggggttagagtttactatttttgaagtttacattgttacatatgaaatggaaacattattttgaaacgttgtcataacccaatggtgcattctgtaaccatggagtcttctgtttcctgggggaaaggggcattcatgacctgaactttttagcaaattattattctcagtttccattacctgtttggccaaacagattaataaaatatttgaaaaagaagcgtt

SEQ ID NO: 4708 - protein, 490 aa, Homo sapien
MGIREFPSGAPRGKSIAVGMRRSPDVSPRRLSDISPQLRQLKYLVVDEAIKEDLKWSRSVEDLTSGPVGLTSIEERILRITGYYGYQPWAASCKREERPRDSPGPAEAQAPAGVEAGGRASRRCWTCSRAQLKKIFWGVAVVLCVCSSWAGSTQLAKLTFRKFDAPFTLTWFATNWNFLFFPLYYVGHVCKSTEKQSVKQRYRECCRFFGDNGLTLKVFFTKAAPFGVLWTLTNYLYLHAIKKINTTDVSVLFCCNKAFVFLLSWIVLRDRFMGVRIVAAILAIAGIVMMTYADGFHSHSVIGIALVVASASMSALYKVLFKLLLGSAKFGEAALFLSILGVFNILFITCIPIILYFTKVEYWSSFDDIPWGNLCGFSVLLLTFNIVLNFGIAVTYPTLMSLGIVLSIPVNAVIDHYTSQIVFNGVRVIAIIIIGLGFLLLLLPEEWDVWLIKLLTRLKVRKKEEPAEGAADLSSGPQSKNRRARPSFAR

SEQ ID NO: 4709 - DNA, 1602 bp, Homo sapien
gacttaggctgtgacccacagaaggacgccagaaagtactcaagacattcacggtgccccggtcagcactcgccatgacgaagacttctacatgcatataccacttccttgttctgagctggtatactttcctcaattattacatctcacaggaaggaaaagacgaggtgaaacccaaaatcttggcaaatggtgcaaggtggaaatatatgacgctgcttaatctgctcttgcagaccattttctacggggtcacctgcctggatgatgtgctgaaaagaaccaaagggggaaaagacattaagttcctaactgccttcagagacctgcttttcaccactctggcttttcctgtatccacgtttgtatttttggcattctggatcctctttctctacaatcgagatctcatttaccccaaggtcctagatactgtcatccccgtgtggctgaatcatgcaatgcacactttcatattccccatcacattggctgaagtcgtcctcaggcctcactcctatccatcaaagaagacaggactcaccttgctggctgctgccagcattgcttacatcagccgcatcctatggctctactttgagacgggtacctgggtgtatcctgtgtttgccaaactcagcctcttgggtctagcagctttcttctctctcagctacgtcttcatcgccagcatctacctacttggagagaagctcaaccactggaaatggggtgacatgaggcagccacggaagaagaggaagtaattgcacaccattttccaagaaccaagaaagaagaaaacacaagagatttttctcatcttttttttttttttttctggtggagggaggtggtggaggaacatagcaaagtaggagggacagagagtgatacttaaatttaataagaggttcgtgaaggtagcttaacttgagaactcttggttttttgaaaggttgactgcacatgccaaaaacaactcctgctatctcagaattaattatctttgaccttcgtggaggatggtctctggttaaaatctgaccaaagaaactcacataaacttggtgttagagaacatctagagagagagagaggaacttagagtcatttaaactcttcagtttacagagaaggatgctgaggacctagatgagaagttacctgcaaaaggcaaaagggttacttagtgtcagaaccaaggcaatgacttctctctcccagatctcctagctactggtcctgggccatttttttttttttaaataatcccaacttttctttaaaagacaagcatttcagtaagctagttattttcatgggttgctcatccatttttttcagtgatctaaaaatgtagggagatggctactactgaagttgtctgtctacttgggataatagcaaattaattgaagacaatgggaaagtaagttataaaaaatactgggaaatctgtttctcttctgagcaagcattcagggcaggtataaacatcaaacatagtgacattgtcaaaacctcttccatttgaacattgattaattcatcaaataaatggtatagtaacaaaaaaaaaaaaaaaaaaaaaaaaaaaaa

SEQ ID NO: 4710 - protein, 230 aa, Homo sapien
MTKTSTCIYHFLVLSWYTFLNYYISQEGKDEVKPKILANGARWKYMTLLNLLLQTIFYGVTCLDDVLKRTKGGKDIKFLTAFRDLLFTTLAFPVSTFVFLAFWILFLYNRDLIYPKVLDTVIPVWLNHAMHTFIFPITLAEVVLRPHSYPSKKTGLTLLAAASIAYISRILWLYFETGTWVYPVFAKLSLLGLAAFFSLSYVFIASIYLLGEKLNHWKWGDMRQPRKKRK

SEQ ID NO: 4711 - DNA, 680 bp, Homo sapien
atgggtgtatgttttcacatctctcttaaaaacaattagtctgacaaatcaaatcaaatcatttatgtttatttacgtagaacctcttgcaatcctgtttggagagtgcaacttacgatcttagtttaattgatcaattaggagacctctgaataaagactaactccccaatacatccataagaatttttctatgagcctgtcatttagatgtgataagcaatcaatttcatgaagactgtttcagtcttgtagaaattgagttgccatcacatagaggatttcttgtcctctgcattgtttaaaggacaactacaaatcatgctggataagagtactcattcaatcttttaggattcaatgaagtagcattttaaatatgtaagttattttatatattgtctgtcttttaaaattggactttgcttcttgaaaaaagtttgtcaaatcaccaaaccatatgactgtccattcattgtagcctatgttttctattattaagaaataattcatactgagagtaaaagaaaaagaatgtattttgtgtgcaaaggatgaatgtattaaaaactttttatttgtaacaattttttaaaaaaactaaatggaaattgctttcccatgtacttgtatataaataaacatttcctgttgcccacatttggaaaaacaaataaaagg

SEQ ID NO: 4712 - protein, 40 aa, Homo sapien
WVYVFTSLLKTISLTNQIKSFMFIYVEPLAILFGECNLRS

SEQ ID NO: 4713 - DNA, 2374 bp, Homo sapien
  Unsure 2173-2204: Unknown base
ccctgtctcaaaaaaaataaaaaagtagaaagatggagtggaagcctgcccagggttgtgagcatgcacgggaaaggcacccaggtcaggggggatccccgaggagatgcctgaggtgaaggattgtggttggggaaagcgtagtcccagcaaggaagcagtttgtgggtaagtgctgggaggtgagtggagtgagcttgtcagggagctgctggtggagcctggaggggaaggagggaggcagtgagagagatcggggtgggggttggggggatgtcgccagagctcaggggtggggacagccttgtgcgcatcagtcctgaggcctggggcacctttcgtctgatgagcctctgcatggagagaggctgagggctaaacacagctggatgtcacctgagttcatttataggaagagagaaatgtcgaggtgaaacgtaaaagcatctggcaggaaggtgagtctgaagccctgcacccgcgttccgactatcagtggggagctgttagcacgtaggattcttcagagcagctgggctggagctcccctgagctcaggaagccccagggtgcaagggcaaggaaatgaggggtggtgggtcagtgaagatctgggcagaccttgtgtggggaaggggtgctgctgtgacttcagggtctgaggtccaaagacagcatttgaaaagaggctctgaagccagtgtttgaagaatttgttcctgaagtacctcctgggggtaggctagaggcttctggcttcagggtcctgaagaacacattgaggtgccgtctgacactggaatagggtgcccttcattcctatgcctgagtccttaactatatttccaacctccagtgaggaggagaagattcggaaatgtgacaggagagcaaacaggacagtttgcatgtgtgtgtgcgcacacatacatgtgcgtgaaagattatcaataaaagtgcataaatttgttgatctggtaagagtttctagcaggaaggtcgagccacttactgtaggtcaagaagttgctagttgcggagttttttcttgcagttagactttacctagtggtagcagggccaccaaagctctgtgtcccagatggtgtatggcccataatccacccaacagcagcaaaggaccaggcaaaggagaacaggagcagaagcctcccagccactagccttttgggctcagtctctccaataatcctggagaggggcttcgttgggtctggacacctaccatgcattctgtgacctttccctagcttccaataaataactgtttgacgcccagagtacaggataccacaatgcactcttcctgcgtagagcacatgttcccatctgctcccattcctcaggaaccttgaattctagctctgctggcctttgagcccatgccagtaaatgtcctgatgggcattgcctactatctccagggcagctgcctttgtcctcctaacagctttattggagtacagttcacttaccatacaatccacaattgaccctgcacaatttgatgccggtttagtatagtcacagttcagcagccatcagcacagtcagtcttagagtttactacccccaaaagaaatccagccccccttagtcaccaccccaacctccccatccctaggcacccctaggctactttgatctctgtagacttgcctcttctggacatgacatagagaaaggagtcataaattctccaaggtgtctgtttcttctttaatgtcattccctgtttctcctcacattccctccccatttcctgggcccagtctcacactggtccttgcttaccctaaatgctattaattccatcactctgagtatggtgtttgctgtccgctgaatgccaagagcttcaagagtgtgtgtaaataaagccacacctttatttttgtattattctgaaccatggctaataaattgtttcaccaagaaatgtctctctaagaacagatgccctccacgctgtgcccctcccacctcttcagctcgtctcctgagtgtgcagaggtggttccggttgggaaagaagcagcggagcatctaaccatgcctgtgtccaggccgattatgcacgcagccaccaacaagctcccaactcccgcgtagagtttcatgactttttcctgcctactatcttgatcctagnnnnnnnnnnnnnnnnnnnnnnnnnnnnnnnnttactttgattcaaaaccagtttctcttttctgcataggaaggtccttgaaggtgtttagggtctaaaaagggtggtgttcggtctctgaaacatccattcagcagtttgagctgggatctctgaatgcaagggtatgatggatatacttctttcttgcttttgttgtgt

SEQ ID NO: 4714 - protein, 37 aa, Homo sapien
  Unsure 2173-2204: Unknown amino acid
PCLKKNKKVERWSGSLPRVVSMHGKGTQVRGDPRGDA

SEQ ID NO: 4715 - DNA, 5469 bp, Homo sapien
  Unsure 5034-5076: Unknown base
gccgttcctgccggcggttggctaaaagacgttacagccgcgagacccgacacacaaaagccgctttctccgcgccgcccgcccagggaggctgcggccagcaagggaccccacctgagagcagctcgggctgctgagttcgttttgtgtctgagctctgcgctctgcacggaaccgaccccgtacccatggctctgataatggaaccggtgagcaaatggtctccgagtcaagtagtggactggatgaaaggtcttgatgactgtttgcagcagtatattaagaactttgagagggagaagatcagtggggaccagctgctgcgcattacacatcaggagctagaagatctgggggtcagccgcattggccatcaggaactgatcttggaagcagttgaccttctgtgtgcattgaattatggcttggaaacagaaaatctaaaaaccctttctcacaagttgaatgcatctgccaaaaatctgcagaattttataacaggaaggagaaggagtggccattatgatgggaggaccagccgaaaattgccaaacgactttctgacctcagttgtggatctgattggagcagccaagagtctgcttgcctggttggacaggtcaccatttgctgctgtgacagactattcagttacaagaaataatgtcatacaactctgcctggagttaacaacaattgtgcaacaggattgtactgtatatgaaacagagaataaaattcttcacgtgtgtaaaactctttctggagtctgtgaccacatcatatccctgtcgtcagatcctctggtttcacagtctgctcacctggaagtgattcaactggcaaacattaaaccaagcgaagggctgggtatgtatattaaatctacatatgatggcctccatgtaattactggaaccacagaaaattcacctgcagatcggtgcaagaaaatccatgctggcgatgaagtgattcaagttaatcatcagactgtggtggggtggcagttgaaaaatttggtgaatgcactacgagaggacccgagtggtgttatcttaactttgaaaaagcgacctcagagcatgcttacctcaggcaccagctttactgaaaaatatgagatggaagccccttgctctgcagcctcttatacctagaagtcccacaagcagcgttgccacgccttccagcaccatcagtacacccaccaaaagagacagttctgccctccaggatctctacattccccctcctcctgcagaaccatatattcccagggatgaaaaaggaaaccttccttgtgaagacctcagaggacatatggtgggcaagccagtgcataagggatctgaatcaccaaattcatttctggatcaggaatatcgaaagagatttaatattgtcgaagaagatactgtcttatattgctatgaatatgaaaaaggaagatcaagtagtcaaggaagacgagaaagcaccccaacttatggcaagctacgacctatatctatgccagtggaatataattgggtgggggactatgaagatccaaataagatgaagagagatagtagaagagaaaactctctacttcggtatatgagcaatgaaaagattgctcaagaagaatacatgtttcagagaaacagcaaaaaggacacagggaagaagtcaaaaaagaagggtgataagagtaatagcccaactcactattcattgctacctagtttacaaatggatgcactgagacaagacatcatgggcactcctgtgccagagaccacactataccatacatttcagcagtcctcactgcagcacaaatcaaagaagaaaaacaaaggtcctatagcaggcaagagcaaaagacgaatttcttgcaaagatcttggccgtggtgactgtgagggctggctttggaaaaagaaagatgcgaagagttacttttcacagaaatggaaaaaatattggtttgtcctaaaggatgcatccctttattggtatattaatgaggaggatgaaaaagcagaaggattcattagcctgcctgaatttaaaattgatagagccagtgaatgccgcaaaaaatatgcattcaaagcctgtcatcctaaaatcaaaagcttttattttgctgctgaacatcttgatgatatgaacaggtggcttaacagaattaatatgctgactgcaggatatgcagaaagagagaggattaagcaggaacaagattactggagtgagagtgacaaggaagaagcagatactccatcaacaccaaaacaagatagccctccacccccatatgatacatacccacgacctccctcgatgagttgcgccagtccttatgtggaagcaaaacatagccgactttcctccacggagacttctcagtctcagtcttctcatgaggagtttcgccaggaagtaactgggagcagtgcagtgtctcccattcgcaagacagccagtcagcgccgctcctggcaggatttaattgagacgccactgacaagttcaggcttacactatcttcagactctgcccctggaggattctgtcttctctgactccgcggccatctccccagagcacaggcggcagtctaccctgccaactcagaaatgccacctgcaggatcactatgggccataccccttagctgagagtgagaggatgcaagtgctaaatggaaatgggggcaagcctcgaagttttactctgcctcgagatagcgggttcaaccattgctgtctgaatgctccagttagtgcctgtgacccacaggatgacgtgcaacccccagaggtggaggaagaggaggaggaggaggaggaggaaggggaggcagcaggggaaaacataggagaaaaaagtgaaagcagagaagaaaagttaggagactcattgcaagatttatacagggcactggagcaggccagtctgtcaccactaggagaacatcgtatttcaaccaagatggaatacaagctatcatttataaaaagatgtaatgatcctgtaatgaatgaaaaactacaccggctgagaattctcaaaagcactttaaaggccagagaaggggaagtagccattatcgataaagtcctagacaatccagacttgacatctaaagaattccaacaatggaagcagatgtacctcgaccttttcttggatatctgtcaaaataccacctcaaatgacccactgagtatttcttctgaagtagatgtaatcacttcctctctagcacacactcattcatacattgaaacgcatgtctaaatgtattctgccttcagaccatctagtacctgctggtactctgaacaagtatataaggtagtttttatatcaatgtgtggaacacttgacaagctatactttaatgttaccaaactatatgaaacaaaccatatatggtcacaataccactatctttaatgagcatttgtatattttatatgcaacagtgctcagcttatgtttaccatgtgcaaaatcaactgtctttaatgacttaaaattaacttttgcaaacaattctaaatacaggtggtcttcaagtagtaaaaccacaaaaggcagttttctatctatggtcatcttttctccctttaagttaattttatataaacaagacttcaaaagtaaatcacattttttcaggtgcagacatccttgtgggtgggaaagaatttaaaccttttttatatttattaaaatgttctaagaattttcttaaacattgcacaaagtttaatgctgtagttttatttttgtgaaatgtagatgcgcatacaagagctaagcaaaatagaagagcatcgacataagaaaagttcaggtatctaatattcgtcttaatagtctattaacttgtgaaagctaagttaatggaaatattattccaaatctatgagaacacttggtgtatcagggcaaagctttgtaagatgtttttgtaactaagaccaaaattgaagatagagctgctttattttcttggtttaaatcttcctttatttttgtagtgatgagatgctgattgtgtacagaagaatttgagaggggatttttaaaaactgacttaacacacccagaaaggcagctaacagctatatatatatataaatttcagcccaaactcatgtttttaaactccaactcttaaaagacaacaaggtataaactgaaatgaatcaactttccacttagtttccaattttcccctagtccactaattaaacttaggtaattatacttcaggtagggaagtacaatatgtttagtttcaggctgatgtgtgttataaaaaacaacactgaaaaataaaaatgtacttcccttctaaggagcaagcaggtgatggtcattcaaagagatgtcacattgaattatgagagaaacaatttagaggtttttttcctggcttcatgaattgttctatagagtggatgaagtctaaggaaaagtcctcttcatatatttccatttataagcgtcttgtttttgaaagtgatcacagcatgaaaatgactgtgctgctttttagtgtctggctgcataatgtacaagtcacaatttgctgtttttttcaggaggagaaagggaacctcctttactattctatatcctaaaatctacttctaatcagctttatactgttgcctgtacagctcagtgaatgtactttcatctttaagagttcagatatatgccagtgaatatttttgctgtagaggagaaagtaaaaactccacagcggggatctttttctttgcttttgaaaccaccattgaatcactatcgttttgcagactttgcacaactgtacaggagagtggcctttctacagcacattttcagtaatcctatatttagtcaaaatggatgagaaatcatgtattaatgtttgtatggaattttgggtccagtgtaatatttttatcatttaaaaagaactctatttgtaaaaacatttatttactgcatggatattgacgcacattaaatttgtgggannnnnnnnnnnnnnnnnnnnnnnnnnnnnnnnnnnnnnnnnnncctcttgtcctaaaatgaagtgtgcttgttaacaggtgtttagacttattgatgtttactagaccaaatgtgtatgttcacttaaaaatatatgtacctgatggatgtgtcatgtttacagtggccaggttgtggcctgtaaacagcaagcagttgacgggaagactagctctgttgctactaagcagcttttacttttgtaaagtcagctctgttgttttaaatggtaaaaattaaactaatgaatttgacaagactcgtggctagcctagcatgaaagagaccttttaacactatataatatctgtacattttattgcattcgtttcaaatctaggagagaggcagcactgtaaactgaagtcaaataaattcagctcttaatgaatcctt

SEQ ID NO: 4716 - protein, 1031 aa, Homo sapien
  Unsure 5034-5076: Unknown amino acid
MEPVSKWSPSQVVDWMKGLDDCLQQYIKNFEREKISGDQLLRITHQELEDLGVSRIGHQELILEAVDLLCALNYGLETENLKTLSHKLNASAKNLQNFITGRRRSGHYDGRTSRKLPNDFLTSVVDLIGAAKSLLAWLDRSPFAAVTDYSVTRNNVIQLCLELTTIVQQDCTVYETENKILHVCKTLSGVCDHIISLSSDPLVSQSAHLEVIQLANIKPSEGLGMYIKSTYDGLHVITGTTENSPADRCKKIHAGDEVIQVNHQTVVGWQLKNLVNALREDPSGVILTLKKSDLRACLPQAPALLKNMRWKPLALQPLIPRSPTSSVATPSSTISTPTKRDSSALQDLYIPPPPAEPYIPRDEKGNLPCEDLRGHMVGKPVHKGSESPNSFLDQEYRKRFNIVEEDTVLYCYEYEKGRSSSQGRRESTPTYGKLRPISMPVEYNWVGDYEDPNKMKRDSRRENSLLRYMSNEKIAQEEYMFQRNSKKDTGKKSKKKGDKSNSPTHYSLLPSLQMDALRQDIMGTPVPETTLYHTFQQSSLQHKSKKKNKGPIAGKSKRRISCKDLGRGDCEGWLWKKKDAKSYFSQKWKKYWFVLKDASLYWYINEEDEKAEGFISLPEFKIDRASECRKKYAFKACHPKIKSFYFAAEHLDDMNRWLNRINMLTAGYAERERIKQEQDYWSESDKEEADTPSTPKQDSPPPPYDTYPRPPSMSCASPYVEAKHSRLSSTETSQSQSSHEEFRQEVTGSSAVSPIRKTASQRRSWQDLIETPLTSSGLHYLQTLPLEDSVFSDSAAISPEHRRQSTLPTQKCHLQDHYGPYPLAESERMQVLNGNGGKPRSFTLPRDSGFNHCCLNAPVSACDPQDDVQPPEVEEEEEEEEEEGEAAGENIGEKSESREEKLGDSLQDLYRALEQASLSPLGEHRISTKMEYKLSFIKRCNDPVMNEKLHRLRILKSTLKAREGEVAIIDKVLDNPDLTSKEFQQWKQMYLDLFLDICQNTTSNDPLSISSEVDVITSSLAHTHSYIETHV

SEQ ID NO: 4717 - DNA, 11030 bp, Homo sapien
  Unsure 6512-6670, 8968, 8984: Unknown base
gaggaatatgggaccaaaataaatgaaactttcaggaaaagatttaaacaacagagatcttaaaaataggaaattgaggttgaagagaagatggcaaggctagataataagtcaaaaacattatttttaaagaaacaattttctttaaataaatgacagatactttttgtgtattacctgatatgatagattgacagtatacatgtgaaaacagtttggattaataagttcactttacccatgagggtgggaagtcaagggaaagccaggctcagctgctatttacatctctgacctaggctcttgtttgacctaagtctgtcttgatgcagcagcacaagccagcgaggaggcagtgtcatttcgccgtgaacgcagcacatttaggcgccaggcagtacggcgccggcacaatgcagggagtaaccctacccctcctacattgctcatcggatcacccctaagccttcaagatggtcagcaaggccagcagtccacagcccaggtcaaagtccagtcccgccccccttcccaggctgcagtgctcagtgctagtgcctccttgctggtgagaaatgggagtgtccacttagaagcatcacatgacaatgcatctgctgtaggcggtagcagtttgcacgatgaacttggtaagttctcttctacgctgtatgagactggtggctgtgatatgtcacttgtgaattttgaaccagcagcaagaagagcatccaatatctgtgacacagattctcatgtatccagttctacctcagttcgattttatccacatgatgtgctctctctcccacagattcgattgaatagactattgaccattgatacagatttgttggagcaacaggacattgatctaagccctgacttggcagctacttacggcccaacagaagaagctgcccaaaaggttaaacactattatcgcttttggatcctaccccagctgtggattggcattaactttgacagactcacacttttggccctgtttgatagaaatcgtgagatcctggaaaatgtgttagctgtcatcctggctattctcgtggcctttttgggatctattcttctcatacaaggattcttcagagatatctgggtcttccagttctgcctcgtcatagccagctgtcaatactcactgcttaagagtgttcaaccagattcttcttctcccagacatggtcataatcgtatcattgcctacagtagaccagtttatttctgcatatgttgcggtcttatttggctcttggattatggtagcagaaacctgactgcaaccaagttcaaattatatggaataactttcaccaatccactggtgtttatatcagccagggatttagttatagtgtttacactctgtttcccaatagtgtttttcattggtctcctgcctcaggtgaatacatttgtaatgtacctttgtgaacaattggatattcatatttttggtggtaatgccactacaagcctgcttgcagcactttacagttttatctgtagcattgttgcagtagccttattgtatggattatgttatggggctttaaaggattcttgggatggccagcatattccagtacttttctccattttttgtggtttattagtggcagtgtcttaccatctcagccgacaaagcagtgatccatctgtacttttctctttagtgcaatccaagatttttccaaaaacggaagagaaaaatccagaagaccctctatctgaagtaaaagatccactgcctgaaaaacttagaaattctgttagtgagcgattacagtctgacctggtagtatgcattgtaattggtgtgctgtattttgctattcatgtaagcacagtcttcacagtattgcagcctgccctcaagtatgtgttgtatacattggttggctttgtgggttttggtaacccattatgtgctgcctcaagttagaaaacagctaccatggcactgtttctctcatcctctgctaaagacactagagtataatcagtatgaagttcgaaatgcagccactatgatgtggtttgagaaacttcatgtgtggcttctttttgtggagaagaatataatctatccattgattgttctcaatgaactgagcagcagtgcagagacaattgctagtccaaagaaactgaatacagaattaggtgctttaatgatcactgttgctggtttgaagttgctacgatcctcttttagcagccctacatatcagtatgttacagtcatctttactgtgctgtttttcaaatttgactatgaagctttttcagagaccatgctgttggatctcttctttatgtccatactcttcaacaagctttgggaactactttataaattgcagtttgtgtatacctatattgccccatggcagatcacatggggttctgctttccatgcttttgctcagccttttgcagtgcctcattcagccatgctgtttattcaggctgctgtctcggccttcttctctactccactgaacccctttctgggaagtgcaatattcatcacttcatatgtccgacctgtgaaattctgggagagagactataacacaaaacgagtggatcattcaaataccagattggcttcccagcttgatagaaatccaggatcagatgacaacaatctgaattccatcttttatgagcatttaactagatccctacagcacagcctctgtggtgatttgctactaggacggtggggaaactacagtacaggggactgtttcatccttgcctctgactatctcaatgcattagtacaccttatagagataggcaatggtctggtcacttttcagctgcggggacttgaattcagaggtacctactgtcaacaacgggaagtggaggccattactgaaggtgtagaggaagatgaaggattttgctgttgtgaacctggccatattcctcacatgctttcatttaatgctgcatttagccagcgatggctagcttgggaagtgatagtcacaaagtacattctggagggttatagcatcactgataacagtgctgcttctatgcttcaagtctttgatcttcggaaagtactcaccacttactatgtcaagggtatcatttattatgttacgacctcgtctaagctagaggagtggctagctaatgagacaatgcaggaaggacttcgtctgtgtgctgatcgcaattatgtcgatgtggacccgacctttaatccaaacattgatgaagactatgaccaccgactggcaggcatatctagggagagtttctgtgtgatttacctcaactggatagagtactgctcttcccgaagagcaaagcctgtggatgtggacaaagattcatccctagtgactctctgttatggactctgtgttctgggacggagagctttggggactgcatcccatcatatgtccagtaatttagagtcattcctctatggattgcatgccctatttaaaggagatttccgtatttcttcaattcgagatgaatggatctttgctgacatggaattgctaagaaaagtagtagtccctgggatccgtatgtccattaaacttcatcaggatcattttacttctccagatgaatatgatgaccctactgtgctctatgaagccatagtatctcatgagaagaacctcgtaatagcccatgaaggggaccctgcatggcggagtgcagtacttgccaactctccctccttgcttgctctgcggcatgtcatggatgatggcaccaatgaatataaaatcatcatgctcaacagacgctacctgagcttcagggtcattaaagtgaataaggaatgtgtccgaggtctttgggcagggcaacagcaggagcttgtttttctacgtaaccgtaacccagagagaggtagcatccaaaatgcaaagcaagccctgagaaacatgataaactcatcttgtgatcaacctattggctacccaatctttgtctcacccctgacaacttcttactctgacagccacgaacagcttaaagacattcttgggggtcctatcagcttgggaaatatcaggaacttcatagtgtcaacctggcacaggcttaggaaaggttgcggagctggatgtaacagtggtggcaatattgaagattctgatactggaggtgggacttcctgcactggtaacaatgcaacaactgccaacaatccccacagcaacgtgacccagggaagcattggaaatcctgggcagggatcaggaactggactccacccacctgtcacatcttatcctccaacactaggcactagccacagctctcactctgtgcagtcgggcctggtcagacagtctcctgcccgggcctcagtagccagccagtcttcctactgctatagcagccggcattcatccctccggatgtccaccactgggtttgtgccttgtcggcgctcttctactagtcagatatcgcttcgaaacttgccatcatccatccaatcccgactgtcgatggtgaaccaaatggaaccctcaggtcagagcggcctggcctgtgtgcagcacggcctgccttcctccagcagctccagccaaagcatcccagcctgcaaacatcacactctcgtgggctttcttgcgacagagggaggtcagagcagtgccactgatgcacagccaggcaacaccttaagtcctgccaacaattcacactccagaaaggcagaagtgatttacagagtccaaattgtggatcccagtcaaattctggaagggatcaacctgtctaaaaggaaagagctacagtggcctgatgaaggaatccggttaaaagctgggagaaatagctggaaagactggagtccgcaggagggcatggaaggccatgtgattcaccgatgggtgccttgcagcagagatccaggtaccagatcccacatcgacaaggcagtgcttctggtccagattgatgataaatatgtgactgtaattgaaactggggtactagaacttggggctgaagtgtgagccagtgtttattataaagacatttctttttccctctcaattccaaggcattggaaaaagagaggaacaagcagaagatgcctgcaggtatcactttgatcctatgtgggagcgactgaaaatagaatgagcttggttaagcacctctcctttgcccttcaccctgactcctgtcactgtctccatccccaaataaagctgaaatatttttttaagttagctgccgagaaaacattttgcatgaaggataaagttctgttaaaatacatccttaaaaaaagtttttcctatgcattgcctatgctttaaatcaacaaactcttcatttctaaactatgatctcatatttttctaatttctttgccaaaaataattgccatgttttgtcatagaacatgaaattcatttaccttgatttttaagaacagaccagtgtagaaatgttccttttgacttatagcagtataaaagtttaatgtacagtgaaagagactatgaacagacatagatttatcttattccttgagcgctaaaaactttaataaaaaaaactgcactaattttttacagcaatgcactaaagtctgagatttctcagaacatttatttatatataaaaataaaataccattatttaaattgccttagggattagccccttccctttccttataaacacaggtagcaggaactgtgctgctcatttttctgttagtagtgtgtacttcatgccaggacattgggtattttctttaaagtgaatatagaatctcaagatatacgtagcttcatcattgacatttcccagagccaatagtcagcggatcggtcttgtgaacaccactgccagctcctgtgtctacatctcagaggagcccatgtgctctgcttctctccaccagagcaagctctgctgggcgtgcttctgggaagaaaacaattttctttaagaagaagatgaatgtccaggaatttaaagaaaggatcgattgccttttatttatgagtttctagctcttgaagttattcacatgcagttcagttagtcaagtaaaattttttttcaaataaaagtatccaagtggtgcagttaattattatatccctctttaataattttgctttttatttttcccctcttctttttctgttacttgaattttatttcctgtaatttatagtgtgtagctgtaaattgaaatatttataactgtgaaattgacttaattcatatgttgtctcataactttattttttttaaatgcatattcagggaaatatattactcatatttacaattgggcgatataggaacttcaatttagatttaatttgcaactcttagcattttttaaatccttgataaaattttcccttttggtgtgaaactccaaagaaaattgtacatctcctctgagcatttaggagcagccatctttctaccccttgtgaataaatcattgnnnnnnnnnnnnnnnnnnnnnnnnnnnnnnnnnnnnnnnnnnnnnnnnnnnnnnnnnnnnnnnnnnnnnnnnnnnnnnnnnnnnnnnnnnnnnnnnnnnnnnnnnnnnnnnnnnnnnnnnnnnnnnnnnnnnnnnnnnnnnnnnnnnnnnnnnnnnnnntttgttgaggtgacagaagagagaagctgtttttcctaccaattctgatgtagatctcacattatagcataacattacagtagaaggaatgaaaactaagaaagtaaatagtgaacatacagaacttactgcatttccactttaaaacctatttattttccctttttctaattttaaacttttgtggtcattcagaacctaatgtgccttgtgttgacatttccatagacttcacactttacaaaatttactgtttaaaaatacttgtcaaatgatttactgaacctttatacaaaagtaccctttctaaattgaccatttaaaaatgtatttttgtgataccgtcattatgttctgcatttgcctcattttggcagatctacagtatgccattaaagtttagtgttgtttttggttttggagggtttttttctgaaactgaatttataatctatttctctgtatacatatatttttaaaatcttctgaaaggaactatgttccctgctgcttcttccctttctgaagtgaatatgatcttttcatggtcattgcctagataaaagtagagccttttcaatcttagatggaagataattcattttcccacacagaaaaaaaatctgacctttacatgatttaatctgaagggctagaattttttaatttctagcccctcctccaaaaaaattttaaacacatcacatactctgaaaagtcagatttcaaatgcaagactagactttatatggaacatatatgttgggttttgattttgggtagcaattgacatatatttttctcaaaacaagttgaattttgttaacatatataattctttagtgaatttataaattaggacccctgagaagaagccctgttgtttttcttaagagtctaaaactgacaatcttttaaaaatcataatacttttctagtaattgcatcagggaattggtgataattgaagaaagatccatttcttaagaataatttgatctaaattattatatggaaataaacatacttgtgttaactaaattgatcataaattcttgttcctgcctcacccctcaccccccagagaatagtgagtgactcgtttagattctctgctttttttcagttatgtacaagacttcagcatacattaatgtctttagtttataaatttgccaatgctttaatttccataatttgaaagttaaaagatgtaactaaaatactagcttttttattcatttccttttggtggagttgtatgattgaaaactttgctttttcttgtttaattcttccgccaccccctcttttgagagaaaggtaatcgtggaatgagttataaattattgcctgtttttcctttatttctttcattcagtggcaaaaaacattttataactcctaagtttttggttaatcttccaacttataccttggtgtgaactctctttttacaccattttcaacactggataaaactttaatgttgactttttgctaaagaactttaatttttccaagaatctagattaacataagatgttgatatttaaggaacttggaagagtaagtggtgaggctgtatgtatattttttaagagattaccttttaggaaattagtgaacaaacttaaccagtgttctgccttctttgactttgttactggaggatgataatctatttctattagattcgaagtattttggaaaatatttcaagtatatctgaactacttataattcttaaaacagaagtagtcagacaatatttgtatcctaagtgagatatggaaaattactctgtatactaaatgtcaggcaatgaaaatgtaagtttttgtgtagaaaacccattaagaagatgtgtttttctttctgaattagtttatttttccatcacataccaaaatataaaaatcagcctcacatttttcagcaagtttagcttatagccttgataaattcctctgtgcttctgagcagcatccttctgcctctgcttagcagctctgcatttggtggattgctgttgtgagtcattcatccagcactgggccttttaagctgaagattcacccagtgtctaaagttgtccttttcttatagctagctttcaagcatctttcctcctaaataaatatgtgacttgagaaaaaggtaataatgattttgtcagaattctttgaatttatatttactagctacttaaccataaactgctgtccagattgttaatttcatttatatttattttaattaatttgtcatgaatatggacaaagccttttctggggngtgtgtgtgtgtatanagtttgttggttaagtcgtcattattcattcgtattctttttctgtgtaatgtaatcatataaagttactttggacagagacccagttaattttctcttttgataggatacatggtttagataaggtataaagtgtccctttttattctagaggcttttcctttaattcagagattagtggagataataacatcagtcaaggctaatgtggtacatggaacttgctaatggaggttggacattctgtttcagtcttacatggatattgtttcattggtgttgaggaagaaaaaaattagatactaccatgcattgggacagcataattctaatattacattgaatatggctttttaaaaataagtattaaaaagccaatcgttttctccatttatctatcttttttgtttgtttttaatttggttgattgatatgcacccaggccgtcttatttttacttgttaaatgtctgtctaggaagaactgtgattggaaaggaattaattattatacaaataaatctggtaggatatgagtggagtaagtttgcttgaaacagaagtatattttctactttgaatcacctcaccagagtcatctgtcaagaattatgtataacaatttatctttattgcctacatacaacatactttttctgaattaagataacttctatttgtgagttgaacttcattatctgccattttgtggaatcaaccttacattctttggtggaactagagctgattgtcaccacaaggttatatgacaactctgttctaagacttatacctattatatagggttataccttttttcttatgcctcagctctgtacctgacaatttatgattcagtggagccaagctagaaggaacaaaggtcatctaacactgtgatggggatgaattcctgagttttacctgcacaatgaggtggtgccccggaattcacaacagagtagtgatagagcataagatggctgctccagatgactcttgggtttagtgtacttgtgattgaacaagattttttatctatgaagcttgattctacaaccaaaataatagaaatggggggggggggggaatcatgtctgcttatgctttttaaaagcttatagtttaagtaaaagtaaaatgtaaaaactgattaaacctatacaagtctggcaatgagctctgcatgaggaaatggaaggaggaatattgaaaatgattctaggaaagtgaacgtaagaaaggaaaatgggttttccttttctgatcatgggctctggaaagtattcatggcctttaccagcattcagtataaaccagagataaggacatatgtacttacgtgtgtctgtgagtgtgtgtgtgtctgagtgttattctgaacagcttgtaaatattgtagttgtttaaaatggaaaataaaagctgagttcttttggcaaatatattgcatcaaaaatacagtattgacagtggataaaacactgaggaaataaattttttttcattttgccttctgtccattttttgtcaaactgagaaaaattagagtacactatattaagttctgtatggcatgttcacacttggttctgaaatcattttaaacaagctttggcctgtaaacatgagcttcaacttgcaatagatcaaaagcgtacatcatacttcatgttaaaacatggtctgtttcacacttttcttagtgcaagggttgtagtttgtcttctgaatttatctcgatgttacatattaacaatattagatagaacatgtaggataaaaatgtgtgttcaatcacagactaaactacaatacagaaaatggaaagaacatttggattatggtcatcaaaggcaggtacaaacttgtttggtatatttgcagtgtgtactaactcagtgatttcacatataatacagaaaatgcaagctaatttacaatgagaatagacatattcttgattaaatcacttataatcctttaatgcatcattttaactatttattagtaagaaccagaaccagcacgatacagattatatgcc

SEQ ID NO: 4718 - protein, 1451 aa, Homo sapien
  Unsure 6512-6670, 8968, 8984: Unknown amino acid
MSLVNFEPAARRASNICDTDSHVSSSTSVRFYPHDVLSLPQIRLNRLLTIDTDLLEQQDIDLSPDLAATYGPTEEAAQKVKHYYRFWILPQLWIGINFDRLTLLALFDRNREILENVLAVILAILVAFLGSILLIQGFFRDIWVFQFCLVIASCQYSLLKSVQPDSSSPRHGHNRIIAYSRPVYFCICCGLIWLLDYGSRNLTATKFKLYGITFTNPLVFISARDLVIVFTLCFPIVFFIGLLPQVNTFVMYLCEQLDIHIFGGNATTSLLAALYSFICSIVAVALLYGLCYGALKDSWDGQHIPVLFSIFCGLLVAVSYHLSRQSSDPSVLFSLVQSKIFPKTEEKNPEDPLSEVKDPLPEKLRNSVSERLQSDLVVCIVIGVLYFAIHVSTVFTVLQPALKYVLYTLVGFVGFGNPLCAASSRKQLPWHCFSHPLLKTLEYNQYEVRNAATMMWFEKLHVWLLFVEKNIIYPLIVLNELSSSAETIASPKKLNTELGALMITVAGLKLLRSSFSSPTYQYVTVIFTVLFFKFDYEAFSETMLLDLFFMSILFNKLWELLYKLQFVYTYIAPWQITWGSAFHAFAQPFAVPHSAMLFIQAAVSAFFSTPLNPFLGSAIFITSYVRPVKFWERDYNTKRVDHSNTRLASQLDRNPGSDDNNLNSIFYEHLTRSLQHSLCGDLLLGRWGNYSTGDCFILASDYLNALVHLIEIGNGLVTFQLRGLEFRGTYCQQREVEAITEGVEEDEGFCCCEPGHIPHMLSFNAAFSQRWLAWEVIVTKYILEGYSITDNSAASMLQVFDLRKVLTTYYVKGIIYYVTTSSKLEEWLANETMQEGLRLCADRNYVDVDPTFNPNIDEDYDHRLAGISRESFCVIYLNWIEYCSSRRAKPVDVDKDSSLVTLCYGLCVLGRRALGTASHHMSSNLESFLYGLHALFKGDFRISSIRDEWIFADMELLRKVVVPGIRMSIKLHQDHFTSPDEYDDPTVLYEAIVSHEKNLVIAHEGDPAWRSAVLANSPSLLALRHVMDDGTNEYKIIMLNRRYLSFRVIKVNKECVRGLWAGQQQELVFLRNRNPERGSIQNAKQALRNMINSSCDQPIGYPIFVSPLTTSYSDSHEQLKDILGGPISLGNIRNFIVSTWHRLRKGCGAGCNSGGNIEDSDTGGGTSCTGNNATTANNPHSNVTQGSIGNPGQGSGTGLHPPVTSYPPTLGTSHSSHSVQSGLVRQSPARASVASQSSYCYSSRHSSLRMSTTGFVPCRRSSTSQISLRNLPSSIQSRLSMVNQMEPSGQSGLACVQHGLPSSSSSSQSIPACKHHTLVGFLATEGGQSSATDAQPGNTLSPANNSHSRKAEVIYRVQIVDPSQILEGINLSKRKELQWPDEGIRLKAGRNSWKDWSPQEGMEGHVIHRWVPCSRDPGTRSHIDKAVLLVQIDDKYVTVIETGVLELGAEV

SEQ ID NO: 4719 - DNA, 2158 bp, Homo sapien
agaagatgtacttacaatgcagtgggtggttttaactctataacctttgggctctgtggttggtgctccccttcctaaataaatgaggtgtatgcagggccctcttctgccttagcgccctgccagctgggactccagcaaggcccggggcacctgaggacagagtgagatggagggccgctgctccagcagccgggcctgcatcccacaagtcaactgtgtcggacagaggatccttacaaagaagaggcagcagggttgggggctggccagctgctcgtccgccctaggtagcttgctcatctgtaaagtgggtggggcaggagttcccacctcatggggtcctggcaagcctgcagtatccccgagtggcaccagcctgcttctggggcagagcagtttgtgccccctgaggtaccactgatcctctttccctgctattaggtattgctctctccctccggtgtttgccttttcagattataaaagtaatatgtgttcccatatttggcgtctctcaggagctcaggaagtacttggctgagtggacatgtccattgtggaaaaatggcaacaatatggattccatgggtatattttatagaagaatatgaagaaaagcagctacccctaaacccatggcacaagctgttcatgttaattctgtacccgacgctttccccacggggcctcccctcactctgaaatggcatccaggtccatcttgccctccacctctgcatggctctccatgccccatcgcctctcccagatcctagcactgggtccacactctcgccctgtccatttaggttgatgaaagcaggcagtcacccgggtgggccagtcttgcctgtgggaggaacatgcagtctcctgtctcatggtttgaagtgtgccaggaagcctggcccagcccacctccccctggagtccttcccaggaggaataaccccttaggtcattgactataagatgagttcgctcactggatccttcctctctgatgagacaggaagaaggtacacagtgaccaggtaggaggaggagagggagtagaaaggagggatgcgggtggctggtccctgcatttgcctgcttccctgcacgggtgtcccactggccgcctctgctcaccagtgtcatgggattctctcagaagatgaaaacagcccctgcttttttgctagaatggctgagctttcatggaaaggaagctggacccaagcaacagccgactaccgaaggttgcctggagcagtgcagatgtgggaggaagaagggccttggtgcacactggcttttcttcctgactgcaatgtggcattgtgccagctacctcctctttctcggcctcaggaaaatggagagaaagcagccctgaaggtggctgtgacgagggaaggggcagagggcctgacagtcaaccacgcgctatattttcctgttcttccttagggcaagaactgcatggccagactcaggcaaggcctaggtgtgggctgggcattgcctacacgtgaagagatcactccgcgtccctactgcacctgtcacaaagtgccttctgatatgcctggcaaaccaaaatcggtgagcgccagcttgcttccctagaagacatttctaaatattcataacatgcttgctcaaatcaatcaccttattttacatccgctccagggagaaatgaagacatggtcctacgttgttctgtaattattttctatgtaaattttgttccttgttacaattatatatgtcttaggggaaaggaccatttcacatgtgtcacctcatgtgattctcaccacagccctgtgattgctcctgttttataaataatgacatagttccagttgatggccaaagccacagctaacgagaggcagagagagctcaggctcccaggagcttccactctcagaccttgcctcccgggctgccctgagtgaaacccctgcttagcatttggcacagccagaagcagcaagctagggtcacaacacagagaggggctgtgtaatactggctgcctctgtgctaagaaaaaaaaaaaatcactgtgtgtttgtttattttggtgcaggcccagtgttcttgcttagacttaatactacccttcatgttaaaataaaaccaaacaaaaacccaaaaa

SEQ ID NO: 4720 - protein, 25 aa, Homo sapien [sequence omitted]

SEQ ID NO: 4721 - DNA, 5726 bp, Homo sapien
cggcacgtggactccctttaatccagtgactgtcaggtcgatcatatgccgaggacgatgatcccgccgggggagtgcacgtacgcgggccggaagcggaggaggcccctgcagaaacagaggcccgccgtgggggcagagaagtccaacccctccaagcgacaccgggaccgcctcaacgccgagttggaccacctggccagcctgctgccgttcccgcctgacatcatctccaagctggacaagctttctgtcctgcgcctcagtgtcagttacctccgggtgaagagcttcttccaagtcgtgcaggagcagagctcacggcagcctgcggccggcgccccctcgcccggagacagctgtcctcttgcagggtctgccgtgctggagggaaggctgctgttggagtctcttaatggctttgctctggtcgtgagtgcagaagggacgatattttatgcatcagcaacgatcgtggactatctgggcttccatcagacggatgtaatgcaccagaacatttatgactacatccacgtggacgaccgccaggacttctgccggcagctccactgggccatggaccctccccaggtggtgtttgggcaggccccgcccttggagacaggagatgatgctatcctggggaggctgctcagggcccaggagtggggcacaggcacgcccaccgagtactcggccttcctgacccgctgcttcatctgccgtgtgcgctgcctgctggacagcacctcgggcttcctggcccgggggtcacaggcttggcagctgcggctctgctgtcccgagccactcatgacgatgcagtttcaaggaaaactaaaattcctgtttggacagaagaagaaggcgccgtcaggagccatgctcccgccgcggctgtcgctgttctgcattgcggcacccgttctcctcccctccgcagcggagatgaaaatgaggagcgcgctcctgagggcaaaacccagagcagacaccgcagccaccgcggatgcaaaagtaaaagccaccaccagtctgtgcgaatcggaactgcatggaaaacccaattactcagcaggaaggagcagcagagagagcggcgttttggtgctcagggaacagactgacgctggccgatgggcacaggttcccgccagggccccatgcctgtgcctccggggtggccctgaccttgtccttgaccccaaggggggctcaggggacagggaggaggagcagcacaggatgctgagcagggcctctggagtgacagggcggagggagactccaggacccacaaagcccctgccctggacagcgggaaagcacagtgaggatggtgccaggccgaggctgcagcccagcaagaatgacccgccctccctgcgccccatgccccgcggctcctgcctgccctgcccgtgtgtccagggcactttcaggaactcgcccatctctcacccgccgagcccgtcccccagtgcctactccagccggaccagcagacccatgcgggatgtcggtgaggaccaggtgcaccctcccctctgccactttccccagaggagcctgcagcaccagctccctcagcctggagctcagcgttttgccacgaggggctatcccatggaggacatgaagctgcaaggtgtaccgatgcctccgggggacctgtgtggtccgacgctgctgctagatgtgtccatcaagatggagaaggactctgggtgtgagggtgctgcagacggctgtgtgcccagccaggtgtggctgggggccagtgacaggagccacccagccaccttccctaccaggatgcacctgaaaacagagccagactctcggcaacaggtgtacatctcgcacctggggcacggcgtgcggggggctcagccccatgggagggccactgctgggcgcagcagggagctgacccctttccaccctgcacactgtgcctgcctggagcccacagacggccttccccagtcggagcctccccaccagctctgtgcacggggccgaggtgaacagtcctgcacctgcagagctgctgaggccgcccctgtggtcaagcgggagcccttggactcaccccagtgggctactcacagccagggaatggtgcccgggatgttgcccaaaagtgccttggccacgctggtcccgccccaagcttcggggtgcacattcctgccatagcgcagtgaccaccatccaagctcagatctgtctgtctacgctcagatgcgtcggtggctgggctgccctgctcctggtcaggccggagcccgtcctaagacacactctttgcagagctgtgcatgcgcagtctgctagtgtgtgtgtgcagcatacgcaggagcctatcctgaattttgtaaaatatcccaacagttcttaaatgaaaactggccttaagtctattcaagcatgacagcatttctctttgaggaattaaaatctttaggaaagtgatcatggctggacagcttcatgccccagaggcagcgagcacccgtcccatggctgccaagtccacagtcggggatgaagcagtcgggtgatgctcccaagtccgcagtcggggatgaagcggtcgggtgatgctcccaagtccgcagtcggggatgaagcggtcgggtgacacacctagctcagccctcccaggccacctgcagctcccagcctgtgctgtgcaggcagggtcagcccatcgccacagtgcactgtagaggccagcacacggcaaattagaaatacaacacgcggagaaaggggtccgtgagcccactcatagaggaatctagaatgttccaggcagcagaggctggcagcgtgggtcccacactgccccacaccgtgcggcaggtgctccatggcgccatgacagagtctgaggccagacctggactggaattgacagcataacccctgttccttctggacatctcccgagttctcagtgggtctctgcggacggttcttcctaatctgcctcttggtacatcacgtaatacagagttcacagactccgggtttggaagtacagagaaacacacaacgtagagagaagacacaggaaactgcgctgcctgtgggggtttctctctggctggctgtacagttcactcaaatgagggttcccattgccatcctaggagaataattagggacaagacagacaagtattaatagcattaaaacagttgtaaaggcgatattttctgagagtaggaaatttggatacaaaagcataagtcagaaagtgaaggtcaccaatccaccaacccgagaacctacagctgatggtgcatttcaggcttcttccacggtctggcctggaaccccacccggctggtgcaggcatcagatcagggtgtagaagtcaccccaagcaagaggaagccaggcagtgaggccctggggtgtggctgcagctgggcccacctgtgcgggggtgggaaggccccatcctcagggagagggcatcggcgccctgacgtcagctccactgggagtggcaggagctgtgggagcccatgggtgagggacccaccaccccgctgcactgtgcattgtgcctcccgtgtggacgccctctctgttgttggcccgcgggtgagggacccaccaccccgctgcactgtgcattgtgcctcccgtgtggacgccctctctgttgttggcccgcgggtgagggacccaccacccctagggacccaccaccccgccgcactgtgcattctgcctcctgtgtggacgccctctctgttgtcagtggctttgaggtgtcagtgcttacttagatgctggtttaatgctggacccatttgttaaacgcaccttcactttgtcaaaacccaggtttggttggcaggactgggtcttctgcccaatgccaggtgcctgcgcctctcagtggcctggttcttggacagtttgcccccatgtggcagggatagggataaggatctcctctcagtactggaggagaacagccaaccatctgagcccagagtcacagatccatcgtggccccctatgacccccaagccctaccgagggggcactcactctctgcttagccagggggcgtctttcaaaaggtgacctccatgctgtgctgtcgtgggtgtgagacgtgctcatggccttccactgccatctctcccttatctgatgcctaaagtcacgatggggacagagctacccaggggccagccatggggtgaccagccacctgagggtcagtcacctgtggagagcaggcacctgtgaagaccaggcacctgaggactggcgcctacttcccactttggccctacactggcacagagcccctctttattcatttctcatgctgagcatggcacacttctggcctctgggcatttatggatttaagaccaggatggtatttcagaagcttcccacttccttcctattctaaccgagtgcccagctcctttgctgatcatggaaagacccttaataattaggcctgcaggccaggcgcagtggctcatgcctataatcccagcactttaggaggtcaaggtaggaggatcgcttaagcccaggagttcaagaccagcctgggcaacacaggaagaatgtgtctctacaaaaaataattaaaaatcagatctgctgtatccctgaaaaagtctcaatcaacatgcatgttccactcttggagttccctgttctgagggccagccacgtcctgtgtcctggagcttagccctcagcagctcccttcagcctgggcgccgcctgggtcccaaacgtggcagctgctcttccagtctcggggccgaggagggcagggagctcagtgactgagagtcttgtgtatcacatgtcttgagtgtcctggagccaacggctgtcactgggaaaaacaccaggccccaaagatcgaatcagagacgtggctgcgtgtttgcgattgtagccaggcccttcagtgtcatcaaaggagcactggggcctccttaagcacagacggcagcccctgcccaggaggcttcttcaccacgtcctgccctgcagcctcccagacctttagatgcgcccctgcccaaggccctcctggtgacaggtgccagattgagtggtgggttgctgccaggcaggccacgctgtgttgacgctgcactcagcacgtgggtgttggctctgccggttttgtggtgtggggaccctacaggaggctgcggccctgagagcctgggatcagcgaggtgtccgacatcccttcctcaacggcaacaaaaactccccaagtcagcactttggttattttatagccacaaccctcttggaaaacagtggggaagactatggaacatagaaagtgtggatgtatcacttctctctaaaatgtcattgttagcactaattacaggttcatgtttttctgtttatgtagcttttccctatatagctgaaaaagtattaaagtcaaatataaggtgggaatgggatggaagggaggagatcaatacaacttatatttttgcagtttctactggaagaaaaaagttttcaatacctagaccaacttgttgaatttttaaaacttatgcactataaatgcaactttctctactgctttctcagtgcctttaggaagctttcaaatttttttgtactgtggtttgtattaaatttgcaatattgatgtaaaatacatgacatgctagtacatgtttaac

SEQ ID NO: 4722 - DNA, 2428 bp, Homo sapien; identical to SEQ ID NO: 3463

SEQ ID NO: 4723 - protein, 292 aa, Homo sapien; identical to SEQ ID NO: 3464

SEQ ID NO: 4724 - DNA, 614 bp, Homo sapien
agacggaaagggtgccgcccatcatagaagtaccagaacttgagctggactttgctgatttagcttatggaagaggaaccagaaatttgtccttgaataatgtttcccgtgttgggctggatcttgatagcagttgttatcatcattcttctgatttttacatctgtcacccgatgcctatctccagttagttttctgcagctgaaattctggaaaatctatttggaacaggagcagcagatccttaaaagtaaagccacagagcatgcaactgaattggcaaaagagaatattaaatgtttctttgagggctcgcatccaaaagaatataacactccaagcatgaaagagtggcagcaaatttcatcactgtatactttcaatccgaagggccagtactacagcatgttgcacaaatatgtcaacagaaaagagaagactcacagtatcaggtctactgaaggagatacggtgattcctgttcttggctttgtagattcatctggtataaacagcactcctgagttatgaccttttgaatgagtagaaaaaaaaattgttttgaattattgctttattaaaaaataaacattggtattttttgagtgcttttt

SEQ ID NO: 4725 - protein, 143 aa, Homo sapien
MFPVLGWILIAVVIIILLIFTSVTRCLSPVSFLQLKFWKIYLEQEQQILKSKATEHATELAKENIKCFFEGSHPKEYNTPSMKEWQQISSLYTFNPKGQYYSMLHKYVNRKEKTHSIRSTEGDTVIPVLGFVDSSGINSTPEL

SEQ ID NO: 4726 - DNA, 1029 bp, Homo sapien
atggagaagtttcgggcggtgctggacctgcacgtcaagcaccacagcgccttgggctacggcctggtgaccctgctgacggcgggcggggagcgcatcttctccgccgtggcattccagtgcccgtgcagcgccgcctggaacctgccctacggcctggtcttcttgctggtgccggcgctcgcgctcttcctcctgggctacgtgctgagcgcacgcacgtggcgcctgctcaccggatgctgctccagcgcccgcgcgagttgcggatcggcgctgcgcggctccctggtgtgcacgcaaatcagcgcggccgccgcgctcgcgcccctcacctgggtggccgtggcgctgctcgggggcgccttttacgagtgcgcggccaccgggagcgcggccttcgcgcagcgcctgtgcctcggccgcaaccgcagctgcgccgcggagctgccgctggtgccgtgcaaccaggccaaggcgtcggacgtgcaggacctcctgaaggatctgaaggctcagtcgcaggtgttgggctggatcttgatagcagttgttatcatcattcttctgatttttacatctgtcacccgatgcctatctccagttagttttctgcagctgaaattctggaaaatctatttggaacaggagcagcagatccttaaaagtaaagccacagagcatgcaactgaattggcaaaagagaatattaaatgtttctttgagggctcgcatccaaaagaatataacactccaaggcatgaaaagaggtggcagcaaatttcatcactgtatactttcaatccgaagggccagtactacagcatgttgcacaaatatgtcaacagaaaagagaagactcacagtatcaggtctactgaaggagatacggtgattcctgttcttggctttgtagattcatctggtataaacagcactcctgagttatgaccttttgaatgagtagaaaaaaaaattgttttgaattattgctttattaaaaaataaacattggttaaaaaagaaaaa

SEQ ID NO: 4727 - protein, 316 aa, Homo sapien
MEKFRAVLDLHVKHHSALGYGLVTLLTAGGERIFSAVAFQCPCSAAWNLPYGLVFLLVPALALFLLGYVLSARTWRLLTGCCSSARASCGSALRGSLVCTQISAAAALAPLTWVAVALLGGAFYECAATGSAAFAQRLCLGRNRSCAAELPLVPCNQAKASDVQDLLKDLKAQSQVLGWILIAVVIIILLIFTSVTRCLSPVSFLQLKFWKIYLEQEQQILKSKATEHATELAKENIKCFFEGSHPKEYNTPRHEKRWQQISSLYTFNPKGQYYSMLHKYVNRKEKTHSIRSTEGDTVIPVLGFVDSSGINSTPEL

SEQ ID NO: 4728 - DNA, 1421 bp, Homo sapien
agcggagccccgagccgcccgcagagcaagcgcggggaaccaaggagacgctcctggcactgcagataacttgtctgcatttcaagaacaacctaccagagaccttacctgtcaccttggctctcccacccaatggagatggctctaatggtggcacaaaccaggaaggggaaatctgtggtttaaattctttatgcctcatcctctgagtgctgaaggcttgctgtaggctgtatgctgttaatgctaatcgtgataggggtttttgcctccaactgactcctacatattagcattaacagtgtatgatgcctgttactagcattcacatggaacaaattgctgccgtgggaggatgacaaagaagcatgagtcaccctgctggataaacttagacttcaggctttatcatttttcaatctgttaatcataatctggtcactgggatgttcaaccttaaactaagttttgaaagtaaggttatttaaaagatttatcagtagtatcctaaatgcaaacattttcatttaaatgtcaagcccatgtttgtttttatcattaacagaaaatatattcatgtcattcttaattgcaggttttggcttgttcattataatgttcataaacacctttgattcaactgttagaaatgtgggctaaacacaaatttctataatatttttgtagttaaaaattagaaggactactaacctccagttatatcatggattgtctggcaacgttttttaaaagatttagaaactggtactttcccccaggtaacgattttctgttcaggcaacttcagtttaaaattaatacttttatttgactcttaaagggaaactgaaaggctatgaagctgaatttttttaatgaaatatttttaacagttagcagggtaaataacatctgacagctaatgagatattttttccatacaagataaaaagatttaatcaaaaatttcatatttgaaatgaagtcccaaatctaggttcaagttcaatagcttagccacataatacggttgtgcgagcagagaatctacctttccacttctaagcctgtttcttcctccataaaatggggataatactttacaaggttgttgtgaggcttagatgagatagagaattattccataagataatcaagtgctacattaatgttatagttagattaatccaagaactagtcaccctactttattagagaagagaaaagctaatgatttgatttgcagaatatttaaggtttggatttctatgcagtttttctaaataaccatcacttacaaatatgtaaccaaacgtaattgttagtatatttaatgtaaacttgttttaacaactcttctcaacattttgtccaggttattcactgtaaccaaataaatctcatgagtctttagttgattt

SEQ ID NO: 4729 - protein, 68 aa, Homo sapien
RSPEPPAEQARGTKETLLALQITCLHFKNNLPETLPVTLALPPNGDGSNGGTNQEGEICGLNSLCLIL

SEQ ID NO: 4730 - DNA, 2024 bp, Homo sapien
gcccgtgagttttttaccatgctgctctgaccagtttgagtggcaattaccaatagatttgttttctttattctatggagatgtttttaccactgacactgttttctgattatagtctgcttcatagaaaatagcctgcataatcaaacaaggagttactttgaaattaaagtatgcctggctattaaaaatgcagattttaggtgggtaaacatcaggtaggtctgggtgggtcatgttctaggcctagaaaaatacactattagacaagttctaaagaaggcaaggagataaaggcatcaggtggtaacttctaattgaatattatatgttgatcatacataatatatactatgcctggaaattatgactgaaaagcacctattcggttagtgctcctattcatgagaacatatctccaatactaaatgagataagcctgttctaaaatcttatagccagtattttaagaaacttgattatacttaccaaaggaacattgtttgttttctcttgttttaaatatggagaggtttaatcctttacataacaaaggaattaattttagcaaaatgattcattccaaccttcttataagaaatatctaggagagtcaagtaagaaaaataacgaatctaagtgataaacattcaagaaattctctaaataagagatttatttataattttaatatctcagggttctttttaggtttccaggggaaaagagcaggataacagtgtggagactgctaagttgagaatttaaaacaaatgagaacataagatttttaaaattgcattgtgaatgtaaaatttttatcaatcctttgctctcttttagacatattgagaaaatgttaaatagaaaaaattaagtattttaataagatgtttcagatctttgagtatgaaaaacataacaaaaaagcctaatttcaaaaaactatttgagatcaagggacaatggtgtgaccaatatgaagggtcaagactgaaatgtattgtctttactatcaagaactctactttcagttgtttctcagacagttaatttcagcttcatagagatttctgagcaaattaagaaacactgttttcctgggtttgttttgggtatatgtcattatagttatgttatttcttgttgaaatttataattgtaggttttttgtattgttttagtatttaatggtgtataatgtgttattacattatatgtagttataccaaaatattgcctgaagataaatcatgacaaggtcccctgtttattcctgtgttacagacgcatggaattgctcctgtagatttgaatttttgtttcatttttttctgtcccacccttcactctctctgtttcagaacatttttggtagaagtgctatccagaagtgaacttgtcaaaaggcaagtagcatgaaagaagacagaagaagcaaaaggctaatacagtggataatttctgagcacttgaagtttcttcaaatgtgcaagactgtgtgtcttcctattagatgtataaattggatatttcatgcctaattaaatgttgcgttggattgcagtgcctatcatacagcgattggagtaaattgaggcctaatcctgaacacatatagagcatattgttagatatttttcctgtgacatttgaagttattattctcccatttcctttttctttttttgtttataatcatatgtccctaagattgttttccttttttggaccaaaaaaaagaaaaaaaaaatcttagcttttcatcctcccagtgtattctgcattgtccttaccctagatcagccccttctgtgtaacagtttttctcacaatgtagcaacttttatccacccttcaggaccttcactggggactagttcattcattttcaaatagctatttcaacctttaacatctactggtcttagtcttttacacagaagccagagtgactgggtctgggcaagactctggtggtggtatcaccactcgtaaccttactggattggtttcagcaaatt

SEQ ID NO: 4731 - protein, 35 aa, Homo sapien
PVSFLPCCSDQFEWQLPIDLFSLFYGDVFTTDTVF

SEQ ID NO: 4732 - DNA, 579 bp, Homo sapien
  Unsure 80-119: Unknown base
ggtgaaatggggatggaaaagggttatataaaaacaaataatggtaacaataatgatgaagattggagtactccatctcnnnnnnnnnnnnnnnnnnnnnnnnnnnnnnnnnnnnnnnncatgttcattatagttcattacagttacatagtccgaaggtcttacaactaatcactggtagcaataaatgcttcaggcccacatgatgctgattagttctcagttttcattcagttcacaatataaccaccattcctgccctccctgccaagggtcataaatggtgactgcctaacaacaaaatttgcagtctcatctcattttcatccagacttctggaactcaaagattaacttttgactaaccctggaatatctcttatctcacttatagcttcaggcatgtatttatatgtattcttgatagcaataccataatcaatgtgtattcctgatagtaatgctacaataaatccaaacatttcaactctgttagaatagaggtaattgtgtggtttgtgtatgggactataacagtaatattaattcccaaaatttctcctactaggaacagtgggta

SEQ ID NO: 4733 - protein, 56 aa, Homo sapien
  unsure 27-40: unknown amino acid
  Unsure 80-119: Unknown amino acid
GEMGMEKGYIKTNNGNNNDEDWSTPSXXXXXXXXXXXXXXMFIIVHYSYIVRRSYN

SEQ ID NO: 4734 - DNA, 4898 bp, Homo sapien
  Unsure 4221, 4288: Unknown base
ctccacgctgtgcagcggatcaacaaagccatccggaggagagtggcggctgacactgtgaaggagctgatgtgccctgaggcccagctgcctccagtgtaccctgttgcatcgtctatgtaccagctggagctggcagtgctccagcagcagcagggggagcttggccaggaggagctcttcgtggctgtggagatgctctcagctgtggtcctgattaaccgggccctggaggcccgggatgccagtggcttctggagcagcctggtgaaccctgccacaggcctggctgaggtggaaggagaaaatgcccagcgttacttcgatgccctgctgaaattgcgacaggagcgtgggatgggtgaggacttcctgagctggaatgacctgcaggccaccgtgagccaggtcaatgcacagacccaggaagagactgaccgggtccttgcagtcagcctcatcaatgaggctctggacaaaggcagccctgagaagactctgtctgccctactgcttcctgcagctggcctagatgatgtcagcctccctgtcgcccctcggtaccatctcctccttgtggcagccaaaaggcagaaggcccaggtgacaggggatcctggagctgtgctgtggcttgaggagatccgccagggagtggtcagagccaaccaggacactaatacagctcagagaatggctcttggtgtggctgccatcaatcaagccatcaaggagggcaaggcagcccagactgagcgggtgttgaggaaccccgcagtggcccttcgaggggtagttcccgactgtgccaacggctaccagcgagccctggaaagtgccatggcaaagaaacagcgtccagcagacacagctttctgggttcaacatgacatgaaggatggcactgcctactacttccatctgcagaccttccaggggatctgggagcaacctcctggctgccccctcaacacctctcacctgacccgggaggagatccagtcagctgtcaccaaggtcactgctgcctatgaccgccaacagctctggaaagccaacgtcggctttgttatccagctccaggcccgcctccgtggcttcctagttcggcagaagtttgctgagcattcccactttctgaggacctggctcccagcagtcatcaagatccagatccaggcctgggcccggatgtgggcagctcggaggcaatacctgaggcgtctgcactacttccagaagaatgttaactccattgtgaagatccaggcatttttccgagccaggaaagcccaagatgactacaggatattaggtgagctgcctgatccaccctccccagctgttgggagggagaggaccccacagagccaggcaggtctagacatccttctgcgactgcacagcagtgtggtacgcagatttgcccatctcttgaatcaaagccagcaagacttcttggctgaggcagagctgctgaagctccaggaagaggtagttaggaagatccgatccaatcagcagctggagcaggacctcaacatcatggacatcaagattggcctgctggtgaagaaccggatcactctgcaggaagtggtctcccactgcaagaagctgaccaagaggaataaggaacagctgtcagatatgatggttctggacaagcagaagggtttaaagtcgctgagcaaagagaaacggcagaaactagaagcataccaacacctcttctacctgctccagactcagcccatctacctggccaagctgatctttcagatgccacagaacaaaaccaccaagttcatggaggcagtgattttcagcctgtacaactatgcctccagccgccgagaggcctatctcctgctccagctgttcaagacagcactccaggaggaaatcaagtcaaaggtggagcagccccaggacgtggtgacaggcaacccaacagtggtgaggctggtggtgagattctaccgtaatgggcggggacagagtgccctgcaggagattctgggcaaggttatccaggatgtgctagaagacaaagtgctcagcgtccacacagaccctgtccacctctataagaactggatcaaccagactgaggcccagacagggcagcgcagccatctcccatatgatgtcaccccggagcaggccttgagccaccccgaggtccagagacgactggacatcgccctacgcaacctcctcgccatgactgataagttccttttagccatcacctcatctgtggaccaaattccgtatgggatgcgatatgtggccaaagtcctgaaggcaactctggcagagaaattccctgacgccacagacagcgaggtctataaggcaagtgttgtctccccacccccacctcccaatccctcctttgctttgctggtggtcgggaacctcctgtactaccgcttcctgaacccagctgtggtggctcctgacgccttcgacattgtggccatggcagctggtggagccctggctgccccccagcgccatgccctgggggctgtggctcagctcctacagcacgctgcggctggcaaggccttctctgggcagagccagcacctacgggtcctgaatgactatctggaggaaacacacctcaagttcaggaagttcatccatagagcctgccaggtgccagagccagaggagcgttttgcagtggacgagtactcagacatggtggctgtggccaaacccatggtgtacatcaccgtgggggagctggtcaacacgcacaggctgttgctggagcaccaggactgcattgcccctgatcaccaagaccccctgcatgagctcctggaggatcttggggagctgcccaccatccctgaccttattggtgagagcatcgctgcagatgggcacacggacctgagcaagctagaagtgtccctgacgctgaccaacaagtttgaaggactagaggcagatgctgatgactccaacacccgtagcctgcttctgagcaccaagcagctgttggccgatatcatacagttccatcctggggacaccctcaaggagatcctgtccctctcggcttccagagagcaagaagcagcccacaagcagctgatgagccgacgccaggcctgtacagcccagacaccggagccactgcgacgacaccgctcactgacagctcactccctcctgccactggcagagaagcagcggcgcgtcctgcggaacctgcgccgacttgaagccctggggttggtcagcgccagaaatggctaccaggggctagtggacgagctggccaaggacatccgcaaccagcacagacacaggcacaggcggaaggcagagctggtgaagctgcaggccacattacagggcctgagcactaagaccaccttctatgaggagcagggtgactactacagccagtacatccgggcctgcctggaccacctggcccccgactccaagagttctgggaaggggaagaagcagccttctcttcattacactgctgctcagctcctggaaaagggtgtcttggtggaaattgaagatcttcccgcctctcacttcagaaacgtcatctttgacatcacgccgggagatgaggcaggaaagtttgaagtaaatgccaagttcctgggtgtggacatggagcgatttcagcttcactatcaggatctcctgcagctccagtatgagggtgtggctgtcatgaaactcttcaacaaggccaaagtcaatgtcaaccttctcatcttcctcctcaacaagaagtttttgcggaagtgacagaggcaaagggtgctacccaagcccctcttacctctctggatgctttctttaacactaactcaccactgtgcttccctgcagacacccagagctcaggactgggcaaggcccagggattctcaccccttccccagctgggaggagcttgcctgcctggccacagacagtgtatcttctaattggctaaagtgggccttgcccagagtccagctgtgtggcttttatcatgcatgacaaacccctggctttcctgccagatggtaggacatggaccttgacctgggaaagccattactcttgtgtctgctactgccctcccacagtcaccccaatattacaagcactgccccagcggcttgatttcccctctgccttccttctctctgcactcccacaaagccagggccaggctccccntccctacctcccactgcatcagcagtgggtgttcctgcccttcctgagtctaggcagctctgctgtngtgatctgcacaccctccaacctgggcagggactggggggatgcagtgtgtgttagtgcccatgtggcattgtggcactgttgccccccatggcggcatgggcaagatgaccttccattagcttcaagtcttgttctcttgtctgtggtctgtttaatatgtgggtcactagggtatttattctttctcccatccttacactctggatcattgtgcagacttaatcagcgtcgatacgacttttttttttttttttttttttttttttgagctcaaagagagttctcattttccctattcaaactaatacccatgccgtgttttttaccttggatttaaagtcaccttaggttggggcaacagattctcactcatgtttaagatcttgttatttcagcttcataagatcaaagaggagtctttcccttttctcttttaccctcaggattctcatcccttacagctgactcttccaggcaatttccatagatctgcagtcctgcctctgccacagtctctctgttgtccccacatctacccaacttcctgtactgttgcccttctgtcgtcttctcgcagccgtataactcccaaaaaaaaaaaaaaaaaa

SEQ ID NO: 4735 - protein, 1266 aa, Homo sapien
  Unsure 4221, 4288: Unknown amino acid
LHAVQRINKAIRRRVAADTVKELMCPEAQLPPVYPVASSMYQLELAVLQQQQGELGQEELFVAVEMLSAVVLINRALEARDASGFWSSLVNPATGLAEVEGENAQRYFDALLKLRQERGMGEDFLSWNDLQATVSQVNAQTQEETDRVLAVSLINEALDKGSPEKTLSALLLPAAGLDDVSLPVAPRYHLLLVAAKRQKAQVTGDPGAVLWLEEIRQGVVRANQDTNTAQRMALGVAAINQAIKEGKAAQTERVLRNPAVALRGVVPDCANGYQRALESAMAKKQRPADTAFWVQHDMKDGTAYYFHLQTFQGIWEQPPGCPLNTSHLTREEIQSAVTKVTAAYDRQQLWKANVGFVIQLQARLRGFLVRQKFAEHSHFLRTWLPAVIKIQIQAWARMWAARRQYLRRLHYFQKNVNSIVKIQAFFRARKAQDDYRILGELPDPPSPAVGRERTPQSQAGLDILLRLHSSVVRRFAHLLNQSQQDFLAEAELLKLQEEVVRKIRSNQQLEQDLNIMDIKIGLLVKNRITLQEVVSHCKKLTKRNKEQLSDMMVLDKQKGLKSLSKEKRQKLEAYQHLFYLLQTQPIYLAKLIFQMPQNKTTKFMEAVIFSLYNYASSRREAYLLLQLFKTALQEEIKSKVEQPQDVVTGNPTVVRLVVRFYRNGRGQSALQEILGKVIQDVLEDKVLSVHTDPVHLYKNWINQTEAQTGQRSHLPYDVTPEQALSHPEVQRRLDIALRNLLAMTDKFLLAITSSVDQIPYGMRYVAKVLKATLAEKFPDATDSEVYKASVVSPPPPPNPSFALLVVGNLLYYRFLNPAVVAPDAFDIVAMAAGGALAAPQRHALGAVAQLLQHAAAGKAFSGQSQHLRVLNDYLEETHLKFRKFIHRACQVPEPEERFAVDEYSDMVAVAKPMVYITVGELVNTHRLLLEHQDCIAPDHQDPLHELLEDLGELPTIPDLIGESIAADGHTDLSKLEVSLTLTNKFEGLEADADDSNTRSLLLSTKQLLADIIQFHPGDTLKEILSLSASREQEAAHKQLMSRRQACTAQTPEPLRRHRSLTAHSLLPLAEKQRRVLRNLRRLEALGLVSARNGYQGLVDELAKDIRNQHRHRHRRKAELVKLQATLQGLSTKTTFYEEQGDYYSQYIRACLDHLAPDSKSSGKGKKQPSLHYTAAQLLEKGVLVEIEDLPASHFRNVIFDITPGDEAGKFEVNAKFLGVDMERFQLHYQDLLQLQYEGVAVMKLFNKAKVNVNLLIFLLNKKFLRK

SEQ ID NO: 4736 - DNA, 1523 bp, Homo sapien
atgaagaggcggcggcgccggcgcccggtcgccccggccacggccgcccggggcggcgactttagggcagaagacggggctgggttggaggcgcgggaggagaaggtggtgtactcgcggtcgcaactgtcgctggctgacagcaccaaggcgctgggcgacgccttcaagctcttcatgccccgcagcacggagttcatgagctcggacgcggagctctggagcttcctctgcagcctcaagcaccagttctccccgcacatcctgcgcagcaaggacgtctacggctactcctcctgccgggccctggtacccgaccccccggggccccctacagcccgcggccaggcgcgccggccggttccgcgcgcagcggccaggaggaggcgccgcggagcccgggcggccgctgcccgcaggaggaagccccggccgccacccccaccgccgccgccccccgaggagagctgcccggccaagcccgtggcccccgggccctgcttcgggggccgcaccttggaggagatctggagggcggccaccccgacgctgaccaccttccccaccatccgcgtcggcagcgacgtgtggggcgagcgcagcctggcggcagcgcggcgcagggcgcgccaggtcctgcgagtgaacctggaacccatggtgaggctccgccgcttcccggtgccccgggcatgaggtgcggcctccagggcgcctcctgccggccccgaccttgggacaggccttccgcccggaggaatgaacaagtgtcagtcgagtgtttacagatccggccaggaccccggcccccaatgcactttacgcgcgaagaagttgccggatggttgtccctgtcccgggccgcggcgcggtcgtcttggacgctggggcaggtgtgccctctgctgcctcccgtacccggcctgcggagggaggggacagctggacccgcaggggaggtccctttcttcctgaccaccgattgagacgtctccaggaccttaggggcagatccgttttctcactgttggactctacctcactggtctggaagtcctccgaagacattatttttccaaaggaatttggtttcgtgcttgtgtaataaagccagaatttacttgttctttatctccccctttttctatttcactgtcacccctctttgtggacagaagttcgaacatgtggtgttgcactagtttgtgctcagggtattctgaagcccactcgtttcctaatttttactggattccaaagctttgatcgaggatattttttaagaggttcaagcttgtgactgttagtagtgcaaggatttgtatgggctcagtgattacaaacaaagacatgcaaaatacaactgtttaaacattttcaaggtatttttaaaggttttgtattgaaacaatgtttatatttactgagctcctaaaaatggtagaatacacatgaaaacttttgtttaggaaaagttaacttgttaaattcttttgaattgaataaaaaaatgcattgaaacc

SEQ ID NO: 4737 - protein, 231 aa, Homo sapien
MKRRRRRRPVAPATAARGGDFRAEDGAGLEAREEKVVYSRSQLSLADSTKALGDAFKLFMPRSTEFMSSDAELWSFLCSLKHQFSPHILRSKDVYGYSSCRALVPDPPGPPTARGQARRPVPRAAARRRRRGARAAAARRRKPRPPPPPPPPPEESCPAKPVAPGPCFGGRTLEEIWRAATPTLTTFPTIRVGSDVWGERSLAAARRRARQVLRVNLEPMVRLRRFPVPRA

SEQ ID NO: 4738 - DNA, 2994 bp, Homo sapien
ggcctccgccgccgcctcgggaggtgaggacgaggaggaagcgagcagcccagacagcggccacctcaaggatggaatccgacgtggtaggcccagagcagatactgtccgcgatttaataaatgaaggagagcattcatccagcagaatccgttgtaacatctgtaatagggtgtttccacgggagaaatcgctccaggctcacaaaaggactcatacaggtgagaggccctatctgtgtgactatccagactgtggaaaagcctttgttcaaagtggacagctcaaaacacatcagcgtcttcacaccggagagaaacctttgtttgttcagaaaatggctgcctgagcagattcacccatgcaaaccgccactgtccgaagcacccctacgccaggctgaagagagaggagcccacggacacactcagcaaacatcaggctgccgacaacaaggccgcggccgagtggctggcgaggtattgggaaatgagagagcagcgcacccccactttgaaaggcaagctggttcagaaggctgatcaggagcagcaggaccctctggaataccttcagtctgatgaagaggacgacgagaagagaggggcccagcgccggctgcaggagcagcgggagcgcctgcatggagccctcgcgctcatagagcttgccaacctgactggggcgccactccgacagtagcttggacactgactcttccactgtacaaaagtactgcccagcatacttaaaaagtagatccttgggcataagctaagcaccttatttgcttatcataggctgctattctgtagaaatttatgaagaatgttattgccccagaatatggggtgagagagaactgcacttttttaatatggaaatgaattcatcgtaaagtttaaaatattttgtaaatatggactgcacagtacagggtagaaaactacatattgtgggaagctagattttgcaagtttaatgcattcattggaagcagttctcacaggaagcactttctgaataagacacttgtttgaaaaacagaatggtacaaatagccaaagaagattaaaacagattatttataagatcatttttaacaatatatattagtatgtttaacaatactgtaaacactgaagcaagcaagaaagtataaaatatgtaagatagataattttaattgcaaaatactgtgcccactaaggctagagaaatgggaggctattttggaagatgttctaagtaatggacttagaagaaaatagatatttgaggctcttggtaagatgcacaatagttcagaatttttgaaattggagcaaaatcagtcttattctatctggggctttacaactcagtataatgtttaagtttgaaaagcacttgtcatccctagcatgttaacttgggaacttttgcacatttcatatttctcatttgctgaaattgagtgattaatcttgcaaagtctaggtaacatagtaattggtaattttaaaaatacatattaagggccctgtaatgagatttggcacttggatttttactaaagggacacctgcagggttgttttgtagtgaaatgttttagatcttttgttagcaaacactacattttaattgtactgcttgtttagaattattagcaaatggaagcctccatatttatattttcagtgcataaagccaccttcttgctttacttcagagtaacatgccaagctattttgtgttcactaaatttagctatcagttaaacactgcagaaaatattagctactcaaataagtaggcttctgaaatagttttaactgcaagtgtgttaacttgtgtggtggtttgaagccatttttccaaataaagttattaaacaccactttatgtactgaagcatgaacagaaaaatcaagagctgagcagaccacctcctttatgtaggcaaaacttccatcattttggcttttgttctaaacagaactaaatgacatgcatagcatggtaacttacagatcgcttaattggagtaaaactcagagtaatagagggaaatatgggctcttcagtgcctttttagcttttttgagttgaagacgttcctacagatgtagtttaaacattacaaagtaggcttctttatccaaaaatcccaatgtgtcatagtacacagatagtttaaaatatgtagccacggggaaggggaggcatgtaaatgtcttgaagaggagaaaaagtatgaaagaagatacgatagttacgaataatgtgtatgatgaggacatactttaaaaatgtaattcctctgtacagtaaattacaaatctttagggatttttttgtaataagagaatttatatttgtaatggtctaagaatttttttgtaatgtggtatatagaattttaatttggagcacttataagctggtaagagagactatagcatctgaattatcttggtttatgtttcagcatttcctctagaatttttgctctcaaatatgtgatttaatgaactaaaaacaacactcatcagtcttgggaaatttgaactttgatcaacttaactaaagaaggaagggtagtaagaatttttcaaatacaaatatttgccaattcacagatgataacatttaaggccttcaaaagtaagggtttttccttgtttctccagtcagcttttgtcaactctaatagttttttcataaacattttttatttgtataattgcaacagtttaagaaattatcacaactatttagaaacatttaaaatgttctttttgatataagctatatacttggaaaaatacattggtatctaaaatttgaggtgtgttaagactgctttttgttttaaaaaatggtttacattcaaatttttgaagtgttttatgcttcatatggctaagttgtagtttggcagagttaacagcataagaataaacatgctgtaattttaaaagatgctttgaataaaaatttattttaattt

SEQ ID NO: 4739 - protein, 139 aa, Homo sapien
MKESIHPAESVVTSVIGCFHGRNRSRLTKGLIQVRGPICVTIQTVEKPLFKVDSSKHISVFTPERNLCLFRKWLPEQIHPCKPPLSEAPLRQAEERGAHGHTQQTSGCRQQGRGRVAGEVLGNERAAHPHFERQAGSEG

SEQ ID NO: 4740 - DNA, 2496 bp, Homo sapien
gttgttctctcgcggcgcgaccgcctcagtcacttcgcccagagacccggacctggtccgctggggagcaggcggccataaaccccctctctcccggttccctgacgccgcggcaggagctgttacaaacaccctgcggttggtctccgatgcccttcagtgaggtggggacgcctggaccctggtgagcgaaccccaagccaccccccaccccaactcagtgtcttcgccggcccccggcccgtacgcctgtctggtcgccatggctgaaaacacagagggggatctgaactccaacctgctccacgccccctaccacaccggggaccctcagctggacacggccatcgggcagtggctccgctgggataagaatcccaaaacaaaagagcagattgaaaacctgttacggaatgggatgaacaaggagctgcgagatcgtctttgttgccgaatgacttttggggctgcaggacttcgttctgccatgggggcagggttttgctatattaatgaccttacagtaatacagtcaacacaggggatgtacaaataccttgagagatgtttctcagacttcaagcagagaggctttgtggttgggtatgacactcggggtcaagtaactagcagctgcagcagccagaggcttgctaaactcactgctgcagtcttgctggccaaagatgttcctgtgtaccttttttcaagatatgttcctacaccttttgtaccatatgcagttcagaagctcaaagcagttgcaggtgtgatgattactgcctctcacaaccgcaaggaagacaatggatacaaggtttactgggaaactggtgctcagatcacatctcctcatgataaagaaattctaaaatgtatagaagaatgtgtggaaccctggaatggttcctggaatgataatttagtggataccagcccgctgaagagagaccctctgcaggacatttgcaggagatacatggaagatctgaaaaagatctgtttttacagggagttaaactcgaagaccaccttgaaatttgtgcacacatcttttcatggggtcggacatgactatgtgcagttggcttttaaagtgtttggttttaagcctccaattccagtaccagaacaaaaagatcctgatccagacttttctaccgttaaatgtccaaatcctgaagaaggagaatctgtgctggaactttccttgagactggcagagaaagaaaatgcccgggtagtgctagccacagatcctgatgcagacagactggcagcagcagaacttcaggagaatggttgttggaaagttttcacagggaatgagttggcagctttgtttggatggtggatgtttgattgctggaagaaaaataaatcaagaaatgctgatgtgaagaacgtttatatgttagccaccacagtctcttctaaaattctgaaggcaattgcacttaaagaaggatttcattttgaagaaacattaccaggttttaaatggattggaagtaggataatagacctcctggaaaatgggaaagaagtcctttttgcatttgaagagtctattggttttctctgtggaacttcagttttggataaagatggggtgagtgcagctgttgtggttgctgagatggcatcttacctggaaaccatgaatataacattgaaacagcaactggttaaggtttatgaaaaatatggttatcatatttcaaaaacttcctatttcttgtgttatgaaccacctaccatcaaaagtatatttgaaaggcttcgtaattttgattctccaaaagaatatccaaaattttgtggaacatttgctatattgcatgtacgggacattaccactggatatgacagtagccagcctaataagaaatcagtgctgcctgtgagtaaaaacagccaaatgattacatttacttttcaaaatggctgtgttgctacccttcggacaagtggaacagaaccaaagataaagtattatgcagagatgtgtgcgtcacctgaccagagtgacactgctttactggaggaagaactgaagaaactcattgatgctctgatagagaattttcttcagcctagtaagaatggactgatctggcgttctgtttaggggtacaccaatatgtcatgacactgtgtgggcatatggaacagagcaaccgagaactgcatacattgaaccttgtgttagcattctctctctatctcatctggccgagtatctttttccttttattttctttctttttggtcaactggctagactaaacaaagtataagtttgaaatgaaatggtctagagggaaatgattcaaattttttcataattcaaacaaaagttattacactaaaagtattatagtaacgtattgtccttccgttaacagaaacatcacaattcaaaagtgagttttcttattatagtgtgattaagcctagttctgtatctcgtaattgtgtatagcatggtaaaag

SEQ ID NO: 4741 - protein, 622 aa, Homo sapien
MAENTEGDLNSNLLHAPYHTGDPQLDTAIGQWLRWDKNPKTKEQIENLLRNGMNKELRDRLCCRMTFGAAGLRSAMGAGFCYINDLTVIQSTQGMYKYLERCFSDFKQRGFVVGYDTRGQVTSSCSSQRLAKLTAAVLLAKDVPVYLFSRYVPTPFVPYAVQKLKAVAGVMITASHNRKEDNGYKVYWETGAQITSPHDKEILKCIEECVEPWNGSWNDNLVDTSPLKRDPLQDICRRYMEDLKKICFYRELNSKTTLKFVHTSFHGVGHDYVQLAFKVFGFKPPIPVPEQKDPDPDFSTVKCPNPEEGESVLELSLRLAEKENARVVLATDPDADRLAAAELQENGCWKVFTGNELAALFGWWMFDCWKKNKSRNADVKNVYMLATTVSSKILKAIALKEGFHFEETLPGFKWIGSRIIDLLENGKEVLFAFEESIGFLCGTSVLDKDGVSAAVVVAEMASYLETMNITLKQQLVKVYEKYGYHISKTSYFLCYEPPTIKSIFERLRNFDSPKEYPKFCGTFAILHVRDITTGYDSSQPNKKSVLPVSKNSQMITFTFQNGCVATLRTSGTEPKIKYYAEMCASPDQSDTALLEEELKKLIDALIENFLQPSKNGLIWRSV

SEQ ID NO: 4742 - DNA, 3677 bp, Homo sapien
  Unsure 611-653, 848-883: Unknown base
attttttcatttccctatattttttgttaaaacattaataactctcttattagctgtgagccaccgcgcctggccctctgcagttgtttaataaggcacagaatacctgtagcataggtcagccttacgatgtccatgaattacatattcagacgttttagagcctgatacattttggaaaagaaaaacaacttctacacctattctacagtccgcatttaaaacaataaattcctctattaaaaacgtaaagccgggtttgcttgcgtgccacagggaatatatccaggaaggttattatgaagctgtcaaatcaagatgatgggaataaggcagtttgaacgaacagtcttcccacagtcaggccatttttgctgatttggtttagaattttcagaaatacttagtacactccacctgttctttgatgggaatatctaagaaggctaggtaggttcttagggttagcctgagtcatctaggggctcaactccttgtgaggggaaatgacagtgaacaagttagtactttgctccacaaatgcatgaaaggacaaatttgcatcttctatcagtatttaacttccttttgctaatgacaaataaatatannnnnnnnnnnnnnnnnnnnnnnnnnnnnnnnnnnnnnnnnnnctctcttattgtttggccaacaatatagccaacaataagagagtttttaatgttttaacaacaattttaaaggccacagagcaaaccatttttcccatggattaatagggatgcttcggatggttttgattgcaaggtctttactgtgcaaagcaagcactgcctgtgcttgtggaaaccaccggacaagagggnnnnnnnnnnnnnnnnnnnnnnnnnnnnnnnnnnnntgcttatgtttttataagcatagccaaaggtctggaattttgtggctggaggggggcctgtctcgttcatctccattttgcagaggtggtgactgaagccactgagtgtcggtgctttactcatggtcatccagttgatccctcagtggcagaaccaggcctgggagcctgtttctggctgcctggtccagtgcgctttgggaggtcacaacccaaacctagtctggggcaagacctccctttgggagatggcctctgatatttttggagcaccaggtcttccttagtgtttgagaccgtctcggagctgactggctttcacatgagaaacagttgggtctgtgttacatgtgtgtctattattttatgggataatagttcagggccgtcagggggaaactcagtccaggtagctcacagagggacccactgtacataagcgagcatgacctgtgcaggctgcactcctttgcagagttgtctgatgtcctgtgggccatgctgatgcgcgtgggcctccgcgttgacaccacctatggcgtcttgctactgctcccggttatcgcgctctttgcagttttgaccattttcatccttctgatcatggaagggctttctgcgtttcttcacgccatacgcctccactggtgagtttgaaacctagccttggagctgttatttaaaaaacatacccgccccaccatgcctggccaaaatatgcaaatattttttatcctgtgctacctagaattacaagtagaggattgtttttacaattttgtcttgttttagtaattggggacaatgggataaaatgacatacaacaaatggttatcccacttgtatatttttttaaagactcttatcctgttacccttacataaaaccagttatgataattgtatgtttggaagataaattgtatgctgagccttaaaacccagtgtgactgtagaagatataatgcggacatgatttgaatttagtgacagcttggctgatgtcactgaaccagaagggtttatactgagtgaaggaaaggtaaaaagtagtattttgtatatttttgtaacaaaatataaatgaagatattttaccatgaagagattgcacttatccttgagaacagtctaaatataaatgaagatattttaccatgaagagattgcacttatccttgagaacagtctaatgatactttttttactttcagactgtttctagctaaagttctgataaaagtattgagttaatttaaactttcaaacactgtttagatcagttgaaaactaattcttaatagccattgttttataatctttagtttaaattcatctgtttgacatttggttttttgtgaacttgagtcagtcctattgaacattttgacctatattcttgcaaattatgttaatttttcatattttagtttgattttagacaattattttcaaaaagaaacctgactttttttcaccttcttgacattgtgagtgatacacgttaaaaggctatttgcccgcatcctcctctatcctgtttcgaggtagagagcttggcacttctgttacaagctgagagtctggaggtgctgagtttaacgtggctgtgcaggtgatttcaaggcatgagctgaacagcgttgacacagccgtgacttacaattaaaccctttcaattacagtacagattctgtgtgctacttgatgagatgttacccaaggccagtttggacttactgctttttgtccctcatattaaattatcaaatgatgccgatgaaatgcttgaaaatgattctgctctcaaagttatgcttccctagaaaggtgtcatgtcgggcacttgtgttgggtgactatgacatcccagcagtgctggtcaggtctcagagttgctttcacctagagctgatgcttccacaaggggacatttgtgttactttgctccaggggtctgtcataaaaacaatggtaactacttcatccctaggaagcccaagacttcagggcactgttagctgattggtaaataagggacacgatattcacgggaattgtttactgctccccactagtaattctcatggggccacttttttaactctttctaattaacacctcttctcagcatagagcagaggatgcagtcatttctctgttgaaatctatgtagtatttatgtagaatgtcattatatgaaaagcgaattcagaatcctaactctgggaaagcgctctctggaaatgtagtttgataatagtgtcttataggggccacgggaatttgtttctctataaagcgatgggctccagtgtcatgttaccagagttatcgctcagttttgtttgttaaggcttttgctagaacctattatgtatccagtttttaaaacatacttcattcccttgatagcagagatccagagcacagatggcaagttgtgtggatgatactgaatatgtttattttcctaaagataaatgtcacgacacgacatttctcagtttttatttagatgtttattaccatgtgttaacagaatcttaaaacccaagggatttcttcagtaaactagactttgattcaacctgctgggctggagactgtaattgccgtggtcagttaaggagtgcaaagggtgttctgtctgataggatctgggtgagccctgcggactttccagcagcgaaaggacttggaactcctctttcgctgaatgctgctctgtttctggaatggatattttataacaacattctggtgtcagcatcccctcagcagttgtttattt

SEQ ID NO: 4743 - protein, 105 aa, Homo sapien
  Unsure 611-653, 848-883: Unknown amino acid
MRCYPRPVWTYCFLSLILNYQMMPMKCLKMILLSKLCFPRKVSCRALVLGDYDIPAVLVRSQSCFHLELMLPQGDICVTLLQGSVIKTMVTTSSLGSPRLQGTVS

SEQ ID NO: 4744 - DNA, 3666 bp, Homo sapien
actggttacaaaaggcagcgagaatatgaagaggaagatgacgatgatgatgaatacgactctgaaatggaagattttattgaagatgaaggagagcctcaggaagaaatatccaggcacattagagaaatctttggttatgaccgaaaaaaatacaaagatgaaagtgattatgccttacgttacatggaaagtagttggaaagagcagcagaaggaagaagcaaagagcttaagactgggtatgcaagaggacttagaggaaatgagacgtgaagaagaagaaatgcaacgtcgaagggccaagaagctgaagaggcgttagctgctgcttttatttttgtgaaattctagagctgctctgctgcaaggatttcctgccttcagactgaagaagcccccttatcattttagatttatacttgggtactcaaggagaaggaatgcatactgtcatttgcaggctgtcatttgagcataaaatattttcagatattttccagggtgaaatctgtaatgcagatgatataatgcccacttgtgctcttatgaagttaactgttcacagatgccagccttgatcctgatgagctatgcactctaatgtggggccactcaccagtcagccaatcttttattgttcctttgctactttgaaaggaaaaaaaaggttgtctcttgatttctgtaattcttctgctgatctgtgagtagggcactgccctgctcccaatcaaacttagtctttttatgagaaacctggaccttccatgaatgttgccagcaataaagtgacttgtcctaatctatggattgagaacttgaaaatgtagagtagaatttataactatcatatggatgtcatcctgtgactttgaagtacaaagtagaataaattctgtattcatggattggatgctgagcattcttactcattaatttaggtggctaggaattaatgaaaaaattttcaagttaaaatacaggttataacagtataatattcttttctaagttttcctttcagatttactgttatgttggctttagtgtaagacaaggtcactgtgctgattgatttttatctaaaaaaattcatttttatatcgaagaaaaaatattttattcaaacattagatttgaaagagtaatagtttataaaataaggaagtaacatgtgaggctctcccctcctcccctcccccatcataaagatattttgaaatcccaaggtgccctcatacctcttgacattaatgacttcattttttagcttgaatttgttagcaaatattaatggcagaaaaccaaaaactaaatttatggtatcgagagcaccaccttctctttttgcccatattgcactttgatttcaaactatgcactgtgaagagatttttttccccaggtaggaagggatgttccctgttatcgttattttactgagctgtggaaactcatttttaccctttttaaagtcataaatatggacttaatagcccttaaccttcaagtccaagcagttccaatcaggctgacttaggatcatgctggaaggaagccaagtctcaagaactgtcagcaacagaaaatgagatatgatgctagagagcatttgtccttgactgtaagtacagaggcttaggggaagtgagacataagcttgtaggaataataaacgttctacaataaacgttttggctatcttaagccattgtatgggggggattaggaagtaggagggattgtcctacaacaggcccttatacttcaacagcccaaatattttggtttattcctttttatccataaagtctttattcttcaagtttgggtattatagattaccattgttagcctcccttaatgggaccatatgagccaggcttttaagacggactcattttgaattgagtttcaaactttgaaagtgcaaggatttaatttttaagttgaatcccatgaaaggtgtcatcatcactaggaataacaccctttgtaactacatatagaactgttacaatggtagcagaaaatcctattgatttcatctcacccatttcagataccttcagtgaaattaagggtagtgtgatgtcccatgtaataaaacaggcttagaacatcaattcctctgctgccatttatgtgcttttattcccccttcaaaaattttttattggatatatatatttttcagtattcagactctgaaatctgtcattacaatcaagtgcttgtcacagctgaaagatttctggtggcttaaagtttactagcagtaaatttatgatatggtacagttctttgtacagaaaggcaccattatgttagaataaatttccagaacttagtgggaagaatcaggttttaaccttgtgtgtctgttacttctgagtgcatttctataatataaatgttgatttgcgtcaacattataaaagagcacttctgtggctcatttaaaagaaaaaaaaaggttaagtcttttaaattttggccttgtttccaaatcctgtcttccatgttgtttttctgcacttcctgaccactcttataaaaagctcacaaacctttgaagaaactggagtaggctgttatttcattaaggtttacaaattaaatgcttgatttttaatgtattctctactgttttgatttttggattttcttaattcaacatttgaagatgtgccttttgggtaatgttaatcacgaatgtagtaatatttcatgattgtaataatgttacatgatcatgggtgtggcattctctaacaaatgatgtgaaaggaaagtagttttcataaaactcatggctctgattgcacagtcccacttgcttttgatattgctatgtcaaagcaaagggcacttcttttaaggctactttcagaactttgtattttcgctaaactataaatgcagttgtgtccagttggaggccagggtaccacatgtcacaggcggccttacatgtgtgccgtgaaaaggttcaaagaccgttaacaaaaaagtaagtctggccgggcatggtggctcaagcctgtaatcccagctaccggggaggctgaggcaggagaatcgctagaacctgggaggcggaggttgcagtcagccaagatagcaccactgcactccaggctgggtgacagagcgagactccatgtcaaaaaaaaaagaatgtgggaactcaaattttcatttttaatgtaatccccaagattttctccaagaaataaattgttgttttgtattttgtaacttaaaagcagctattggtaaatttctgagatatagcaggagaccaaaacatgtttggaaagagaataaatatatgaagagagactggttgttttattttcaatgtattgaatatattagactactatttattttctgagtggatgtgattaaatattcagacgtttagtgtatgattaagagtgagatagagatttctttggagtaattaaatccatcctgtcttttacacaatggacaaatcaagttaaaaaaatttttagatagcttagcttgttttctggtgctgttgacctgcaagagaatatacttttgcatatacaggtgaaagttttgcaatttatgtatacaagaaattgtaggcattaaaaatattttattgataaaaaaaaaaaaaaaaaaa

SEQ ID NO: 4745 - DNA, 2356 bp, Homo sapien
atccacagtaggcattttaataggacagataatactgaaggggtaagcaaaccagatggatttcaagaacatgttacagctactcacaaaacttacagatgtaatgatttggtagagttggcagtaggcttgagtcatggagatcacagcagcatgaagttagtagaagaagcagtacagctgcaatatcagaatgcttgtgtgcaacaaggcaactgtacaaaaccatttatgtttgacatttcaagaattttcacttgctgtctaccaggcttacctgaaacttcttcttgtgtttgtccaggatatatcactgttgtgtcagtatctaataatcctgtgatcaaggaattgcagaatcagcctgtgcgaatagttctcattgagggtgacctcacagagaattaccgccacctgggatttaataagtctgcaaatattaaaacagtattagatagcatgcggcttcaagaagacagctcagaagaactgtgggcaaatcacgtgttacaggtgttaatccagttcaaggtgaaccttgtcctggtacaaggaaatgtgtccgaacgcttaattgaaaaatgtataaacagtaagcggttggtaatcggctcagtgaatggcagtgtgatgcaggcttttgcagaggctgcaggagcagtacaggtggcctacattacacaagtgaatgaagattgtgtgggcgacggggtctgcgtgaccttctggagaagcagccctttggatgttgtagataggaacaacagaatcgcaatcttattaaaaacagaaggaattaatttggttacggccgtgctcactaacccagttactgcacagatgcaaatcaaagaagataggttctggacatgtgcctatcgtttgtattatgctctaaaagaggaaaaggtcttccttggaggtggtgcagttgaatttttgtgtcttagctgtcttcatattcttgcagagcaatctctgaaaaaagaaaaccatgcctgctcagggtggctgcataatacttcctcttggctggcttcatctctggcaatatacagaccaactgtgcttaaattcctggcaaatggatggcagagatacctttcaactctcctatataacactgccaattactcatcagaatttgaagccagcacatacattcaacatcatctgcaaaatgccacagactctggctctccttcatcttacatcttgaatgaatatagtaaactaaatagtagaatttttaattcagacatttcaaataaactggagcagattccgagagtttatgacgttgttacaccaaagattgaggcgtggcgccgagcattggatttagtattgttagtacttcagacagacagtgaaataattactggacatggacacacacagataaattcacaggaattaacgggctttctatttttgtagtgttactggctaagtctttggaaaataatttttcataatatgtcatgctaataataaatatattgatagccaagtcatggtgcctaaaatgccagctattgccaagaagaaaatagttgatgtctgtcaataactgtgcatggtctgagattttaccctacttataagctaacaagttagcctgttactgtttcgtgggatgctacagaatgcataagacacctgggtcagaaacaaaggacttatcgctcacagcaaaagctgtagccagagcttcatgttggttttattcagttcctcatttttctagttcccacaggaggaacacaaagggcccatgatgaaagcctgcacacagtgggttatgttgtaagcttgggttattaactgcttttatagtaagcaaaaaatcctggtctttgtccaaagggagttattaccccatacttgaagatagcttagtgtaaacacaagcctaggacatggactaggtaaagacaaagtccttgcattcttgacatacccagtaagtatgcagggacactcagagcccatagtggatagtctcttccaacagtctgctcctcagcctgagatgttcttggccaaacttgaattttcacatgagtatgccactctatcagctactctgattaacctgacagtcgggttgtttagtcagtaccaaatttgttcatttggtctcatatagcaattaatgcaggctattatcagacacagcagcaggatgaagccaacctgcagtattaacctcagtcccgtcccccaaggtcttgactcaatcaactctaagttccaagggaggaccaataggtctttttattaggcagccagaatgtagtgaaggacaatttattatactttatgacccaataaagggagctttgactgacgt

SEQ ID NO: 4746 - protein, 428 aa, Homo sapien
MKLVEEAVQLQYQNACVQQGNCTKPFMFDISRIFTCCLPGLPETSSCVCPGYITVVSVSNNPVIKELQNQPVRIVLIEGDLTENYRHLGFNKSANIKTVLDSMRLQEDSSEELWANHVLQVLIQFKVNLVLVQGNVSERLIEKCINSKRLVIGSVNGSVMQAFAEAAGAVQVAYITQVNEDCVGDGVCVTFWRSSPLDVVDRNNRIAILLKTEGINLVTAVLTNPVTAQMQIKEDRFWTCAYRLYYALKEEKVFLGGGAVEFLCLSCLHILAEQSLKKENHACSGWLHNTSSWLASSLAIYRPTVLKFLANGWQRYLSTLLYNTANYSSEFEASTYIQHHLQNATDSGSPSSYILNEYSKLNSRIFNSDISNKLEQIPRVYDVVTPKIEAWRRALDLVLLVLQTDSEIITGHGHTQINSQELTGFLFL

SEQ ID NO: 4747 - DNA, 1114 bp, Homo sapien
cagatattcccatttatgttggaaacacagaaaggcctgtattttggactctgaatcagagcggtgtccagttgactaatatcaatgtcgtgccatttggaatatggcagcaggtggacaaaaatcttcgattcatgatcttgatggacggtgttcatcctgagatggacacttgcattattgtggagtacaaaggtcataaaatactcaatatagtagactgcaccagacccaatgggggaaggctgcctatgaaggttgctaatgatgagtgattttgctggaggagcatcaggctttccaatgactttcagtggtggaaaatttacggcagaggagactccaatctaaatcctgtcatttcagaggaatggaaagcccaattcattaaaacagaaaggaagaagctcctgaactacaaggctcggctggtgaagaacctgcaaccccgaatttattgtccctttgctgggtattttgtggaatctcacccatcagacaagtatggctagacactttgtacatttttacatacaacttaacgtatggtggaatgagcgactttgctgtgaaagcagtgtgacatgagaaggaaagtgattagtaggtgtctggaactttttaacaagctgctggagaacccagagcatgaataaaagttacacttggcagccaggaactctttcagaagataaaataacagatagatattctccgaaaggatcccaggaaagaggatggcaactgccatttattatgtgaagtgaactggggacttttaactaagccatctaagttaatctcccaatagcactatgcgtaggaagggggtattgttccttttttgcagataaggaatctgaaactcagaaaggtcaagggacgtgcccaaagtcaccctgttggaaacatgagttgagaatggaaccctggtatgcttagttctaaagctcttttctctataccatactgcattccagaatagaattatgtctttcttctcatgttttaggtatctaatgtgatttttcttgcagcaatataacttctgcaaatactatgaatcatcaccaatgtatgaaattgttgaaagaaataaaagaccatgaatttg

SEQ ID NO: 4748 - protein, 90 aa, Homo sapien
DIPIYVGNTERPVFWTLNQSGVQLTNINVVPFGIWQQVDKNLRFMILMDGVHPEMDTCIIVEYKGHKILNIVDCTRPNGGRLPMKVANDE

SEQ ID NO: 4749 - DNA, 3307 bp, Homo sapien
cgcggcggcggcggcggcggcggcggcgttgagtgtctggcccgccggtccggtcggggtgtgcagtcggacggacgagcagcgcgtcgctgtcctccggcagctggagatgtccgagcccaaggcaattgatcccaagttgtcgacgaccgacagggtggtgaaagctgttccatttcctccaagtcaccggcttacagcaaaagaagtgtttgataatgatggaaaacctcgtgtggatatcttaaaggcgcatcttatgaaggagggaaggctggaagagagtgttgcattgagaataataacagagggtgcatcaattcttcgacaggaaaaaaatttgctggatattgatgcgccagtcactgtttgtggggacattcatggacaattctttgatttgatgaagctctttgaagtcgggggatctcctgccaacactcgctacctcttcttaggggactatgttgacagagggtacttcagtattgaatgtgtgctgtatttgtgggccttgaaaattctctaccccaaaacactgtttttacttcgtggaaatcatgaatgtagacatctaacagagtatttcacatttaaacaagaatgtaaaataaagtattcagaacgcgtatatgatgcctgtatggatgcctttgactgccttcccctggctgccctgatgaaccaacagttcctgtgtgtgcatggtggtttgtctccagagattaacactttagatgatatcagaaaattagaccgattcaaagaaccacctgcatatggacctatgtgtgatatcctgtggtcagaccccctggaagattttggaaatgagaagactcaggaacatttcactcacaacacagtcagggggtgttcatacttctacagttacccggctgtatgtgaattcttacagcacaataacttgttatctatactccgagcccacgaagcccaagatgcagggtaccgcatgtacaggaaaagccaaacaacaggcttcccttctctaattacaattttttcagcaccaaattacttagatgtatacaataacaaagctgcagtattgaagtatgagaacaatgttatgaatatcaggcaattcaactgttctcctcatccatactggcttccaaatttcatggatgtttttacttggtcccttccatttgttggggaaaaagtgactgagatgctggtaaatgtcctcaacatctgctcagatgatgaactagggtcagaagaagatggatttgatggtgcaacagctgcagcccggaaagaggtgataaggaacaagatccgagcaataggcaaaatggccagagtgttctcagtgctcagagaagagagtgagagtgtgctgacgctgaaaggcttgaccccaactggcatgctccccagcggagtactttctggagggaagcaaaccctgcaaagcgctatcaaaggattttcaccacaacataagatcactagcttcgaggaagccaagggcttagaccgaattaatgagaggatgccgcctcgcagagatgccatgccctctgacgccaaccttaactccatcaacaaggctctcacctcagagactaacggcacggacagcaatggcagtaatagcagcaatattcagtgaccacttcctgttcactttttttttttttttttttttttttttttgagctgcggggcatgatggggattgctgcatatcagcagttggatgttcttgcctctgacagtagcttatttgctctgggggccaggaattggattcagtttacactatcattaaaaaagagggagagagataataaactatattttggtggggatggtgattaaacacctcttttgggtatgccttttaaaaatgcttatagagaaaaaaaattttaaaaagaaagctaatgctagtatatactgcaatgttaggggaatgaacatgttttcctactgcattggggacttctagataggttaatgaaaggccttttattctgttactggacatgaaaactttgtctaatttcttactctattgtacgtttacagtcgcagcactaaaaatggatgacatcaaacatttttaacaaaatgatgtacaaactaaggactatttattgataatgttttgctactcttgtcagacaatggctataaactgaattaggcagtcttaaaaaaaaaaaaaaacagaaaaagaaaaaaaagaacgttgcaaatttgttaaaatgccaaaaaggacagtttaattttgtacagattatgcttacctcaggtttctttagtgtgcttgaatgcccttctttccatataacacttatcttcttcttaattcggcaatggaatatcttttaagttttaaaaaaaactggaataattatatctatcttttttgccgtttatatttaggggtttttgttgataaaatcaagtcttggttgtggcttgctgaattaaatatttatgagtggtgcatttttaagtatagtgaacaagacaccatattaagtacagtgataaagcatctatattctgtaaaaaaaaaaaaaaatctgcctatgcatgttttttaagaaaaaaaaaatggctgtatcggcctgtatgggactgtaatgcgcttagtggtctgacatatactggaaatgtatgtatactggcgtactttatattctctaaaatgcttaatgcctttgaaattttgtaatcaaaaaaaagctttgaaaaaatctaaaggggagagtattctttaaattttttaacataagcttgtcaatgcacatgtagatggttagcatgtttagcaaaccttgtgaaattataataagtttgtagttacatgtgaaactctaaatgcatggcaactgttaatgtcataacagtttagttattttgttctgttctgtcatgtgccacaaaatatgtacttttttcacttttttccctttgtatatcagttacgggttacaactggttcattctgaaaacaacaacaacaaaagtccattcatattttttaacaattgtataagtgcccaagtaattcactacagcctaaagccttgcctttgtaatttgacttctgacatgttggcaatcaaagcatgcacttgtaacaatgaaaaagaaaaagcattttatattactactcaataaaatgtgcatgaacttaaaaaaaaaaaaaaaaaaaaaaaaaaaaaaaaaaaaaaaaaaaaaaaaaaaaaaaaaaaaaaaaaaaaaaaaaaaaaaaaaaaaaaaaaaaaaaaaaaaaaaaaaaaaaaaaaaaaaaaaaaaa

SEQ ID NO: 4750 - protein, 511 aa, Homo sapien
MSEPKAIDPKLSTTDRVVKAVPFPPSHRLTAKEVFDNDGKPRVDILKAHLMKEGRLEESVALRIITEGASILRQEKNLLDIDAPVTVCGDIHGQFFDLMKLFEVGGSPANTRYLFLGDYVDRGYFSIECVLYLWALKILYPKTLFLLRGNHECRHLTEYFTFKQECKIKYSERVYDACMDAFDCLPLAALMNQQFLCVHGGLSPEINTLDDIRKLDRFKEPPAYGPMCDILWSDPLEDFGNEKTQEHFTHNTVRGCSYFYSYPAVCEFLQHNNLLSILRAHEAQDAGYRMYRKSQTTGFPSLITIFSAPNYLDVYNNKAAVLKYENNVMNIRQFNCSPHPYWLPNFMDVFTWSLPFVGEKVTEMLVNVLNICSDDELGSEEDGFDGATAAARKEVIRNKIRAIGKMARVFSVLREESESVLTLKGLTPTGMLPSGVLSGGKQTLQSAIKGFSPQHKITSFEEAKGLDRINERMPPRRDAMPSDANLNSINKALTSETNGTDSNGSNSSNIQ

SEQ ID NO: 4751 - DNA, 979 bp, Homo sapien
tgctctcccaggcagcaacctgatcaattcattcacaccatggtgctaatagctaatgttaggttcatattaatttacccaggaatatctgaattccaggctttaggactaggcattaaaccaaagtggtgactttcaatggagggctaatacatactgaagcagacagactggagggaaagaaattttggataaagtgggtcccacagcactgcctttcatattgcatacagtaagcaaacacctactttggttaccataatgggaatgctgacttttaagaaattaagaaatgtatccatgaacatggctatcagtttctcagatgtctgctcaccttcttttcattttgcctctctcctttcctacgttgggcctgattttcaggggaaagtctaaactagtagcttactaatttaggagtactggtgcagctacgatccagacagcagcctgttctctgagcttctccattccatggcttatccagacttctcatttatcactctctgggttctatgaaattgtggtgcaaagagtaaacaccctcaaccatagtaatgtatacttcaagataaataattccacatttcctatataaagttgttgaattttgattcaaaaatgcgtaagtattccaataagaaaaactttgtatgtagtgatttctatgtaaaaatattgtaattattattatattcaaatggtttatatgttttcattgtcactcagttaagcagccaattctgttagctggtaattccacaaagagaagccatctgccccaggagcaacagaccaagctgccttggtctgagagggtgcatctgtggaactcttgcgcaacttacattttatgtcaccttttgattttactcccaagatactgtgaaaatgttgcacttggaatttatttatggctataacttataatattcattttaataataaagattgtctttgtaattacatagaaaaa

SEQ ID NO: 4752 - protein, 43 aa, Homo sapien
CSPRQQPDQFIHTMVLIANVRFILIYPGISEFQALGLGIKPKW

SEQ ID NO: 4753 - DNA, 1022 bp, Homo sapien
ggaccggccactaccggtcctgagtctggctccagcgccaccaccagtggccgtggcctcgccgtctgccgtcgccccccgtgagcctggacccctgcgctcccgcaccagcccccgcctccgccctgcagaagcccaagatctggtccctcgcggagactgccacaagcccggacaacccgcgccgctcgcctcccggcgcgggggggtctccaccgggggcagcggtcgcgccttccgccctgcagctctctccggccgccgccgccgccgccgctcacagactggtctcagcgccgctgggcaagttcccggcttggaccaaccggccgtttccaggcccaccgcccggcccccgcccgcacccgctctccctgctgggctctgcccctccgcacctgctgggacttcccggagccgcgggccacccggctgccgccgccgccttcgctcggccagcggagcccgaaggcggaacagatcgctgtagtgccttggaagtggagaaaaagttactcaagacagctttccagcccgtgcccaggcggccccagaaccatctggacgccgccctggtcttatcggctctctcctcatcctagttctttaaaaaaaaacaaaaaaacaaaaaaaactttttttaatcgttgtaataattgtataaaaaaaatcgctctgtatagttacaacttgtaagcatgtccgtgtataaatacctaaaagcaaaactaaacaaagaaagtaagaaaaagaaataaaaccagtcctcctcagccctccccaagtcgcttctgtggcaccccgcattcgctgtgaggtttgtttgtccggttgattttggggggtggagtttcagtgagaataaacgtgtctgcctttgtgtgtgtgtatatatacagagaaatgtacatatgtgtgaaccaaattgtacgagaaagtatctatttttggctaaataaatgagctgctgccaaaaaaaaaaaaaaaaaaaaaaaaaaaaaaaaaaaaaaaaaaaaaaaaaa

SEQ ID NO: 4754 - DNA, 2580 bp, Homo sapien
agctgggctgtcacccccgagctccttagacactcctcacacctgtccatacccgagggtggatattcaaccagccccaccgcctacccgactcggtttctggatatcctccgtgggcgaactgcgagccccattcccagctcttctccctgctgacatcgtcccttagttgtggttctggccttctccattctcctccaggggttctggtctccgtagcccggtgcacgccgaaatttctgtttatttcactcaggggcactgtggttgctgtggttggaattcttctttcagaggagcgcctggggctcctgcaagtcagctactctccgtgcccacttccccccacacacacaccccaccctgttgctgaccaaggtgatttttggcacatttgttctggcctggcttggtgggaccccacccctattctgcttctgtgagtccctgatagagaaggaggtcccatcaggcccctggaacacactcaggcttccgtgactcaggacaaggaccacgggaggcccaggtgcggaaaggaggctccgtgagatggggtccagcccatcccaacacaagggtgcagcttgattcgggagttccccacctcctgcccattctccgcgtccttttaccccatggagagcctcagccatggcaagtccatctggagtccaggaagcaggcaactggcctgacccatgagaccgtttggagaccaagcagcagatgcaggtgtggaccccaggaacctacaggggtgtcagccgctgagccccctccctgctgtgtgggtggtgagcaggctgggtctttgtctgtcttcttctacacggcatgtgcctgcaccagccccaacacctgagctggtttagcgcaaagaagagctctgactctccaggggtgctgggacatcacgtggaattggatcccaggctctcttgggcgagaaagaccattctggaggtgggagtgggagagctgcctgtctgcccacgggctctgcgtctccgcagtgggtggccttggatgcccggcccctccctttctgtgcactggggacgctgatggaggctgaagctgctgttcggaggccctctattggtgcctctctcctgccgtcatcactatggcaggaaaacagagatggtttagtaatgaattatcattcccaaacccgtgtccacctggaacatcaggatgggaccatgtttgaaaatcgggtctttccaaatgtaattaagtaaggcgaggccatactgcatttacaatgggcccaatccagtgtccctatgagagacggaagaggagacacagacacaaagcaggaggccacataaagacagaggcagagactgaagtgatgctgccccaagcccagggatgcctggagtccccaggagctgggagaggcaggaaggaccctcccctagagtctctggagggaactggatacaattgcagagtgcactaaacagttgccccagaaagacatgtcttgttttaaagcccagaacctgaaattattatagattttattcggtaataaggaactttgcatgtgtaattacttaaggatatgaagatgagattgtgctggattattaagcaccctaaatgccatgacaggtgtccttccaagagacagaagaggagacacagacacagagcaggaggacacgtggagacagaggcagactggagtgatgcggccacaagcccagggacacctggagcccccaggagctgggagaggcaggaaggatcctcccctagagcctccagggggaactggaggatgcgtaagagacccagaacttccacagaaggaggaaaattaacctcctgcttctctagactgttccaaagctgaaccctagaaagcaaagctgatacagaagcatccaggctgcaggagtacaggtcgcaagtgctgagcgtgggccttgggtgtgtctcatgggggaaaaaaaactgtgaaaaacctcagagtagcatcttcacagtaacgcacggacgatccctaaactgccttgtaaacaaaaatgagagcttgagtcagaggaagccgagacaatatccttcctcgacaacgtgcgagaaccctgacgtcccccagcaaaggaagacgttgcaagcaggcaaaatgcgtcgatttttttttttgtcagtatgatgatttttgcagccacttggctattgagagcagccgacaccccctcttacagccgtggatgtttcctggaaactgactcagtctgttcactggttgagctttgagtgaaaagataacacaggtctattgactcacacacatgttttaagatggaaaactttacttctgttcttggcaggacatggagagagggagggattccaaaaagtctcagcctccatcaaggcgtggcagctcatgccggtaatctcagcactttgggaggctcaggcgggaggactgattgagtccgggtgttcaagggccaacctaggcaacacagtgagaactcatctctgtaaaaaataaaaataaaacattaaaaaaaacatgaaaaaaaaaaaaaaaaaaaaaaaaaaaaaaaa

SEQ ID NO: 4755 - protein, 97 aa, Homo sapien
MKMRLCWIIKHPKCHDRCPSKRQKRRHRHRAGGHVETEADWSDAATSPGTPGAPRSWERQEGSSPRASRGNWRMRKRPRTSTEGGKLTSCFSRLFQS

SEQ ID NO: 4756 - DNA, 1616 bp, Homo sapien
ggttccttcttttggccacttaaaatatcttatatttctagatttccaggtctatgtggaaatcatcacactggggccaataaatgggttagttcagatgtgctgagaaaagtaaatagtgtaccctaaatatcttgcatgtacatttatctatttctctgtttaatgccacttaattttgtaagaaatgagaaatgaaaccctatgtatcagtggaaaaatccttcttgcttcagatttcccaactttattctggaggagaaaaaaatctgtatttctcattaacagagatagaaaaaggtgatgtacttacgatggtcacattcatattgggcattggatctatttaagcctagaagtataacagataatcagttccttaagtgtaaatatgttcttaaatgtttggcctttttatctgttattcaaatgtattagtaattctcatattttgcaaacagatccttttgtgtatattataaaatatataccaaatctgtttttccttttgctgtggaagatgtctttatataatattgagacttcccttgcaaatgagagacgggactctggtcaggtatagtgtgtaggcctagccccatgtattaggaactcataaactcagaaatccaaggattaaacattttatgtctccttcatttatgcaagtcatgctttcattctacatgtagttaaaactacaagtatgagaaaaaatagaactttccattggaattttttccaatcaggtaatgttttagcaacttgaaatcagcacttaatttgattgtattacctatcaaagaaccaataacctttcctttttctgcagtaaagaaaatgaaatatcctttattttccaaatgtatgaagcacaaatgcaatatagttatttaaaatataaaatactttaaaatgaatgtgaagaatgggaaaatatatttttgcatgaaaacagactacttacaaatgtgcttaatatctcaggaaaaaaagaatgaataaccgtatataaaattggtaaactataaattggctgtatttccttgccggttttaattttaaggaagcatttacatgaaaagaaaaaaggatcctagtagtctgaatttcctctcaagtatgctagaaaatactttctatgaatttacaattaactgcaataagaagtgggttagcattcaagtaaggtcaataccccaaatgagaaactcttcagttagaacacattagtggttgtaacacagaggcagtagataaatatttgaaatgtgagcatttctaaacttggtaccaaatggaaagggtttcatgaggtgacagtggcttttaaacattcatttgaccgattattctaattttccttgttaaatcattgcaacagttgcatgggggagaatggatattttttgaagaattgcttattccactttcaatttttaaaaatcgaggggattaaaatattactttttaaatatgcataaaagtatcttaactgtaattacattttcagttgctttgttatagtagcatgcatattaaatataaaatgcatttatgaaaatttttgtaaaaaataaaagattttctcgagccggggagaatccaaatacaac

SEQ ID NO: 4757 - protein, 42 aa, Homo sapien [sequence omitted]

SEQ ID NO: 4758 - DNA, 6014 bp, Homo sapien
attatgggctgtgggtgccgctgagcaagatggagctgtctgcagtgggcgagcgggtcttcgcggccgaatccatcatcaaacggcggatccgaaagggacgcatcgagtacctggtgaaatggaaggggtgggcgatcaagtacagcacttgggagcccgaggagaacatcctggactcgcggctcattgcagccttcgaacaaaaggagagggagcgtgagctgtatgggcccaagaagaggggacccaaacccaaaactttcctcctgaaggcgcgggcccaggccgaggccctccgcatcagtgatgtgcatttctctgtcaagccgagcgccagtgcctcctcgcccaagctgcactccagcgcagccgtgcaccggctcaagaaggacatccgccgctgccaccgtatgtcccgccgtcccctgccccgcccggacccgcaggggggcagccccggactgcgcccgcccatttcgcccttctcggagacggtgcgcatcatcaaccgcaaggtgaagccgcgggagcccaagcggaaccgcatcatcctgaacctgaaggtgatcgacaagggcgctggcggcgggggcgccgggcagggggccggggcgctggcccgccccaaagtcccctcgcggaaccgcgttataggcaagagcaagaagttcagcgagagcgtcctgcgtacacagatccgccacatgaagttcggcgcctttgcgctgtacaagcctccgcccgcccccctggtagccccgtcccccggcaaggctgaggcctcagccccgggccctgggctacttctggccgcccccgccgccccctacgacgcccgcagctctggctcctccggctgcccctcgcctacaccacagtcctctgaccccgacgacacgccccccaagctcctccccgagaccgtgagcccatccgcccccagctggcgcgagccggaggtgctcgacctgtccctccctcccgagtcggcagccaccagcaagcgggcaccgcctgaggtcacagctgctgccggcccggcacctcccacggcccctgagcccgccggtgcctcctccgagcccgaggctggggactggcgccccgagatgtcaccctgctccaatgtggtcgtcaccgatgtcaccagcaacctcctgacggtcacaatcaaggaattctgcaaccctgaggatttcgagaaggtggctgctggggtagcaggcgccgctgggggcggtggcagcattggggcgagcaagtgagggggctccaccaaggaggggggcttgggggggccctcctgcccgaagtcatactcttgctcccaccccacccttgcccccagccctctctccctgtgctttgcttgtctcaaatggctcggtgttgacccagggatggggctgggtagttggggtcccagaaagccgggggtaggggccaccctggaatggggcaggggaagggcacaccccctgcccatgcatggtagcccactgggtggtttctggaaagccctagaaactagggttcctctgccccttccacatcccacctgtctctctagcttgcttcctgctctcctgtgcggcgtctgatttctcggtgctaacctggcagctgtggggcccttaggagccccccaccgagggtggacacagtccctttccttcctgcagatgcctaggcaggaggagggcttcctgcctgtttggcaaagtcccaggcagaggccaaggatgaggcctgactcggctcctccctccacatcagccagggcatcagaagttgggccagggcggggtcttccctgctcgattttggacgaggcctaagtagaccccctatgccctgccccagccctggctctttcctaaccccctcaacggtgggaggaactggcagagggtgcgcctggccacagcctccccgcatctaaaggccccttcagttcttgaccaaaggtgctacgagaacctgccgtggaaacttccagttgtgcgtctgccccactcgctgtgtttgtccgtgggttcatacatgcattgggtgctaggccccaggctgccgggtggcaccctttacagttcctttgaacaggggcattgaaggcctggactgcctctcgcctcagtaggcctggggaccaggcttgggtctggaggtttgctgtggaagtcaccaggcctcccctcctggcccaggtgtgctgggggcaccgtgccccccacccccctgccctcctcagggtggtcagcccaacctgtcggaccttcacttcacatcatggtggggaccgagatagagagggagaccccattccaagctccctcttcctccgggtgtttggggaggatgctgaagaatccattcccgagggcctcccggcttgtcccagcccctcttttgcttctgaccacggaggctttctcacagcccagcctgcctgaagcaaaggaggctcccgtgtcctgggcagcttctgtttccctctgctgcctgggagctgaggcacccgtgccagtggcagaggccacagccccagccttaggccaggccctgggagggcaggcaggcaaaggggagaccagagggtctgtgttctccaggagaatgagggtgttggtcccagaattgggaccggggccccgctggccagccctgggccacttcccgggtctccattgtgcgtgggtggcgtgttccaggcgtggctggagctggcttcctggctgtgctgccatgggcccctccctcagaagcacgttggcaggaggccgatcagaaccctagcgcctttggtcctaagaatgggaggctgccttccttcccaatctccctgccagggcccacagcgtggccctagccctcccctccccgggatgtagaacggggaccctcgcagggttggggcgggggctgatactcctcggcccctccctaccctgccctgtgtgttggctttgtggccgtccaagtgccaattggcttttcgcccaaataagggctggtatttctcctctgtccttggaggtgatttccccctgaccccctcccccaggtgagtgaccacctgggtgccagttacaggtgtttccagagaccatagaaatgtgttttcctgagagttcgtgtcattcgtgacttttttgtaaagaagttgtgttttcagaggtgattttatgacaggaaagtgaaagaattagttttgcaaaaaaacaaaaacaaaaaaagaggaaaaaaaaaagaaatagaaaaaaatattgtgggattcctatgggggggtggcgggggagaaagagctatttaagaaaaaatagtaacgcagtgattgcacaggtgaggtggcaatgtcaggatggggcggaggcctgggcccagctggcaggtcccctggcatcgcaggcactgtggagagggcctggacccagatctccacacccgtgcttgctcaaagggaaggacaacagcgggcccccgggagctaacccaagctgcaggtcccggcaagctgaggtttgggagggtgggggttgtcactggtgattttctccagggggctggtgagtgggcagtttggtttcttgcccccttctgttcctttcccagttgttgggccatctggtccccaccaccgccaccctatgggggagacctccctccccacgggtcaccctaaagcccacaacctctctgagcctccctggcctgaaaggggatgcaggcttcaggaggcaagaagctgggcccctgggggtggctggggagagggaatgcatttcccttgccacaggtggtctgcttctgctggcctgagctccaagtggagcagcccgggccagccttggtgcatgaagaggcaccaggcacaccgccttgaggtgggcagtgcccatgggggcccgagtggatgggaccgagggtgagtggagcctccttcctcccctctctagtacccccgcctcccacacacttgcacggatcggcctcccttgggagatcagcctccatgggcccctcgtccacccttgctgctttccatttgcctaattaccaagcagaagttgcaatctggtttgctttatttttgtatgtgaaataacccccaaagcccaatctcctcctacgttcaatattggttggggcatccgtcatctccccttaagtgcgccccctccccacccaagtatcataggaaaccggtgaggtctggtgtctctggtttgagacggtaagttgggacccatccctgtctgggtgcccactctgacctttagtttgcccttctgtgaaatgggtgtattgggtagcaagccctcttcagaaagcgctgctggtgtcagagcagctgcccagtaccaggtggggggtcaaggttgctggtactggggcccccagctgcccacaacccctctttgttctcaccctgcaaaggggtcaaggtcaaaatgagcctcatccttcctatgatctgggaagaggtgatgatcaagtccccaacttcagtgtgaggtggacagagttggggggatggcccctttttgaagaggtgaaaatggttttggagaagcgcagctgcttcactgggggaatgcggcagggactggggcccaggatgctttggcctatggggaaaagccctttaaaaggcagggcccaggccctggagccagcacaagactggcctcgagcccctgagccaggaggtcctggaggagagccaggccggtgggcccgcccaaggctggagggtcagccccaacagggagctgggttggccagggggctggactgctaccagcctctctggcctatggggacccaagaggacacatcccccttttgcccactcttctgtgtcattttgttgttttggtttgtggtggtttttcttttttcttttgtttttcttttttctttctttctttttttttttttttttttttttttttgcacttcgcccacacaggacagtggagccccacctggtcagttccacttccgggctcccatgcacttgcccaaggcggcctctttgggacggggatggtttgaggaaacacttttaaagaaaaaaggaagacattgaaaggttttagtttcttccctatctgcatgtcctctcatatagaaagcccagaattaggggctagaactccaggagagggtctccccgactcatctcttgctgacggtcaccaggatgcagaaatagggagatggttagtgggggccaaagatgccccctcccaggccttcgtggttccctcctccgccccctgcaatctttggaggagtcagtgcctcactccagcagtgagtgcctactgtatgcaggtagtcagccaggcaaagagagactaacggtctcatgggggaaccctcttgcgggaggccgggtagctggagcgaagcgttccggctgcccttgctgctgggtggagtggagagggagacttctttttgttggttttaatttaaaaacacaaaggcctaaagaaatacgtatcttataatttttttaatttttgagacgttcatttaatgaattgtgcacgaatgaattctatatatataaaatatacatatatagctctatatttggggaggggcactgtctcttttttctctcatttttaaaatgaagtgttgttgcctttgtatgtggttcaaccatccagctcccagctggctaaactttgcctccagtggtcaaagatgggaaaagagtggggttggcaggagatggaaaacggaggtgccgccccagcatggggggcaggtcccccagtccaccctgcccctccccctgtggagaagacgcttagttgggggtgtgggtttgggctccattctggattcggcggttccgggggaggggtgggtctgtgccgattactctgtcttgtacgtttgttctgctgctcttcaatattgtatcaacgccaggaaaggggggtgaaaagcctcttttaccccccaaataaattgtcacattccgaagctga

SEQ ID NO: 4759 - protein, 412 aa, Homo sapien
MELSAVGERVFAAESIIKRRIRKGRIEYLVKWKGWAIKYSTWEPEENILDSRLIAAFEQKERERELYGPKKRGPKPKTFLLKARAQAEALRISDVHFSVKPSASASSPKLHSSAAVHRLKKDIRRCHRMSRRPLPRPDPQGGSPGLRPPISPFSETVRIINRKVKPREPKRNRIILNLKVIDKGAGGGGAGQGAGALARPKVPSRNRVIGKSKKFSESVLRTQIRHMKFGAFALYKPPPAPLVAPSPGKAEASAPGPGLLLAAPAAPYDARSSGSSGCPSPTPQSSDPDDTPPKLLPETVSPSAPSWREPEVLDLSLPPESAATSKRAPPEVTAAAGPAPPTAPEPAGASSEPEAGDWRPEMSPCSNVVVTDVTSNLLTVTIKEFCNPEDFEKVAAGVAGAAGGGGSIGASK

SEQ ID NO: 4760 - DNA, 735 bp, Homo sapien
aactggaggaagagtatgacaaaaagaatgatatgaaagtgtgaaaagttgtttaagtaatcatgactagtctcctgggtgactggaaaattagagacagtagtggaagagaggagaacatgctcatggacagtgttgaatggagacaaggagaaggccttaggatctactgggggagtccggaggagcagtctcttctgtcccgctggaacccatggtccactgaagttccttatgctactttcactgagcatcctatgaaatacaccagtgagaaattccttgaaatttgcaagttgtctgggttcatgtctaagcttgttccagctatccagaatgcccacaagaattcaactggatctggaagaggaaagaaactgatggtgttaactgaacccattttgattgagacctacacagggctgatgtcattcattggaaaccgcaacaaacttggctattcccttgcccgtgggagtattggtttttgagagtctttttggtaccataagcatatcatccacagatatgtcactttgaaaattccagtttgacccacgctatttttggactgaaacaattaattatttttaaatgacgctttatgatttagaaatttagtatttccgaaaatttaaaagcttgattggactgatagatacacactttagacctcatacaagaataatcaaattttcttaaaactagaaaataaatgctgctgagcctatcaaa

SEQ ID NO: 4761 - protein, 142 aa, Homo sapien
MTSLLGDWKIRDSSGREENMLMDSVEWRQGEGLRIYWGSPEEQSLLSRWNPWSTEVPYATFTEHPMKYTSEKFLEICKLSGFMSKLVPAIQNAHKNSTGSGRGKKLMVLTEPILIETYTGLMSFIGNRNKLGYSLARGSIGF

SEQ ID NO: 4762 - DNA, 1015 bp, Homo sapien
aataaataaatttttaaaaaccaacctgatgtgaagttgaaacacaagacgcggaaataaaaactcagagtataaatatctatattgttaccattatctgggataattgatgatttataagaagctgaggtttcgtcttcctagaaatggacttttattaggccagcaagaatgaccacttagccatttaaatgatttgtcagcatcttttgctgctctcttctaagaccattggttttcactaaaggataaatacctgctaagcaaattataaaatactataagacatttaatctcctggaagaggacttgctgataattggatcaaagttccagcattattgctcttttcgaatcatatggacttagtgttctcatgaccgaggagtcacatttttagcttgctaaaatattcactggagaacatggtgaaatccacgagtggaaacgttccatggtattttcaaacgccacgtgtcaggaatttggcatgccttcctctgggagaggcactggagtgtggccagatggaacccagcagggtacagagggcatttgtgggagcagttaggaaaccaggacgtccagcttctgcctgccagggagctcgctcatgttgtctctgaaatttgcataagagcaattacctcatattctaattttaaagatacaatttttaaagacatggaaggctctgaggcctcctgaaggctattcctatgtgaggtattgtttacgggtggcctttcactatttccaaatcagcgatgaaaagaagactgagtctaaaataaatgaagcaacagacttcagcagcctgagagaattttgttcaattccagtctccttaaaaaaaaatcggtttttgctttcaatttaggaaaattgttttgggttgcattgttgaaagtaatgatttctagcagctacttatgtataatctcttaaccaattaaattctgaatctcttaaatcacttgattattcatgctggttttagttatccactgctgta

SEQ ID NO: 4763 - protein, 66 aa, Homo sapien
MVKSTSGNVPWYFQTPRVRNLACLPLGEALECGQMEPSRVQRAFVGAVRKPGRPASACQGARSCCL

SEQ ID NO: 4764 - DNA, 2400 bp, Homo sapien
tttcatgtttcttttttttttcccctccagtctgagatttctgtgtggctgatggagagtgtgatttgggcgtaggtcttatttgcaaacctgctcatgttctaagctttcttcaggtagtaccacctgtcatcgcttctgcatatgatttaaatggatttttgtttttataaaagtatcataaatttagagataaaatggaggggacccagctttctttacaatgtggatctacctcagttaaacagttgggtgctattactaagtctgtcaaattaaattggaaaaagtaaccaaacagtgagatacaactccacatgaaacttgaaattgtaatttccgtttatttaatgatatttttatttatttgtgccttttatgttgaaccccaatgcattgaaaaaattcagtatgaaacagtacatattttatttatattacaggtgggagaaaagtccaattggtcatggaatttgatagacttttccccagccaactgctacagtgtattataatcccgactgcccccctgtgaaaagaaaaaaaaaaatgtccaagagcaaatttaacattttacaaacaataaagtccaaactcctctatgcacatatttatagcttatcacttcattttctgtgccagtgaaggggtggccagaaaaaaaatcccaagtaccctcatcattgcttttctagccattcatgccccctcttcctctggcacattttctaagagtttatttcataagcagcaaacggactgttgtcgatttcatctctcctgacctacctggtggaggtgctaatggccatggacagaaaggggcgagccagagctcgtggctttgtggaggcagaggcctgcattcagcagcggccctgtgtgcctgtaagttaggaaggctttctgacaggtaagaaaatgagataggttgatgacttaccatgcttttatatttggcagtttacaattctagacttttcctactatggcgatctttttttacttaattctttggaggtaacaatattttggagtcttaagaatttgattttataccaataagaaataaaaattagggatctttcctgtagtatatagttttactattttaaagagatctctgaattttacaagagaaccaacattccttaatggcagaactttgaaagttgatttgggaggctttttgctgcaggatctcaaaaatagagagagagatgattctacttaaatgtttttaattttctaacttccatcaggttgatacttaagctctattttgtaaagagtaaatcatcctttagtatgctgcataagatgatcagcattcttgcactttctcagtaataagacgtgccgggcaattggctccccaggacgcattgtgtttttaacctaacgagaggactttggggcaggtgattaaatttatataggtacctcaagaaaaagaacctgaatatgctgcattttctttctttagcttttacatgtagcattttgttttgcttttgttatttttgttttgatatatgctttttggaccccaatagactgttgaaagaaatttaaaaattactcttgtagggatatagtatccttaaaaaataaaaattaaaaaaaatttaaaaaaattgctgcaatatctggctcgaaggttgccctatattagaataatactttagccaaatacacctgaggaggcagacactgtgtttataagcagacaataatgttctgaatccttcctgttcatgctgctttcttaattcatttctccatgtcatcaagaggttggataacttatttctaagctcaaggttaaaaatcatgtcaccttttttttttcccccaacacagacctcagaaaaattgcgattgaggaagtagcatgatcctaaatgtgttgctgaaatcaggcagcccgagcctctggtctctccagagagcccgtcttcacatttctctattcctcagcactcacccgaaactgaacagatggggagtggtcttgattgtcaagataaaactggtgaagaaagctaaatgctgagaaactgagcatctattgtcgtgtttaagcttagctgggtcctttctagtttgtttttacagcttactaggtgaagtagtttgcactatttttgcaataaattcatggaaaacctaacagttacttgttttgtttcttactgtgtgtatataaactaatactaaaagtttggcatagtgttttttcacctccttacataacccctaacatgcacagaatgctgtaaatctgataaaatatgatgtgaatgatattttataaagttattttgtatggtgtcaattttgttttgcctcatagtatgtcagcaaaaaattaaataaaagtcctcctatttacagctg

SEQ ID NO: 4765 - protein, 24 aa, Homo sapien
FHVSFFFPLQSEISVWLMESVIWA

SEQ ID NO: 4766 - DNA, 2777 bp, Homo sapien
agtgctcttggccgggaggaggctgtgctgcaccagcacctcttgctccacatctccagagagcccagggccctgtggccgagtgtgtccagcccagtgtcatggggagcttccatatctcatggctccttgctgggccaagccctccagaaccccaaacccccaaagactgatgaatgccagagtggccaccttgcttatctgtggccccggccctggtgatcaccatggcagctgggaagggagccccgttgagcccatcggctgaaaacagatggcgacttagcgaacctgagctgggccggggctgcaagccagtgctgctcgagaagacgaaccgcctgggccctgaggctgctgtgggcagggcgggccgggatgtgggcagtgcggagctggcactgttggtagccccaggcaagccccgacctggcaagccgctgcccccgaagacacgtggagagcagaggcagagcgccttcacggagctgccgaggatgaaggaccggcaggtggatgctcaggcccaggagagggagcacgatgaccccacaggccaacctggtgccccacagctgacccagaacatccccagaggcccagctggcagcaaagtcttctctgtgtggcccagcggagcacgaagtgagcaaagaagcgcctttagcaaaccaaccaagcgaccagcagagaggcctgagctaacctcagtcttccctgcaggggaatctgcagatgccctgggggagctgtctggactcctcaacactacagacctcgcttgttggggtcgactttcaactcccaagcttttggttggtgatttgtggaacttgcaagcattgccacagaatgctccactctgtagcacttttctgggtgcccctacactgtggctggagcatacccaggcccaggtgcccccaccctcatcatcctccaccacttcgtgggccctcctgccacccaccctcacctccctgggcttgtccacccagaactggtgtgcaaagtgcaacctgtcctttcgcctaacgtccgacctggtctttcacatgcgatcccaccacaaaaaggagcatgcggggcctgacccacattctcagaagcggagagaagaggcccttgcctgccctgtgtgccaggagcacttccgggagcgccaccacctctcccggcacatgacttctcacagctagcaggtgaccgcagaatgacctgctgggtgcagcagccagcctttggcagaggggggctccctgggcctgcgttgagggggctgtcatggtcctttgcagagctgctgcttttggcattcatagataaacagctcaggcataatttgaaaaagccacacctgcatgatgtgttttgaaggaaatgaagtcctgaaataaagtgatgggctttgcaaatccagggtagaggccctaacaggcacagagagcaggggcaactcctggcacacatcatgggctttggaggcacacaagcctggattcgaatctgggctctttcacatactagctgtgaccctggacaaagagctttaacctgctgagtccccattttctcatctgtgaaatggagatgataacactgtgtcttaggttggcattcaggtcacatgaaaggtgtgtggaaagtggccagcattctgcctgcagaccctgagcactgagtcaacaaggtttgtgatgatgtctgtactagttagctattgttattaacaagatctccatggcagacaagctaaagcatctgcctaagtcgtgagtctgtgggttggctcaggttaagctgagcaggtggggatctcagccagcctcccagactgcacctcttctattgctctcctctgtccaccgttccaggcagcagcactcccacctggctgctctgatgtcctcgctccctccattcctgcctctcaccatgcacgcatccattgtccacacacacacaaccagataatcttctgaaagtgtaactcagatgatgcctccaaccctgtggctgcccttcacacttacaggcctaaccccagcaggacctgccagctgcttcatgaacaagtccctgcctcatgttaattgcaagcactcatttcactctccctgtgtgccaggcaatagcataagcactggaagaatacagatgttatagtgagtcctacaatagccctggaaggcaagagctgtttcctttccatttctacaatgagtcaattgcagatgatgctataacacttccagtgtttctgacacttccctgaagctatacctgctaccttcatgggccgagcttgcccttatgaggcccacaggtggcagtgggcagaggggaccccgctataccacctcgctgctgttccactgtctgctcccgtgttctgaccacagctctggtgccgtttctcaagcctgggcttcattcaacattttctatctagctcttcatggtgctgctcctgctatggttccacagggcttcttctcgcaggtcagctccttagagaggtctcccagattccccgtaaagcagccctgcagcctctgcctctctcagccgcatcaccctgttgcttccttcacagcatgtctcaccatctgcaaccatctttctgtttgtcgtcttgttgatttgctgcctccacactgtcagctccttgggaacagagattggtttgtttactgtgcatccctggtgcccagaacagggcatggcatattgttggtgcataataaatattgtggaaataaaaaaaaaaaaaaaag

SEQ ID NO: 4767 - protein, 340 aa, Homo sapien
MPEWPPCLSVAPALVITMAAGKGAPLSPSAENRWRLSEPELGRGCKPVLLEKTNRLGPEAAVGRAGRDVGSAELALLVAPGKPRPGKPLPPKTRGEQRQSAFTELPRMKDRQVDAQAQEREHDDPTGQPGAPQLTQNIPRGPAGSKVFSVWPSGARSEQRSAFSKPTKRPAERPELTSVFPAGESADALGELSGLLNTTDLACWGRLSTPKLLVGDLWNLQALPQNAPLCSTFLGAPTLWLEHTQAQVPPPSSSSTTSWALLPPTLTSLGLSTQNWCAKCNLSFRLTSDLVFHMRSHHKKEHAGPDPHSQKRREEALACPVCQEHFRERHHLSRHMTSHS

SEQ ID NO: 4768 - DNA, 483 bp, Homo sapien
  Unsure 58-100: Unknown base
gtgagccgaaatccacagcactccagtagcctaggcgacagagcaaaactccatctcnnnnnnnnnnnnnnnnnnnnnnnnnnnnnnnnnnnnnnnnnnngaaattagaagaataacaagttattccaaatgaaggcgtaagaaagggaataataacaataataagaggagttgttcatgaggaaaaaccaaagcttgaaaattcaacaaagccagtgaagctcattcttgaaaacatgaatcacactcatgaattctaactacaatgaaaaagagaaagaaagagcaggcatgcatttccatatgggagtgagccagcagacagccctacagatcgtacacacgttttccaaaactaacaatggaacaggcggcaaacctatgccaatatactagaaattgcagattaaatagatgaaatattctaaactggagtttacataatgaacataagagtaatcagagaatctgactcattttaga

SEQ ID NO: 4769 - protein, 48 aa, Homo sapien [sequence omitted]

SEQ ID NO: 4770 - DNA, 616 bp, Homo sapien
aaaaaaaaaaaaacctgagatttttttggaccttattcaaggggagaggagtctggagggaatgccgcttggcttcactaccaaaggttttatgacttagcattttaaaaggttttccttttaccaagaaatgcagaaaccaagagcaaaccccacgtaccagatcactgattcctactgaagcagctagcccgagaaaggactctctcatactggtcttgggaaatgacttggcagcctgagccatcccagcagtggacaaggatggttaattcttattctgtagacgtccacaggaacagactaggatggaaaacacagttaagcacagccatgcaccctgtggctgtagaaatgcccctgtgtgaaagaaaaataaattcaagactggagttttggaggaaaaaaaatacaagtagcatttacaacagctctttgctctttaaatttcttaccattcaataaagtgatccagtcactcacatttgaactgagatgccttctccagactgttctgacaaggtaatgaaaataaaatgcacttggatttttccagacatccacatccaccgtcaagggctgggaagaaaagcattgttgcgtggaaacctgcagc

SEQ ID NO: 4771 - protein, 79 aa, Homo sapien
MTWQPEPSQQWTRMVNSYSVDVHRNRLGWKTQLSTAMHPVAVEMPLCERKINSRLEFWRKKNTSSIYNSSLLFKFLTIQ

SEQ ID NO: 4772 - DNA, 3848 bp, Homo sapien
ggcagcttctcaggtcagcctcctccgggcctctccccactctcctctgcccagttctctgtccttatccacaggcccctcagtgggcactggccatacccatgtccaggtgggcacaggcctggtgatatcctggtgagcaagctggggacccaccctccttccctttctggttggcagctccacatctggggcaatgtagagatctgtgcttttggaaggaggggcaatttaaattaagaagtggttaggcatgggtctcgaatcttagcttccccgcgaggtctgggacaagtgaagagaggtttcttttctggacctcagtttctcatctgtaaaatggggtgagtctgggaacctgcaccttggatggctgtcaggggctcagtagaggacctggcacacagtttgtgcttggcaatctggagcaggtgcagctcctttcagagtgacctggattggatcctggggacagcatgtctcagggccggagccagttcttggaggagactctgcgcagggcatggatcactgtggtgcccttttcctgtgcctgtgccttctgactttgcagaatgcaacaacagagacatgggaagaactcctgagctacatggagaatatgcaggtgtccaggggccggagctcagttttttcctctcgtcaactccaccagctggagcagatgctactgaacaccagcttcccaggctacaacctgaccttgcagacacccaccatccagtctctggccttcaagctgagctgtgacttctctggcctctcgctgaccagtgccactctgaagcgggtgccccaggcaggaggtcagcatgcccggggtcagcacgccatgcagttccccgccgagctgacccgggacgcctgcaagacccgccccagggagctgcggctcatctgtatctacttctccaacacccactttttcaaggatgaaaacaactcatctctgctgaataactacgtcctgggggcccagctgagtcatgggcacgtgaacaacctcagggatcctgtgaacatcagcttctggcacaaccaaagcctggaaggctacaccctgacctgtgtcttctggaaggagggagccaggaaacagccctgggggggctggagccctgagggctgtcgtacagagcagccctcccactctcaggtgctctgccgctgcaaccacctcacctactttgctgttctcatgcaactctccccagccctggtccctgcagagttgctggcacctcttacgtacatctccctcgtgggctgcagcatctccatcgtggcctcgctgatcacagtcctgctgcacttccatttcaggaagcagagtgactccttaacacgcatccacatgaacctgcatgcctccgtgctgctcctgaacatcgccttcctgctgagccccgcattcgcaatgtctcctgtgcccgggtcagcatgcacggctctggccgctgccctgcactacgcgctgctcagctgcctcacctggatggccatcgagggcttcaacctctacctcctcctcgggcgtgtctacaacatctacatccgcagatatgtgttcaagcttggtgtgctaggctggggggccccagccctcctggtgctgctttccctctctgtcaagagctcggtatacggaccctgcacaatccccgtcttcgacagctgggagaatggcacaggcttccagaacatgtccatatgctgggtgcggagccccgtggtgcacagtgtcctggtcatgggctacggcggcctcacgtccctcttcaacctggtggtgctggcctgggcgctgtggaccctgcgcaggctgcgggagcgggcggatgcaccaagtgtcagggcctgccatgacactgtcactgtgctgggcctcaccgtgctgctgggaaccacctgggccttggccttcttttcttttggcgtcttcctgctgccccagctgttcctcttcaccatcttaaactcgctctacggtttcttccttttcctgtggttctgctcccagcggtgccgctcagaagcagaggccaaggcacagatagaggccttcagctcctcccaaacaacacagtagtccgggcctcctggcctggaatcctcagcctctctggccgccagtagcctgaggctacggctcctgctagagagggtggcaggcctgctgctggaccccagaggccactgtgaccgccaaggggccttttccacttccacggcctctccaggcactgaggggaaggcattgctctacctctccctgacattttgctccggggcagatccaaccttacctggggcagcaaactttgtcctggtacctgggcccagctcgccagggatgtgggcagagcaccagcctgggcatcaggaagccaagtttcaaggactgtctttgagtctgtctgtatgaccttgggcctgccacttctcacagaccctaggtatccacagctgtgacatgggggcaagcggctttgtttcagcctaacccaggagcttagtaaaaattgcataagaccagggggaagagtgtcagcgtggggtgggaattcccgcggcctccacctgcttgctaggggcaggatctcattcaggctgccctggaagcacctgcttggccctgccaccttcctccaggggagggccagatggcatcctggcttggggcgggtgggacctacccaggctctgagactttactggcctatgcctgaggcctcttttcctttaactccctaaattatgatgactccaagtccaagcccacccttcccaaagattgggaggttccgccgttcccagaggctcctcctgcggtgctcccaagacttccatagaccatctggaccagtagcccatcccgcagttttcttgggggcagaggaaaacgcttctttctcctccagctgaatcagctggatcccagtgtcctggctgtttggtgattgggcaagattgaatttgcccaggtaggcgtgagagtgtgggttttaaattcgaagctcaggccatagtttcagagaatcacccttaccccagaccttcatgagacagtgctcatgaagccagtgcgtttcccagaacgaacactaggcggcaccgttggtccacactcagaggcccttggcgccaagactgcatctagaatcgctcaaacacctgtttgcagaccccatgcaccagctggaggggccgtaactgcaggactgcgcctactgagtgacccatttcctccaggaggaaaggcaagacacgcttacacggccatttgtctcttttcccaatgcggcggtgcactttcgctcttgggggctgcaccccagacatagctggcaccagagcagggtgctcaggtggtgggtgctcagggccctgccccaggccactgggccgttttgatgacctcgaaggtcacaggcagaaaataggagcaggatttcccctggggaaaagttctcctgggacatcttctgctcttctgtacatttctagatgcaaataactccttcaccaggcagtgagtggcgtaggctctggagccaggctgcctgggctccaatgccagctctgccacttgctagctgtgagactgtggacaaaccactcagcctctgtgtgcctcagttttcctatttgtaaaatagaggccatagtggtacctattttgaagactaagtaaaagaattcaaataaagagacttggcacagagtaagtgctcagtaaaaaaaaaaaaaaaaaaaaaaaaaaaaaaaaaaaaaaaaaaaaaaaaaaaaaaaaaaaaaaaaaaaaaaaaaaaaaaaaaaaaaaaaaa

SEQ ID NO: 4773 - protein, 528 aa, Homo sapien
MDHCGALFLCLCLLTLQNATTETWEELLSYMENMQVSRGRSSVFSSRQLHQLEQMLLNTSFPGYNLTLQTPTIQSLAFKLSCDFSGLSLTSATLKRVPQAGGQHARGQHAMQFPAELTRDACKTRPRELRLICIYFSNTHFFKDENNSSLLNNYVLGAQLSHGHVNNLRDPVNISFWHNQSLEGYTLTCVFWKEGARKQPWGGWSPEGCRTEQPSHSQVLCRCNHLTYFAVLMQLSPALVPAELLAPLTYISLVGCSISIVASLITVLLHFHFRKQSDSLTRIHMNLHASVLLLNIAFLLSPAFAMSPVPGSACTALAAALHYALLSCLTWMAIEGFNLYLLLGRVYNIYIRRYVFKLGVLGWGAPALLVLLSLSVKSSVYGPCTIPVFDSWENGTGFQNMSICWVRSPVVHSVLVMGYGGLTSLFNLVVLAWALWTLRRLRERADAPSVRACHDTVTVLGLTVLLGTTWALAFFSFGVFLLPQLFLFTILNSLYGFFLFLWFCSQRCRSEAEAKAQIEAFSSSQTTQ

SEQ ID NO: 4774 - DNA, 2154 bp, Homo sapien
tgccatcttggactcgggctgagtaataaattccccccgcaccgaaacgcggtctttctctagacgcgtcttgctgggagagtgtccgttgcttcccgtccgtgtcgcggccctgcggttggcggcctcctcgtggagcggagcaaggccaggcggcccctgctcgagtcccgcgtcgccatggccgcggttcccgagttgctgcagcagcaggaggaggaccgcagcaagctgagatctgtatctgtggacctgaatgttgatccctcgcttcagattgacatacctgatgcgctcagtgagagagacaaagtcaaatttacagtgcacacaaagaccacactgcccacgtttcagagcccagagttttctgttacaaggcaacatgaagactttgtgtggctacatgacactcttattgaaacaacagactatgctgggcttattattccacctgctcctacgaagcccgactttgatggtcctcgagagaagatgcagaaactgggagaaggtgaagggtctatgaccaaagaagaatttgccaagatgaaacaagaactggaagctgagtatctcgctgtgtttaagaagactgtgtcctcccatgaagtctttcttcagcggctttcttctcaccctgttctcagtaaagatcgcaactttcatgttttcctggaatatgatcaggatctaagtgttaggcggaaaaatactaaagagatgtttggtggcttcttcaaaagtgtggtgaaaagtgctgatgaagtcctttttactggagttaaggaggtagatgacttctttgagcaagagaagaacttccttattaactattacaataggatcaaagattcttgtgtgaaagctgacaaaatgaccagatctcataaaaatgttgccgatgactatatccacaccgcagcctgcttacatagcctggctttagaagagcccacagtcatcaaaaagtacctattgaaggttgctgagctatttgaaaaactaaggaaagtagagggtcgagtttcatcagatgaagatttgaagctaacagagctcctccgatactacatgctcaacattgaagctgctaaggatctcttatacagacgcaccaaagccctcattgactatgagaactcaaacaaagctctggataaggcccggttaaagagcaaagacgtcaagttggctgaggcacaccagcaggagtgctgccagaaatttgaacaactttccgaatctgcaaaagaagaactgataaatttcaaacggaagagagtggcagcatttagaaagaatctaattgaaatgtctgaactggaaataaaacatgccaggaacaatgtctcccttttgcagagctgtattgacttgttcaagaataactgatatgccttcactcagaagaaaagaaatgaatgtgaaagaaagccaagcatcacttgcacttaaatcattaccacggaagatatattagcttcaactttagtttaaaattatgtgaataaatattttgatttctacaaatcttaacatttaaccatgttggtttaaaaatattattgcttgctacttggacataactaatttttccttgtgcatttaatacctctgggcagaatccaaatactgggttctcccgtagttcgtctttagttactaagaaagggtgtaggacacattagccttctggaaacaagtagaagccatcacctggcccatgtccctacaaacccatgattgtcagggaggtgccagttacagcaggtgattcagctacttgaggtcggtaacagaccttccattcctcactgaaggtggggtttgtgtttttgttttgccctgttactccactggtagtcatctggtgtttgtactataacaacagcaagaaaatctcatttatctttatatactctttgcacctcctttttttagtcgagatataaatatttgaggggagagaaatatctacaggtatatatggaaacaaataatgtggtctgctttataagatggccagatctacattaggaaaagtataagccccctccctaatggccgctggggggtgagggcggtgtgttgtatgtctttgggtgtttgtttttttataaagcatataataaaataatcgtgctactaaaa

SEQ ID NO: 4775 - protein, 404 aa, Homo sapien
MAAVPELLQQQEEDRSKLRSVSVDLNVDPSLQIDIPDALSERDKVKFTVHTKTTLPTFQSPEFSVTRQHEDFVWLHDTLIETTDYAGLIIPPAPTKPDFDGPREKMQKLGEGEGSMTKEEFAKMKQELEAEYLAVFKKTVSSHEVFLQRLSSHPVLSKDRNFHVFLEYDQDLSVRRKNTKEMFGGFFKSVVKSADEVLFTGVKEVDDFFEQEKNFLINYYNRIKDSCVKADKMTRSHKNVADDYIHTAACLHSLALEEPTVIKKYLLKVAELFEKLRKVEGRVSSDEDLKLTELLRYYMLNIEAAKDLLYRRTKALIDYENSNKALDKARLKSKDVKLAEAHQQECCQKFEQLSESAKEELINFKRKRVAAFRKNLIEMSELEIKHARNNVSLLQSCIDLFKNN

SEQ ID NO: 4776 - DNA, 2561 bp, Homo sapien
tgatatatgaaaaagtccaaatgaatataaggaagtcagtttggaagctcttctagtattcttggtattagatcatgaagtgccacaggctagtgtgatagatggagggatggaaaaagtgctgaatacaagaaaggaaggttgaattttatatatttgtctataaagtgtcactctgggaataaagcttaaattgtctcacttatttaaaaaacagttccagtttgcccacgtgcaacattagtgagtacctaccctgttcccatgggttctccacccacccgaaacaagcacacactgggacaatctgagggtgctcacgtctgccggtgataaggaggtgttcatttgcatgatggcatttgtgcataaaatggtactgctccagaagtggttctagtgaccctgtcttcaccctagtgtggcaggccgatggaacagagcatctgcattgactgccatgcgccgattggaggcattgaccacaaacctcgggacggctttcatctggtcaagtatgtgggtcaggattctatttcctaagtactcaaactttggggtgttgggctgtttttattccagctgataaagtgatactcaagatagtactaattactccagtacatgtgggcctgtgtcatattgaatagcaatgccaaagtcccagcagtcacacagcagggaggcatctgatctgttgttggatccctgggccctgaaatgcaaagcaggctaccctttaacagctgttaatatgaatacaggtgtcttccttttgggccttgggtgcaccttctgtagaaatatgcatgacataaacagatgatctaattcacgaggacatctatgtctgcaggaccaaaacctgggcatccgtctgtctcagcagatgccatctcacttgccagcaatcttagctttctccattttttattttttgagaaaaatgaaggagacagacatagtcttatgaaataccagacttcagaatccaggtacaaatccgatcccacaatcccatgctgagatgaatgtggttctaaatgctcctttcagagagtgagtgggacctgcgtgggggcctcacattctgactgttccctgcagtcacagcttaaaatactttcatgttatctccagaaactgtcacagtgtcctccatcctctaatagttttgccactgagagcatcggccacactgcatctcctctctgccggactttagatcccggtttttcctttggggagatgagaacaatatggacacccatgggatgccgactgtcctcccaaactctagctgttcttagcccaaccgctcctctcctgacaaagacttcagtggaaaagacgggtccaggcctgcgtcttaacaccctgcccggggatcagcatcaataccacacagcgcagccacctgacgctgagaatgcggtcgggtctggtccaccggaaaggcgagtctatcatgagagagactcttaggaacatggtccaggctttgtggaacagcaagtactcttcacataactctcttctcagccgtaagcctcactccaagtgctgagaaagtgcagcgtgccaaagcggccagcctcagcctctgtcttgtgttctctcgttctttccagagacaaggcagacagaacgcagaccggccatgtgctgggcaacccgcagcggagagacgtggtgacatgtgaccgagggctgcccccagtggtcttcctccttatccggctactcactcacttggctctgcttctgggagcgtcccagagttcccaggctctgataaacatcattaagcctccagtgagggatccaaaaggctttctgcagcagcacatcctgaaggacctggagcagttggccaagatgctgggacacagtgccgacgagaccatcggcgtggtccacctcgtcctgcgcaggcttctccaagagcagcaccagctctctagcagaagtgaggaaaggggcaagggctgggcggggatcacacagcacaacggcagcgcaagcaggctcgctgtcttgtgggccaccccacacacagccagtctgagctctgtctgtgctgttgctggaaagaatgagagaacacacagagagaaaaccgtgtctagggaaggcgatgcctggggctggaaaaaggaagcactctgcttgcccagaggctggaaggagctgctctgttccctccattcacccctgcctggctaagacctgcggtattcgggagcgtctgcacgcaagtgttcagtgtgcatatatggggagtcttcagttccgaagtcagccccgtaggtcattcccctaccatgctgggagcacgtgtcgtccacacagagcgtgcgtgtcaaaggatcaatcaccatcacagttgtgtgctgatttattaaatgtttatatgtccacagttatgttaaaaaaaaaaagctataaaatattgtattcactgagctaactttctattttaaaaatttaaatccatacagaaagaaaaggtctgtaagacaacttagtaaaatggttatatggttatctgtgaaaaaaat

SEQ ID NO: 4777 - protein, 124 aa, Homo sapien
MREHTERKPCLGKAMPGAGKRKHSACPEAGRSCSVPSIHPCLAKTCGIRERLHASVQCAYMGSLQFRSQPRRSFPYHAGSTCRPHRACVSKDQSPSQLCADLLNVYMSTVMLKKKSYKILYSLS

SEQ ID NO: 4778 - DNA, 2078 bp, Homo sapien
atgggttgggcattaggaacggcctggccccacaaatcacacaactggggtgtagaacaaaatggttccacagatgacaccaggctggtccagggccgatgcaggccagaaccccgctgggaggactccccagaacaggcactgagctgaggaaaggcaggacacgtggtctgctaccgaccccaccagatcttgctgggactctgggcagctccggagtaagagcagcatgctctgcaacgaagagctaggtccaaggaccgcaggcggaggcaggaagtgtcaagatcccaggttacggaatggcaccaagtcggtaaccaaaggaagcaacaacccgggttttcaaggcagtcgtgcaaggcggcgcgggggcgaggccgaggccactccctcccacttccttgacgctatttcctgggaggagccggagctcgcggcccggagccaagagattcccagcccagtgctccaaaatactcggcctgggggaggctggtccgtgagcgtgcgcccggaccgttccgccatgcatagtggacccagcactacagcaagcctggcacgacctctaaggcggttcgcggcaacgtccgcacgtcggctcgttggtctaggggtatgattctcgcttcgggtgcgagaggtcccgggttcaaatcccggacgagccctcctttaccttttactgagacaagagtgtcttcaaggaatatgttacctgaccagcgctgcaggaggcttgactgtaagtcatcaatgtacagtaagctcttttgtggcaccgcggtagcagaaagcatctcaatccccagacccgcctggcatgtcaggaagagacgaggcacgcccagacttgggcaggtccctccctttctgcttcctgacttccttcctggtgtctcaactcggccaccacagcctggtttcgctttgattgacacgcgtcaatctatagttgtggatgacagtgttcgggagagcccaggaactgtcaaaacttggttctctgcagtcctgaaggcactctgtctctttcggtcactccatctgacgattggtgcctgaaatacacctacggtttctggtcagcgtttatcagtggttggaagaacagaacccctaggaaccctgctgtcagcacgcagagtgtaaagtctcagatcaaggattcggagaaaggtctctacaggtccctcctcgttagtatagtggttggttgggatgagtcgggttggacccgtgcggatccaggaaaacagcgatcgaggtaaaagtaatggctgccgtcgtctgcccagcgcgcaattgtgagtgaccttcaccgctagcgcgcgccacccaccccacatgaacctgtagggttatgcccagtctacagacgaggaaaccaagatccagggaagctgagtcaccggcagagctgggattacgtctaagatttgtccagggggcgagaactgcagcgacaccatgatgatttatcatctccagaaaacaaaaaaaaaggcctagacacataaaaatggcttctctgtagagtgagctcaacgagctcaatgtgattccagttaaggaattgggccttaagccaaatgcgcctaaacgcaacttgcctctctattatttatccagaggatgaatttaattcctacgtacatgcgcccacatctcgtcagctggtgcctcagagaaatgcgctgacaaatcttaaaggtggggcttcatgacaaaagtccgcccgttattgctgctcaacagacccatcaagtcacgctgttggacaggcctcgtggcgcaacggtagcgcgtctgactccagatcagaaggttgcgtgttcaaatcacgtcggggtcaaacaaaacattgttttccctaatcaaatagacctacggtgacatttttcaggataggaaaaaaaaaaagcctcctcagtagaaggataggaggggaatgagacaaatatgaacgttattcagaagttgggtgcagactttcaacattatgtgatatatccctgtggcaaaactgcgcatgtatccctaaggtctataaaagtaaaaataaatttaaaaat

SEQ ID NO: 4779 - protein, 148 aa, Homo sapien
MILASGARGPGFKSRTSPPLPFTETRVSSRNMLPDQRCRRLDCKSSMYSKLFCGTAVAESISIPRPAWHVRKRRGTPRLGQVPPFLLPDFLPGVSTRPPQPGFALIDTRQSIVVDDSVRESPGTVKTWFSAVLKALCLFRSLHLTIGA

SEQ ID NO: 4780 - DNA, 3193 bp, Homo sapien
gtgggaccgctgaccgcgcggctgctccgctctccccgctccaagcgccgatctgggcacccgccaccagcatggacgctcgccgcgtgccgcagaaagatctcagagtaaagaagaacttaaagaaattcagatatgtgaagttgatttccatggaaacctcgtcatcctctgatgacagttgtgacagctttgcttctgataattttgcaaacacgaggctgcagtcagttcgggaaggctgtaggacccgcagccagtgcaggcactctggacctctcagggtggcgatgaagtttccagcgcggagtaccaggggagcaaccaacaaaaaagcagagtcccgccagccctcagagaattctgtgactgattccaactccgattcagaagatgaaagtggaatgaattttttggagaaaagggctttaaatataaagcaaaacaaagcaatgcttgcaaaactcatgtctgaattagaaagcttccctggctcgttccgtggaagacatcccctcccaggctccgactcagtaagtaccagttcttgtttatatacagtagtgttttgggcacacctaaggtcgatctgtgttgtatttaaaaatctaatttctttatttgtgtggccttctagacaaacgaaggggacctagaggaaaccccctgacagatctctggatgatcctccttgaatcctgggcagtttggtctctccttgctgtgctcctgtggcactaaactccttttgattggttctttctttccttcccagctagactaagcccctcatgggcaggtaatgaagattgaaaacttttttctgttctccagtgtgagcacattcctcctacatggtagatgtgcaatagatgtttttaaaattggagaatgaaaataaaagaagaaaatcacaatttcttatcaagttgtagcttggtatcatacacaattgcattctgaggaattaaggtggtacaacttagggagatttggtgtgtctgctgtgatagaaaagatttctttttcctggctttccctgaggaaaggaaagatggaaagagggaagccatacagatatccctctgttttgcagtgtagaaactgaatgtgtttctacagggtcaagagacattagagaaattttttttttttagaacagaagatcatttcttacatcttcattaagtaaaagaataaatagctcatctctcaagttgaaagaaactgggcttggtattattacaaaagcaaaattaaaatggccatataggttttaggctcattttgccatgcattatgcaaaggacaaagaaaaagaaaaaatagagctctctttacttaaaacatccttaaggagaagctatgaattccccaaagtactacttctctttattatggaataaatggattcccttatacgtgctttgtttagcaatcaaggagaccgcgaaggcgtacattcccgggtgttgcttccaggagaaaccctgaacggagagctcgtcctcttaccaggtcaaggtcccggatcctcgggtcccttgacgctctacccatggaggaggaggaggaagaggataagtacatgttggtgagaaagaggaagaccgtggatggctacatgaatgaagatgacctgcccagaagccgtcgctccagatcatccgtgacccttccgcatataattcgcccagtggaagaaattacagaggaggagttggagaacgtctgcagcaattctcgagagagatatataaccgttcactgaactggcattgcccgccttgtcgaggaatctgcaactgcagtttctgccggcagcgagatggacggtgtgcgactggggtccttgtgtatttagccaaatatcatggctttgggaatgtgcatgcctacttgaaaagcctgaaacaggaatttgaaatgcaagcataatatctggaaaatttgctgcctgccttctacttctcaaatctttcttgtaaaagtttccaattttttcactgaaacctgagttaaaaatcttgatgatcagcctgtttcataagaaactccaatcaagttaatcttagcagacatgtgtttctggagcatcacagaaggtatattgctagttacactttgccctcctgcagtttcttctctgctcccaacccccatctcatagcatccccctctatttccaatgctcctctccaaccgcttagtttctgaatttcttttaaattacagttttatgaaagcatattttatttacttggtgttgaaatagccctcataaaacctaagcacttggaaacacaataatagtattaactaactagatctattgaatttcagagaagagccttctaacttgtttacacaaaaacgagtatgatttagcactcatactagttgaaatttttaatagaatcaaggcacaaaagtcttaaaaccatgtggaaaaattaggtaattattgcagattgatgtctctcaatcccatgtattgcgcttatgttacaagttgttgtcacagttgagacttaatttctcctaatttcttctgcccgaagggtaagtggtgcgtccagcttacacgatcataattcaaaggttggtgggcaatgtaatacttaattaaaataatgatggaagagctatctggagattatgagtaagctgatttgaattttcagtataaaactttagtataattgtagtttgcaaagtttatttcagttcacatgtaaggtattgcaaataaattcttggacaattttgtatggaaacttgatattaaaaactagtctgtggttctttgcagtttcttgtaaatttataaaccaggcacaaggttcaagtttagattttaagcacttttataacaatgataagtgcctttttggagatgtaacttttagcagtttgttaacctgacatctctgccagtctagtttctgggcaggtttcctgtgtcagtattccccctcctctttgcattaatcaaggtatttggtagaggtggaatctaagtgtttgtatgtccaatttacttgcatatgtaaaccattgctgtgccattcaatgtttgatgcataattggaccttgaatcgataagtgtaaatacagcttttgatctgtaatgcttttatacaaaagtttattttaataataaaatgtttgttccaaaaaaaaaaaaaaaaa

SEQ ID NO: 4781 - protein, 217 aa, Homo sapien
GTADRAAAPLSPLQAPIWAPATSMDARRVPQKDLRVKKNLKKFRYVKLISMETSSSSDDSCDSFASDNFANTRLQSVREGCRTRSQCRHSGPLRVAMKFPARSTRGATNKKAESRQPSENSVTDSNSDSEDESGMNFLEKRALNIKQNKAMLAKLMSELESFPGSFRGRHPLPGSDSVSTSSCLYTVVFWAHLRSICVVFKNLISLFVWPSRQTKGT

SEQ ID NO: 4782 - DNA, 3076 bp, Homo sapien
acacagagccgcctttcagccgcccgagaactgcccgccgcactccgcgactgcggcgcctgctctcgggccggggtctgcgcgcaccacgcggccggcagaaagggtaagagaagggaaccccgctttgcagggctccaacttcggcggacgcgttacggcgagggcgaaatgagtcggccgtgaacggtgtttcctgttccgaatcccgagagccctggaaagttttgaaggaggaggcatggcccggcagccttatcgttttccccaggcaaggattccggagagaggatcaggtgttttcaggttaaccgtcagaaacgcaatggcacatcgtgattctgagatgaaaggagaatgtctaagggaagacctgaagttttacttcatgagcccttgtgaaaaataccgagccagacgccagattccgtgaaaactgggtttgcagattttgaagatagtcatggtcaccacacagcttgttcgttttggtttaagtaaccagctggtggttgctttcaaagaagataacactgttgcttttaagcacttgtttttgaaaggatattctggtacagatgaagatgactacagctgcagtgtatatactcaagaggatgcctatgagagcatcttttttgctattaatcagtatcatcagctaaaggacattaccctggggacccttggttatggagaaaatgaagacaatagaattggcttaaaagtctgtaagcagcattacaagaaagggaccatgtttccttctaatgagacactgaatattgacaacgacgttgagctcatttcttgttctttcattgccctagattgtgttcaattagaccttcaggacctctccaagaagcctccggactggaagaactcatcattcttcagactggaattttatcggctcttacaggttgaaatctcctttcatcttaaaggcattgacctacagacaattcattcccgtgagttaccagactgttatgtctttcagaatacgattatctttgacaataaagctcacagtggcaaaatcaaaatctattttgacagtgatgccaaaattgaagaatgtaaagacttgaacatatttggatctactcagaaaaatgctcagtatgtcctggtgtttgatgcatttgtcattgtgatttgcttggcatctcttattctgtgtacaagatccattgttcttgctctaaggttacggaagagatttctaaatttcttcctggagaagtacaagcggcctgtgtgtgacaccgaccagtgggagttcatcaacggctggtatgtcctggtgattatcagcgacctaatgacaatcattggctccatattaaaaatggaaatcaaagcaaagaatctcacaaactatgatctctgcagcatttttcttggaacctctacgctcttggtttgggttggagtcatcagatacctgggttatttccaggcatataatgtgctgattttaacaatgcaggcctcactgccaaaagttcttcggttttgtgcttgtgctggtatgatttatctgggttacacattctgtggctggattgtcttaggaccataccatgacaagtttgaaaatctgaacacagttgctgagtgtctgttttctctggtcaacggtgatgacatgtttgcaacctttgcccaaatccagcagaagagcatcttggtgtggctgttcagtcgtctgtatttatattccttcatcagcctttttatatatatgattctcagtctttttattgcacttattacagattcttatgacaccattaagaaattccaacagaatgggtttcctgaaacggatttgcaggaattcctgaaggaatgcagtagcaaagaagagtatcagaaagagtcctcagccttcctgtcctgcatctgctgtcggaggaggaaaagaagtgatgatcacttgatacctattagctaaagttctgctaaagatgattaaagttcaggcatccttatccagcggctgagcagaggaaccccaaatgacttggacaagcagttccaaaatgactctcttatttaattgtggagtgggaaagaggactcacagttagccagctgaccatgactgaagttccagctttactttttataaacttgaatgataaagaatagaccatgggctactactgggcattagtgcaatataacagcgataataaaattctctattagtctgttaatttatgacatgatctcggaatggaaaaagatcatttcagagtgtgcgaaataatagtctttaaccatgtaattaaatatgtgtgtttattgtcaaataaggatttgttttaaaggtgattcttgggtttgaagacatttgttaattcatggtctgtacagaaatgaagctggttgcaataccaatctagagagtccaagctggcgaactattaagctgtttaaagatcacccttggcctggcacagtggttcacacctgtaatcccagcactttgggaggcctaggcaggcagactgagctcaggagcttgagaccagcctgggcaacatggcaaaaacccacctctacaaaaagtacaaaaattagtcgggcgtgatggcaggcatctgtagtcccagctacttgggaagctgaagtgggaggatcacctgagctctggaggtggaggctgccatgagccatgatcgtgccactacactccagcctgggtgacagagtgagatcctgtctcaaaaaaaaaaaaaaatcacccttaaatcaacaaaaagacctcatgctcatgcagtggacatttcttggcctgttttcctgtgggttttcttcagcatgatatgaagcaactgttggcatagccagtgggataaataagaaatggaatcatttggctgcctcgtcacttgtgctaatggtcagttgtacacacatgacatgtggaagtgacctgtagcagcggtcactcattttaacaattgaactctgctgggttgggtatttacctttgtctagaaaagaaatatgatatattttctctaaataaatttattttctaagttaaaaagaaaaa

SEQ ID NO: 4783 - protein, 500 aa, Homo sapien
MVTTQLVRFGLSNQLVVAFKEDNTVAFKHLFLKGYSGTDEDDYSCSVYTQEDAYESIFFAINQYHQLKDITLGTLGYGENEDNRIGLKVCKQHYKKGTMFPSNETLNIDNDVELISCSFIALDCVQLDLQDLSKKPPDWKNSSFFRLEFYRLLQVEISFHLKGIDLQTIHSRELPDCYVFQNTIIFDNKAHSGKIKIYFDSDAKIEECKDLNIFGSTQKNAQYVLVFDAFVIVICLASLILCTRSIVLALRLRKRFLNFFLEKYKRPVCDTDQWEFINGWYVLVIISDLMTIIGSILKMEIKAKNLTNYDLCSIFLGTSTLLVWVGVIRYLGYFQAYNVLILTMQASLPKVLRFCACAGMIYLGYTFCGWIVLGPYHDKFENLNTVAECLFSLVNGDDMFATFAQIQQKSILVWLFSRLYLYSFISLFIYMILSLFIALITDSYDTIKKFQQNGFPETDLQEFLKECSSKEEYQKESSAFLSCICCRRRKRSDDHLIPIS

SEQ ID NO: 4784 - DNA, 2367 bp, Homo sapien
gatattcttgcaggagatcgtgcaagaatatccccgcacatcaaagatggagagaaagataaacacagagaaaaacatccgaattcatcccctaggacatataaatggagctttcagctcaatgaattagataatatgaacagtacagagagaatctcatttctccaagaaaaactacaggaaatcagaaaatattatatgtctttgaagtctgaagttgcaacgcatagacaggaggagaaaaagattaaaaaagaaagacagggaagtgtctcatgcgggagcctccatgtcatctgcttcatcagacactggaatgagtccctcatcatcatctcccccacaaaatgtacttgctgtagaatgcaggtgataaacattttctctaccttcccagcagtttgctgccatggacataaatccccaaaccctgaattacaaccacagaaagcactcaactggtttgacattgctaagtatatcctgtatacttttccaggctggattgtatctattcccctctctcttctttttttcttgttgcaaaaaataagctgattaataagtgaaggttaagcagcctgccatatttgtcataatttttcctctttacttttgtttttcgtttgttgtgatatagaacaaagggcacttagcaaatttgaatttgtataataaagctttcaggtgttacagaaatcgtagacaagcaagtgcacatgataaacatcaaaatattacccagctgaatagttactgctgcactttcactaagatgtatttgaacacttggtgagtagggggtttatgttgtgttttttttcattatcgttttttttatttttgtggaagcacttgctatttagaactgccaaagtatatgttcagcagtgtgcccaggattgaaggtgtaaatgggacaaaataaattgtgaaaggaagtgtagttgactgaaaactacagttgtaataagtcttccactttttataggatttttgagcacacaattatgcaaatattttaatgtttattaatgtttacagtggaattgtgaataagttttcagtggactatcttatcccttgacaaaaatattttgtcttttttctatgtaatttcagagtttttattttgttacaaaaagacaaaaatgaaatatataacaacaatgaagttatttaacaagatttctaaagctgaaatttttgtgtaaaataaggtattatcttgcaacttgttaaatatatttattcagacattggatgttgtatttttatgtattttttaaaatattaataaaatttaaaaaaagaaaattctaggttaattcactctttggatgacaatagctctcagctgtcctttttacaggaggttgcatcctgcagccttgcctgtgttaaagggagtctgtctcagtccatcaaacagtatagaactataaatgggcatctggatcattaaagtatgtccttgtttagaaactttggcagtcctagtatttaaactgttttgaggatcaaatttttggttgcccttaagatactttgtcacagtttttatgtttgctatactgccgaatgaatttatatctcccaaagttgagatgcaacaactaagtaaagcaactatgtatgctttgtctgtgaattgttccacagactgatagattttgtaaataattcttccaaaatcatgtatttaaagcagttttgcatatacattatgtaaaaaggtgattttataaaagcagtttttaaattcatgtttgtacattgaaaggggttttttttttaaacctccttttctgtgtttaatatgctgtagaataataacctagatgctctagactgtatatcaggatctgatttacaagaaaaagtcagagctaaacactagtgatggcatagcattactgaaatcattgtttcttaatttcattttactacattgtgaacttgtgattcagattccattttctcagagaattaaaaacaaaaaaagtactcttgtaaaatgcacttttctgtcttttctttgcaaagcagaagtatctcaatgtaaaataaaaatggagctcagtgggcagtattaataaaggccatgttttaaacataggctttatacttttagttttcatttaagtgattgcttttttcctaagtgcttgtaacttacagttggaaaatcagatttcacaaaaccaagcattttagtatattcagcctttacaataaaatatttctactaattataaaaatgaaaaaaaaagtgtcatttaaatccatttggacctaggaggcaaccttagatttatacattaaatattttaatgatttccttctgtagcaattcaataaatgtga

SEQ ID NO: 4785 - protein, 185 aa, Homo sapien [sequence omitted]

SEQ ID NO: 4786 - DNA, 1880 bp, Homo sapien
agccgagaggtgtcacccccagcgggcgcgggccggagcacgggcacccagcatgggggtactgctcacacagaggacgctgctcagtctggtccttgcactcctgtttccaagcatggcgagcatggcggctataggcagctgctcgaaagagtaccgcgtgctccttggccagctccagaagcagacagatctcatgcaggacaccagcagactcctggacccctatatacgtatccaaggcctggatgttcctaaactgagagagcactgcagggagcgccccggggccttccccagtgaggagaccctgagggggctgggcaggcggggcttcctgcagaccctcaatgccacactgggctgcgtcctgcacagactggccgacttagagcagcgcctccccaaggcccaggatttggagaggtctgggctgaacatcgaggacttggagaagctgcagatggcgaggccgaacatcctcgggctcaggaacaacatctactgcatggcccagctgctggacaactcagacacggctgagcccacgaaggctggccggggggcctctcagccgcccacccccacccctgcctcggatgcttttcagcgcaagctggagggctgcaggttcctgcatggctaccatcgcttcatgcactcagtggggcgggtcttcagcaagtggggggagagcccgaaccggagccggagacacagcccccaccaggccctgaggaagggggtgcgcaggaccagaccctccaggaaaggcaagagactcatgaccaggggacagctgccccggtagcctcgagagcaccccttgccggtgaaggatgcggcaggtgctctgtggatgagaggaaccatcgcaggatgacagctcccgggtccccaaacctgttcccctctgctactagccactgagaagtgcactttaagaggtgggagctgggcagacccctctacctcctccaggctgggagacagagtcaggctgttgcgctcccacctcagccccaagttccccaggcccagtggggtggccgggcgggccacgcgggaccgactttccattgattcaggggtctgatgacacaggctgactcatggccgggctgactgcccccctgccttgctccccgaggcctgccggtccttccctctcatgacttgcagggccgttgcccccagacttcctcctttccgtgtttctgaaggggaggtcacagcctgagctggcctcctatgcctcatcatgtcccaaaccagacacctggatgtctgggtgacctcactttaggcagctgtaacagcggcagggtgtcccaggagccctgatccgggggtccagggaatggagctcaggtcccaggccagccccgaagtcgccacgtggcctggggcaggtcactttacctctgtggacctgttttctctttgtgaagctagggagttagaggctgtacaaggcccccactgcctgtcggttgcttggattccctgacgtaaggtggatattaaaaatctgtaaatcaggacaggtggtgcaaatggcgctgggaggtgtacacggaggtctctgtaaaagcagacccacctcccagcgccgggaagcccgtcttgggtcctcgctgctggctgctccccctggtggtggatcctggaattttctcacgcaggagccattgctctcctagagggggtctcagaaactgcgaggccagttccttggagggacatgactaatttatcgatttttatcaatttttatcagttttatatttataagccttatttatgatgtatatttaatgttaatattgtgcaaacttatatttaaaacttgcctggtttctaaaaaaaaaaaaaaaaaa

SEQ ID NO: 4787 - protein, 252 aa, Homo sapien
MGVLLTQRTLLSLVLALLFPSMASMAAIGSCSKEYRVLLGQLQKQTDLMQDTSRLLDPYIRIQGLDVPKLREHCRERPGAFPSEETLRGLGRRGFLQTLNATLGCVLHRLADLEQRLPKAQDLERSGLNIEDLEKLQMARPNILGLRNNIYCMAQLLDNSDTAEPTKAGRGASQPPTPTPASDAFQRKLEGCRFLHGYHRFMHSVGRVFSKWGESPNRSRRHSPHQALRKGVRRTRPSRKGKRLMTRGQLPR

SEQ ID NO: 4788 - DNA, 3255 bp, Homo sapien
cttgttcaaagtcacacaactgttaggcagaaatgaggtcattcaaatccttaatcttctcctccagaccacactgcctcccaggaagagatgtgggcacctcctgctcttgccaggcaggaaaccgctccttatcaatgtctacggggtctgctctcacacccaggaaggactgtgacaagcatggactaacctgcggctccactcagcctgctgtcagcaccctcctgttcagcaggatgcaacatctgatgttctgccaggaggctgtagagctgcacatagaagtagccagtgtttcttcccattccaaaatggaaatatcactcagccttttttaaaattgacttcctatgttcattttgattgtaggtgatgcagcaagcctcagggctggggattttcaaaatcttgttggctgactattatagatggccttggaatttgctcttgggggtctgaatataacgtaggaaaatgtcctttctcagggagtggggctttaaagttcgtttgttcgtcactccaattttagctgtgcactgcacctttctttgcacccctactctcttcatcttgtctcatagccacagctattgaatttggcctgtgatcataagttgggtttctgatctgatctcttgcattctggtgggtactgggggcagaatcagctttgttaatgattttctgggcagaaggtaaattcagctgcatctgaaggggcttcacagtccaatagccgtccttttgttttacataacagagagtgatggtcaaggccacccacatctttagtggtagagccaggacaaaaagtcaggttttctgcctcttaagtctcatgctgcctcacatagcacctccagagctctagggaaaggaggctcagagagatgaagtgacttgtctgaagtcctgtggctagtggcagagaagttggaattagacctgcattggacctcaattcgctgagcagttgcagggaaatctggaaatcctttttttttttttttgagacagagtcttactctgtcacccaggctggagtgcaatggcgtgatctcagctcactgcaacaccgcctcccgggttcaagcgattctcctgcctcagcctcctgagtagctgggattacagacgcacgccaccatgcccggctaatttttgtatttttagtagagacaaggtttccccatattggtcaggctggtcttgaactcctgaccttgtgatccgcccgccttgacctcccaaagtgctgggatgacaggcgtgatccaccgtgcccagccgggaaatccattttttaaaataaattcaattatgtcttgaatgtactcagaaaacgagctgtttaaaatgtcccattgtgactgtaatgtgaacaatgacctctaacttgtattttatttggcaaggatgggggatgtgcatcaaatcttcacctctgggatttcctgaggcttggtctacttggctcaccctccacctgcatccccaccccactcctagatattaatacaaatctagccttgacaccgcctactgctccaccaccgcctacgtttttggccatcagagccttggagtttacagagcagaggccatgacattggggagcttgtttaaaaatcaatgatcagaaccccacattttagtttccttttggggagaaagaggagggccgtggaagaaaaggggtgtgcagctggagcgttattatgtctttctcagcggcaggcatgcccgcctctccaccttctccccgccaggcacaggagccagcagctggagcgtgctctgagtttcaggggaccccccacccagactgactggggcttctgggacttctcataggaagagtcaagacctcctgcgcttctttaaaaggtgatgggctcagtgttcccagtggcatctggaggtgaagccggtactgtctcaggagtggaaggcaatggcccactggcctttttctcccccacgtcacagtccccatttgctggagcccttgagggggccaccgaaactgtggctctcattcagcctcccaaagtgttgcactactgaatactcctttctgtttacaccagcagtgaatagagtcatgaaaagaacatattatatgcaatggcttgatgcttagtgtggcaatcaaaagcttgcctgggcagatgtaggcaggggctagacaatagtcatggagttgtcaccaggtcactgtctctctccttccccttccaggtctctactgtcccctgcagccaccacaagggctaagctgttgaatgagccccttggtttttccttataaacgcaatgacttacttgtgattcttggtctaatcccaggctaagaaacaaaacaaaagcttgtgatctgacccattcctttgctgccttccttctctttcaggcacctggacgtatttagtattctgccctgtgccttgcccaggggagggagaagtttctagcaaatgtggctttctgtctgctgcctggtgcttttatagtacttcatctgctttttattgttgttgttgtgttttttaaccaaaatggcatttgtttggctgtcattgtcgagtatatatttattgtgttttacaaacatgagtatatatgtatgtatatgtataaaaccaaacttatatatataagaagtcaaggcatgtatactagatattttaaagagttatttatcaagggaaaaagatgtgtgttataaagtaaacagagtctatattttctatataatgtagatagtcaaacatagcttataaattataggaggttttggttttcttttttattattaaaggaaaaaaagaagaaaaaaaaaagacaatgaatgcaactgttcttagtgtttttaaggccaaactactgtggaagctgggaggcggccctccctgcgggcctccagcagccctgtgcctgccgctaggagctccagagctgatgcccgttgtgatctctgcgatgctcgatgctcggagccagcggtcagcatcactcagccagctggcctgtgccgctctgacgtggcttccagctgttctccgcaatttgcattggtgggataaaggaatgaaaaggataaataaagatttaaaagaaaaaaaaaaaaaaaaaaaaaaaaaaaaaaaaaaaaaaaaaaaaaaaaaaaaaaaaaaaaaaaaaaaaaaaaaaaaaaaaaaaaaaaaaaaaaaaaaaaaaaaaaaaaaaaaaaaaaaaaaaaaaaaaaaa

SEQ ID NO: 4789 - protein, 133 aa, Homo sapien
MNATVLSVFKAKLLWKLGGGPPCGPPAALCLPLGAPELMPVVISAMLDARSQRSASLSQLACAALTWLPAVLRNLHWWDKGMKRINKDLKEKKKKKKKKKKKKKKKKKKKKKKKKKKKKKKKKKKKKKKKKKK

SEQ ID NO: 4790 - DNA, 6476 bp, Homo sapien
ctgggaaggaaggagacgcctaaaccgcggcactgcccggtttgagcgtagccaaacctgcccaccggctttgtagccccgattctctgtgttttgctcccgtctccgacgagagaggcggcgacggtggcgtctgcgacgggagacagcgcgtcggagcgagagagcgctgcgcctgccgccgccccaacagcggaggcgccgccgccatcggtcgtcaccagaccggagccgcaggccctcccgagcccggccatccgtgccccgctcccagatctctatccttttgggaccatgcgcggaggaggctttggggaccgggaccgggatcgtgaccgtggaggatttggagcaagaggtggtggtggccttcccccgaagaaatttggtaatcctggggagcgtttgcgtaaaaaaaagtgggatttgagtgagctccccaagtttgagaaaaatttttatgtggaacatccggaagtagcaaggctgacaccatatgaggttgatgagctacgccgaaagaaggagattacagtgagggggggagatgtttgtcctaaacccgtgtttgccttccatcatgctaacttcccacaatatgtaatggatgtgttgatggatcagcactttacagaaccaactccaattcagtgccagggatttccgttggctcttagtggccgggatatggtgggcattgctcagactggctctgggaagacgttggcgtatctcctgcctgcaattgttcatattaaccaccagccatacttggaaaggggagatggcccaatctgtctagttctggctcctaccagagagcttgcccagcaagtacagcaggtggccgatgactatggcaaatgttctagattgaagagtacttgtatttatggaggtgctcctaaaggtccccagattcgagacttggaaagaggtgttgagatctgcatagccactcctggacgtctgatagatttcctggagtcaggaaagacaaatcttcgccgatgtacttaccttgtattggacgaagctgacagaatgcttgatatggggtttgaaccccagatccgtaaaattgttgaccaaatcaggcctgataggcagacactgatgtggagtgcaacctggccaaaagaagtaagacagcttgcagaggatttccttcgtgattacacccagatcaacgtaggcaatctggagttgagtgccaaccacaacatcctccagatagtggatgtctgcatggaaagtgaaaaagaccacaagttgatccaactaatggaagaaataatggctgaaaaggaaaacaaaacaataatatttgtggagacaaagagacgctgtgatgatctgactcgaaggatgcgcagagatggttggccagctatgtgtatccatggagacaagagtcaaccagaaagagattgggtacttaatgagttccgttctggaaaggcacccatccttattgctacagatgtagcctcccgtgggctaggtttgtatagataggtgtctctgtcaatggtatatgtatcttttggtttaaagattcgtcatttcaaattcagacttcaagtttagaaagttgtatatacatgtggttagataaatatttgaaagaaaaaaatacaaagcgtgattctccccattccctgccccccccacaattttttttaactttggtttcccccaccccccttttattttcaaagtctcttcctgctcctaacaaacaggctttggtctgcagcaaggcctaggcatgactattcaaacagagggagaggagacagacagctgaatggctcagcttctctctggtggtggtttctggctggatagaataagcctgacgaaacctagctattgtaagctagtttcttcagttattcttttccctatccctgtctaagctagatatatacagagaggtccagttttatgaatgcttattagatggaattttataagtctaatgcagtatcagaatagcaaatatgtgtattgcccagtttaatttactgaggtcaaattatcatgggcacttggctatcccctcctacccatgcacttatctgtaggtgtgttatcaactgatgattttctggagtttttgacccattaccatttaagatatacagagaattttatggtagtttagcccactattctgagctaaacaggtctaactcagaacttctatattttaaaaaaaaagattatttgtattacaaggaaatccttaaattattgacaggtatttaatttgcccagtaaggtgagaagtaccatattattcccttatactatataatataaagagaacaggtattcaaactggaatacaaaagtaatgaagcctttttatgcattgcactcatcattccctccttcagaggtggtgacctgcagccatgatggaaagttctctctgcccctctgccctctgaggtcatgtctggatctgtgccattagaacttgggcctgttgggagaggaggcggaggcctgaaggcagtttacataaagctttcagtaatggttggtttttaaacaggcttgctatgtgctggtagcttctttgtgcatcttgcctagacaattaaaaatatttgctccatgtccccttgcatttctaaaccaaattaattggctaccattagaataacttagactcttcatcccacccccactcatccaagtgaggggagagggaaggtacccgagtctgtttcttgttactcaacatcagtgcttgttttgggcccctttgtttgctgccttgtaaaaaatcaaaagagggagaaaacccaccaaaatggcagaattctgaccaatgtcctacaagatcctggaaagtgaaggcttctacctcatagacaggggtgcaattttcagctgagtcaccagggccttttttcacttcctgtcaagcgatggtctcttaaatgttcccttcaggtaagttctttgattcccataattttataatagtcatccttaggctaccacttccctttccactgggatattttttatttttccttttttttgtttgaactacacactgttaaactaaaagtattgaatttattttgttttgttttttaacagaagctttgatatcagctgcagatcactcaatacatggccgagacaaatctacattggccggaagcagctctagatgagcctcttggctagacttagtccctccttattagtgattggcgattcaggccatgtcatagggcctttcagacaaaaggttcttatcccagtcagctggccaaaacattaactttggatttcttaccctgctacagcatcttctagaaaggcagcaagataatattgtggcagtgcacagataacatcagggtagacttgactggagaaaaccaaattctgcgcttgctcctgtgtgcccccatccagctgtgcatgcacacacaggacacctttctagtatgaagaacttgcatcatgtctgccctctattgagcacccccttctagaaatacttccaagtattagcatgtgaactgttgactccaccctggtgctttctgctaggaaagcacacttaacgcatccagtgtagtaattgaacttgttctactgccatggtcatatgcagtgggattgcataaggagcattatcctagctctgaagataccatggagtagaattccccaccccctgtcttacatccaccctggccctgtaaattcttttttcctttgttgcgtcaacgaccctagccggagactcaagctgccccctgtgataagtgccttctcgtctttctggtgtgattcaggactttaggggtcagtaaagaccgaggagcctttattgtaataagaaacagacataatgccccttcttcacaagccctgtaacaacagctaattttttttttttgatctcccctttctcccttgaaattaatccagtctgggcaatagatgcagtctgaccctttggatgtaacttacatttttttttattaattatttttttctacaatcaccccaattatccttgggggaggcgttggaggacctgaaatttttacccgaacccaggttctccggcgcttggcaaccaaatggggctacagagaagcatctaagccagttcacagagcgagcgtgtgtggggacttctcactgccacggacccttgatgcatgctccccgcgctccagtggtcccgtgtcagaaggcggagttttcgaaaggaggccgccaaaaataaaaggcaaagagacgggatcggctgcagcggtttcccaaaggaggagggagtgtgcatcggtctggtaacaaacagagaatgttttttaattatttatatcacaaaaatctgtgttttatctaggatattttctgaatattctttgtaaaatgcagatttttttccacaaaacagtaggattctttgttatattcttaaaattgtttgtttaagtaggtaaaaatatacattcagctgaaagcattacactaacatttacattttaagccttaggaggttattcagcccaattcccagcagtagagagaatactaaacttgtgtctcaaggtttcatggttttcccacgttctttggctattaatttaatttcccaggtcacgtagacaatcattgataattgaaacaagtcctgagttgaaataaccttgagttgagcaaaaatatcctcattttggcagaagctgggcttggtagtacagtaaaattttagtgtaatgtgctcttgtaattgaaaggggatagataatctggatgtttctgcaaaggaaaataggtgtgtacttaacagctttggctctactcagtttcttaaaaagataagagcaaaaaaagttaaatgttaatcaaaacatttaagtttcctttaaattgtagtaataaaatatatgaagctcctttttttactttgctctgtgactggtttaaaggtaagtttgttatgttgttggtagattttgccaggcttctcccaacagagtagaagtgatttggcctcataacttcacagtggtttaccactttgttctatgttctggttttgtaaaggatagtactggaatttgcgtctgaagaccaatattggtgtaactcctgtcagtatattggtaaaatgtagcagaggcaggagtttggatgtttggatgggattcccttaggattctacagccaataaagatcctatttcctatgcatgtcccaggaatcagtaatcctcttttactctgttgggatgagtctttttttgtttctgttcagagtggttactaacttcaccttctttcctcttgctgtcatctgcattcgtgcttcccacctgttgttggcatgtcctttaccttctctttccctgccacatcaacctacacactgactcatcattgacgtggaagatgtggaagatgtcaagtttgtgatcaactatgactatccaaacagctcagaggattatgtgcaccgtattggccgaacagcccgtagcaccaacaagggtaccgcctataccttcttcaccccagggaacctaaaacaggccagagagcttatcaaagtgctggaagaggccaatcaggctatcaatccaaaactgatgcagcttgtggaccacagaggaggcggcggaggcgggggtggtcgttctcgttaccggaccacttcttcagccaacaatcccaatctgatgtatcaggatgagtgtgaccgaaggcttcgaggagtcaaggatggtggccggagagactctgcaagctatcgggatcgtagtgaaaccgatagagctggttatgctaatggcagtggctatggaagtccaaattctgcctttggagcacaagcaggccaatacacctatggtcaaggcacctatggggcagctgcttatggcaccagtagctatacagctcaagaatatggtgctggcacttatggagctagtagcaccacctcaactgggagaagttcacagagctctagccagcagtttagtgggataggccggtctgggcagcagccacagccactgatgtcacaacagtttgcacagcctccgggagctaccaatatgataggttacatggggcagactgcctaccaataccctcctcctcctccccctcctcctccttcacgtaaatgaaaccactcaagtggtagtgactccagcagacttaattacattttaaggaacactgtctttcctttttttttcctcttcgccttttctttttttttccttttttcttttttttttttaatttttccccccaaccatcgtgatttgtcttttcatgcagattagttagaattcactgccaggtttcttctgcccaccaaaatgatccagtctggaataacattttgtaaaaaaaaaatatatatatatatatataaaaaaaaaaaaaaaaaaaaaaaaaaaaaaaaaaaaa

SEQ ID NO: 4791 - protein, 505 aa, Homo sapien
WEGRRRLNRGTARFERSPNLPTGFVAPILCVLLPSPTREAATVASATGDSASERESAAPAAAPTAEAPPPSVVTRPEPQALPSPAIRAPLPDLYPFGTMRGGGFGDRDRDRDRGGFGARGGGGLPPKKFGNPGERLRKKKWDLSELPKFEKNFYVEHPEVARLTPYEVDELRRKKEITVRGGDVCPKPVFAFHHANFPQYVMDVLMDQHFTEPTPIQCQGFPLALSGRDMVGIAQTGSGKTLAYLLPAIVHINHQPYLERGDGPICLVLAPTRELAQQVQQVADDYGKCSRLKSTCIYGGAPKGPQIRDLERGVEICIATPGRLIDFLESGKTNLRRCTYLVLDEADRMLDMGFEPQIRKIVDQIRPDRQTLMWSATWPKEVRQLAEDFLRDYTQINVGNLELSANHNILQIVDVCMESEKDHKLIQLMEEIMAEKENKTIIFVETKRRCDDLTRRMRRDGWPAMCIHGDKSQPERDWVLNEFRSGKAPILIATDVASRGLGLYR

SEQ ID NO: 4792 - DNA, 3000 bp, Homo sapien
ggggggaagaatgagtagtcaggaactggtcactttgaatgtgggagggaagatattcacgacaaggttttctacgataaagcagtttcctgcttctcgtttggcacgcatgttagatggcagagaccaagaattcaagatggttggtggccagatttttgtagacagagatggtgatttgtttagtttcatcttagattttttgagaactcaccagcttttattacccactgaattttcagactatcttaggcttcagagagaggctcttttctatgaacttcgttctctagttgatctcttaaacccatacctgctacagccaagacctgctcttgtggaggtacatttcctaagccggaacactcaagcttttttcagggtgtttggctcttgcagcaaaacaattgagatgctaacagggaggattacagtgtttacagaacaaccttcagcgccgacctggaatggtaactttttccctcctcagatgaccttacttccactgcctccacaaagaccttcttaccatgacctggttttccagtgtggttctgacagcactactgataaccaaactggagtcaggtattttgtactttgcagtatttctcttgtataccagtttgtgatgttttctctaaaaacttgaagttcctcaggcctgtaacttctggaaaagatgattattcaaaataatgttttggggtaaccagtggagttgggtagaatgaccaaataattattttccaaactgggatactttttagagtgaaaggggctattattaggtgggacaaaaggaataaatgaagactgcccagaaaaaactgagactatggacattcaaatcatgggagaaaataattttgtagattatgttccattgctaatgaatttgacttagaaaagaattgccttatttttaagagattgtttcagtggttcacataaaggctcgctcactggtttctcttgagttccttacacactatataagttgttctttcagttttatgattcaactactgtttttccttcagctgactttatttttaaacacccttaaagacagatatatctcatggcaaatttggtatcctgttacagccttggctcttaaacaactcaaaatattgggataggctgtcagtatgttaaggatagttgctcctgagtcaattcttcacttactccctctgttgttcttggctggatcctaacgctgattttcactctgctgtcacaaacatttttccccccgtaaaatgtcttaatgctgtcctaccattattttaccaactgtgaaagctggctttaatttttaggaggaaaagaaaagcctgcatgtgttctttattggtatcatttaaaatatactttttttttttggtaaaggtaggcgtattttaagatattttcttaacttgagcagtagccaacaggaaggataccagtgtctctctctcttagcgacacactccttggtcttgcttaccaactggaggacactaggtagaatacccgagtatgacaattcttaattgttaacatttaataacttcctgtccttcaaaagagtttgaaatgtcattttgggaaaagagagccagtcaagctagtaggctgattgtgaagaaaatctaataccttatctttatctcaaacctctgtacaactttattttcattgatgggatactttaacaaaaatgaaattttttttggtttttaaaatatgagtgattatgacctctttggggatcatgcttcaaaaagtcagaaacctagagacaaaactgtcattgatttttaagaagaaacacactaggtcaaaagaagatgtcctggaaatacgaagtactctttaaaaaccatgcatttggagaaagtaattgtttccttgaaaaatatgattaaaaactaaaactgggatgttcctgtgtgtacacagtgccaaatggttttccctttttatgttgtgttttagaaacagcacgaaagttttttccattttaaagtgagaaaacattatatttagacttccataattccaaaatcagaagctatttttaaaattagcattttcttgcatcaccaaatggtattcaattgtttgaagctcaaaatttttaccattccataaatgtttgtgaatttttagacagtgccaatttaaaagtagagatagccaatctgaatacggtgaaattatggggatctctggtgattgggatgaaaactctggccttaaaaggtccacttttagtatataattgcctaattagcaatcatttttattttttgctcactccctggtctgaatctatctgtctattcagatattttttggtaggtttggaaaatggagaagtgagcctaattggtgcctaattgtctggtgtatcattcactttattcagtttgttctatcaatatgatttacccctcaaggttaacctagcaggttgctcagttattatctctcaaggccacagtactagaaatacttggcttgcatctttcagatgccattcatgttatcaagctcaaattatagttggtcacaggattctaaagtctttatttgacttctcctttttgaactggctcaaatggaaaagtgtagttgcttttaaatgttaaaaataagtttaaactttatatttcccattggtttcccctattttgtcctttctttgtgtgcttgaaatattttatttttcagtttgtcctcatagggaatcaagtattttagctaggtgatgtcttgcaagtacgttccactttgttacaatctactatctgtatatactatttgtatcttaattcttttatgagatgttctgtaacatttttctcactttgacaaatgtttttagactgtacagtcaagatctggcgcttgggggtaagtggaatgatttgctaatattgagaatctgttgtatcaaacataataaactttttttgagatgtgaaaaaaaaaaaaaaaaaaaaa

SEQ ID NO: 4793 - DNA, 3585 bp, Homo sapien
caagggacttaccagtctggattcagcagtttcttttctaaaacccatttgggtgactcagcagccgcatctgctacctgattttatcctggagaatacagtgcaatatttctctttgattatttattcctcttgattgtggaattaatttgattgcttgctaatggtactagtagtactcctttcagaagaaaaaatggagcgatttaggtgaccaaatattacatacataaatagccacatgaagttttagacgtttggacttgaagcctcaaagatcaaccaaccagtccccttatttagtaaataaggaaattgaggctacacacagaaaattgtactacagattattactaataacccagcttgctaaattaggctatacctaggtaatctctagaagacaactctgacagactctttaatatttacccctggttggaacaatatttgaaatgtcccagatatttctatgctacttagatatttgtggcaaagcagaaagctttttgactgtgaaggcagaggtcagcactgggggaaacttgctggtggtctctcccacaaccttgcccagagtcctttccactaaggaggtgaagagaacagagaaagagatttccatttctgctgccagagctggtatttgcctgcctgattctctgtgtttcctgtttcaccgccaccctttcaggagagaactacaccagttcatcatgagggtcagggaagcaaaagctctcagatgtgtccagggcgttacttaagaaatgagtatgcagattctggaaggggtgtggaaaaggtgatcctttacccccacccaggaaaacctgcattgtgctagcatggaagaatcatgggctttggaattaaacccatttggtggaattaaacccatttggtttcaaatcccagttatgacatctgttaactttgcaaactcacaaaaattatttgaaattatctgagttttcattttctcaccttccagaatggggataatgcctcctgcatcggttgttgtgaggtttcaatgagatgaaatatgggaaagaagaggtactcacctgatggtccctgctttcctctgctaggcctgagtaggaactggaactctctaagagcattactcatactttttttttcttccaaggtagtttggaatgtgagtgcaagttagttctgcacatacagcccttctccaaatggtggtttcctttgaggtcttttacatgattatttatgactagagacaaacttaataagaactcaagaggattttaaatggagagaactcaagctgtagagaaaggaggaggcaacagacaggatatgtaggggcttacctagagcctggcacgacttctgagaagtcacccagcagaccggctagaggggatttgtgtgccacactctacttgccgggctgccattaaaatagaaagatataaaactgggtcaccaaaaaaaccaaacctcaaggctatccttccagagcagtagaaatgagtcccacagcctggtctttgagcagaggctgggaagataggatacatcactgtctggataccttctctttttaatagaatatattccgtatgattccctttccaccttaatggaaataatagctctctcctgcctgaacaaaagggattccaggtagtattgtggctaagagattacagcggacgatggaaggttcattttttagggaaggtgttgggtaggaagagtcacatttgacagaattcataaataatgtgtcctgaagtcagaggatgactgcaaagaaacacctcatgattccattaaatataaagagataaggagcaaggaggaaaaaagagaaagaattggtctttatttttcttgctaagaactctctggagtattgaaagacattgaaattatccctaaaattgtcacaacttttgtgaatactggtatacggttggaggtgtttttaaatctttatttcctctctttctttgttctagtgacttgtcttgctttaagattttttttaaagaattgttttattcaacatatatcaagttcttatggaatgccagtcatggtactagccccttgggatgtagtggttgagtgtgttcaatggaaacagccccagtatacaaagacagttcactctggtgtgctgtaggattggaaagggagtggtaccagatgaaaatgaaaccctaaagaagactgctgggccatgagttgcttcctcctcctccaccttaaccctctgattccagaattgcagtcattttcttctgccaaggaaatccattaaaaactgcagccacactgcaatttcctaatgtagaacaagatataaagcaggctttgagacaacaacctacctttgtttactctttccaagctggaagagtccttctcctctagttgcccctaggtcactggctaatttattttaaaatttagatggaactcatgtatagttaagtgcacaaatcttagccgtgcagatgggtaattttcacatagctatttgcccacatccgtgcctctaagatagagacatacactgttttcagcaccccagaaagttcccacatgcccatggtgccattttgtgaaaggtatttataaggcccttcaaatttgtggcttcctttctcatacttctcaggtataatgaaagggggagaaaaaccccaccatcaacacaaaacaaggctataaagactgtgcaccttttaacaagtcaatttgtagtcagtccctgggcctgtcttttttttttttaaattttgaagctacctgaggtttagaattccttcagccctagctgcttttattctgctttttatttaaacaaaaagagggggaggatctgaaggaaactagttttctgtacaaaggctttgaggtccatggactatacttgtcccatttatcatcccaggtggtgctttgaccctgccataccctggctattaagataaaaagatttgtggacattaaaattatgaatatgtcagtaataatccagcacacattgaaatattgacacagattaccataatttgtgcaacatcttataaacaatgtcatttccatagtagtctaaggcttcaccagcctggcccactgtatctagactttaggttcattttaataattatgctttccttctctgtatcatttgggaagttgataaatatcacttccttagataccttcattcagtgatatatctggcttttacaattaaattggaaaaggtaagtttctctttggtgggttgagagttggaccatcaattctaatctacaaaaggaaattcatgatttcactctgacgcctaggatctagccaaggctggtctgcagtatcagatgtccaaactcatctactattagccatattttgtgagtcgtttgtctaaactttgtcaaaaatgcctttgccatgattttgttgctatctggatttcaaacatggacagttaggaagatgtgcattgaagtaggaaaattttgttcagatttgctgttatttattttttaaattaaaaatggaaatgtattttaaagtttaaaaaaa

SEQ ID NO: 4794 - protein, 44 aa, Homo sapien
KGLTSLDSAVSFLKPIWVTQQPHLLPDFILENTVQYFSLIIYSS

SEQ ID NO: 4795 - DNA, 2566 bp, Homo sapien
  Unsure 349-452: Unknown base
aaagaaaaatggaaatatggtaggcctgtggtattcttaaaagctaagtcattagaactatgcagatccccaagtttaaaagtacaaatacagcaccagtagttagctttctagctgggggagaagacaggagatttttcttccacagatgtttattttgcttcctgataggtactgcagcaaagccatgttgatgtgtagatgcatgattcaaatttgtgcctcagtaaaattataaattattgcatgtcataccttgaataatggaaacggcaaacattaaacctgtgattacccataatgtactttaataataaaaaacatggcagccaggtgcagtagagtgcannnnnnnnnnnnnnnnnnnnnnnnnnnnnnnnnnnnnnnnnnnnnnnnnnnnnnnnnnnnnnnnnnnnnnnnnnnnnnnnnnnnnnnnnnnnnnnnnnnnnnnnttaaaggacagaggctaagctgtaaggttagcatggttctgcctgggcttgcttctgtgcttctgtgcaggctgagctgtaaggttagcatggttctgcctgggctttgcttctgcgcttctgtgcaggctgagctgtaaggttagcatggttctgcctgggctttgcttctgcgcttctgtgcaggctgagctgtaaggttagcatggttctgcctgggctttgcttctgcgcttctgtgctagcaggtgcccacaaaatgtctttttgaatttcttaatttttgggttctggatgcaattcgtgcacgccaagaaactacttgcttgtcagtattttaattctgtagtacatgtgtgtgaatatcagccagtacttacagtaggaggatgaacagaaaaactgagaagacctgtctttcaaaagatgggtttatccactttttaagggaaaaagtgacagtttggcatgggatttgaaaagtggaaattgtggaaaaattgagctgttgaagtcccacatataaccagatttaataaagcttcacatgtgaattagctccatatgtgtgtagaaggttgcttttatagcaggtccttaagtactccttttgaaattcctccttttttttttaagtcataccattacttctttggatatgaatgtcccaagtggtatctcctactgtagtatgaggaagaatggctgttaatgtattttttgaattttggtcttgtcttggcctggatcatatccagtcaccactatgcaacaaatgatgtgcactgggcaaggatatgatgggttatgaaagctgtatcttgtttgttttttcttttgcagtactccaagtggtctaaacaggaatgtcttgtaaaacctcaagactccctattgattattcccttacatatttatttacaatttatcagggtaattggtggtgccttatgaaaagtataactcgatttcttgatctttgagcatgttttgtgtttcttgtgttttctaaaagaatattagatatggttaattgcattacatctaaaagatttaaaaaattgtgtgtatgctcaggttccccacacccatacccaccctaacccctgtcatttacattggtggcaactttaaatggtaaccaagcaaaagtacattttgataatgagtattgataatcctgaggaaaactagtgagtatatgggagccacctttgacctgtgccaaagcagtttctaatttcatttgctaactataaaataaagaactgagccaaaataatttgatcagtggtgtgattagcctattatcattgctgagaatagtgtttttggagtgtgaagtgattcctgaagatttcacctgccttctgtttccagcaagaatccagtgatgaccaacacatttcctcacttttggttcttgagaagtttatccctttgcaacaaaccattaatagggaaaacaaggaaatgctttccctttctctttggcttcttaaagctcacaaccaattcagaccccaagttacttcagagaagcaaatggcaccttttccccattgccaaggatcccagcttatgcagatatgaaggacggatcatttctgaaaatgttaagactctgcttgcagtggacttggcctcagtttcatgaaatgtgtaactctgtatgtgtatgttaggaggagggttggttgaaagagcgggggcagggaggggaatctgattacctcttgggaaataattttcttgccaacaaaaagatacacttgaagtttcttaaggtggcaagtccattaaaaaaaaaaattgtgttggaccctcccagtttagatcaagtatttcttgggggtcttgctattgtggttgataccaataaatggaagatccagaatattttcatttaaagctcaaccattaattggaacatggtgaaacattgtacacattgtaaaagtagggaacagtacaaaagaatggaatcaaatactatattatgtgaataaactagagtgattttggaatttcactctcttcaccccttctcacttgtatgttctgtaaagtgtatttctactttggtaggaagaaagacttgatttaatatttca

SEQ ID NO: 4796 - protein, 87 aa, Homo sapien
  Unsure 349-452: Unknown amino acid
MTNTFPHFWFLRSLSLCNKPLIGKTRKCFPFLFGFLKLTTNSDPKLLQRSKWHLFPIAKDPSLCRYEGRIISENVKTLLAVDLASVS

SEQ ID NO: 4797 - DNA, 1871 bp, Homo sapien
ctgatgttgggcagatcagtgaaggatgctgttgtgctccagtcactgacatttttcatagaacattaccccaaaggacacagaaatgattccaaaaaatgtagaagtctttgcctagtaggtcactgcaaagtgctaaaatctgaagaaaggaagagcagttcataaatgcttatcttcacattgttcattgggctgccctaacctcccctgctcccagagaatgccagatggctttacaattgaggtggttcaaacacagaaggccctttttccttttattaattgctcagctatgtgtacattggcccccacacctgccacctgaccagcgcggcttctgcctccctcagcactgccagccgggggttttcttagactcatcccctgggccaccttccgctcctctccctccctctgcattaacatccaggccaccctcattactccttggcaacctagcttgggttggcctccccagccagccttccagactattctttctctcccttgcagcctgtcttgcacaccactgtggccaggtcagtctttctgagaataccatttcctcacatcatggccctgtttacaaagcagtttcccatttgcctatcacatcagatcaaatcagaactcttcggctctggattgaagccgacgccactgttcctggcaagcctcattgccctccgatcccggcgttggcctccgtccctgtcaggtcttgtacgatgctgctctctgccatcctgccgtctccagctctgcctgcatattggtcctgcattgctctccacctcacagactcttattccacggctctggccagtccaaagcatacatggcccagttagttcccttttacttgaaatattccctgaggagcccccaggtatttttccttactcactggagacttgtagtcagggccacactgatgtcatttgggaattatttgcaaagtcacagatctggacttctctctccagctaaatcatgagttcctcagctaaatcacgggcccacagttctgcagcagctggtaaacacttttagtcacggaaggaagcctttttcggttctcagctctgccaaggaacttatttcacgtacacaaaaccacaaaccgtgagaggattgctgcctgtatcctgttccccctcatctttttttttctttgaaaagatggtaaagctgattataagaatttaaataacgtggccctagaactacactctgactctgatccgcgtgtcctgcccacagcaccaggccacgaagacagaccatgtcgctatcctcacatttgcttgtaacttaggaggcttgccagtaaaatcgatactaacagtggacgtacttctctttgaataagtttattctatttccttctcccattttctttatttgttgaaaagaatgatgctgattgagaagccaaatattgttaaccattttccccgtctggcacggttcttttgcacagcactggattaggccaggggactggcctaaccctgcaaatatcaggaaaggactcttctagggaaagtcgtactaatttgaattgatcactagaaatacatggtctccacctaaaagatgctttgtcacttaaaaggctgagtagtcatcataatgtaaagaaacctctattgtcatgcaaccatttgcacccagacattgtgcctggttggcacttaacattttatcacttgattctcacaccacccttgcaatgtgatgaaaccaaggctcctaggtgctaagtgacattcccctagtcacgcagcctagtgctagtcacgcagcctagtggtagagcgaggattcaaacccagttttgttttcctttgagctggagctgcaag

SEQ ID NO: 4798 - protein, 207 aa, Homo sapien [sequence omitted]

SEQ ID NO: 4799 - DNA, 1263 bp, Homo sapien
gctgtggacgaagaggcggcctcggtggtaagtggcggccgctgggacccagccaggtaccggtccggctcggccctgcccctttccggccgctctcactccttccctcggcctcgagttcctcgtgggcccgtgggggccgccgcggggtcggggctgcgaggcagcgcccgccgttccatggtaagcggtgctacgggacgttcggaaggaaacctcgctagagcaggggacgcctgggctcctggctgaccacggggcctttgcacggccagggctttgcgaccgcagtgtcttccttctgtccccggtcgtgcgccgtgcccctcagcgcggctcacgtttcggaacacgtctgcctttcatgcctcccgaagagcctccccgcatcccgtgccccctgctcgctgctgccgctgacccttgggcgctgcgctggtccagagcgtgttgtcctctgacgccgtcagaacctgagctccctgcgagctgggactccgccgtgtcttcattgcctccagtgcaaagcaactgcttgcaagagaacaaaagtgtgttcaggtgcacagagtagaaaattcaaggagcctgaaagggtatttggtgaagacttgatgtgtttttcccagtcctaacctccaaggcccagttctcccctggggcagagggaaacccgtttcttacgggtctgcaaagaaagtctatgcaggaacatctacgtgcgtttctgcaaaaggtcagttactttacttggggctcttatacttaacgtagctcggagagcgccccatgcattcagatacaggtgggattcctccggaaacggagttttatagcaccagactttatcccctttcctgtagaaatttagggtttttgctgtcttttataacgaacaatgctagcttgactattgcttgtacaaaccgttttttgcccaagtcggactattttcttaggttaaattccttggtgcagaagtgcgagggctgtatttaggcccctaaaggggtggtaccaaatcgccctcccccaccagcataagagggggccggcgacacccttgcccaagctggattttgcagacctggtaggcgtgagatagtatttcactgtagcttgtgtttcctgtaagtatagtcgaacgtcgtgatgttcctgttacatctatgttacgttgatcattgttaccactgacagtcgtttcgagattggaaaatatgtttattataaacgtttgactatttaaaagccatttgtatt

SEQ ID NO: 4800 - protein, 83 aa, Homo sapien
AVDEEAASVVSGGRWDPARYRSGSALPLSGRSHSFPRPRVPRGPVGAAAGSGLRGSARRSMVSGATGRSEGNLARAGDAWAPG

SEQ ID NO: 4801 - DNA, 1577 bp, Homo sapien
ggaaactacgaggcaagaatatccaagaaaaatctagaaaagaagaaacctgagtgagtcagcatgaccaaatattaaaacatcttataaagctgcaataattaaaacaatgtggtgctgatatgtggagggtcaatggaacaagatgaaatggccaaaaataaatttaaaatacatgttgaaatgtattaacagcatatgttaaagttaagttgtgttaactttatatgttaaattcaagttaattggtgaaagatggattattcaatatatgatgaacaactctgtcacgcagctaaaaaaaattaagctaggtccatatgccagactagataccaaaataaattccaggaggaccaagtttttaaaagtaaaaatatggaatcatggaagtgcatgaagaagaagtagcacttaaaaaaataataatctcagcatggggaaggtctaagtatggccctcaatcagaaaccaggaaggaaaatattgactattttaaacaaaattatctctgtaccaaaaacagcataaaaggtcaagaaacaacacactggaaaaagaattgcaatgaatatcacagccaaatagttaatttcttattttcaaaaaatagcttctacaaatcgaagagaaaaattctaaggtctcaaaggaaaaatgagcaaaggatttgacaggtggtagaatacagaaaaagaatttaaaatagctcctaaagatatggaaacattactcatgatagcagaagtatcaattgacaaaattactcagattggtaacaaactttaagggggaaagcacttccatgcattgctgtaaattggtacatcttctactgagaacaatccggcagtagttaacaaaattgtgaatgcatatatctctttctctagaaatttctcttttgggaatttattctacatatatattcaaacatgtgtgaaatacttctatacaggtgattgaatttcactttattcctaagagcagaagactgcaaaatagtaaatatatacccaaaagggtctaatggattagtttttggcatatcagcacatgataatactatgaagccataaaaaagagagatctctatatgtattgatgggggaccatctttaagatatactgtggtgttgaacaaaacaacatgctgaaaatgtctcttattcttttagaatcaatataagtctgtgcttgtaaatgcagtaagtatctttggaagtatacctaaaaattggtaatagtgtttgactccagggaagaacagatgggtgccagagtgaaaaaaagatagcttttgctttttatgacttttggattctgtaccacgtaataattttgatgtaaattttgctgtgtgtgtttttacttgttcatgtagtgattttataaattactcttttaattttctatcaatgaatatcctgggataaacccctcatgatcataatgaataatgatgtgtggagagtggggagggtttacatatgaaaaatgtagaaaatacaaaaagtgtctatatatacaaaaatgtaagtgttaacatttttatatttgcttcaagcttttttttt

SEQ ID NO: 4802 - protein, 95 aa, Homo sapien [sequence omitted]

SEQ ID NO: 4803 - DNA, 2276 bp, Homo sapien
tggccttaggtgtacacacacctggcactttgcttgacacataataggtggaccacaaatatctactaaatgaatatttgcatatagtaatattttaaggtactaaaagcagctcaaagtaaatatattaatatattaattccattgctatctggataaccactcaactttcctgctgaaaatgcccatttaattaaagaaggttggatagagctctctatatgcattttggacaggcaggggtttcaggtcataaacattctgatgagttaatataaaatgagagaaactgtaaatttccactactaaaaatcacaaaaataacagaaacaaaagaagagataagaatttggggaattgtgctgaacaatttagtggttaaaaaaaacaactgtgcatgtttagacttaaataagcccccatccaagtgtgaggggtccagtaatttttcaaaacatatgaaagtgttaatacattttgacaaaggaccattaaaaaagtcctgaattctgacttgagggaggaaagtaatgactaatacattctctagagacttgcagactttgggaattcataaaggaatggatgataattattaactgttgctggctgattgcccagacagttctcaacagccctgtacaagtctctgggtttgggatggatcaattctgagactggaaaatggccaaatctttgcaaatgagaaatatttttcttataagttcttattgtaggcaaataattacatagattattcatcagagaatttttaaatgctcataatctcaactctttcatttacaacttgtatttccaatagtttatgggtcatctctgcatagatgtcagaagtcacctcaagtttagtgtgtccaaaatctaactcacaggtctgtttctgacctcccaacttgctttccttgtgtttttcctatgctaatgatccaccataatcaaaataattaacatttatccagtgcctactatgtactattccctgtcctgttttacatttactcatttaaagtccataagaaacattaaatctcatctgccttctgaagaagatacaaccatgctctcttttacaaagtaggaaactgggtcacagaaaggtgaagtctttaaggctgaatcacagtagctcatcctagtaaatagaaaagccaggattcaactccaggggctgggtgcagaactgctattcttcactgcttcaccaatcagcagctacccaaggcagaaaactttttcatccttggctccttcattctccctgtcaccccagatcccctctacatctagtcagagaataggtcctgtcaattccaacttctctatatggctcctctcaggcatgtgcccttaattggcctaattctctaatacaccttccctctacatgctcactccctcagatcattgctttatcacgtgttacctgggttgctattacataaagagcaatctttctaaaatgaggatcttatcacttcacttccacactaaaatgtttttcctggggaaccacactccttagcaatctgacccatcagaccttccaggctgtctcctgcctgctccctaaggctccagccacacagaattatcatgggcccacacacccaccaaatcctcccatgcctttgcccatgttgtctgggatgcccttctctcccttctgtctacatcaagcatcagactgaatatccctcttgtgcggccttctaaaacctcccgtccaaagcgaaatatattgccctctatttatacttttacagcatttggcacacaagtacagagtagtagctttttatcacattctctgataattatatagatatggtatttcttagctctctctccaactggctaataagttgctttttgtctgagtgcctaattttgtgttttgtgtctgagtgcctcagttcctcaaaaaaaggttttttgattagttcattattcatttgaacatggaaattatgctcactagtggcaaatgccactaaccgtattccagaagctaggtgtcatgtttgcaataagatatattatcccttctacaagtcaccttttatttcaggcatttgtaaatgcccattaataaagtatggttcataaattttaccttgtaagtgcctaagaaatgagactacaagctccatttcagcaggacacaataaatattattttataatgcaaaaaaatctatgtcggtgcggagaaagaggtaatgaaatggcaggaattcgatatcagctatcatacct

SEQ ID NO: 4804 - protein, 11 aa, Homo sapien
MKWQEFDISYH

SEQ ID NO: 4805 - DNA, 4526 bp, Homo sapien
gaattccacatgcacacccacacccacgcgcgcccgcaccgccccacgcgcacacactcctgcccacgcccacgcagcgctccgggaagtccggtccgggcgagagcgcgaaaggataccgagaagccacccgcggagagcgcagcggcgccctgggacgcggcgctctcccggcgctgctgcctcggcttggtctcggcctgcgggccgtcggccggcgatggccctggattatctactactgctcctcctggcatccgcagtggctgcgatggaagaaacgttaatggacaccagaacggctactgcagagcctgggctggacggccaatcctgcgtccgggtgggaagaagtcagtggctacgatgaaaacctgaacaccatccgcacctaccaggtgtgcaatgtcttcgagcccaaccagaacaattggctgctcaccaccttcatcaaccggcggggggcccatcgcatctacacagagatgcgcttcactgtgagagactgcagcagcctccctaatgtcccaggatcctgcaaggagaccttcaacttgtattactatgagactgactctgtcattgccaccaagaagtcagccttctggtctgaggccccctacctcaaagtagacaccattgctgcagatgagagcttctcccaggtggactttgggggaaggctgatgaaggtaaacacagaagtcaggagctttgggcctcttactcggaatggtttttacctcgcttttcaggattatggagcctgtatgtctcttctttctgtccgtgtcttcttcaaaaagtgtcccagcattgtgcaaaattttgcagtgtttccagagactatgacaggggcagagagcacatctctggtgattgctcggggcacatgcatccccaacgcagaggaagtggacgtgcccatcaaactctactgcaacggggatggggaatggatggtgcctattgggcgatgcacctgcaagcctggctatgagcctgagaacagcgtggcatgcaaggcttgccctgcagggacattcaaggccagccaggaagctgaaggctgctcccactgcccctccaacagccgctcccctgcagaggcgtctcccatctgcacctgtcggaccggttattaccgagcggactttgaccctccagaagtggcatgcactagcgtcccatcaggtccccgcaatgttatctccatcgtcaatgagacgtccatcattctggagtggcaccctccaagggagacaggtgggcgggatgatgtgacctacaacatcatctgcaaaaagtgccgggcagaccgccggagctgctcccgctgtgacgacaatgtggagtttgtgcccaggcagctgggcctgacggagtgccgcgtctccatcagcagcctgtgggcccacaccccctacacctttgacatccaggccatcaatggagtctccagcaagagtcccttccccccacagcacgtctctgtcaacatcaccacaaaccaagccgccccctccaccgttcccatcatgcaccaagtcagtgccactatgaggagcatcaccttgtcatggccacagccggagcagcccaatggcatcatcctggactatgagatccggtactatgagaaggaacacaatgagttcaactcctccatggccaggagtcagaccaacacagcaaggattgatgggctgcggcctggcatggtatatgtggtacaggtgcgtgcccgcactgttgctggctacggcaagttcagtggcaagatgtgcttccagactctgactgacgatgattacaagtcagagctgagggagcagctgcccctgattgctggctcggcagcggccggggtcgtgttcgttgtgtccttggtggccatctctatcgtctgtagcaggaaacgggcttatagcaaagaggctgtgtacagcgataagctccagcattacagcacaggccgaggctccccagggatgaagatctacattgaccccttcacttatgaggatcccaacgaagctgtccgggagtttgccaaggagattgatgtatcttttgtgaaaattgaagaggtcatcggagcaggggagtttggagaagtgtacaaggggcgtttgaaactgccaggcaagagggaaatctacgtggccatcaagaccctgaaggcagggtactcggagaagcagcgtcgggactttctgagtgaggcgagcatcatgggccagttcgaccatcctaacatcattcgcctggagggtgtggtcaccaagagtcggcctgtcatgatcatcacagagttcatggagaatggtgcattggattctttcctcaggcaaaatgacgggcagttcaccgtgatccagcttgtgggtatgctcaggggcatcgctgctggcatgaagtacctggctgagatgaattatgtgcatcgggacctggctgctaggaacattctggtcaacagtaacctggtgtgcaaggtgtccgactttggcctctcccgctacctccaggatgacacctcagatcccacctacaccagctccttgggagggaagatccctgtgagatggacagctccagaggccatcgcctaccgcaagttcacttcagccagcgacgtttggagctatgggatcgtcatgtgggaagtcatgtcatttggagagagaccctattgggatatgtccaaccaagatgtcatcaatgccatcgagcaggactaccggctgcccccacccatggactgtccagctgctctacaccagctcatgctggactgttggcagaaggaccggaacagccggccccggtttgcggagattgtcaacaccctagataagatgatccggaacccggcaagtctcaagactgtggcaaccatcaccgccgtgccttcccagcccctgctcgaccgctccatcccagacttcacggcctttaccaccgtggatgactggctcagcgccatcaaaatggtccagtacagggacagcttcctcactgctggcttcacctccctccagctggtcacccagatgacatcagaagacctcctgagaataggcatcaccttggcaggccatcagaagaagatcctgaacagcattcattctatgagggtccagataagtcagtcaccaacggcaatggcatgagaactcttgtttcttggggaaggagaggagggaaaaggaccagggtcaagggggaccagaggttgaccactgtggaatgtactggagagactggcttctcagctgaggaatgcatttccatcagtgaagaatcaaccggacctgttgctagcaggcaatctccatttctcagtgacagaagcatgtttgagatgccgtgggaaaccaaatatataataataaaaatataaaaaggtgatgttcaacagaagtgaagacaaaacaatatgcatcaggagaacaagagtaaacccagctcccactctcagtgggctgcagttgcccaaccacaggaagaaagggaaggaggtagagggaagaaacagaagcagtgttccattttcttcctcaccaatgacattcttttcttttctcctttcgtactcctccctgagagtcccctcccttctcccacactcgtttccctttgctcatgactcctgtagggaagtttcttcaaacaaaacccagctcctgagtctccagatgttgttctgtcagttgccaaaggactttgctgaccactgcatggggatccaaccaattcaattaatgtcttcatattgaagaagagatgtaccttcaattgaaaacctcgtttttcttttgtttgcattttctgcaaaaaggaaaaagaaaccacaaattggggaaaaaaaaaagaagaaaaacctgtttccgtgtgcaaaagcacacatatgtatgtctgtgttataaaatgactgtgcttgttcgtaacagatgcaaacaagaaagaagaactgggaagtctttgtccctaggaaatccaaaggggctggaatatggtgttggtttggctttctggttggcccaatcggcctattggctcaatgggaagagaggagagggagaaaaataaaatgaaaggaaaaaaaaaagtttgcaaattcagacaggaaacaggtgagtggtttgaattggatgcagtgtgggccatcctggaatgatactgactgattaattattcctgataacatctcaagaaaaggagaaggaaagtgtttctggagaatgttctttcacatcactggaatctgcaattcaagaagtgacaagggagaattcttgctttacctatggactggcttaagccgtgtggcatccgaggaatgtttcaaatgtgtctgtgtttctctttacattccttgttgtacctcattgttcaattcacttttgtaaattccacctaacatttaattattttaaatttctccttttaccttaatctccttgctaattttatctgtctaattaaaaagagcagaagcatgtctgggtttacgtaaaaaa

SEQ ID NO: 4806 - protein, 1057 aa, Homo sapien
EFHMHTHTHARPHRPTRTHSCPRPRSAPGSPVRARARKDTEKPPAESAAAPWDAALSRRCCLGLVSACGPSAGDGPGLSTTAPPGIRSGCDGRNVNGHQNGYCRAWAGRPILRPGGKKSVATENLNTIRTYQVCNVFEPNQNNWLLTTFINRRGAHRIYTEMRFTVRDCSSLPNVPGSCKETFNLYYYETDSVIATKKSAFWSEAPYLKVDTIAADESFSQVDFGGRLMKVNTEVRSFGPLTRNGFYLAFQDYGACMSLLSVRVFFKKCPSIVQNFAVFPETMTGAESTSLVIARGTCIPNAEEVDVPIKLYCNGDGEWMVPIGRCTCKPGYEPENSVACKACPAGTFKASQEAEGCSHCPSNSRSPAEASPICTCRTGYYRADFDPPEVACTSVPSGPRNVISIVNETSIILEWHPPRETGGRDDVTYNIICKKCRADRRSCSRCDDNVEFVPRQLGLTECRVSISSLWAHTPYTFDIQAINGVSSKSPFPPQHVSVNITTNQAAPSTVPIMHQVSATMRSITLSWPQPEQPNGIILDYEIRYYEKEHNEFNSSMARSQTNTARIDGLRPGMVYVVQVRARTVAGYGKFSGKMCFQTLTDDDYKSELREQLPLIAGSAAAGVVFVVSLVAISIVCSRKRAYSKEAVYSDKLQHYSTGRGSPGMKIYIDPFTYEDPNEAVREFAKEIDVSFVKIEEVIGAGEFGEVYKGRLKLPGKREIYVAIKTLKAGYSEKQRRDFLSEASIMGQFDHPNIIRLEGVVTKSRPVMIITEFMENGALDSFLRQNDGQFTVIQLVGMLRGIAAGMKYLAEMNYVHRDLAARNILVNSNLVCKVSDFGLSRYLQDDTSDPTYTSSLGGKIPVRWTAPEAIAYRKFTSASDVWSYGIVMWEVMSFGERPYWDMSNQDVINAIEQDYRLPPPMDCPAALHQLMLDCWQKDRNSRPRFAEIVNTLDKMIRNPASLKTVATITAVPSQPLLDRSIPDFTAFTTVDDWLSAIKMVQYRDSFLTAGFTSLQLVTQMTSEDLLRIGITLAGHQKKILNSIHSMRVQISQSPTAMA

SEQ ID NO: 4807 - DNA, 1030 bp, Homo sapien
tgcgtcggagggcggcggctgccgacggcgggactgggttttctatcagatgttccacgtaataatgctggagttaagaagtttccattattttgctccaaaccagaagactctgttccctgtatatagaataggagtaatatttgaaaacaactggctgatgtttaaaactgaagattgtcatgattgtttatcctaatcccaatgctgaagtaagattgtcttggaaatactaagttggggtaatccaaatctatttctggaaccatgaaaattttgctagtttttgactttgacaatacaatcatagatgacaatagtgacacttggattgtacaatgtgctcccaacaaaaagcttcctattgaactacgtgattcttatcgaaaaggattttggacagaatttatgggcagagtctttaagtatttgggagataagggtgtaagagaacatgaaatgaaaagagcagtgacatcattgcctttcactccagggatggtggaactcttcaactttataagaaagaataaggataaatttgactgcattattatttcagattcaaattcggtcttcatagattgggttttagaagctgccagttttcatgacatatttgataaagtgtttacaaatccagcagcttttaatagcaatggtcatctcactgttgaaaattatcatactcattcttgcaatagatgcccaaagaatctttgcaaaaaggtagttttgatagaatttgtagataaacagttacaacagggagtgaattatacacaaattgtttatattggtgatggtggaaatgatgtctgtccagtcacctttttaaagaatgatgatgttgccatgccacggaaaggatataccttacagaaaactctttccagaatgtctcaaaatcttgagcctatggaatattctgttgtagtttggtcctcaggtgttgatataatttctcatttacaatttctaataaaggattaatatgtcgaaaaaaaaaaaaaaaaaaaaaaaaaaaaaa

SEQ ID NO: 4808 - protein, 241 aa, Homo sapien
MKILLVFDFDNTIIDDNSDTWIVQCAPNKKLPIELRDSYRKGFWTEFMGRVFKYLGDKGVREHEMKRAVTSLPFTPGMVELFNFIRKNKDKFDCIIISDSNSVFIDWVLEAASFHDIFDKVFTNPAAFNSNGHLTVENYHTHSCNRCPKNLCKKVVLIEFVDKQLQQGVNYTQIVYIGDGGNDVCPVTFLKNDDVAMPRKGYTLQKTLSRMSQNLEPMEYSVVVWSSGVDIISHLQFLIKD

SEQ ID NO: 4809 - DNA, 1438 bp, Homo sapien
  Unsure 932, 934-937, 946, 951-952, 955: Unknown base
ctctctctccctctccctttcttttctacattgaaatctgttcttacataatagagaacagggctattgaataaagacccaatcctaccagatctttagttctaaagggcaacttgactgtgagtaggagggcccccaagaaagggaggaaagtccacacccagctaaccacacaacagggcttcattatggaaatattttaacaaaagtacatgttattaccaaccaaagagatgcatgtgcaatagaagccttccttaaaaacaggctaaataacctcattttatgcagcagtttaatctgagaacagagggaaaggtgtgcagtggttccagaggggccttatattctatttttagtctagatattttttgtttataaattcccaaggaattgttaacactttggtgacacctaatggattctttttgaaattccaaggtgcttcagttctttgcccaagtgaactgtgccttttattgcatttctgttcgtctcttggtggctcttctgactttttggagaatacccatcttgttggaggcagacttaagttgttatgctgtgccacacaatttactgagacaatcatatcttcctaagcatttaaggaaagttgaaaaaaatagaattagctataaaatatgtatggcacatcttgtttaattttgcatgtaacttctcttttgtacattgatgaggttttagtgacattgtcatccaacactttacctttattgttcagggaatgccttcgtgattttttgtactggttttattattcagactatggcctggatttgagtatattgttattaccacctggttttttaattattcatcccagtaaacttatattttgtgaagcatttgtttctcagattaagacactgttagaacctaaagtagtagctgatgggtatctgtgaatntnnnnttttttttnttttnnacntgaagtagattgtctgaataggcatcctcatctatatttacccaaaacctcgcttactgtcatgtgcactacaaattgcaatttggaaacctactgtattgaaattctgtcagtttatggttcttgaagactgatgtcctttcccaaacactggttactgcagcagcatttttaatgtgtaagtgaagaaaaaaggccactaaggccaaagattttttaagaatcattgtacaaatcattatgttaaactatctaagctttgctgtaatactgttttctcttcaatatgtgatggtacaggaaggatgttaaatgaaggggtggtattgcaggagagcattttaaatggcagaagtaaaaagttataatatttataattttgatgggtttaagtttatttttgtagggaagatttttctcccctaaaatagtttctagaatggcaaaagtgtttccattattaaaaattgaagttattagttg

SEQ ID NO: 4810 - protein, 94 aa, Homo sapien [sequence omitted]

SEQ ID NO: 4811 - DNA, 3653 bp, Homo sapien
agcccagcattcatggcgcagccatctcttgtacttgctagcaaaacaccacctgtggaaagtcagctcaaacttccaacctcatccctcacaaagggggaatggagggtttggttttggctttcactggagtctgcaacaagaactggcatcatgctgcccatttcccgcctctccccacccagacccctgcctcagggacgcctgtcctcagcccagccctcagctgcagccaggccttcagcctccgtaacccccgctcagggtccccaccccctgcagccctgtccctccagatgcatggccttgtcctgtgtgggggtggccgagagcactgccccagccctgggtaccttgggcaggaagctggcagaggccagggctgccattcaaacaggggcaggtggttttgccaggaggaagttgacagttcaacttcaaacatgggtgacgcaggccccacactgcctgctccccgtcccacccctccctgagacacgccaccccgccctctccctctctgagagcgagatacccggccagacaccctcacctgcggtgcccagctgcccaggctgaggcaagagaaggccagaaaccatgcccatggggtctctgcaaccgctggccaccttgtacctgctggggatgctggtcgcttcctgcctcggacggctcagctggtatgacccagatttccaggcaaggctcacccgttccaactcgaagtgccagggccagctggaggtctacctcaaggacggatggcacatggtttgcagccagagctggggccggagctccaagcagtgggaggaccccagtcaagcgtcaaaagtctgccagcggctgaactgtggggtgcccttaagccttggccccttccttgtcacctacacacctcagagctcaatcatctgctacggacaactgggctccttctccaactgcagccacagcagaaatgacatgtgtcactctctgggcctgacctgcttagaaccccagaagacaacacctccaacgacaaggcccccgcccaccacaactccagagcccacagctcctcccaggctgcagctggtggcacagtctggcggccagcactgtgccggcgtggtggagttctacagcggcagcctggggggtaccatcagctatgaggcccaggacaagacccaggacctggagaacttcctctgcaacaacctccagtgtggctccttcttgaagcatctgccagagactgaggcaggcagagcccaagacctaggggagccacgggaacaccagcccttgccaatccaatggaagatccagaactcaagctgtacctccctggagcattgcttcaggaaaatcaagccccagaaaagtggccgagttcttgccctcctttgctcaggtttccagcccaaggtgcagagccgtctggtggggggcagcagcatctgtgaaggcaccgtggaggtgcgccagggggctcagtgggcagccctgtgtgacagctcttcagccaggagctcgctgcggtgggaggaggtgtgccgggagcagcagtgtggcagcgtcaactcctatcgagtgctggacgctggtgacccaacatcccgggggctcttctgtccccatcagaagctgtcccagtgccacgaactttgggagagaaattcctactgcaagaaggtgtttgtcacatgccaggatccaaaccccgcaggcctggccgcaggcacggtggcaagcatcatcctggccctggtgctcctggtggtgctgctggtcgtgtgcggcccccttgcctacaagaagctagtgaagaaattccgccagaagaagcagcgccagtggattggcccaacgggaatgaaccaaaacatgtctttccatcgcaaccacacggcaaccgtccgatcccatgctgagaaccccacagcctcccacgtggataacgaatacagccaacctcccaggaactcccgcctgtcagcttatccagctctggaaggggctctgcatcgctcctccatgcagcctgacaactcctccgacagtgactatgatctgcatggggctcagaggctgtaaagaactgggatccatgagcaaaaagccgagagccagacctgtttgtcctgagaaaactgtccgctcttcacttgaaatcatgtccctatttctaccccggccagaacatggacagaggccagaagccttccggacaggcgctgctgccccgagtggcaggccagctcacactctgctgcacaacagctcggccgcccctccacttgtggaagctgtggtgggcagagccccaaaacaagcagccttccaactagagactcgggggtgtctgaagggggccccctttccctgcccgctggggagcggcgtctcagtgaaatcggctttctcctcagactctgtccctggtaaggagtgacaaggaagctcacagctgggcgagtgcattttgaatagttttttgtaagtagtgcttttcctccttcctgacaaatcgagcgctttggcctcttctgtgcagcatccacccctgcggatccctctggggaggacaggaaggggactcccggagacctctgcagccgtggtggtcagaggctgctcacctgagcacaaagacagctctgcacattcaccgcagctgccagccaggggtctgggtgggcaccaccctgacccacagcgtcaccccactccctctgtcttatgactcccctccccaaccccctcatctaaagacaccttcctttccactggctgtcaagcccacagggcaccagtgccacccagggccctgcacaaaggggcgcctagtaaaccttaaccaacttggttttttgcttcacccagcaattaaaagtcccaagctgaggtagtttcagtccatcacagttcatcttctaacccaagagtcagagatggggctggtcatgttcctttggtttgaataactcccttgacgaaaacagactcctctagtacttggagatcttggacgttacacctaatcccatggggcctcggcttccttaactgcaagtgagaagaggaggtctacccaggagcctcgggtctgatcaagggagaggccaggcgcagctcactgcggcggctccctaagaaggtgaagcaacatgggaacacatcctaagacaggtcctttctccacgccatttgatgctgtatctcctgggagcacaggcatcaatggtccaagccgcataataagtctggaagagcaaaagggagttactaggatatggggtgggctgctcccagaatctgctcagctttctgcccccaccaacaccctccaaccaggccttgccttctgagagcccccgtggccaagcccaggtcacagatcttcccccgaccatgctgggaatccagaaacagggaccccatttgtcttcccatatctggtggaggtgagggggctcctcaaaagggaactgagaggctgctcttagggagggcaaaggttcgggggcagccagtgtctcccatcagtgccttttttaataaaagctctttcatctatagtttggccaccatacagtggcctcaaagcaaccatggcctacttaaaaaccaaaccaaaaataaagagtttagttgaggag

SEQ ID NO: 4812 - protein, 695 aa, Homo sapien
  unsure 193: unknown amino acid
SPAFMAQPSLVLASKTPPVESQLKLPTSSLTKGEWRVWFWLSLESATRTGIMLPISRLSPPRPLPQGRLSSAQPSAAARPSASVTPAQGPHPLQPCPSRCMALSCVGVAESTAPALGTLGRKLAEARAAIQTGAGGFARRKLTVQLQTWVTQAPHCLLPVPPLPETRHPALSLSESEIPGQTPSPAVPSCPGXGKRRPETMPMGSLQPLATLYLLGMLVASCLGRLSWYDPDFQARLTRSNSKCQGQLEVYLKDGWHMVCSQSWGRSSKQWEDPSQASKVCQRLNCGVPLSLGPFLVTYTPQSSIICYGQLGSFSNCSHSRNDMCHSLGLTCLEPQKTTPPTTRPPPTTTPEPTAPPRLQLVAQSGGQHCAGVVEFYSGSLGGTISYEAQDKTQDLENFLCNNLQCGSFLKHLPETEAGRAQDLGEPREHQPLPIQWKIQNSSCTSLEHCFRKIKPQKSGRVLALLCSGFQPKVQSRLVGGSSICEGTVEVRQGAQWAALCDSSSARSSLRWEEVCREQQCGSVNSYRVLDAGDPTSRGLFCPHQKLSQCHELWERNSYCKKVFVTCQDPNPAGLAAGTVASIILALVLLVVLLVVCGPLAYKKLVKKFRQKKQRQWIGPTGMNQNMSFHRNHTATVRSHAENPTASHVDNEYSQPPRNSRLSAYPALEGALHRSSMQPDNSSDSDYDLHGAQRL

SEQ ID NO: 4813 - DNA, 960 bp, Homo sapien
tcctcccattctttcggtgtttgacttgggtgttctcctatagaattaatacatactaggtatggtagaattcttatttttagtcactggccttactgttccttaaacatttcaagtttttgccttagggccttggcatttgctgatatctctgtctggaacattcagcgcccaaataatcaggtggtttgccccttctgtacccatagttaatgtacacagcttgctagcttactacatttatgtcatgcttattccttgaccctccccacccaaatggtgcccccccttccatcactctcctcttacccttctttatttctcttcacagcatttgtcagtactttacattattccatactagaaggtgagtgtcagttctattagaacaggaacttggtcttattccctcctatatttcggtgcccagaatagcacttggcacacagtcttttgagtgagtggatgaccttgtgcacaatcagttattatcattgaacttcggtaaagcattaattgtggcatctttgtcagatgtttagataagatggttggcgtacgcatagtctgcatgttgtatttttagtctttgaagatatgaagtcaggtaagcaacatcctaacatagtctatttcttgacatctcttacaaacgtagagtatagcctatcctcaggtgtgtgctgaagtttatattagggcttttgggtaccttagaatgtgggtattgcaatctttattcaggatgttatcagtcactggtacagttagtcttgttattaaaagaaaaaagaaaaaaaaacaggtagaagttggaattagccttcgtaggaaggattccagatgcaaatgcaggaaaaactctgttgtccttggaaactactctggagagagttattggcactataattcccaaacctaccctgttaaaagattctgtggaaatgggttaacctttat

SEQ ID NO: 4814 - protein, 80 aa, Homo sapien [sequence omitted]

SEQ ID NO: 4815 - DNA, 3254 bp, Homo sapien
ggcggcggccgcgcgctgctcggggcccgactgcggcgcgagggcggcgcgggagcgacgctggcccggaccgaggaaactatgccgcagacgtccgttgtcttctccagcatccttgggcccagctgtagcggacaggtgcagcctggcatgggggagcgtggaggcggggccggtggcggctccggggacctcatcttccaagatggacacctcatctctgggtccctggaggccctgatggagcaccttgttcccacggtggactattaccccgataggacgtacatcttcacctttctcctgagctcccgggtctttatgccccctcatgacctgctggcccgcgtggggcagatctgcgtggagcagaagcagcagctggaagccgggcctgaaaaggccaagctgaagtctttctcagccaagatcgtgcagctcctgaaggagtggaccgaggccttcccctatgacttccaggatgagaaggccatggccgagctgaaagccatcacacaccgtgtcacccagtgtgatgaggagaatggcacagtgaagaaggccattgcccagatgacacagagcctgttgctgtccttggctgcccggagccagctccaggaactgcgagagaagctccggccaccggctgtagacaaggggcccatcctcaagaccaagccaccagccgcccagaaggacatcctgggcgtgtgctgcgaccccctggtgctggcccagcagctgactcacattgagctggacagggtcagcagcatttaccctgaggacttgatgcagatcgtcagccacatggactcattggacaaccacaggtgccgaggggacctgaccaagacctacagcctggaggcctatgacaactggttcaactgcctgagcatgctggtggccactgaggtgtgccgggtggtgaagaagaaacaccggacccgcatgttggagttcttcattgatgtggcccgggagtgcttcaacatcgggaacttcaactccatgatggccatcatctctggcatgaacctcagtcctgtggcaaggctgaagaaaacttggtccaaggtcaagacagccaagtttgatgtcttggagcatcacatggacccgtccagcaacttctgcaactaccgtacagccctgcagggggccacgcagaggtcccagatggccaacagcagccgtgaaaagatcgtcatccctgtgttcaacctcttcgttaaggacatctacttcctgcacaaaatccataccaaccacctgcccaacgggcacattaactttaagaaattctgggagatctccagacagatccatgagttcatgacatggacacaggtagagtgtcctttcgagaaggacaagaagattcagagttacctgctcacggcgcccatctacagcgaggaagctctcttcgtcgcctcctttgaaagtgagggtcccgagaaccacgtggaaaaagacagctggaagaccctcaggaccacccttctgaacagagcctgaggcggatgcagcccgcgacgccagaggaagcacgtgcactaactgggtttaaattttgactgatgtgggttgagatgaggaggcctcactggttggggtccattttgtatataacttttatgagaaaaaaatggtaattatttcacgcatcaacctttggcacttacaaagttttttttgtttattttaaataacagggcagggccctgctttggggagggggaggggagagtatcatgggagatggtatccatgataacatcttattctaatgaaatgtagatttttattttctacttttgattattgacatcttatgaaaaaaatattttaaaaaacccagccaaaaccaacgtgagccctgcctgctcggacgcctttccagccagtgtctctgacgtcggggttagtgccttagagggtactggggtctggtcttcctgctctgtggtttgggctgcggtgagtcccactccacctgggcgcctgccctcaggagcctgggctgcgaggctccataggagggctggtggctgggaggtcgcgtccgcacacttctggaagtgagcctttgagtacgggctgtccaaagtttacattttcattttcctttcagggatttgcggggtcagggaggggcagggggcacctggcagcatattttctgtgacaatgtgtccagcaaatcattcttcaactacattttagaaaggaggaaatctaaaataaggtaagggagggaagcatggagttgtcagttttctgggctgtgactgaaagacacactgagctgtgatgaagaaaaatacatggccgactccagggtggtgacatttagagctagtcttgaaacctatcatctacagaggggagggcagccaacagccctcttcccacctgggtaggcagcgccctaattggaattggaaacagaaaattcgccaggccatactgctggagcccattcagataaaactgcccaaatactgagaggtgttttctacacccagctagaggagcacactccattttcccatgtctgacttcgtggtgtgagccctgggccctactgaccatggcgcaggacagctgtccttcagaaagcacacggtcaatccacgtggaccgtctccctcgcaggaactccgcatccttgtccctctctgcattcccagtttccgcaggagccttgatcaatggggaagcctgggtgaggatgggccaggtcccaattcccaaagctcctggaagagcctgaagacattgggaaaggctgggcctggggaggaggcagccctgggcccgttgcccatgcctctggtcctgggtggagcaggaatagttccactgtattgtcacagtgtgtttgcactttctgaggttctagctagtacagattgtatattgatagtacatattgctttgtttatgtctttgagatgagaaaggcttaaaacttgagaatatatatttggaatacagccttagaacggtttctgtacacatccacgtgcacttcacgggtgatcagttctagtacctacttgaaacagtgtctgtctgctactttattttcccaatttgatacataccctgatttgatgttttggtatttgagatgaactctgagtatgaagctgtaccataatgcagggcgtcagttttggtgtgactggacatacttgcttcaataaaagaatacatcactcccaaaaaaaaaaaaaaaa

SEQ ID NO: 4816 - protein, 428 aa, Homo sapien
MEHLVPTVDYYPDRTYIFTFLLSSRVFMPPHDLLARVGQICVEQKQQLEAGPEKAKLKSFSAKIVQLLKEWTEAFPYDFQDEKAMAELKAITHRVTQCDEENGTVKKAIAQMTQSLLLSLAARSQLQELREKLRPPAVDKGPILKTKPPAAQKDILGVCCDPLVLAQQLTHIELDRVSSIYPEDLMQIVSHMDSLDNHRCRGDLTKTYSLEAYDNWFNCLSMLVATEVCRVVKKKHRTRMLEFFIDVARECFNIGNFNSMMAIISGMNLSPVARLKKTWSKVKTAKFDVLEHHMDPSSNFCNYRTALQGATQRSQMANSSREKIVIPVFNLFVKDIYFLHKIHTNHLPNGHINFKKFWEISRQIHEFMTWTQVECPFEKDKKIQSYLLTAPIYSEEALFVASFESEGPENHVEKDSWKTLRTTLLNRA

SEQ ID NO: 4817 - DNA, 667 bp, Homo sapien
gtgttagggaatagcttctggtcgggcatttgattgagtgctgtattctgacatttttcaggaaccaaatacatgtgattcatcttctataaatatttgcagtttcttcaagttgaaatgagaaaagctcgtaaattgagcaccaggtctaataaatcattcacttacccaagaacagaaagacaggaaaagctagcatgttaatctaatgaaaaaatcgaatgttaaaaaaccaagaaagtagaagatatttgacattaactttctaatcattgataataatctaataatcataacattattcttaaaacctgaaagaatggattcctgctcccaatgtgtttttaatatcaacttaaactaaaataatttttttacctatttttggaagcttggaaattgagatgtagttgtctaatgttaacctaattaagagagcttggtgtgatttctcatatacagcatctaaatatttaagttttaatgtcttctaaaatattattacattcttcatactatagttttttaacatcctttagaaaacttgtatcagcttcactttcaaaccatgctggcatcgaactcaggtgtagtggtatcagaatgttatgaaataattttttattttcattataaactccatttttacaataaacacttctcaacc

SEQ ID NO: 4818 - protein, 32 aa, Homo sapien
MLASNSGVVVSECYEIIFYFHYKLHFYNKHFS

SEQ ID NO: 4819 - DNA, 10174 bp, Homo sapien
gactggggttttaaggggtgtggcaggaggttttggactcgatgagtttccaccgaaatgtcggagaagtcaggccagagcacaaaagcaaaggatgggaaaaagtatgcaacactcagtttatttaatacttacaaggggaaatcattagaaacacagaaaaccacagctcgacatggattacagagtcttggaaaagtcggtatttcacggcgtatgcctccacctgctaacctcccaagtcttaaagcagaaaacaaaggcaatgatcctaatgtaaacattgtacctaaagatggcacagggtgggcatcaaaacaagagcaacatgaagaagaaaaaacaccagaagtgccaccagcacagccaaaacctggggttgcagctcccccagaagtagcacctgctcccaaatcatgggccagtaacaagcaaggtgggcaaggagatggaatccaagtgaatagtcagtttcagcaagaatttcccagcctgcaggcagctggggatcaggaaaaaaaagaaaaggaaacaaatgatgacaactatggacctggacccagtttacgtccaccaaatgttgcttgttggagagatggtggtaaggctgctggctcaccttcgtcatctgatcaagatgaaaagctccctggccaggatgaaagcacagctggaacatcagagcaaaatgatatcctcaaagtggtggaaaagaggatagcttgtggtcctccacaggctaaactgaatggacagcaggctgctctcgcttcccagtatagagctatgatgcctccttatatgttccaacagtatccgaggatgacatatcctcctctacatggtcccatgagattcccaccttctttatctgaaacaaacaaaggccttcgaggaagaggcccacctccttcatgggcctctgagcctgaacgcccatccattcttagtgcatcagaactgaaggagcttgataaatttgataacctagatgctgaagctgatgaaggttgggcaggtgctcagatggaagtagattatacagagcaactgaatttcagtgatgatgatgaacaaggaagtaacagtcctaaagagaataacagtgaggatcaaggttcaaaagcctctgaaaacaacgaaaacaaaaaagaaacagatgaagtttccaacactaaatcatcttcccaaatacctgcccaaccatcagtagcaaaagttccctatgggaaaggaccttcatttaatcaggaacgtggaacatcttcacatctgccaccacctccaaagttgcttgcacagcagcatccacctccagatcgacaggcagtacctggaagaccaggcccctttccctccaagcagcaagtagctgatgaagatgaaatatggaagcaaagacgaagacaacaatcagaaatttctgcagcagtagaacgtgctcgtaaacggcgtgaagaggaagagcgaagaatggaagaacaaaggaaggcagcttgtgcggagaaactgaaacgattggatgagaagcttggcatcctggaaaaacaaccatctccagaggaaattagggaaagggagcgagaaaaagaacgggagcgtgagaaagaacttgaaaaagaacaagaacaggagcgagagaaggagagggaaaaagacagagagagacagcaggaaaaggagaaagagctggagaaggagcaggaaaaacaaagagaaatggagaaagaaagaaagcaagaaaaagaaaaagaactagaacggcagaaagaaaaggaaaaagaactacaaaagatgaaagaacaagaaaaggaatgtgagctggagaaggaaagggaaaaattagaggagaaaattgaacccagagaacctaatttagagcccatggtagaaaaacaagaaagtgaaaacagctgtaataaagaggaggaacccgttttcactagacaagacagcaatcgcagtgaaaaggaagccacaccagtggtgcatgaaacagaaccagaatcagggtctcaacctcggccggctgtattatctggctatttcaaacagtttcagaagtctttacctccacgattccagcggcagcaggaacagatgaaacagcagcagtggcagcagcagcaacagcaaggtgtacttccacagactgttccttcacaaccgtccagtagtactgtccctcctccaccacacagacctctttatcagcctatgcagcctcatcctcagcatttggcttctatgggttttgatccaaggtggctcatgatgcagtcctacatggatcctcgaatgatgtcaggaagacctgctatggatattccacccattcatcctggaatgattcctcctaaaccattaatgagaagagaccagatggaagggtcaccgaacagttctgagtcatttgagcatatagctcgatctgcaagagatcacgcaatttccctttctgagcctcgtatgctgtgggggtcagatccctatcctcatgctgagcctcaacaagcaactactcccaaagcaacagaagagcctgaggatgtaaggtctgaagctgcgttggaccaggaacagattactgctgcttattctgtagaacataatcaattagaggctcacccaaaggcagactttatcagagaatcaagtgaggcacaagtacaaaagtttttaagcagatctgtggaagatgttagacctcaccatactgatgcaaataatcagtctgcttgttttgaagcacctgatcaaaagaccttatccgctcctcaagaggagcggatttcagctgtagaaagtcagccttcccggaaaagaagtgtttcccatggatctaaccatacgcaaaaaccagacgagcagagaagtgaaccatctgcaggcattcctaaagtaaccagcagatgcattgattcaaaagaaccaatagaaaggccagaggagaaaccaaaaaaggaaggctttatacgatcttctgaaggaccaaaacctgaaaaagtatataaatctaaatcagaaactcgttggggcccacgaccaagctctaacagaagggaagaagttaatgatagacctgtgagaagatcaggtcccattaaaaaacctgtacttagagatatgaaagaggaacgggaacagaggaaggagaaagaaggagaaaaggccgaaaaggtcactgaaaaagtagttgtaaagcctgaaaagacggaaaagaaggatcttcctcctcccccaccaccacctcagccaccagcaccaattcagccacagtcagttccaccaccaattcaaccagaagcagagaaatttccttcaacagaaactgcaactttggctcaaaaaccatctcaggatactgagaagcctctggaacctgtgagtactgttcaggtagagcctgcagttaagactgtaaaccaacagactatggcagcaccagtagtcaaagaagaaaaacaacctgagaaagtcatcagcaaagaccttgttatagagaggcctcgaccagattcaagaccagcagttaaaaaagaatcaactttgcctcccaggacctattggaaagaagctagagagagagattggtttccagatcaaggatacagaggtcgaggccgaggtgaatattactccagaggtcgaagctatagaggttcttatggagggcgtggcaggggtggtaggggacacactcgagattatcctcagtatagagacaataagccaagagcagagcatataccctcagggcctctcagacagcgagaagaaagtgaaacacggagtgagagctctgattttgaagttgtccccaaaagaagacgacagcggggttcagagactgacacagacagtgaaattcatgaaagtgcaagtgacaaggacagtttaagtaaaggcaaacttcccaaaagagaggaacggcctgaaaacaaaaaacctgtaaagcctcattcttctttcaagcctgataatcatgttcgaatagataatagactgctagaaaagccttatgtaagggatgacgataaagctaaaccaggctttcttcctaaaggagagcctacaaggagaggcagagggggaacattcaggcgtggtggaagggatcctggaggccgtccatcacgcccttccactttacgaagaccagcttatcgggacaatcagtggaacccaaggcagtcagaagttcctaaaccagaagatggagagccgccaagaagacatgagcagtttattcctatagcagcagataaacgacctccaaaatttgagcgaaaatttgacccagctagagaaaggcctcgaaggcagcgtcctactcgaccaccaaggcaagacaagccacctcgatttagacggctaagagagagggaggctgcttcaaaatcaaatgaggtggtagcagtgcccacaaatggcacagttaataatgtggctcaagaaccagttaatactcttggggatatttccgggaataagacaccagatttatctaatcagaactcttcagatcaggcaaatgaagaatgggaaacagcttctgaaagcagtgatttcaatgagaggcgagagagggatgaaaaaaaaaatgctgacttgaatgcacaaacagttgtaaaggttggagagaatgttctacctccaaagagggaaattgcaaagagaagtttttctagtcagagaccagtagatcgtcagaatcgacgtggcaacaatggtccacccaaatcaggaaggaatttctcaggtcctagaaatgaaaggagaagtggcccaccatcaaaaagtgggaagagagggccatttgatgaccagcctgcaggcacaactggggttgacctcatcaatggcagctctgcacaccatcaggaaggagtacctaatggtacaggacaaaagaactccaaagattctactgggaaaaaaagagaagaccccaaaccaggccctaaaaaaccaaaagagaaagtggatgctctatcacagtttgatctcaacaattatgcaagtgttgttataattgatgatcatcctgaagtaacagtaattgaagatccccagtcaaatttgaatgatgatggttttactgaagtggtatccaaaaaacaacaaaaacgtttacaggatgaagaacgccgaaagaaggaagaacaagtcatacaggtctggaacaaaaagaatgcaaatgaaaaaggaagaagccagacttctaagcttcctccaagatttgccaaaaaacaggctacagggatccagcaagcacagtcttcagcctcagttccacctctagcttcggctccacttccaccttcaacctcagcttcagttccagcctcaacctcagctccacttccggcaaccttaactccagttccagcctcaacctcagctccggttccagcctcaactttagctccagttctggcctcaacctcagctccagttccagcctcacccttagctccagtttcagcctcagcctcagtctcagcttcagttccagcctctacttcagctgcagctataacctcttcttcagctccagcctcagccccagctccaacccccatccttgcctcagtttcaaccccagcttctgtcaccattcttgcctcagcctcaattcccattcttgcttcagccctagcatcaacttcagctccaacgccagccccagcagcctcttccccagctgccccagtcatcacagcaccaactatcccagcctcagccccaactgcctcagtcccacttgcccctgcctcagcttcagccccagccccagcccctaccccagtctcagccccaaatcctgccccacctgccccagcccagactcaggcacagacccacaaaccagtccagaatccactacagactacatctcagtcttcaaaacaaccaccaccatcaattaggctgccttcagctcaaacacctaatggcacagattatgtagcctcaggaaaatccatccagaccccacagtcacatggcactctgacagctgaattatgggataacaaggtggccccaccagctgtgctgaatgatatctctaagaaattaggtcccattagtccaccacagccaccttcagtcagtgcatggaataagcccttaacatcgtttggatcagctccttcatcagagggagcgaagaatggtcaagaaagtggactcgaaattggaactgacacaattcagtttggtgctccagcctcaaatggaaatgaaaatgaagttgttcctgtgctttcggaaaaatctgctgacaaaatacctgaacctaaagaacagcggcagaagcagccacgagcaggacctatcaaagcccagaagcttccagatttgagtccagtagaaaacaaagaacacaaacctggtcccattggaaaggaacgttcattaaaaaatagaaaagtaaaagatgcccaacaggtggagccagaaggacaagagaaaccaagcccagctacagtcagaagcacagatcctgtcacgacaaaggagactaaagcagtctcagaaatgtctactgaaataggaacaatgatctcggtatcatctgcagaatatggtactaatgcaaaggagtctgtaacagactatactacaccctcttcttctttgcctaacaccgtggctactaataatacaaagatggaggatactttggttaataatgtgcccctgcccaacacccttcccctccctaagagggagactatacaacagagctccagcctaacttcagttcctcccactactttcagcctcaccttcaagatggagtctgcacgcaaagcatgggagaattctccaaatgtaagggaaaaggggtctccagtaacttccacagcacctccaattgcaactggagtcagcagtagtgccagtggaccaagcactgctaattacaattcgttctcaagtgcatccatgccccagattcctgttgcttcagtcactcctacagcatcactatcaggagctggtacatacactacctcttctttgagcacaaaatctacaaccacatcggaccctccaaatatttgtaaagtgaaacctcagcagttacagacaagcagcctgccttctgcaagtcatttttcacagttaagctgtatgccttcccttattgcccagcagcaacagaatccgcaagtttatgtgtctcagtctgcagcagctcaaatcccagccttctatatggacacaagtcatttattcaatacccaacatgcacgattggctccgccatccttggctcaacaacagggtttccaaccaggtctctctcagccaacttcagttcagcagattccaatccctatttatgcaccactgcaagggcagcatcaagcccaactgagtttgggggctggccctgctgtttcccaggctcaggaattgttcagctcctcacttcaaccatatagatctcagccagcttttatgcaaagcagtttatcccagccatctgtggtcctttctggtactgctattcacaactttccaactgtccaacaccaagaacttgccaaggcacaatccggtcttgcctttcagcaaacatcaaatactcagcccattcctatattgtatgaacatcaactggggcaggcatcaggactaggaggttcccagctgattgacacacatcttctccaggccagagcaaatcttacccaggcctcaaatctttattctggacaagtacaacagcctggtcagacaaatttttataacactgcccagtcaccaagtgctctccagcaggttacagtacctttaccagcatcgcagctttccttgcctaattttggatctacagggcaacctctaattgctttgcctcagactcttcagcccccattacagcataccactccccaagcacaggctcagagtctgagtcgtcctgcacaagtaagccagcctttcagaggattaattcctgctggaacacagcatagcatgattgcaaccacaggaaaaatgtctgaaatggaactaaaagcctttggaagtggcattgatataaaaccaggcacacctccaatcgctggtagaagcaccacaccaacatctagtccttccgggctacttctacaagtccgaacagccagtccagcaaaatgaacagcattgtctaccagaagcagttccagtcagcccctgccactgtgagaatgacacaaccatttcctacacagtttgcaccccaggcaaagcagagagcagaggttcttcagtccacgcaacggttcttctctgaacagcaacagagcaaacagataggaggaggcaaagcccagaaagtggacagtgattcaagtaaacctcctgaaacactgaccgaccctcctggggtctgtcaggaaaaagtagaagaaaagccaccccctgcaccctccatagccaccaaacctgttagaactggaccaatcaaacctcaggcgatcaaaaccgaagaaacaaaatcttaaaggctatggtttattgcaggggattgggaggggggcgggaaaacatggagaattaagtcagataatgctggcagccaaaggggcaaaatggcctgtgacattatcctgttcagagcttggagatgtacaagggacataggagcaatttacactgacacacagctgctgtaccagtgaaaacgaggctttgcaagcttgtacctactatataacatgtgcttggttgatggccatgcatcttcagtcagaatttatatataaatgtatgcacccatttttttgagtgcatataatttagacctaaaaatccttatgattagatgaaacaccaaaaatataaggaaaataacacagcagaggaatagctcagcctgaacagtgtgatggtcccagctactacatcagatgcggtttttttgctcccttatgttcttcggatatggttatggcatttgtaggcttggaggtaaagaactgaagataactggtgctggatagaggagccttattttttattatggcagcttgctatttttataacatggtgattgagttgaacacaatcaaagtacagtagtaactgatgtccccttcttcctggatgaatgagcagataaatattgatgtcagcatccttgaaccatatcaaagtgagcagtgtttggctactgcttctatttgaaatggtgctgtgttttggttgtggtctgaagctttgaagcgctacttagcatctcctttcttccatggagctctcacgattcaaacatgacagatttggtaaaatgctggttaggttgagtcttccttgcccccactcagtcatctttgtatgaatcccatgatttgggggtttttttctttttttttttataccagtttttagctggtgtttatgaagaacagtgagtacctagaactgtgccactaattaaaggaaatcctaagaaggtgcatttctttacagagctgtgtcatgccatcctttgggccctctgctggaaaagtagaatcaagtctcaaataatgcctttttaattgtatcctctagtattatagatataggacagtactgtatcatacctctgtgaatgtaaaatatcttgtacctgctttatgatacgtagtagtgaccgtgctttatcagagctgtttttaatgatgttattctagaatgttttctttccagatgatgattcagaagctaattttaaaaaacggtgccaggtaccacaacagtaacagaactttgcaattttctggggttttgttttttacctttttccccccttttttttaaatggagtgtgctggatgtctctataattttattcagatgactgcagaacctggaaaagctgttgctgctattgatgcataacatactgctattggtctttttatataaatatatatatatatatacatatatatatataatttgaatttttggaaactttagctgtgctgtcaactttggaaaaagtatcccggtttactgtgttgagttggcattgtacagaaattaacagccatattggtctagaaacgttaaacttaatttttttccatttgtacaggggtaacgcactgtattaaatatgtaaggtcttatctacatgggtttgattacagaaactaataaagtattctctaaataatga

SEQ ID NO: 4820 - protein, 2000 aa, Homo sapien
MSEKSGQSTKAKDGKKYATLSLFNTYKGKSLETQKTTARHGLQSLGKVGISRRMPPPANLPSLKAENKGNDPNVNIVPKDGTGWASKQEQHEEEKTPEVPPAQPKPGVAAPPEVAPAPKSWASNKQGGQGDGIQVNSQFQQEFPSLQAAGDQEKKEKETNDDNYGPGPSLRPPNVACWRDGGKAAGSPSSSDQDEKLPGQDESTAGTSEQNDILKVVEKRIACGPPQAKLNGQQAALASQYRAMMPPYMFQQYPRMTYPPLHGPMRFPPSLSETNKGLRGRGPPPSWASEPERPSILSASELKELDKFDNLDAEADEGWAGAQMEVDYTEQLNFSDDDEQGSNSPKENNSEDQGSKASENNENKKETDEVSNTKSSSQIPAQPSVAKVPYGKGPSFNQERGTSSHLPPPPKLLAQQHPPPDRQAVPGRPGPFPSKQQVADEDEIWKQRRRQQSEISAAVERARKRREEEERRMEEQRKAACAEKLKRLDEKLGILEKQPSPEEIREREREKEREREKELEKEQEQEREKEREKDRERQQEKEKELEKEQEKQREMEKERKQEKEKELERQKEKEKELQKMKEQEKECELEKEREKLEEKIEPREPNLEPMVEKQESENSCNKEEEPVFTRQDSNRSEKEATPVVHETEPESGSQPRPAVLSGYFKQFQKSLPPRFQRQQEQMKQQQWQQQQQQGVLPQTVPSQPSSSTVPPPPHRPLYQPMQPHPQHLASMGFDPRWLMMQSYMDPRMMSGRPAMDIPPIHPGMIPPKPLMRRDQMEGSPNSSESFEHIARSARDHAISLSEPRMLWGSDPYPHAEPQQATTPKATEEPEDVRSEAALDQEQITAAYSVEHNQLEAHPKADFIRESSEAQVQKFLSRSVEDVRPHHTDANNQSACFEAPDQKTLSAPQEERISAVESQPSRKRSVSHGSNHTQKPDEQRSEPSAGIPKVTSRCIDSKEPIERPEEKPKKEGFIRSSEGPKPEKVYKSKSETRWGPRPSSNRREEVNDRPVRRSGPIKKPVLRDMKEEREQRKEKEGEKAEKVTEKVVVKPEKTEKKDLPPPPPPPQPPAPIQPQSVPPPIQPEAEKFPSTETATLAQKPSQDTEKPLEPVSTVQVEPAVKTVNQQTMAAPVVKEEKQPEKVISKDLVIERPRPDSRPAVKKESTLPPRTYWKEARERDWFPDQGYRGRGRGEYYSRGRSYRGSYGGRGRGGRGHTRDYPQYRDNKPRAEHIPSGPLRQREESETRSESSDFEVVPKRRRQRGSETDTDSEIHESASDKDSLSKGKLPKREERPENKKPVKPHSSFKPDNHVRIDNRLLEKPYVRDDDKAKPGFLPKGEPTRRGRGGTFRRGGRDPGGRPSRPSTLRRPAYRDNQWNPRQSEVPKPEDGEPPRRHEQFIPIAADKRPPKFERKFDPARERPRRQRPTRPPRQDKPPRFRRLREREAASKSNEVVAVPTNGTVNNVAQEPVNTLGDISGNKTPDLSNQNSSDQANEEWETASESSDFNERRERDEKKNADLNAQTVVKVGENVLPPKREIAKRSFSSQRPVDRQNRRGNNGPPKSGRNFSGPRNERRSGPPSKSGKRGPFDDQPAGTTGVDLINGSSAHHQEGVPNGTGQKNSKDSTGKKREDPKPGPKKPKEKVDALSQFDLNNYASVVIIDDHPEVTVIEDPQSNLNDDGFTEVVSKKQQKRLQDEERRKKEEQVIQVWNKKNANEKGRSQTSKLPPRFAKKQATGIQQAQSSASVPPLASAPLPPSTSASVPASTSAPLPATLTPVPASTSAPVPASTLAPVLASTSAPVPASPLAPVSASASVSASVPASTSAAAITSSSAPASAPAPTPILASVSTPASVTILASASIPILASALASTSAPTPAPAASSPAAPVITAPTIPASAPTASVPLAPASASAPAPAPTPVSAPNPAPPAPAQTQAQTHKPVQNPLQTTSQSSKQPPPSIRLPSAQTPNGTDYVASGKSIQTPQSHGTLTAELWDNKVAPPA

SEQ ID NO: 4821 - DNA, 2179 bp, Homo sapien
  Unsure 520-812: Unknown base
ctgtttcctttgcaaactgacataaaaatgaagaagcaaaatgtgtctttagttatatccaagttccaaattcaagttaattactgctgctcctcactcttctaccttttccttcaaatttaaagatgggctttgcagagattaaagcttcagaaaaaaatatgggaaaatatgttaaaatgttgacctgaaaatgaagtggatgactataaaactcttgagagaattagactttttgtagcagtttattacatgataataccttaaaggagatcacattcagtgacctgcgttgacaggtaatatttaaaattaagtattaatgctgattaattcaggcagatgggtggtagcctaaagtatagacatttttccaatattaattttgatattaaataaatgacatcggctcttgttggatattgtaaaatttcctttacttcaactgtaaaataatttcaacagtgaaaggtataaagtaagatgaaaatttccatcatgatcttacctagagataacnnnnnnnnnnnnnnnnnnnnnnnnnnnnnnnnnnnnnnnnnnnnnnnnnnnnnnnnnnnnnnnnnnnnnnnnnnnnnnnnnnnnnnnnnnnnnnnnnnnnnnnnnnnnnnnnnnnnnnnnnnnnnnnnnnnnnnnnnnnnnnnnnnnnnnnnnnnnnnnnnnnnnnnnnnnnnnnnnnnnnnnnnnnnnnnnnnnnnnnnnnnnnnnnnnnnnnnnnnnnnnnnnnnnnnnnnnnnnnnnnnnnnnnnnnnnnnnnnnnnnnnnnnnnnnnnnnnnnnnnnnnnnnnnnnnnnttctttgttaattttatatgtttcggttatgtaaatatataactgaaagggtaaatatatataaatacatatttactgcacatttatattgatatatatttctctgcttgtatctatctatatacacactttataaataaatgagtcaagatttttaaaacaaaataccaaatttttcagtatcatttgaaatttttcaaaattacttttttaaaatttctgcatattcattcagtgaagttgaatgatccagtgggcactctgtattccttcataaactgtgtggtgaatgtggcgtgtcgtgtatatggtatgtatatggcacgtgtttatgtgttttctggggttaatttccttaaaataaaaaggcaactgtcaagactaaagctataataatttttatgaatcttagaaaatgttgaatttttagtgattccagaaattgatctctatcgatgaaactgctttctcaaatacgtcagcaatgggatccaggctttgcttacaatgtgaaggaagttcttagtctcattgcacaaagaaggaaggagggctaaagataaaaagaactcatagtcttttccatagttttgggtcatgttcactgtaaaaaaaaatcacaagatgccatttttacacagcctttttaatctacacatacggcaagctaataattccaaaaaaataatttctttcctttgtagccatttaaaactaacagctagaaatatttcttcttccaattattaaaaataagctgtttctgagtcggtgctgactacatttactgattgaagcagccaactccaaatataccatcttttagtattgacacttaaaataaaacttctccccagaaaaagagttctataaatgatggctgtagaaataggcactgtccaggcagttgttttgtggaagtagtgttgttattttctggtgttttccaagtcatctcagatggtgcgtgaaaatgagatgccaaagaaggcttaaaaaagataccctgcaccagcttcagaatgtaagcaaatctttcattccagcgcttaaaagttttgagaaagctaatctaaagttaaatgtttactagcatctctccgattatattttagaaactactgcacaaaaataaaacaaatttcttattttctctgggttgaaaagtgcacataaaatggaaaatgctttttataccactatttccagcagggattttattttcatttgtcatttgccagcctggggtatgttgggagaaggaacaattgatttttgaaaaggtgcatttgtgtgaaaaccaaaaattgtgttcaacaaatactactactaacccatatgtggatatatgtgttttatacatgagt

SEQ ID NO: 4822 - protein, 120 aa, Homo sapien
  unsure 13-110: unknown amino acid
  Unsure 520-812: Unknown amino acid
MKISIMILPRDNXXXXXXXXXXXXXXXXXXXXXXXXXXXXXXXXXXXXXXXXXXXXXXXXXXXXXXXXXXXXXXXXXXXXXXXXXXXXXXXXXXXXXXXXXXXXXXXXXXSLLILYVSVM

SEQ ID NO: 4823 - DNA, 2192 bp, Homo sapien
ggggcggagagaggcgagcaccgggaaggggagcgtggggccgctggaatgggtgaatttaaggtccatcgagtacgtttctttaattatgttccatcaggaatccgctgtgtggcttacaataaccagtcaaacagattggctgtttcacgaacagatggcactgtggaaatttataacttgtcagcaaactactttcaggagaaatttttcccaggtcatgagtctcgggctacagaagctttgtgctgggcagaaggacagcgactctttagtgctgggctcaatggcgagattatggagtatgatttacaggcgttaaacatcaagtatgctatggatgcctttggaggacctatttggagcatggctgccagccccagtggctctcaacttttggttggttgtgaagatggatctgtgaaactatttcaaattaccccagacaaaatccagtttgaaagaaattttgatcggcagaaaagtcgcatcctgagtctcagctggcatccctctggtacccacattgcagctggttccatagactacattagtgtgtttgatgtcaaatcaggcagcgctgttcataagatgattgtggacaggcagtatatgggcgtgtctaagcggaagtgcatcgtgtggggtgtcgccttcttgtccgatggcactatcataagtgtggactctgctgggaaggtgcagttctgggactcagccactgggacgcttgtgaagagccatctcatcgctaatgctgacgtgcagtccattgctgtagctgaccaagaagacagtttcgtggtgggcacagccgagggaacagtcttccattttcagctggtccctgtgacatctaacagcagtgagaagcagtgggtgcggacaaaaccgttccagcatcacactcatgacatgcgcactgtggcccacagcccaacagcgctgatatctggaggcactgacacccacttagtctttcgtcctctcatggagaaggtggaagtaaagaattacgatgccgctctccgaaaaatcacctttccccaccgatgtctcatctcctgttctaaaaagaggcagcttctcctcttccagtttgctcatcacttagaactttggcgactgggatccacagttgcaacaggcaagaatggggatactcttccactctctaaaaatgcagatcatttactgcacctaaagacaaagggtcctgagaacattatctgtagctgtatctccccatgtggaagttggatagcctattctacagtttctcggttttttctctatcggctgaattatgaacatgacaacataagcctcaaaagggtttccaaaatgccagcattccttcgctctgcccttcagattttgttttctgaagattcaacaaagctctttgtagcatcaaatcaaggagctctgcatattgttcagctgtcaggaggaagcttcaagcacctgcatgctttccagcctcagtcaggaacagtggaggccatgtgtcttttggcagtcagtccagatgggaattggctagctgcatcaggtaccagtgctggagtccatgtctacaacgtaaaacagctaaagcttcactgcacggtgcctgcttacaatttcccagtgactgctatggctattgcccccaataccaacaaccttgtcatcgctcattcggaccagcaggtatttgagtacagcatcccagacaaacagtatacagattggagccggactgtccagaagcagggctttcaccacctttggctccaaagggatactcctatcacacacatcagttttcatcccaagagaccgatgcacatccttctccatgatgcctacatgttctgcatcattgacaagtcattgccccttccaaatgacaaaaccttactctacaatccatttcctcccacgaatgaatcagatgtcatccggaggcgcacagctcatgcttttaaaatttctaagatatataagcctctactcttcatggatcttttggatgaaagaacactcgtggcagtagaacggcctctggatgacatcattgctcagctcccaccacccattaaaaagaagaaatttggaacctaaaacagggcactgtctgtgtccttccttgaactgtctaccctgttgcttttcacaaatcatggtaataaaacaagttattcttg

SEQ ID NO: 4824 - protein, 686 aa, Homo sapien
MGEFKVHRVRFFNYVPSGIRCVAYNNQSNRLAVSRTDGTVEIYNLSANYFQEKFFPGHESRATEALCWAEGQRLFSAGLNGEIMEYDLQALNIKYAMDAFGGPIWSMAASPSGSQLLVGCEDGSVKLFQITPDKIQFERNFDRQKSRILSLSWHPSGTHIAAGSIDYISVFDVKSGSAVHKMIVDRQYMGVSKRKCIVWGVAFLSDGTIISVDSAGKVQFWDSATGTLVKSHLIANADVQSIAVADQEDSFVVGTAEGTVFHFQLVPVTSNSSEKQWVRTKPFQHHTHDMRTVAHSPTALISGGTDTHLVFRPLMEKVEVKNYDAALRKITFPHRCLISCSKKRQLLLFQFAHHLELWRLGSTVATGKNGDTLPLSKNADHLLHLKTKGPENIICSCISPCGSWIAYSTVSRFFLYRLNYEHDNISLKRVSKMPAFLRSALQILFSEDSTKLFVASNQGALHIVQLSGGSFKHLHAFQPQSGTVEAMCLLAVSPDGNWLAASGTSAGVHVYNVKQLKLHCTVPAYNFPVTAMAIAPNTNNLVIAHSDQQVFEYSIPDKQYTDWSRTVQKQGFHHLWLQRDTPITHISFHPKRPMHILLHDAYMFCIIDKSLPLPNDKTLLYNPFPPTNESDVIRRRTAHAFKISKIYKPLLFMDLLDERTLVAVERPLDDIIAQLPPPIKKKKFGT

SEQ ID NO: 4825 - DNA, 1920 bp, Homo sapien
gaaaggacagcaacagtcaggtggtttaccttccagaggctggcaatgctgtttcactggaggacacggctaagaaggaagtccaccagcctgccaagatgaattgccttgaaggagagggagagggatcctggcccagctgactttgaatctgagggagggccaagctgccactgccctggatgttggaacacctggtcttgctgcttcctcccaccacctcaaaaacacagaccttggactacctgtcgcccatccctttctggcctacatttcccagcaccagctctccagcacagcactttggacctcggctgccctcaccagacccaactctcttctgcagcctgctgacctcgtggccccctaggttcagtcatctgacccagctccaccctcggcaccaacgaatcttgcagcagcagcagcatagtcaaacaccaagagagccccacttcctgctcaccacactccttaggaagtgccagtggtgggtaagtctaaagggttgttcctcctggcttaaagtcccccagccaagaagccttggtctcagcagccagacccctatgctaacctcatgaccagaaaagagaaggactgggtgataaaagtgcagatggtgcagctgcagagtgcaaaaccccgcctggatgactactattaccaggaatattaccagaagctagagaagaagcaggcagacgaagagctacttggacgaagaaaccgggttgagtccctcaagctggtaacgccttacattccgaaggcagaggcttatgagtccgtggtccgaatcgagggttccctgggccaggtagctgtgtcgacatgcttcagccctcgccgagctattgatgcggtaccccatggaactcaagagcaggatatagaagctgcaagcagtcagaggcttcgggtattataccggattgagaagatgttccttcagttactagaaatagaggaaggctggaagtataggcctccaccgccctgcttttctgagcagcaaagcaaccaggttgagaagctcttccagaccttaaagacccaggagcagaacaacctggaagaggcagcagatggcttcctgcaggtgctctctgtgaggaaggggaaggccctggtggcccggctgctccccttcctgccccaggatcaggctgttaccattcttttggctatcacccaccatctgcccctcctggtccggagggatgtggctgatcaggccctacaaatgttattcaaacctctgggcaaatgtattagtcacttgaccctccacgaactcctccaaggacttcagggattaacgctgttgccacctggctcctcagagcggccagtcaccgtggtgcttcagaatcagtttggaatatctttgctctatgccctgctgagccatggggagcaactggtatcgctgcattcttccctagaggaacccaacagtgaccatacagcttggacagacatggtggttctgattgcctgggagatagcccaaatgcctacagcctctctggcagaacccctagctttccccagcaacctacttcccctgttctgtcaccacgtggacaaacaattggttcagcagctggaggccaggatggagtttgcctggatttactgatctgtttgttctggaatacgtgtatgtgggaagttgaatcatcagacactagctacatagactatgtttacagggatccagagagtctgaagacatttcttatgcctttatatattggagaacccttccccattttcatatcctttcttcaaaaatctaaatgatgtgcctaaaaataagacatggcataataaggtataattaaagagataatagaaaaaaaaaaaaaaaaaaaaaaaaaaaaaaaaaaaaaaaaaaaaaaaaaaaaaaaaaaa

SEQ ID NO: 4826 - protein, 354 aa, Homo sapien
MTRKEKDWVIKVQMVQLQSAKPRLDDYYYQEYYQKLEKKQADEELLGRRNRVESLKLVTPYIPKAEAYESVVRIEGSLGQVAVSTCFSPRRAIDAVPHGTQEQDIEAASSQRLRVLYRIEKMFLQLLEIEEGWKYRPPPPCFSEQQSNQVEKLFQTLKTQEQNNLEEAADGFLQVLSVRKGKALVARLLPFLPQDQAVTILLAITHHLPLLVRRDVADQALQMLFKPLGKCISHLTLHELLQGLQGLTLLPPGSSERPVTVVLQNQFGISLLYALLSHGEQLVSLHSSLEEPNSDHTAWTDMVVLIAWEIAQMPTASLAEPLAFPSNLLPLFCHHVDKQLVQQLEARMEFAWIY

SEQ ID NO: 4827 - DNA, 1725 bp, Homo sapien
ggggaggtagcacaaagggaggaccatggtcttctaactgaggaacctgagcagatgccttgacccagaccagagacccaagccaaggaaagcccatgatcaccagagtaatggggatatgaaggaagaatcagctgcacaattaggttgttgtcataggcccatggccctgggaggtacagggggctccctgtcccccagcctggacttccagctcttccgaggtgaccaggtcttctcagcctgcagaccacttccagacatggtggatgctcatggcccatcctgtgccagctggctgtgtcccttgcccctggcaccgggcaggtctgcactgctggcctgcctacaggacctggacctgaacctgtgcaccccacagccggcacccctgggcacagacctgcagggcctccaagaggacgccttgagcatgaagcacgagccaccagggctgcaggccagctccaccgatgacaagaaattcacagtcaagtacccacagaacaaggacaagctgggaaaacagccagaaagagctggcgagggggccccctgcccagccttctcctctcataacagctcttccccaccaccgctgcagaacagaaagagccccagccccttggctttctgcccctgtccccctgtcaactccatctccaaggagctcccatttctcctccacgccttctaccctggatacccacttctcctgcctccacccaacctgttcacctatggggccctaccttctgaccaatgtccccacctcctcatgctgccccaagacccctcctaccccaccatggctatgcctagcctgctgatgatggtcaatgagctggggcaccccagcgctcggtgggagaccctgcttccctacccaggggccttccaagcctctggccaagctctgccttcccaggcccgaaatccaggtgctggagctgccccaaccgactccccaggcctggagcgtggtggcatggcatctccagcaaagcgggtcccattgagttcccagacaggcaccgcagccttgccttacccgctgaaaaagaagaatggcaaaatcctgtacgagtgcaacatatgtggcaagagctttgggcagctctccaatctcaaggtccacctgcgtgtgcacagtggagagcgtccattccagtgtgccttgtgccagaagagcttcactcaacttgcccacctgcagaagcaccacctggtgcacactggggagcggccccacaagtgctcgataccgtgggttccaggaagaaatcactggaaaagcttccaggcctggagggaaagagaggtgtgccacaagcgcttcagcagctccagtaacctcaagacccacctgcgcctgcactccggggcccggcccttccagtgcagtgtctgccggagtcgcttcacccagcacatccacctgaagctgcaccatcggctgcatgccccacagccctgtggcctggtgcacacccagctgcccctggcctctctggcctgccttgcccaatggcaccagggggcactagatcttatggcggtggcatctgagaaacacatgggctatgacatagatgaggtcaaagtgtcctcgacatcccaggggaaagcaagagcagtgagcctgagcagtgccgggactcccctggtgatggggcaggaccagaacaattaaaaatgtttcttctgtcaaaaaaaaaaaaaaaa

SEQ ID NO: 4828 - protein, 509 aa, Homo sapien
MALGGTGGSLSPSLDFQLFRGDQVFSACRPLPDMVDAHGPSCASWLCPLPLAPGRSALLACLQDLDLNLCTPQPAPLGTDLQGLQEDALSMKHEPPGLQASSTDDKKFTVKYPQNKDKLGKQPERAGEGAPCPAFSSHNSSSPPPLQNRKSPSPLAFCPCPPVNSISKELPFLLHAFYPGYPLLLPPPNLFTYGALPSDQCPHLLMLPQDPSYPTMAMPSLLMMVNELGHPSARWETLLPYPGAFQASGQALPSQARNPGAGAAPTDSPGLERGGMASPAKRVPLSSQTGTAALPYPLKKKNGKILYECNICGKSFGQLSNLKVHLRVHSGERPFQCALCQKSFTQLAHLQKHHLVHTGERPHKCSIPWVPGRNHWKSFQAWREREVCHKRFSSSSNLKTHLRLHSGARPFQCSVCRSRFTQHIHLKLHHRLHAPQPCGLVHTQLPLASLACLAQWHQGALDLMAVASEKHMGYDIDEVKVSSTSQGKARAVSLSSAGTPLVMGQDQNN

SEQ ID NO: 4829 - DNA, 2285 bp, Homo sapien
attacactggattaggtgttacgaagtaatttagagactatttaaagtacacgggaggatgtgcatagttatgtgcaaatactacgcccactttctatgagagacttgagcaacctggattttggtatcggcgggggccctggaccaatcccctctcagttctaccgagggagaactgttttgtttcttccagcacggctttgaccgacagtgtgttgggattcgctgacgtccatgagaaagcttggcagcatgctgagaccaattttcccagggccagaattctcctgtgtgagctaaaatacagtggctcggtccaacaaaacagagcctggagccaggaattatggcgaacctgctccctcccgtcctcccttggcgcacagatccctggcgccgccgctcttgaggtcgcctctcgcgtgtcgacctcatcgtcggaacggcgcttcctgaagctttatataagcacggctctgaatccgctcgtcgggattaaatcctgcgctggcgcgctcctgccagtctctggcctccatttgctcttcctgaggctccctccagagacctttcccttagcctcagtgcaatgccttccgggcgtcctcagaccagacacaggccaaagccactacagaatccggaagccccggttgggatctgaattctcccggggactgtggcgtagcggttaaaaaaaaaaaagagtgagagggacctgagcagagtggaggaggagggagaggaaaacagaaaagaaatgacgaaatgtcgagagggcggggacaattgagaacgcttcccgccggcgcgctttcggttttcaatctggtccgatactcttgtatatcaggggaagacggtgctcgccttgacagaagctgtctatcgggctccagcggtcatgtccggcagaggaaagggcggaaaaggcttaggcaaagggggcgctaagcgccaccgcaaggtcttgagagacaacattcagggcatcaccaagcctgccattcggcgtctagctcggcgtggcggcgttaagcggatctctggcctcatttacgaggagacccgcggtgtgctgaaggtgttcctggagaatgtgattcgggacgcagtcacctacaccgagcacgccaagcgcaagaccgtcacagccatggatgtggtgtacgcgctcaagcgccaggggcgcaccctgtacggcttcggaggctaggccgccgctccagctttgcacgtttcgatcccaaaggccctttttagggccgaccacttgctcatctgaggagttggacacttgactgcgtaaagtgcaacagtaacgatgttggaaggtaactttggcagtggggcgacaatcggatctgaagttaacggaaagctaccgcggcccatagcgctcacagccgtaaagacttaagtcgttgaccgaaagcggctttttcacttacctgggctttttttttttttttttttttttttaaagcctttatcggtatgaaaggttgaatgctctaggtttgagcactgctttctcggcttgctcttctggtgcagtataggcacacctagagggccacgtcagtctttgcgatcaccaaatctggttctgagaaataggcactggcaatttacacatgccttgctgtgtaatctcactatatttgctcaggcaaagtgggagaagcagccttaggttttcattctagagatgccggctttcccacctgatcggcttagagttcacgattgactgttttgggcttcatttcaccctctacataacaagcgggtggactagatgccttagcaagggtccgtgttgtgtggtgtctccagccacgcactcagctcaatcttagcacagttaaaaaatgcctttctagcaagttatctgcccagtgcctgaaaagtatcatttcttgtgttcaataaaaagcctcctaatttaatcaaggacctatgagataactgtcttttagttgtggcattgcaaggatacaaatgcagagatattttaaagtgatccttctgtaagagtgaaccaacgatatgatctgaaagcaacttcacaggtaattcaggtatgtgacttctacctcttagggcctgttgtagcttagaatgagagacctgcagaaacatgcccaccatcaatacagaaagcacaatttaattttgacaaggccaaaagccaattctgtatcagcatggcgtatattacagcaagctattctttacgctaccacctctaaattgccctaatttggattaaaatgtgggtt

SEQ ID NO: 4830 - protein, 10 aa, Homo sapien
LHWIRCYEVI

SEQ ID NO: 4831 - DNA, 1634 bp, Homo sapien
ggagcacagggcgagctctcctccgccctgcagcctcaggtaaggatccggaccttcactgctgccccaactggggctcctcagctcggggcctctaggggcttgggctgctggtctgggtggaggcgcgttgggggtgtcgaggagcttgggtgcaagccccatgcgggaagctcagggcaaagcgccttgaaaccctctctagtgaaggaaggtaaaatggctccgggaccccaggcggggaaagaggtgtccaaggaggagggctggagagtaaggcggggatggcagagggtacgcagaggctgagaagtgggaccagtgtctcaaggggcgccagcctcttcctccgcccaacatggccaccatttttgttgggatagccttgggctcctgccaggggaacagcagggcagtgagggagtcaggactttgggctggtggggaggccgagaatcaaggctctggggagtcaggactttggggctggtggagtggctggggactgaggccctggggggtcaggaccttgggctgctatggaggctgggactgaggctctgggggagtcaggaccttgagctggtggggaggctgggaattgaggccctggtgtgttcaagaccttgggctggtggggaggccagggcctgaggccctggggggtcaggaccctgggctgttggggaggctggggacttaggccctggggggtcaggatcttgggctggtggggaggctgaagggtggggactgaggctctgggcagtcaggacctcagggttggggtggactggagaccaagaccttggcaggggagctgtggctgcctcatttggacgctggagggtggctagcgtggctggaagcggccagccaggggttcacagaactgaaggtgaggcctccagaggccctagtctctacctgagtgtctctgaaactggggggatggggtggagcctttagggggaagggaagagggaactgaagaggaagtgggggagggaggtagaggaggcaagtctggcgccatgctgagtcaccgcccacaaggcccagggcgggccctcggggggccctggcagggttggggggatcttaggaagccacaaggagggctggggggctcttggagcaggagtcaggaggcctgggcagcctgaagagtacacgccgacggacatacagacagtgcagtcacccataaagtagaaagcactactaacagcactggagggtgtagtgtttcctactttatggatgagtgtactgtgggcttcggagatcacgccactgctgccgcccgctgcccgccaccatcttcctcggcgctcggggacctcgtgtgacaggtgagcaccttacggcccctccctaccctgcccagatgcctgaaaggcctccatggctttcctgcccttcctggttccggacagctggggaaaggccacagcagctcctctgctgccctgcagtctttgggggcggggagggctggacatgtggaaccctgatgcagccgcagcgtcaaggacgaggaaggggtgggaagggatggtacgtggaggggaatgggtggtgggaccagggacccaatgctaataaagactggactgtgcttctcaaaaaaa

SEQ ID NO: 4832 - protein, 102 aa, Homo sapien
GAQGELSSALQPQVRIRTFTAAPTGAPQLGASRGLGCWSGWRRVGGVEELGCKPHAGSSGQSALKPSLVKEGKMAPGPQAGKEVSKEEGWRVRRGWQRVRRG

SEQ ID NO: 4833 - DNA, 1747 bp, Homo sapien
tataaaagcatacttgacataggtggagctttttcttttgaaaatatatattcacaattttaatattttaatttattttttactatttaaccctgtacttggcaatgctcaggcagctgattgtgaaatattcttgtcctttacagaacatggttgttattgtgctgttgacatgaatagaccatggaaacattttcatcattattattcagcctgtgctgtagttaatgttaagttgctgaaataaaaagtgagcaagtaatagattttcttggcaaatctaatgattcagcccacaggactgttgaaactactgcggaagtttttctatctgaaagaaggtgctgggcattcaaatgtgttcatgtattgtatatcatatgaattgtatatcaattactaatgggaatttctacatatatgcttacaaaagcaatttatttaagtaatgctaggggtagtgtacataccaattagttattcagctactatacagaaaaaggatgaacaaattaatttatttctaattgagccagttagacataatgcatataacgtgatatttggttcatgaaagagttgttttcatgtggttattgtagggagtatatataattgtggaaggggtatgggaagagttgtgtatagttagttgttatctctacaagtttgaaagttttcccatcaaacattatcaatataccaatgttttaaaaattgagtgagggttattatttgtatttgatgaaagaaaatccaaataaagcccacctagaaatagatattttattatatatgtgctatagatatacctatatagtacaaatagacatgtgtgatgcatatatacaatgttatatatgtgtatatgtctgtatacacactgagtctgtaatatgtatacactaaatttgtgttatgctaacatcttcagggtctgcactgtgaactcccctggagataagtaagtccactttagaataaagaagttcttttgagacttcagttactaacgtgctttaagaggtatctactttataactgaattctatgtcgttcatacgtagagttacagtaagggtctagtatgtccaaatcttaataataaagaagaaaagtaaaggcttcaagctagcaatgtattcgaattacagttttcagattgtggctccaggccttgtgtttctcatttaagtagcaccttttaataaaaaccgtttctttgtgtaggcaaaagcacaagtgtttcaaatgtaaatagcaggaaaaaaaaagagtttacagagatagcattgctgcagagaataattgctactgagtatttcttatagaatttgtggaactgaaagatgaggtttattctgtcaagttcaagttcattctgttcaacactgttttcttattgtttgtgtatagcaaccgggtattattgttttatcatttgtaaaattgtaaaataaattaatccctttttttcactgtttctcttatctcatatatccaagcccttggttatactttgtatgtcaatgttaggtgatcatttttaacaagctttggcttgtgctttgcttttccactccccttagccctagtggttggcaattaggcaaaccatttatttttaagtgtatacatgggaatatgaacaatgtcaaaaaccccatgaatattaggaaatccttaacgatattttgtgtagcacattctgtttgcggttgagggaataaagtatttcacaagtgaa

SEQ ID NO: 4834 - protein, 20 aa, Homo sapien [sequence omitted]

SEQ ID NO: 4835 - DNA, 2876 bp, Homo sapien
cccatcttagagcagctgaataatttcctgagaattctattcctgaagctaggaagaaaagtttatttatacatacacgcaacctgcaagtctccagtttctattcttccttcctctttgacccttcccctcccccactttgcaccagagaagtcagactccgggagtgctttaacagtttgaaggctaatctgaaagaggaagaagaatctgtatatctgtatatattggctagcaaatgtgccctgctctctcccctcttaaaaatagcagcaacccatctttgcaaagaagcttgcctatagagcaggcactctgtgaatggactgtgcttttacgaccctacagggtatcaagatactgtgcagctcgccaacaaggattaattgcaaggactggtagatcgaatttactgaagacttggagcttgcttctgagaacaaacgcaaaaggacagtaaactgtggaccttgaagttagcagcgtgggcttcctctaatattacaccgtaaaaggcattgatcaccataagaaggaacatttgtgaaggtactccagtgccagaaagaggcacaaagcagacattcgtagagaaacatggatgaaacaggaaatctgacagtatcttctgccacatgccatgacactattgatgacttccgcaatcaagtgtattccaccttgtactctatgatctctgttgtaggcttctttggcaatggctttgtgctctatgtcctcataaaaacctatcacaagaagtcagccttccaagtatacatgattaatttagcagtagcagatctactttgtgtgtgcacactgcctctccgtgtggtctattatgttcacaaaggcatttggctctttggtgacttcttgtgccgcctcagcacctatgctttgtatgtcaacctctattgtagcatcttctttatgacagccatgagctttttccggtgcattgcaattgtttttccagtccagaacattaatttggttacacagaaaaaagccaggtttgtgtgtgtaggtatttggatttttgtgattttgaccagttctccatttctaatggccaaaccacaaaaagatgagaaaaataataccaagtgctttgagcccccacaagacaatcaaactaaaaatcatgttttggtcttgcattatgtgtcattgtttgttggctttatcatcccttttgttattataattgtctgttacacaatgatcattttgaccttactaaaaaaatcaatgaaaaaaaatctgtcaagtcataaaaaggctataggaatgatcatggtcgtgaccgctgcctttttagtcagtttcatgccatatcatattcaacgtaccattcaccttcattttttacacaatgaaactaaaccctgtgattctgtccttagaatgcagaagtccgtggtcataaccttgtctctggctgcatccaattgttgctttgaccctctcctatatttcttttctgggggtaactttaggaaaaggctgtctacatttagaaagcattctttgtccagcgtgacttatgtacccagaaagaaggcctctttgccagaaaaaggagaagaaatatgtaaagtatagtttaaacccatttccagtccaaaccaatgaaaatagtttcccaaataagtattttgtcaaatcatttacaaaaaaaataaaaattttacttaatattttacaaatacttaactatttgggcctacaactctatctcatttatgcatccacatgattagatatttatagatattttaagtgctaaaaattcggtccacaactatgaactgaattataaataattttgaccactcaccagaatttggagaatatttttatctttgcactataaaatatgtcttatattaaagttttcctcttcaaataaaagctttacaaacgataaaatatataaaattagtcaataaaaatacatgcaagctaaaagttataaaatataaaactagatataaaattggcaaatagttctgaatcattctaacatattcctttgcatgcatgccatcagatgagaactggagatgactcaggagctacataaaacgtactgtcacccttctttgtagtactgattcgctaggcaaattagggccatttcttccaaaagagaatgtaaaagtgctagaacagactagtattcagctaaagggtcctaaaagcaccatacaatgttcaatatggcaacaggagaaatctggtcaaaagccagtttgtctccagttttcttctgcctttgcctcaggctcccaaaattgaatagtggagttttagctgctcagtgaggttcctgtagagatttctctccatccatgacatacaattcttccttaagaagccagacaactggcactcctatatataaatagaagtaattaaaaacttatctgaagaagagaaaaggaaaaggaatctacttttctatatgccaattgctgggatcaaaataaactacaaaggatttatgaagaaaattgtgaatgttcacgttacaaattcttttaagaagtgcatacatttatgtatatgtatacaactatatgtaagagattttgctgtatgatatgcattatgggtgaaagttcacgataagttttattattgctttattactttttattggtatgttgacaggaatatcatggatatgtttacagtgacttttatattacagtggacgctttgatcttaaaacagccacaacaactcatctacggctgaaatataatatgcgtggacaagcttttgctgaagtgtagtgtgtcctttaagtttgttttttaaaaagtaacttacctcagaagaaataaatgataactataaagaaa

SEQ ID NO: 4836 - protein, 306 aa, Homo sapien
MISVVGFFGNGFVLYVLIKTYHKKSAFQVYMINLAVADLLCVCTLPLRVVYYVHKGIWLFGDFLCRLSTYALYVNLYCSIFFMTAMSFFRCIAIVFPVQNINLVTQKKARFVCVGIWIFVILTSSPFLMAKPQKDEKNNTKCFEPPQDNQTKNHVLVLHYVSLFVGFIIPFVIIIVCYTMIILTLLKKSMKKNLSSHKKAIGMIMVVTAAFLVSFMPYHIQRTIHLHFLHNETKPCDSVLRMQKSVVITLSLAASNCCFDPLLYFFSGGNFRKRLSTFRKHSLSSVTYVPRKKASLPEKGEEICKV

SEQ ID NO: 4837 - DNA, 535 bp, Homo sapien
  Unsure 103: Unknown base
tatcccagagagtttttgagcatatgggtagtgtttgtgaatttaagtttgttccccacattgtcagtttattctaaaattatcaccattttagacttaaagnaattttaaagccaaaagataagcaaacagacttgcttaggtcctgtagcaaattaattcagaccttgaacaacatttcattgtgctgtttaggaagtgttaagtatattgagattttccatattactgtgttactatcatacttaaattttagaagatgatcaaattattttaatgactaggactatgcttatgaagttagcatttcctgcccttatttatagaaagcacttgatatatttcacaaaggtgaggagattaactttttagggaacaagtcatttaaattcttgaaccagtttccatcttttaggctatatgagtattgaatataggagaaaagagaaaagtatgcatgtttctcaaaggctctttctttaaatgtcaccagcagatctaaacagtatccataggcacctatggcaaatttact

SEQ ID NO: 4838 - DNA, 1419 bp, Homo sapien
  Unsure 214-291: Unknown base
cccattctcttcctctacctcactccatctgataaaaaaccattctaaatctcatgttcattattcccatgctctcctatttctatcatattaatgtatctacatgttttccttaaatatgtttttatattagttttaactataagttaaagaccatattgttgtagataattttttttagtactttctcttcatgttgtatttctaagattcnnnnnnnnnnnnnnnnnnnnnnnnnnnnnnnnnnnnnnnnnnnnnnnnnnnnnnnnnnnnnnnnnnnnnnnnnnnnnnaatgttttcctagctatcaccatcaaaaactctttccacagtgtgttgaatttttaatatgacaaaaatgaaaatgtaccaacaattttcagtgacttcacctccattctgaaatcctgatgtttccaaatatctctgaacacctcaagtcctagggacaactgagattatattaacattaatctctgaatgttgccaattctaggccttcacttggttcatgtaggaacaccaagtccctttcaaagcaccacatcttcctctaatcaatatttcttggagtccctagggaatgtcttacatgcattcaaacaatcaccatttctggagatacactacagggtcaccataaactctgctacccttaggttccatcactatggaagctgagtttcaccagaaggcacttttgtcctccattacgaccagcaaagccagctaagccacagctgctggcctcaaaaaatgtgatgatcaatccacactgctcccactggcctctgttacccttatcctggcctttgagtgcagggcatgatgtcctgcccgtactgagatgctgatctctgccagttcatgttcatattggcattaaaattttaaggtcccttgaagagggaggaggcaaatgtctctgtcttctatgtgatacattctgctgtttttttctctatggtgaaaatatgtaaaccggttttgggtaccaaccaccaggctgtatatggaggctctcctcctttctaaccctgctgctgatttggaattaccttgccaagcccctttgtgccttatagtgaactttctctaagggacctgtcatctcttatcattgtttatccattttctagattctgaacccaagaaagaacaaagttcaagattttccatgtctttgtaacacttagccctgtgcaaatcagagtatgtgagtggaagaaggggtgagtcctaactgtacatctcggatataacaaatgtgcaaattctgattgattgccctgtaaaatgaattattctcatgcagtgctctacttgacttttatctttgaattcacaactaaaaacccatagcccagaaatctaaaaaaagtaattttagtggagcctttgaaaataaaagaccattgg

SEQ ID NO: 4839 - protein, 30 aa, Homo sapien
  Unsure 214-291: Unknown amino acid
PFSSSTSLHLIKNHSKSHVHYSHALLFLSY

SEQ ID NO: 4840 - DNA, 3164 bp, Homo sapien
gcagccccggcggccgaacgcccgcggcgcgggactccatcgtcagagaagtcattcagaattcaaaagaagttctaagtttattgcaagaaaaaaaccctgccttcaagccggttcttgcaattatccaggcaggtgacgacaacttgatgcaggaaatcaaccagaatttggctgaggaggctggtctgaacatcactcacatttgcctccctccagatagcagtgaagccgagattatagatgaaatcttaaagatcaatgaagataccagagtacatggccttgcccttcagatctctgagaacttgtttagcaacaaagtcctcaatgccttgaaaccagaaaaagatgtggatggagtaacagacataaacctggggaagctggtgcgaggggatgcccatgaatgttttgtttcacctgttgccaaagctgtaattgaacttcttgaaaaatcaggtgtcaacctagatggaaagaagattttggtagtgggggcccatgggtctttggaagctgctctacaatgcctgttccagagaaaagggtccatgacaatgagcatccagtggaaaacacgccagcttcaaagcaagcttcacgaggctgacattgtggtcctaggctcacctaagccagaagagattccccttacttggatacaaccaggaactactgttctcaactgctcccatgacttcctgtcagggaaggttgggtgtggctctccaagaatacattttggtggactcattgaggaagatgatgtgattctccttgctgcagctctgcgaattcagaacatggtcagtagtggaaggagatggcttcgtgaacagcagcacaggcggtggagacttcactgcttgaaacttcagcctctctcccctgtgccaagtgacattgagatttcaagaggacaaactccaaaagctgtggatgtccttgccaaggagattggattgcttgcagatgaaattgaaatctatggcaaaagcaaagccaaagtacgtttgtccgtgctagaaaggttaaaggatcaagcagatggaaaatacgtcttagttgctgggatcacacccacccctcttggagaagggaagagcacagtcaccatcgggcttgtgcaggctctgaccgcacacctgaatgtcaactcctttgcctgcttgaggcagccttcccaaggaccgacgtttggagtgaaaggaggagccgcgggtggtggatatgcccaggtcatccccatggaggagttcaaccttcacttgactggagacatccacgccatcaccgctgccaataacttgctggctgccgccatcgacacgaggattcttcatgaaaacacgcaaacagataaggctctgtataatcggctggttcctttagtgaatggtgtcagagaattttcagaaattcagcttgctcggctaaaaaaactgggaataaataagactgatccgagcacactgacagaagaggaagtgagtaaatttgcccgtctcgacatcgacccatctaccatcacgtggcagagagtattggatacaaatgaccgatttctacgaaaaataaccatcgggcagggaaacacagagaagggccattaccggcaggcgcagtttgacatcgcagtggccagcgagatcatggcggtgctggccctgacggacagcctcgcagacatgaaggcacggctgggaaggatggtggtggccagtgacaaaagcgggcagcctgtgacagcagatgatttgggggtgacaggtgctttgacagttttgatgaaagatgcaataaaaccaaacctgatgcagaccctggaagggacacctgtgttcgtgcatgcgggcccttttgctaacattgctcacggcaactcttcagtgttggctgataaaattgccctgaaactggttggtgaagaaggatttgtagtgaccgaagctggctttggtgctgacatcggaatggagaaattcttcaacatcaagtgccgagcttccggcttggtgcccaacgtggttgtgttagtggcaacggtgcgagctctgaagatgcatggaggcgggccaagtgtaacggctggtgttcctcttaagaaagaatatacagaggagaacatccagctggtggcagacggctgctgtaacctccagaagcaaattcagatcactcagctctttggggttcccgttgtggtggctctgaatgtcttcaagaccgacacccgcgctgagattgacttggtgtgtgagcttgcaaagcgggctggtgcctttgatgcagtcccctgctatcactggtccgttggtggaaaaggatcggtggacttggctcgggctgtgagagaggctgcgagtaaaagaagccgattccagttcctgtatgatgttcaggttccaattgtggacaagataaggaccattgctcaggctgtctatggagccaaagatattgaactctctcctgaggcacaagccaaaatagatcgttacactcaacagggttttggaaatttgcccatctgcatggcaaagacccacctttctctatctcaccaacctgacaaaaaaggtgtgccaagggacttcatcttacctatcagtgacgtccgggccagcataggcgctgggttcatttaccctttggtcggaacgatgagcaccatgccaggactgcccacccggccctgcttttatgacatagatcttgataccgaaacagaacaagttaaaggcttgttctaagtggacaaggctctcacaggacccgatgcagactcctgaaacagactactctttgcctttttgctgcagttggagaagaaactgaatttgaaaaatgtctgttatgcaatgctggagacgtggtgaaataggccaaagatttcttcttcgttcaagatgaattctgttcacagtggagtatggtgttcggcaaaaggacctccaccaagactgaaagaaactaatttatttctgtttctgtggagtttccattatttctactgcttacactttagaatgtttattttatggggactaagggattaggagtgtgaactaaaaggtaacattttccactctcaagttttctactttgtctttgaactgaaaataaacatggatctagaaaaccaaaaaaaaaaaaaaaaa

SEQ ID NO: 4841 - DNA, 1494 bp, Homo sapien
  Unsure 139-161, 258-335, 1126-1143: Unknown base
tgggactacaggcatgtgccaccacacccagctaagttaatgctaatgtgtagtttatctgattcagttttgaagggcgggatatatatagatagttatgttgtgtgtgtggtggtgggggtagtgtttatatgtgtgnnnnnnnnnnnnnnnnnnnnnnntactagtccattgctgctacaacaaactaccagtatgtcagggcataaaacaaatttattacactcctgtatgtcagagtatgatgtggatctcatnnnnnnnnnnnnnnnnnnnnnnnnnnnnnnnnnnnnnnnnnnnnnnnnnnnnnnnnnnnnnnnnnnnnnnnnnnnnnncattctggagtctgcctgcattttttggctttgggctcttctccactctcaccattagcaaccttgcatcccatggactcttcttctatggccacatgtctctgtggctctttccttcccccttctcttccactgttaaggactcatgtgcttacttagtcctgaatggagacaccgtcatcatccacatgagcccactgtcctaatccatacaggctgctacaaggaaatgcattagaccaggtagcttataaataacagaactttgtttctcacagtcctggaggctgagaagtgcaagatcaaggtgccggcagtcttggtgtctggtgaaggcctgctttctcatagaggcttccttcttgctgtgtcttcgcatggtgagaggaacaaacaagctcccttgtgcctttaataaggtgctaatcccagtcatgagggcagagtctcccgtaaggcttaacctcctaatgccatcaccttgagggttaggattttaacacatgaacagtgacggaacacaacgttcattccatagcaccagggtagtctcctcatgtcaaggtctttacctgaatcacatgcatgatgtaccgttttcatgtaaggttctaggaatctgtggacatctttggggggccattattttgctgatcacatattacatattttttaatattctagactagtatgaaaacaatgccacttccattgctttatatacgtatctatatacacattgtctaatgctataattaaaaaaaagttgtagacacaaatatacccatttnnnnnnnnnnnnnnnnnnggctattttacttcatactgccaactcctttttcctgaaactgcttcaactctggaattcttttttgctattagttttattttattgaaatattcatgaatgagcatacacttgtatatggatttaaaattcacagtaatgttctcatgagttcatctgtgaataacattttatagacaaaatgtctgcactaagacaagagaaagatctataattcctttgttctaaggtaccgccattcattgttattattttaaaataggagtgttgactgatgttaaaacacaaaatgggttcgggagtggtggctcccgctgtagtccagcactttgggagaccgggtggggcgga

SEQ ID NO: 4842 - protein, 130 aa, Homo sapien
  unsure 47-54, 86-112: unknown amino acid
  Unsure 139-161, 258-335, 1126-1143: Unknown amino acid
WDYRHVPPHPAKLMLMCSLSDSVLKGGIYIDSYVVCVVVGVVFICVXXXXXXXXTSPLLLQQTTSMSGHKTNLLHSCMSEYDVDLXXXXXXXXXXXXXXXXXXXXXXXXXXXILESACIFWLWALLHSHH

SEQ ID NO: 4843 - DNA, 1615 bp, Homo sapien
  Unsure 891: Unknown base
atacacatgcagaagctgtgacacgtgcggaagctgtggtaagtgcatcctccttcagtctcagttctgaaaatagatcatcatggtggcaccaaagagtcacacagatgactgggctcctgggcctttctccagtaagccacagaggagtcagctgcaaatattctcttctgttctacagacctctctcctcttcctgctcatgggcccaactcctgggaaacatctctccgctgcatggcccggaaccccactgtccagcagatagagccaatccagtaccccagagaggatctcagccacctgggactgtggcagctactgtccttctgtgctcccgctttctccagggcttcagggatgatgatgcaggactaagagcctctggaaaggactcagccccaacagtggtgtcagggatcctagggggttccgtgactctccccctaaacatctcagtagacacagagattgagaacgtcatctggattggtcccaaaaatgctcttgctttcgcacgtcccaaagaaaatgtaaccattatggtcaaaagctacctgggccgactagacatcaccaagtggagttactccctgtgcatcagcaatctgactctgaatgatgcaggatcctacaaagcccagataaaccaaaggaattttgaagtcaccactgaggaggaattcaccctgttcgtctatgcaccatttattgaaaagttgtccgtccacgtcatcgagggtgaccaccgcacactcctggagggcagcggcctggagtccatcatcagcaccctggctgagccacgtgtgagcgtgcgggagggctaggccctcgcccccacctgccactggagaccgctccgccatccccacctcaccgccgcgcaanagagctggaagggtcctgccgatgggaccctgccaggcccagtgccactgccccccgagggctgctagacgtggggcgttaggcgtgtcccacccacccgccgcctcccatgggcacgtcgggaacaccggagccgccaacttggagacttcctggtctgtgaagagccgctgacgcccgcaggaaaccggggctgggccttgtgtgccagtcggggttttgtgcttggtcgtttctccgcttggatttgcttatttattgcattgctggtagagactcccaagcctgtccaccctgcaaagactcctcgggcagcatgcgggtcccgcacactgcacccatttcctggatgtcccctgcaggcgcgggaggccatccgggcctgctggctgcggccccctctcagccaggcctggctcagcccactgcgtgggaggtcaccggccactccccgaggagctgggatccccgggatgcaggcccacagtgcggggctgcacccatgatgcggagctggcctccaaccctgcgggccgcgccaggcaccaactcagtgtttgtcagtgtttgtttttccaagaaatggttcaaattgctgctcagatttttaaatttactgtagctgccagtgtacacgtgtggaccccattttatttttacaccaatttggtgaaaatgctgctttcctcagcctccccacaattaaactgcacatggtctctaa

SEQ ID NO: 4844 - protein, 275 aa, Homo sapien [sequence omitted]

SEQ ID NO: 4845 - DNA, 6478 bp, Homo sapien; identical to SEQ ID NO: 154

SEQ ID NO: 4846 - protein, 289 aa, Homo sapien; identical to SEQ ID NO: 151

SEQ ID NO: 4847 - DNA, 3768 bp, Homo sapien
gagaggctggcggcagtggtggctctcccggctgggttgtcagtcagtgagaggagggggaagatggctcaccgggacccgttctgctaggaagaaggggagcaggtggtgctgctactcgggaggaagcagagcagcctccgtcgctgtcgctgagagcctcacgagtcgaggtcctgcaggtggagctccggcagccgccctggttgaaggtttagaacagatgtggaaaaatgtttacttcagagaaaggggttgtggaggaatggttgtcagagtttaagacattaccagaaacatctttaccaaattatgccacaaatttgaaagacaagagttctttagtttcatctctctataaagttatccaggagccacaaagtgagttgctagaacctgtctgtcaccagctctttgaattctatcgcagtggagaggagcagttgcttcaatttacgctgcaatttctcccagaactaatttggtgctaccttgcagtctcagccagcagaaatgtgcatagcagtggatgcattgaagctcttcttctaggggtttacaatttggaaatagttgacaaacagggacataccaaagtattgagttttacgattccatctttatccaaaccatctgtataccatgaaccttccagcattgggtccatggctctgactgagagtgcactatcccagcatggtttgtcaaaagtggtatacagtggacctcatcctcaaagggagatgctgacagcacagaatcggtttgaagtgttgacattccttttgttgtgttacaatgctgccttaacttacatgcccagtgtttctcttcagtcactgtgtcaaatttgttcaagaatctgtgtttgtggatatcctcgacaacatgtaagaaaatataaaggtataagtagcaggataccagtttcttcaggattcatggtgcaaatgttaacagggatttattttgccttttataatggagaatgggatctagctcaaaaagcactggatgatattatatacagagcccagctagaattatatccagagccattgctggttgctaatgcaataaaggcttcattgcctcatggtcccatgaaatctaataaggaaggtacaaggtgtattcaagttgaaatcacaccaacttcctctcgaatatcaagaaatgcagtaaccagcatgtcaataaggggtcataggtggaaaagacatggaaatacagaattaacaggtcaagaagaactgatggagatatctgaagttgacgagggattttattccagggctgcgtctagtaccagccagtcgggtttatcaaacagtagtcacaattgtagtaacaagccaagtataggaaagaaccacagacggtcaggaggaagcaaaactggaggaaaagaaaaagaaactacaggggaatcttgcaaagatcactttgctcgaaaacaaactcagagagcccaaagtgagaatcttgagcttctctctttgaagagacttactttaacaaccagccaatccctacctaagcctagtagccatggtttggctaagaccgcagcgactgtatttagtaaatcctttgaacaagtcagtggtgtcacagtcccacataacccgtcatctgctgttggttgtggggctgggacagatgccaataggttttccgcttgtagtctccaagaagaaaagcttatttacgtttcagaaagaactgaacttccaatgaagcatcaatcaggtcagcagagacctcctagtattagcattactctgtccacagattaattagtaacatatttttctcccataacctagtgaacctggaaatacaactttgcttctttatgaaagtaccctgggtctttcatccgtattcctgacaggagccctgatgtcttaaattctgaaggctcccctgactttatgaagggaagattgtctaggttgcagtaagttgaaatatggttttgttatttcttgattaagattttttccccttggtttgagtcttttttttccctcctcttatttgttattgttgccctaagattgtcagtgacaataaattttgacaggttgtctaatcaagttggttatgtctcatgtgaggttgtaaggtggtttttcttgttttggtttggtttggttttttaatagctcctattttgatggctgtgtgtttggccttcagagtcaaagggagtctgcatgtatgggaactgttttatagagaatggggcagaggcacaactccaggaattctctagctcctggtcaggaagccaatctgaaaacaggcatgtggaaacacaaaaatgatgtgtatgaaaagcacctgatgaaaatatttgtaagcagatcatctttatgattagaacaatttgctcaaagccctggaaaatgcctggtaacccagtgcctagaatattatatgattccaggggatggctagaggcatttctgttgttatctctgaaacatttttatatcaaaaatcagattgctggtaggtgtgttgttttgaagtgttttatctggatttagcatgtgaagatccctttcaattattaaggtataataggctgtaaagctgatttaccctactgctggactttggaaatcctagttagtttggactcctataattcagagcatacgtcattggaagacttcctggaaatcagtgtaaatcttgcaacatagctctcaagataccactgtataatatgtaattgtttgtctgcaaatgcatttttcatctataaaatgtcatgaaagaaaataaaggtagtgaaatatggacaaaggacatttatatattaactaaagttgtttatgtttgtgttcttaaatttaaaacacgaagaaaaagaaatgtctttcttgttagtgaacaggcctgttttaaatatcttagtatgatatcaaaagaataatcaatttagttacctcccaactaaaaagtaaaaatgaaaaagacgacatggcagaagttgaaacaaacttgtatgtatctgtatgtgacctctagatggaaataaaagtttgatgtttgctagccgtggtccttttggctatggttgcggttcccctgtaaagcaaatgtacttaagtcatcattcagagtgagagagagaaagcacggctgaggctgagtcagttgaccgttgaggaagacctaaggagctgtccagttcttggctctttttcactgtgactgcacagcggtttccttcttcatagtcccttgctgtagtcaccaagagagcatgctagtgttttcctcttgttcctgcttatgcagagctcagatatatgaaaaatttgtatgctttgaaggctgccaaagcatttatactctggacatagttttaactgcaactgctttggctaccagtttaaaccgagttcttcaaaaagcatgaactcgttttcattcattagccctgtttacaatgtggattttgacataaatgaatttgattttcttttagctccagtaacagaatggaataagatctattgccataaattgtagttaagaactgtaaggcaatcgggcagtgaaacttgatattgtattaacttaataggaaccctgtgtacaatttaaaatatttgtaaaatatcactgtgaatttacagatgtctttttgtcattctttaacaatgaatttcccctgtgcatagttattaatagtattggtattattaaaaactaatttggcattttaaaaaaaaaaaaaaaaaaaaa

SEQ ID NO: 4848 - protein, 521 aa, Homo sapien
MFTSEKGVVEEWLSEFKTLPETSLPNYATNLKDKSSLVSSLYKVIQEPQSELLEPVCHQLFEFYRSGEEQLLQFTLQFLPELIWCYLAVSASRNVHSSGCIEALLLGVYNLEIVDKQGHTKVLSFTIPSLSKPSVYHEPSSIGSMALTESALSQHGLSKVVYSGPHPQREMLTAQNRFEVLTFLLLCYNAALTYMPSVSLQSLCQICSRICVCGYPRQHVRKYKGISSRIPVSSGFMVQMLTGIYFAFYNGEWDLAQKALDDIIYRAQLELYPEPLLVANAIKASLPHGPMKSNKEGTRCIQVEITPTSSRISRNAVTSMSIRGHRWKRHGNTELTGQEELMEISEVDEGFYSRAASSTSQSGLSNSSHNCSNKPSIGKNHRRSGGSKTGGKEKETTGESCKDHFARKQTQRAQSENLELLSLKRLTLTTSQSLPKPSSHGLAKTAATVFSKSFEQVSGVTVPHNPSSAVGCGAGTDANRFSACSLQEEKLIYVSERTELPMKHQSGQQRPPSISITLSTD

SEQ ID NO: 4849 - DNA, 348 bp, Homo sapien
  Unsure 34-35: Unknown base
gagggatgatttcagagcactttgagatttaccnncctttagaatcccttacatggtcgatataaaagggaagcaattctgaatcctattactagcctgcaccatgatcccaaaaacctatacaggaagtaggagcatcacaacaaccaaaatctagccagaatggggaaaatagattagatatcttattttgttcccaagatccactgcatagtcccagagctaaagtgagagcctttattcctggttacattcacttccctatgaatctctccaaaaaacctacaatagtgtgacagctagtagctatgcacagtctatcagcaatggctcagtgaacctctattc

SEQ ID NO: 4850 - protein, 2 aa, Homo sapien
  Unsure 34-35: Unknown amino acid
EG

SEQ ID NO: 4851 - DNA, 2881 bp, Homo sapien; identical to SEQ ID NO: 552

SEQ ID NO: 4852 - protein, 592 aa, Homo sapien; identical to SEQ ID NO: 553

SEQ ID NO: 4853 - DNA, 1537 bp, Homo sapien
gaggaagaagaatctgtatatctgtatatattggctagcaaatgtgccctgctctctcccctcttaaaaatagcagcaacccatctttgcaaagaagcttgcctatagagcaggcactctgtgaatggactgtgcttttacgaccctacagggtatcaagatactgtgcagctcgccaacaaggattaattgcaaggactggtagatcgaatttactgaagacttggagcttgcttctgagaacaaacgcaaaaggacagtaaactgtggaccttgaagttagcagcgtgggcttcctctaatattacaccgtaaaaggcattgatcaccataagaaggaacatttgtgaaggtactccagtgccagaaagaggcacaaagcagacattcgtagagaaacatggatgaaacaggaaatctgacagtatcttctgccacatgccatgacactattgatgacttccgcaatcaagtgtattccaccttgtactctatgatctctgttgtaggcttctttggcaatggctttgtgctctatgtcctcataaaaacctatcacaagaagtcagccttccaagtatacatgattaatttagcagtagcagatctactttgtgtgtgcacactgcctctccgtgtggtctattatgttcacaaaggcatttggctctttggtgacttcttgtgccgcctcagcacctatgctttgtatgtcaacctctattgtagcatcttctttatgacagccatgagctttttccggtgcattgcaattgtttttccagtccagaacattaatttggttacacagaaaaaagccaggtttgtgtgtgtaggtatttggatttttgtgattttgaccagttctccatttctaatggccaaaccacaaaaagatgagaaaaataataccaagtgctttgagcccccacaagacaatcaaactaaaaatcatgttttggtcttgcattatgtgtcattgtttgttggctttatcatcccttttgttattataattgtctgttacacaatgatcattttgaccttactaaaaaaatcaatgaaaaaaaatctgtcaagtcataaaaaggctataggaatgatcatggtcgtgaccgctgcctttttagtcagtttcatgccatatcatattcaacgtaccattcaccttcattttttacacaatgaaactaaaccctgtgattctgtccttagaatgcagaagtccgtggtcataaccttgtctctggctgcatccaattgttgctttgaccctctcctatatttcttttctgggggtaactttaggaaaaggctgtctacattcagaaagcattctttgtccagcgtgacttatgtacccagaaagaaggcctctttgccagaaaaaggagaagaaatatgtaaagtatagtttaaacccatttccagtccaaaccaatgaaaatagtttcccaaataagtattttgtcaaatcatttacaaaaaaaataaaaattttacttaatattttaaaaaaaaaaaaaaaaaaaaaaaa

SEQ ID NO: 4854 - protein, 337 aa, Homo sapien
MDETGNLTVSSATCHDTIDDFRNQVYSTLYSMISVVGFFGNGFVLYVLIKTYHKKSAFQVYMINLAVADLLCVCTLPLRVVYYVHKGIWLFGDFLCRLSTYALYVNLYCSIFFMTAMSFFRCIAIVFPVQNINLVTQKKARFVCVGIWIFVILTSSPFLMAKPQKDEKNNTKCFEPPQDNQTKNHVLVLHYVSLFVGFIIPFVIIIVCYTMIILTLLKKSMKKNLSSHKKAIGMIMVVTAAFLVSFMPYHIQRTIHLHFLHNETKPCDSVLRMQKSVVITLSLAASNCCFDPLLYFFSGGNFRKRLSTFRKHSLSSVTYVPRKKASLPEKGEEICKV

SEQ ID NO: 4855 - DNA, 1535 bp, Homo sapien
gcgcgttcgggagcttcggccctgcgtaggaggcgggtgcaggtgtgggtgctgagccgcccgccgcctggagggggagacagcttcaggacacgcaggccgcagcgagggcccgggcccgggggatcccaggccatggatgctccccactccaaagcagccctggacagcattaacgagctgcccgagaacatcctgctggagctgttcacgcacgtgcccgcccgccagctgctgctgaactgccgcctggtctgcagcctctggcgggacctcatcgacctcatgaccctctggaaacgcaagtgcctgcgagagggcttcatcaccaaggactgggaccagcccgtggccgactggaaaatcttctacttcctacggagcctgcataggaacctcctgcgcaacccgtgtgctgaagaggatatgtttgcatggcaaattgatttcaatggtggggaccgctggaaggtggagagcctccctggagcccacgggacagattttcctgaccccaaagtcaagaagtattttgtcacatcctacgaaatgtgcctcaagtcccagctggtggaccttgtagccgagggctactgggaggagctactagacacattccggccggacatcgtggttaaggactggtttgctgccagagccgactgtggctgcacctaccaactcaaagtgcagctggcctcggctgactacttcgtgttggcctccttcgagcccccacctgtgaccatccaacagtggaacaatgccacatggacagaggtctcctacaccttctcagactacccccggggtgtccgctacatcctcttccagcatgggggcagggacacccagtactgggcaggctggtatgggccccgagtcaccaacagcagcattgtcgtcagccccaagatgaccaggaaccaggcctcctccgaggctcagcctgggcagaagcatggacaggaggaggctgcccaatcgccctaccgagctgttgtccagattttctgacagctgtccatcctgtgtctgggtcagccagaggttcctccaggcaggagctgagcatggggtgggcagtgaggtccctgtaccagcgactcctgccccggttcaaccctaccagcttgtggtaacttactgtcacatagctctgacgttttgttgtaataaatgttttcaggccgggcactgtggctcacgcctgtaatcccagcactttgggagaccgaggcaggtggatcacgaggtcaggagacagagaccatcctggccaacacggtgaaaccctgtctctactaaaaatacaaaaaattagccgggcgtggtggcgggcgcctgtagtcccagctactcgggaggctgatgcagaagaatggcgtgaacccggaaggcagagcttgcagtgagccgagatcacgccactgcactccagcctgggtgacagagcgagactctggctcataaaataataataataataaataaataaaaaataaatggttttcagtaaaaaaaaaaaaaaaaaa

SEQ ID NO: 4856 - protein, 293 aa, Homo sapien
MDAPHSKAALDSINELPENILLELFTHVPARQLLLNCRLVCSLWRDLIDLMTLWKRKCLREGFITKDWDQPVADWKIFYFLRSLHRNLLRNPCAEEDMFAWQIDFNGGDRWKVESLPGAHGTDFPDPKVKKYFVTSYEMCLKSQLVDLVAEGYWEELLDTFRPDIVVKDWFAARADCGCTYQLKVQLASADYFVLASFEPPPVTIQQWNNATWTEVSYTFSDYPRGVRYILFQHGGRDTQYWAGWYGPRVTNSSIVVSPKMTRNQASSEAQPGQKHGQEEAAQSPYRAVVQIF

SEQ ID NO: 4857 - DNA, 2756 bp, Homo sapien
atgcagttaggggagcagctcttggtgagctcagtgaacctgcctggcgcgcacttctacccgctggagagtgcgcgaggcggcagcggcgggagcgctggccacctccccagcgcggccccctctcctcagaagttggacttagacaaagcgtccaagaagttttccggcagtctctcctgcgaggcggtgagcggggagcccgcagccgccagcgcaggggcccccgcggccatgcttagtgacaccgacgccggggacgcatttgccagcgctgcggcagtggccaagccggggcccccggacggccgcaagggctccccctgcggggaggaggagctgccctccgccgctgcagccgccgccgccgccgccgccgcggctgcggccactgcgcgctactccatggacagcctgagctccgagcggtactacctccagtcccccggtcctcaggggtcggagctggctgcgccctgctcactcttcccgtaccaggcggcggctggggcgccccacggacctgtgtacccggctcctaacggggcgcgctacccctacggctccatgctgccccccggcggcttccccgcggctgtgtgcccacccgggagggcgcagttcggcccaggagccggtgcgggcagtggcgcgggcggtagcagcggcgggggcggcggcccgggcacctatcagtacagccagggggctccgctctacgggccgtaccctggagccgcagcggcgggatcttgcggaggactggggggcctgggggttccaggttctggcttccgtgcccacgtctacctgtgcaaccggcctctgtggctcaaattccaccgccaccaaactgagatgatcattacgaaacagggcaggcgcatgtttcctttcttgagcttcaacataaacggactcaatcccactgcccactacaatgtgttcgtagaggtggtgctggcggaccccaaccactggcgcttccaggggggcaaatgggtgacctgtggcaaagccgacaataacatgcagggcaacaaaatgtatgttcacccagagtctcctaatactggttcccactggatgagacaggagatttcattcgggaaattaaaactcaccaataacaaaggcgcaaataacaacaacacccagatgatagtcttacaatccttacacaaataccaaccccgactgcatattgttgaagttacagaggatggcgtggaggacttgaatgagccctcaaagacccagacttttaccttctcagaaacgcaattcattgcagtgactgcctaccaaaacaccgatattactcaactaaagattgatcataacccctttgcaaaaggcttcagagacaactatgattcatcccatcagattgtccctggaggtcggtacggcgttcaatccttcttcccggagccctttgtcaacactttacctcaagcccgctattataatggcgagagaaccgtgccacagaccaacggcctcctttcaccccaacagagcgaagaggtggccaaccctccccagcggtggcttgtcacgcctgtccagcaacctgggaccaacaaactagacatcagttcctatgaatctgaatatacttctagcacattgctcccatatggcattaaatccttgccccttcagacatcccatgccctggggtattacccagacccaacctttcctgcaatggcagggtggggaggtcgaggttcttaccagaggaagatggcagctggactaccatggacctccagaacaagccccactgtgttctctgaagatcagctctccaaggagaaagtgaaagaggaaattggctcttcttggatagagacacccccttccatcaaatctctagattccaatgattcaggagtatacaccagtgcttgtaagcgaaggcggctgtctcctagcaactccagtaatgaaaattcaccctccataaagtgtgaggacattaatgctgaagagtatagtaaagacacctcaaaaggcatgggagggtattatgctttttacacaactccctaaagagttattttaacctcaaaaattagctaactttttgcagatggacttggtggtgttttttgttgtcttctttgcctaggttgccaaaaagatgtttgccttccaccttgatgcatcctgttttgtgcaattctctaaaagaaggtgccaaagctttttgattgctgcaggtaactgaaacaaacctagcatttttaaaaaataagattaatggaagactttaaggtattttaaaattcgaagggtatccaaggttctgtatttatttattggggagacactaacccttcaaagaagcaggctgtgaacattgggtgcccagtgctatcagatgagttaaaacctttgattctcatttctatttgtaaattcttaagcaaatagaagccgagtgttaaggtgttttgcttctgaaagagggctgtgccttccgtttcagaaggagacattttgctgttacattctgccaggggcaaaagatactaggcccaggagtcaagaaaagcttttgtgaaagtgatagtttcacctgactttgattccttaacccccggcttttggaacaagccatgtttgccctagtccaggattgcctcacttgagacttgctaggcctctgctgtgtgctggggtggccagtgggactcaggagagagcaagctaaggagtcaccaaaaaaaaaaaaaaaaaaaaaa

SEQ ID NO: 4858 - protein, 686 aa, Homo sapien
MQLGEQLLVSSVNLPGAHFYPLESARGGSGGSAGHLPSAAPSPQKLDLDKASKKFSGSLSCEAVSGEPAAASAGAPAAMLSDTDAGDAFASAAAVAKPGPPDGRKGSPCGEEELPSAAAAAAAAAAAAAATARYSMDSLSSERYYLQSPGPQGSELAAPCSLFPYQAAAGAPHGPVYPAPNGARYPYGSMLPPGGFPAAVCPPGRAQFGPGAGAGSGAGGSSGGGGGPGTYQYSQGAPLYGPYPGAAAAGSCGGLGGLGVPGSGFRAHVYLCNRPLWLKFHRHQTEMIITKQGRRMFPFLSFNINGLNPTAHYNVFVEVVLADPNHWRFQGGKWVTCGKADNNMQGNKMYVHPESPNTGSHWMRQEISFGKLKLTNNKGANNNNTQMIVLQSLHKYQPRLHIVEVTEDGVEDLNEPSKTQTFTFSETQFIAVTAYQNTDITQLKIDHNPFAKGFRDNYDSSHQIVPGGRYGVQSFFPEPFVNTLPQARYYNGERTVPQTNGLLSPQQSEEVANPPQRWLVTPVQQPGTNKLDISSYESEYTSSTLLPYGIKSLPLQTSHALGYYPDPTFPAMAGWGGRGSYQRKMAAGLPWTSRTSPTVFSEDQLSKEKVKEEIGSSWIETPPSIKSLDSNDSGVYTSACKRRRLSPSNSSNENSPSIKCEDINAEEYSKDTSKGMGGYYAFYTTP

SEQ ID NO: 4859 - DNA, 1887 bp, Homo sapien
tttccaaaatgaagcacccaaaagggtagtagaacgaacccttctggaacagtttgcagataaaaatcttagctatgatgaaagatcaatcagcattatgaaggtggctcaagcgaaactgaaggaaattggtccagatgacatgaatatggaagagtacaagaagtggcatgaagattatagtttgttccgaaaagtgtctgtgtatctcctaacaggcctagaactctatcaaaaaggaaagtaccaagaggcactttcctacctggtatatgcctaccagagcaatgctgccctgctgatgaaggggccccgccggggggtcaaagaatccgtgattgctttataccgaagaaaatgccttctggagctgaatgccaaagcagcttctctttttgaaacaaatgatgatcactccgtaactgagggcattaatgtgatgaatgaactgatcatcccctgcattcaccttatcattaataatgacatttccaaggatgatctggatgccattgaggtcatgagaaaccattggtgctcttaccttgggcaagatattgcagaaaatctgcagctgtgcctaggggagtttctacccagacttctagatccttctgcagaaatcatcgtcttgaaagagcctccaactattcgacccaattctccctatgacctatgtagccgatttgcagctgtcatggagtcaattcagggagtttcaactgtgacagtgaaataagctcccacatgttcaaggcccattctggttcctggctgcctgcctcttgcacagaagttcgttgtcatagtgctcaccttgggaaaaggattaggtgggcacataagattccgatcagaccccaaccatgctgcatgtgtaaagaaggattgaaaataaaattgcactttttaggtacaaaatcataaaagctgtttcactagaaaaggcagaaagcagtgtattaaggtgttgaattacgccagaagacctgaaatgccttgtacctacaacaatgcttaggcttttctaagcctcttgccacttttaaaattatccttcaggcataaatatttttgacagcagaatagaagaatgattcatgagaacctgaaccagatgaacagctactagttattttatcaaatacagatgacatttaaaaattcttaactacaagagattagaaatataaccttgcctggctcttgccaggagataacaaaatgggttgctgatgaactgcacccttttacatgtgggtagaatataagctcacatggcagtgagatgttgaaaagtcaaaagagacctgtctctctcctttcttttctatctttaaaccagaaaacctcatactcagtcctcagtgaaagaaagtaaagtattaaggactttagacagaagagcattgtgtaacttgactgaaggtcatccattaatagttattaggcatttaggtaaaattttctaatacctaaaaattgtcaaaaacagtcaatagggctactgctggcccaaagaccatttaggtccacctcctcttttttgctcttttttttttttctgtgacagtttcactgtgtcgcccaggctggcgttcagtggtgcaatctcagctcactgcaaactctgtctcctgggctcaagtgattctcgtgcctcagcctcccgaatagctggaattacgggcatgcaccaccacacctggctaatttttgtatttttaatagagatggggtttcaccatattggccaggctgatctctaactcctggcctcaagtgatctatctgcctccctcagcctcccaaagtctgggattgcagacaagtcatcgtacccggccttcttttttgcccttaaaagtaagggatgtgggtttgtac

SEQ ID NO: 4860 - protein, 213 aa, Homo sapien
MKVAQAKLKEIGPDDMNMEEYKKWHEDYSLFRKVSVYLLTGLELYQKGKYQEALSYLVYAYQSNAALLMKGPRRGVKESVIALYRRKCLLELNAKAASLFETNDDHSVTEGINVMNELIIPCIHLIINNDISKDDLDAIEVMRNHWCSYLGQDIAENLQLCLGEFLPRLLDPSAEIIVLKEPPTIRPNSPYDLCSRFAAVMESIQGVSTVTVK

SEQ ID NO: 4861 - DNA, 2932 bp, Homo sapien
  Unsure 1350-1408, 2345-2512: Unknown base
atagcgttaccataggaaactgttccaaactgagttagctttaattataattattttattcataaatggtgatagtccccagatctgtacacctttatcactccctgccgtagatatactttaggttagtatttctacattcgtggcaagcattttggtaacaccagtggttttcattgtgacttttatcactatcactaagaatgcaatttaagttgccttttggcatcatagatcatagaaactttctctctgaatcatacccatgtgtgaattttcattttatatgatagtgtagcatattagaagcatattttaaaacagagcctttgagaaattgaaaaacaattatttgaagttcaccatagtaccttaaaggaacaaagagaatgtgggataggagtaacttgaattcgtgtttagtatggtgggctttgaatttttttcactatcaaaaatagtgcttttgtttagttaaaaattgtagtttttctttttttgtgtgtccaaactaacataaaaggagtggtcaaagaaggaaagaagaaaaatgagggaggatgtccgaaactgtatggcattttactccttctgaaagagaaatactgtacttgaatttttgagctatgcagacttatacctagattgttgtgtttctttgattcttaggagaaaagctttcttcctaataattcttgagaactttatattttgtttgaaaacagtttctatgtacataaaaagggtatttacccatttgtgagcacttaaaacactccacagagtcagacagtgggaaaggtcaccctttttttattcggcaggtatcaagttagaatgtatggaattgtgaataaaattatattttattttatgaaaatatttttatataataaaatttaaaaggctggtaagctaaaaaaatagtcttctttaatcctagtgtgttttccccaatttagtcttttctaaaatttatctgttttagagtagaaaatattatatcctgagaatcacagaatcatctaaatatgtcttattcaactgaagtgattgtaagtctttattcttgtgctttggttaaatgaatgataatttagttgatagtgaaagttaatgtgtttttatatttttagagtgagggaaaaatactaaacttttgagagttttgttgtcgttgctggttttttaccatgtggtactaaattccactttgatacaaaatttaaattttgtaacttctcaaaatcacttaagattcttcagttttacctgtgcttcttgacatcgctcctataatgtatgttagttaactctgcatatggcaaatcttgtcttgaattatatcannnnnnnnnnnnnnnnnnnnnnnnnnnnnnnnnnnnnnnnnnnnnnnnnnnnnnnnnnnagtgtggggggtattgttatgagtaaaactttatcaaaacttggcctgaaaaagagataactcatgatccattgctatctttattactcaaaggctgttcattcccataataccagatccataatagttgtagtttttttgatgttgttgcccttaccttaattatttgtagttttagtaggccttgcctcagtttttcccacagaattccataattttaatgttgaactaacccatctatataggacttctaaaaactacgtcaggaatgtaaggttaaatgagaggtagaacttgtagtgtaataggtataatggtagctttcaaagttttatcttctcaaaacattgtcttagccagtgtatttctgagaactcagactgaagcacagaagtcacagtatgcttcttttatttaagcacacagattcatgacacaagtacttgttgaacaagtgttctcattgcagagagatctacttgaatataaaagggtcatcatactagattattaaaaagaattggaaatcttgagttgtggaagaaatgtttatgctttggagatctaaaaaagttatgaatgtaggaattagataagtccagtttgttctgttaatataaaatggttagatatattaaactgcaagtagtatcagcttcaccataagcttgggccttcctccatcttgttttatttaagtctctttaaatgaaattttgttgtcattgtttcagcattcatgaactttcttactatcacaggttctactttaattttccttgccatatgtgtttccattttgtgggacattagccaccacaggaacacaagagttgtcagaagactcctgggtgtacagagcaaatcaagctgcatcagtattataggataccaaacagaatcctttctattaggaaataagaaatcagttaagtgnnnnnnnnnnnnnnnnnnnnnnnnnnnnnnnnnnnnnnnnnnnnnnnnnnnnnnnnnnnnnnnnnnnnnnnnnnnnnnnnnnnnnnnnnnnnnnnnnnnnnnnnnnnnnnnnnnnnnnnnnnnnnnnnnnnnnnnnnnnnnnnnnnnnnnnnnnnnnnnnnnnnnnnncagtccacctttctaggccttggttccttgcctgaaaaatgaaagaggcgctggctttccacagtgtcatgctttggcactttagctatggttttctttctgtgtgtgtgtaagccactgcttataataaaaccaacaataccctcagactgaaagggcggaagttattatctgcatctttatcaaccccaagccccacttcctccctgacctccccatgccctccccagcctctcccagcacaagtggggcaaagccagcatgcaagcagaccccaccaccacagcccacctccgtcctcacatacgtgcaggctggctcgggagtccagtgagcagagcattggacttggctggccagagggtctctgagggcaagagacatggccaaccaagggcaaggagtgaccctgtggagggt

SEQ ID NO: 4862 - protein, 126 aa, Homo sapien
  unsure 66-122: unknown amino acid
  Unsure 1350-1408, 2345-2512: Unknown amino acid
MNFLTITGSTLIFLAICVSILWDISHHRNTRVVRRLLGVQSKSSCISIIGYQTESFLLGNKKSVKXXXXXXXXXXXXXXXXXXXXXXXXXXXXXXXXXXXXXXXXXXXXXXXXXXXXXXXXXSPPF

SEQ ID NO: 4863 - DNA, 7981 bp, Homo sapien
tggaaacaaagaagtattttcctgcagaggaataaaattggcagtggattggtttttggaaagaggccacaaagacattacagtttttgttcctgcttggaggaaagagcaatcccgacctgatgctctcattacagatcaggaaattttacgtaaattagagaaggagaaaatcctggtgttcacgccatcccggcgagtccaggggaggagagtggtgtgctatgacgacaggttcatcgtgaagctggcttttgagtcggacggtatcattgtgtccaatgataactacagggacttggctaatgagaagccagaatggaagaagttcatagatgaacgattattaatgtattcatttgtcaatgacaagttcatgccccctgatgaccctcttggcagacatggccccagtctggataattttctgaggaagaaacctattgttcctgaacacaaaaagcagccttgtccatatggaaagaagtgtacctatggacacaagtgcaaatattaccatcccgaaaggggcagtcagccacagcggtcagtggctgatgaactccgtgccatgtctagaaatacggcagccaaaactgcaaacgaaggaggactggtgaaaagcaacagtgttccttgtagcaccaaggctgatagcacttctgatgtcaaacgaggtgctccaaagaggcaatcagatccaagcataaggacacaagtctaccaagacctagaagaaaagcttcccaccaaaaacaaattggaaaccaggtctgtaccttccttagttagcatcccagctacttctactgcaaaaccccaaagcactacatctttaagcaatggccttccatctggagttcatttcccacctcaggatcaaagaccacagggacaatatccttcaatgatgatggcaaccaaaaatcatggaacgccaatgccttatgaacagtatccaaaatgtgactcacctgtcgacatcggatattattccatgttgaatgcatactcaaatctgagtctctcaggcccacgaagccctgaaaggcgtttctccttagacacagattatagaataagttccgtagcttctgactgcagcagtgaagggagcatgagctgtgggagcagtgactcctacgtgggttacaatgaccggtcctatgtcagctcccccgacccacagctagaggagaatttgaagtgtcaacacatgcaccctcacagccgccttaatcctcaaccgttcctgcagaatttccacgaccccttaaccagagggcaaagttacagtcacgaagaaccaaagttccatcacaagcctcctcttccgcacctggctctgcacctgccgcactccgctgtgggcgcccggtccagctgtcctggcgactacccctctcctccaagttcagcacactctaaggcaccacacctagggaggtccttggtggccacgagaatagacagcatctctgactctcgactttatgacagttctccttcacgacaaagaaagccttattcccgccaggaaggcctgggaagctgggagaggccaggctatgggatcgacgcctatgggtaccggcagacttattccttgcccgataactccacacagccgtgttatgagcagttcaccttccagagcctccctgagcaacaggagccagcctggcggatcccatactgtggaatgccgcaagatcccccgaggtatcaagacaaccgagaaaagatttatatcaatttgtgcaacatcttcccccctgaccttgtgagaattgtcatgaaaaggaatcctcacatgacagacgcccagcagctcgccgcagccattttagtggagaaatcccagctgggttattgaaagatgatgcatctttgtggtgtttagtagttttttgttcagctcaaatgctgagggaggtttgctacaatagcacatgtgatctccttctcagcaaggaggttatatagtatccatttatgtgaaatactgtatcatggaatctgtatgtatagccccacatggtggaagtatcacgggattgctttacatttaaacttttttttttttaacatttcctttttaaagctatatccttggctggaaatttttccagtttgatttaatagatgtatctgtgatctttgatattaatctttggtgcatcaggggtttatatgcagcactttttatccttgttttgtgttttattaacttggtgtttgtctatcaattgcaagcaattacaataccttcagaatgtgggacatttgactagacctagcaaactgttttttcgagccaagcttagttagactcttttacagctttttaagttatttttatttggggaaagtgggcttctttgtgctataatcattatttatagaaacaaagttatactacagcactgactttatattttaaacagaatgtaagttaccagttttatgttgaaatgtgttacagtatatatatattagaatgatttacaatatggcacttttcgatgtgttatttttgtttggatttttttttctgttaagaaattagttaatttaatatggtcaatttaaaagaaagcagatgcaatcaatggaaaaatgtttccattttttaaaaatgaataaggcaaaagctgtaactgttacaggttagagctttgttatccagctatgatgtgcttcttgacagtagaagtggaattgaattcctagatttccattaacctgtatttttaatatgtctgtctttttgttttggggcacaacaatactggataaaataaccctttcacagcacttgcctgtttttaatgaatctaattattcacaatgcaacttttatatttaacatactctttagctttcctgctatttatcaaggctggcctgaggtgggtttatgtgttgaggttatgcaacatttcttgatactgcactatagagaaatggtgatggaggagttgtaaatggtaacttaaaatttttgtaagatattgtatattttccattttcctgaaggtagttttcttgggggggcctgttatattattaaggccagactcttgccacaaatagtgtagttttagatacagactaaggtctgttctagtattagtaagggatatttctggtttcaaagtcatgggttttgctagtggtgaatacatttctgcggagtagaagatagattttgcagtcagtggcagacagttgtgtgattgacatcacttgactgttgcgtccaggttttgaattgtacttcacgtaacagatgcattcagatctttttctgtagtctgcttagatgccctggctattctgattatcctacatgctacagtttgaagtgaagccctgaaaaaccagaaagtaccttttactgttgatacaaattgtatctttttaactataagaactattttgatttgtagatctagttaaaacacaagtatgtaactatgattagacttttgggcaacattttatcccttatttaaatacaaatttttaaagtaaaattgaggtctagaatagattagaaaataaaaataacaatttagataaatagaaatgtctgtcttagttttatataatatattaaaacacagtaaataaatttattggcattttctttctcctaaaacttacctagtgtgaacttaaaataaaggtaaaatgctgcctgaaaataatgtccaagcacctttgactaggataacattttcactacttgtgtgacactgtgtgttgcacgaagtaggatttgggtatacagtaaatgcttctaaaaggcattgtgcatattgacataaccaataatctgaaccgtgttcagcaaacttaattcaggaaagtggtattctacacaattattgctgttgtgtttgaaatgagtgtggcactcatctgtatccagaaataatatgggtgaggccacacaacccattctgagtggtgtctgtctgaaagcaaccctactcgcatgtgaaattgttctccttgatttggtcactataaagcaagtttaaatgtagaggctaactcagtgccaaaaacagggttacaaatgtgtagtatcttttattttagtcatattctaagacttctttttagtatgaaatcacttttaaattatacatgtaggttttgcttccattttcttcattttaccattttaattatttgaacattcgccaaattttacatttatttaaatgagatcttaggtgagatgtgtgtgacactttgaatttgaccttcttgtgttattagctgactatttgtcattgcctcatggattttaaattatgggaaaatagtgtagccagctgccacctctactgaagtgagtagctctgaactacccacactaaatccttcagtgtaattaattatgagtttaaaaatagcagttttcttatgtgaagaggacagtttgtcccctttttttgaagcaccgatgttgcgttcagagctgtagaatgagataattggcagactttaggtacagcaaattcttacttatctaaagcaataagtcaaaggagtccatcattaaattaaatccatagctgatcacaagccttcattttagccaaaactttctctctaaccaaatcttttaccagacttgctaataaataaccagagagatgtgttaataagtgaagttgccagaaatggtcaactgatcggaaaaaaaaggattcagactggagtattttgcccctgaataattgacagttgactgtgctttacacagtaactagccagtctgttgtctctgtgtcttagtccagagggaatagtacccaattggccaaatactggcccttagtatctcctcctttcttgcatgggatacagacgttttcagtcttgtttttatgatctctctctatatcctgataagagtttgtcattgacttacacatttggaagaaatgcacaccagtgtaatatatttgatactggtggaaacttgaactttgtgtttttatgaaaattcatttatgagaatatgtaatataactgaagagtattttatgtatatctatatacacaaatatgtatttgttatgaggtattaaaaacaggggttggggggagtgcttctgatggctaacttttctctaattaaactatgtttctttgagttgtgaacgaccgagtctggggtctggacggccaatgataagatttagaaccacttggatggaaagcagttcttcactggttttattcttggtattttcaaagaattattttgatatttttaatagaatgtgtaattttaaaatacacaaaaaacttaaagtagtattgattatacaaataattatttaacatgtcttatggatgtatctatatgtatatagacagtaatatatttataaaacaaatatactttgcttatgttatagctcttagtttgtgacaggtgggaggatggctctgggtgtgtgtgtgtgtgtgtgtgtgtgtgtgtgtgtgtgtgtgtgttttgaaaactctcaagctgttttccctctgatttacaatggtatttactttaaagtatgtttggttttcattattctttttgctctccaacttccttattcaagataaaataagacatacagttttctggccattctgttggtgtgtggtgcacccattttattgtcatctaactcctggagaattcccacgtgacctgaaatcaaacagattctggctggacatatgcttatgttccaaatatattaaagatgttaattcagctaacagttaagtttccaaggtatacaccaacaaataaaatgaggtattaaaaagagatggattacacacatgcattagaataagagaaaacagtagtgttaataaaagtaaagaaacatacactatcttagccccctagggcaggggttgactttttctgtaaaggatcagatagtaaataatacaggaatcatatggacttcaaatgccattgtaaaaactactcagctctgcctttagagcataagaacagccacagataacatgtaaattagtgtggctgtgttccaataaaactttatttacagaaacgggaagccggtcagattgggcctgtgggccataatttgctgatctcaagcagtaaatcctggtatatgttaatagaagaaatcataattgcatttcagttgacattaaaagaaaatctggtagtttttgatgtccttcaaaagaggattgttagacattgatgttaaagcatcttaattcatttgagttttcttacctgtttacacccattatttattagagatatttcttgtgtttaaccacaaaaaaaagcactctgttaaaatgttttaatatgtattgaatttctttcataaacttttcatttctgttgataaatgggaatcccttaccaaccttttgttttttaaaagtctcatagaccaaaaaaaatctgttgcagcatttaattagccacagatacattttggctgcatttaccagttacatttttccattggttttggcttctaataaataacatatctgccattccttaaaaatgattttaaagaagataaatatattgtaatttcacatgctatagctttattctgtaagattaaaaattgtgactagtataattgtagctataatgtgagtggcatgttacaatgtaactctttatgagaaataaaatgtatctctgctttgtctgtccagatctttaggatttttagatgccttgggactgtccttggtgaatgatattcttcatatgatcatatgtaattttgaattcgttggaagtacacgctgctgagcatgtttattcacagtgctttataccgggtgttgcatcagtaatcattttcataagaacatttaaacagcatgaacatcatcatccacttaaatagttaaactttcttttaaaattggaatgcaactgtaggttttaacaatgtttattgttttttaagtggttactttgtttttccttaatactttctgttaacttaattattactcctgttgcagtgttactgttatgtattagaagtggcttttccccctaagatccttagtcttttaaagacaatttaaggtattggccatttggcagtagaaaatgtgcatgttttaacttggttttataaaatctgtaatgtttcacttcttgaaccatgtaccaaatttgccaattttctgtccaagtgtttcagatgaataacaaaacgctgttcattgaagctttcgccacctttcttaaagcagcgtatgttccaagggaaaaaggcattgaaaagcaatcgtttgtttttatgaagaataggtgttcagattccttcagtttttttgaaattagaaatttcttaccttatgtgaaatattcacaaacgtgcacacttctgcagagacaaagcatttcactgcacgtgtaccaggttattgattttatcttttcctttcagggttttgtcctcccaaaccagagtcatatgctgctagtagaattttttatttgatcctgcgaacttttcttataggaaaagtaaggcaaaggatgtgtagtgcaaccatctgataaactagtgtgattgtatttatcctctgttctgtgtatttctgtaatggaatctttacaattcccaaaacggtattttagacctactggaaatctgtatcgaaacagctatgtgattctgccactgagaaaaaaaaaatttttaattcgtttttcttatgctggtttgtttttctttaatgaagaaattgatctcatatggcatcatagatgctaaataaataaaagcatcatacttctctagtttgcctgcattcagtggctaacattatgagcattgtgtaagataaacacatggtcagtatcaatgtaaatgttagagccatgattaattcctatgaaaattgaaattaaatgtcaaagacaactagacat

SEQ ID NO: 4864 - protein, 624 aa, Homo sapien
GNKEVFSCRGIKLAVDWFLERGHKDITVFVPAWRKEQSRPDALITDQEILRKLEKEKILVFTPSRRVQGRRVVCYDDRFIVKLAFESDGIIVSNDNYRDLANEKPEWKKFIDERLLMYSFVNDKFMPPDDPLGRHGPSLDNFLRKKPIVPEHKKQPCPYGKKCTYGHKCKYYHPERGSQPQRSVADELRAMSRNTAAKTANEGGLVKSNSVPCSTKADSTSDVKRGAPKRQSDPSIRTQVYQDLEEKLPTKNKLETRSVPSLVSIPATSTAKPQSTTSLSNGLPSGVHFPPQDQRPQGQYPSMMMATKNHGTPMPYEQYPKCDSPVDIGYYSMLNAYSNLSLSGPRSPERRFSLDTDYRISSVASDCSSEGSMSCGSSDSYVGYNDRSYVSSPDPQLEENLKCQHMHPHSRLNPQPFLQNFHDPLTRGQSYSHEEPKFHHKPPLPHLALHLPHSAVGARSSCPGDYPSPPSSAHSKAPHLGRSLVATRIDSISDSRLYDSSPSRQRKPYSRQEGLGSWERPGYGIDAYGYRQTYSLPDNSTQPCYEQFTFQSLPEQQEPAWRIPYCGMPQDPPRYQDNREKIYINLCNIFPPDLVRIVMKRNPHMTDAQQLAAAILVEKSQLGY

SEQ ID NO: 4865 - DNA, 3828 bp, Homo sapien
  Unsure 3065-3105: Unknown base
gtgaaattgaagtttgtgtatatgaaagttatcttagacatatttttaattctccagtttctgcaaaataattaaaatatacagtaactggtctcctaaatcctgaatttaatgtattaaatacttatgttctttatattggtgcctttttaaaatgcattgagagtgttggttagctgttgcagctgtacaacacttttaatatgcatttttaaaaatcacttaaaattgagtactatataattcatctctgcatttttagtgcaaatctttagagcaatttctaatagagaaattttcagctcagctgttaaaaggaaaaggaaactttgaaactagactttactacctttttagtttcatagtatttctgaatatgattacaagattatgcaggtaaaatatagagtgaaactttacctgtgaattgaattataatttgtgtttttgttttgtttttaaggaagaataagttctgtatcaaacaagaatttattagataattttttggtcaataaaatacagtattcatttggattttcatctccagactagtattgttctagtcttggaatctgtattttctaatctgttagaaaatagagattgaaaattgatggaataatgtgaaaaagcaggtaattaattctccttgaacaaagcaaaactgaacagtcatatcacattgctattctccaaagcataatctcaaatggtttcatatcatggttgtgtattacttgcaatgggtgtgttaggatatgacagctttttaaaaaaatgagctgctggttatacaaagcaaatggcatatgaccaagaagctgtgatatgctagtgtttctttttatcatagtgtattactaggccaaataatgacaccttgaatatttttacatttattgcagaaaccttaaacttggaatttccataaggtttttatgtaatattctatttctagctttttagttttatcttgctgtactgtaagtttgaggatatttttcacctgcactcttaggaataagttcataattctgtttatggggctttcctcccataacactgcatttgtatattttctgtataaaatatgtgttgtgtattaacctttatcccatacagagagtggtacatgaatgactagttttctaagatgtcctttttattgtgaataaaatataaaagttaaaggccctctgctaagtcacataaagtacagcatataagttcatataggtacaaataaatgagtttgcagtggattgggccttcaaattacctcaagtgacagatagtaagaaaagcttcttgagcaggtggaggtcactgaatcccctactatgcacttatcaagattttacttactttaatttactggaaattgattttttaaaaaatgactacactgtaacaagggaagggatctgggtttttttgttgttttattcttgttttttttaagtagttcaaattctgaaactgtgatttaaaaattttttacagtcaagcattctgattttgaacataactcccttccctttctgtgtaacaaaggtctctctgttatctcttaaattttgttacatctccctcagcctctttctttgtccgtctcccttctgtcattgtctatggatgtttacctctctgttctcctaaaagtttgaagattaggtcaactcttatttctagttcattggtaatttaatcctaatttttttttcgtgatttttgttggttgtataatctgctgacgtatttttatactcaagtgtagttttctattaaaaagaaaagtggttggattaaaaatagtaagctatgtaaccctcatgttactttcactttcaaatattgggtacctaaaacattacttcagagattatgtaatcctattatagtatgtttgctttcctttattgttggattttacattctgatttggctttcctccaaaaaatgtatatcatgaaagactagacagttatttgcaagtgtttagaaaggtgttaaaaatgtaaagcaaagagtcttaactttctcctaattgggagaaaaatgctttaacattactataataatattccaggtttggagggggtctccaggccccatatttgctgttaatagttggaccttttagaccatgtgttatttgcaatcccagaatgattgcttctgctattagttaaaaagatactattcttttctttctgtacaagtgcaatactccccttgaagtcttaaaaactatggtgatttttttttcttttctgacctattcttcctttagctaatgacaaaaagaaactcataaaagtcatagtatgttaaaggacacaacaagcaaagagaaaaacactccacaatcaaaagattacagaatgtggaaaccactagtctgatctcatggtatctttatttaagctaaatttccatggaaattagtaatcttttgcttgaaaaatgtgtcctaaagttgaactttttacagattgaatcttcttagaccctcgcccaatgctctaaattaagaacctaatacttaatatttttattttacttctccccttttagaaataaacttttaaataaaagcaaagcacttagctgagttttaaacacttacatatcacctattggagaaatttttttttaaaaatatttggagcagtcctgttttcatacaaatttaagtaagaggtatttttcttatacatatttatatgtagtgtgctaattttctttttttatacctgtgtccctgtagtaaaactgctgtaatataaatacatgttttgttaaaagataacatttctttggcatttcttttaaaggcagttactgcatttctgcatttgtacagtatgtgtcttggccattttagatattctttctttaacaataccaaaggtaattagactattttaaagactaattgcttgacagtttctagggtattttgtgttttagaagcaaaaaaagaaaaaaaaataggtcaaaccagtaaacctcattttttttcaaactaataatttggggaaataaaaactattgtttannnnnnnnnnnnnnnnnnnnnnnnnnnnnnnnnnnnnnnnnaagttaaaattccataccttgtatgtcaggtttgctaagtgtaatgtagttttttttaaggctcaaataccatacctcagaaaatgaggtttactatggaaatactgaaacagtctttgcagctgtgtgacaagtcactctactacatactgatttggagacctccgctaaatagttttatcactgcagactaaaatgtgggacttgtatcttctttgtttttaatgcacacacatacatgttctgtgcatgtatgtggttactgtgtatatgtgtatgagtgttgtatatgcatgtgtgagtgtgtgtctgtatgtgtgtacaactaaagaagctgcagaaactttgtaatactttgtgaaaaggattatattataaaggtttgtactgtctgagtgcacagctactggaataaatttagggaatctcaggaacaagcatataatttgtccaagatttatttcttctcagaagtgtaagtgcagtttttaattctgtatattatttaatattttaccaataaaataaacttctgacatacagaagtcctaggtctttactcttaagtttgaccttctacagagtcctagagcatggagacaatgcagccagttctttgtttatactaacaaggtttggtccagttcctaataaattcttaatttgtatctgagatgtcagcttggcctttactgtctatatttgtatgaacattttgatcac

SEQ ID NO: 4866 - protein, 24 aa, Homo sapien
  Unsure 3065-3105: Unknown amino acid
VKLKFVYMKVILDIFLILQFLQNN

SEQ ID NO: 4867 - DNA, 4644 bp, Homo sapien
agccaagcccagcagagtggccccactggccagccgagccagcccccaggcacagccaccacgccactggagggtgacggcctctccgcgcccaccgaggttggcgacagccccctgcaggcccaggctttgggagaggcaggagtggccacaggaagtgaggctcagagcagcccgcaattccaggaccacacggaaggggaggaccaggacgcttccatcccctctgggggcagaggcctgtcccaggaggggaccggtccccccacctctgctggtgaaggccattctaggactgaagatgctgcccaggagctcctgttgcctgagtcaaaaggaggcagctctgagcccgggacagaactgcagaccaccgagcaacaggcaggggcctcagcctctatggcagttgatgctgtagctgagccagccaatgcagttaaaggggccgggaaggaaatgaaagagaagacccagagaatgaaacagccaccagcaaccactcctcctttcaaaacacactgccaggaagctgagaccaagaccaaggacgagatggctgctgctgaagaaaaagtcggtaagaatgaacaaggggagcctgaagacctcaagaagccagaggggaagaacagaagtgcagctgctgtgaaaaacgagaaggagcaaaaaaaccaggaagcagatgtccaggaagtgaaggcaagcacgctgagcccgggtggaggagtcaccgtgttcttccacgccatcatctctcttcatttcccattcaatcctgacctccataaagtcttcatcagaggaggagaagaatttggggagtcaaaatgggacagcaatatctgtgagctgcactacaccagagacttgggtcatgaccgcgttcttgttgaaggcattgtctgcatttccaagaagcacctagataaatacattccttacaagtacgtcatttataatggggaatcttttgagtatgagttcatttacaagcaccagcagaagaagggcgagtacgtcaaccgctgtctgttcataaaatcttcacttctgggctcaggagactggcatcagtactatgacatagtttatatgaagcctcatgggagactccagaaagtcatgaaccacatcacagacgggccgaggaaggacctggtgaaggggaagcagattgccgctgcgctcatgctggacagcaccttcagcatcctgcagacctgggacaccatcaacctgaacagcttcttcacccagttcgagcagttttgctttgtcctgcaacagcctatgatttatgaaggacaggcacagctgtggaccgatttgcagtacagggagaaagaggtgaagagatacctgtggcaacatctgaaaaaacacgtggtaccattgccggacggaaaaagcacggactttttgcctgtggactgcccagtgaggagtaaactgaaaacaggcctgattgtcctttttgtagtggaaaaaattgagcttttattagaaggcagcctggactggttgtgtcacctcctaacctcagatgccagctcaccagatgagtttcaccgtgacctaagccacatccttgggatacctcagagctggcggctgtacctggtgaacctgtgccaaagatgcatggacacaaggacgtacacctggctgggcgccctgcctgtcctgcactgctgtatggagctggccccgcggcacaaggatgcctggagacagcctgaggacacctgggccgctctggagggactctccttctcaccgttccgggaacaaatgctagatacgagttccctacttcagtttatgagagagaagcagcatttgctgagcatagacgagcctctcttccggtcctggtttagtctgctacctctgagtcacctggttatgtatatggaaaacttcattgagcacctgggtcgttttcctgctcatatcctggactgtctttcagggatttactaccggcttccgggacttgagcaagtcttgaatacgcaggatgttcaggatgttcagaacgttcagaacattttagaaatgctgttgcgactcctggacacttaccgggacaagattcccgaggaggccttgtcaccatcctacctgactgtgtgtctgaaactgcatgaagccatctgcagcagcacaaagctacttaagttttacgagctgccagccttatctgccgagattgtctgcagaatgattagacttctatctctggtggattctgcaggacagagagatgaaactggaaataattcagtccaaacagtcttccaagggacccttgctgctacgaaaaggtggctccgagaagtttttacaaagaacatgctcacatcttcaggtgcctcattcacatacgtcaaggaaattgaggtctggaggcggctggtggaaatccaattccccgcggagcatggctggaaggagtcgttgctgggagacatggaatggaggctcacaaaggaggaacccctctcccagatcactgcctactgcaatagttgctgggacaccaaaggcttagaggacagtgtggccaagaccttcgagaaatgcatcattgaagccgtgagctcagcctgccagtctcagaccagtatccttcaggggttctcttactctgatttgcggaaatttggcatcgtcttgtctgctgtgatcactaagtcctggcctaggaccgcggacaacttcgatgacattttaaagcatctgctcacgttggcagatgtcaagcacgtcttcagattgtgtggaaccgacgagaaaatactagcaaatgtcacagaggatgccaagaggctgatagctgttgccgactctgtgttgacgaaagttgttggtgacctcctaagtggcacgattttagttggacaactggagctgattataaagcacaagaatcagtttcttgacatctggcaactgagggaaaaaagtctttcaccccaggatgaaaaatgtgctgtggaggaagcactggattggagaagggaggaactgttacttctaaagaaagagaaaagatgtgttgatagtctcctgaagatgtgtgggaacgtgaaacatctgatacaagtggactttggagtgcttgcagtaagacactcacaagacctcagcagtaaaagattaaatgacaccatgacagtgagactgtccacctcctcgaactcgcagagggcaacgcattaccacctgagctcccaggtccaagaaatggctgggaagatagacttgctcagagacagccacatcttccagctcttctggcgggaagccgcagagccgctgagtgagcctaaggaggaccaggaagccgcagagttgctgagtgagcccgaagaagaatcagaaaggcacatccttgagcttcaagaggtgtatgactatttgtatcagccttcttacagaaagttcattaagttgcaccaggatctaaagtcaggagaggtcacccttgcagagattgatgtcatcttcaaggactttgtgaataaatacacggacctggattcagaacttaagatcatgtgcaccgtggaccaccagggccaaagagattggatcaaggaccgagtggaacagatcaaggaataccatcacctgcaccaggctgtccacgcagccaaggtcatcttgcaggtcaaagagagcctgggactgaacggtgacttcagtgttctcaacactttactaaattttactgataacttcgacgactttcgccgtgaaacactggaccagatcaaccaggagctcatccaggccaaaaagctgctccaggacatcagcgaggcccggtgcaaggggctgcaggctctgtccctgagaaaggagttcatctgctgggtccgggaggctcttggaggcatcaatgagctgaaggtgtttgtggacctggcctccatctcagcgggggagaatgacattgatgtggaccgggtggcctgcttccatgacgctgtgcagggctacgcatccctgctatttaagctggaccccagcgtggacttcagtgcattcatgaagcatctgaaaaagctgtggaaggctctggataaggaccagtacctgcccaggaaactggtgagtcttattctgtctctaatgcagattttgttgaatagagcattgcttagcaacgttagggcagtgactgtggaaatggtggcacacctgtgtggtaggtttgtacacagccgttttcaatgatatttaaaaagcttttcttcataaatggaaattcaccatcttgttacctagaaagcaggatacaaaattacatgacacatagtaatctctaaggtgcaaaacacacgtggaaaaaagacagaagggaaatatgctgaaacgttgccaggagttttctctgaatggttgtaattgtcattttattctgttactttttgttattttctataattgatagaattttttatcagaaaaaagtaaacatttaaaattagccaggcatggtggtgtgcgcctgtaatcccagctactctggaggctgagacagaattgcttgaacccgggaggcagagatagcagtgaactgagatcacaccactgtactccagcctgagtgacaaagtgagactctgtctc

SEQ ID NO: 4868 - protein, 1415 aa, Homo sapien
SQAQQSGPTGQPSQPPGTATTPLEGDGLSAPTEVGDSPLQAQALGEAGVATGSEAQSSPQFQDHTEGEDQDASIPSGGRGLSQEGTGPPTSAGEGHSRTEDAAQELLLPESKGGSSEPGTELQTTEQQAGASASMAVDAVAEPANAVKGAGKEMKEKTQRMKQPPATTPPFKTHCQEAETKTKDEMAAAEEKVGKNEQGEPEDLKKPEGKNRSAAAVKNEKEQKNQEADVQEVKASTLSPGGGVTVFFHAIISLHFPFNPDLHKVFIRGGEEFGESKWDSNICELHYTRDLGHDRVLVEGIVCISKKHLDKYIPYKYVIYNGESFEYEFIYKHQQKKGEYVNRCLFIKSSLLGSGDWHQYYDIVYMKPHGRLQKVMNHITDGPRKDLVKGKQIAAALMLDSTFSILQTWDTINLNSFFTQFEQFCFVLQQPMIYEGQAQLWTDLQYREKEVKRYLWQHLKKHVVPLPDGKSTDFLPVDCPVRSKLKTGLIVLFVVEKIELLLEGSLDWLCHLLTSDASSPDEFHRDLSHILGIPQSWRLYLVNLCQRCMDTRTYTWLGALPVLHCCMELAPRHKDAWRQPEDTWAALEGLSFSPFREQMLDTSSLLQFMREKQHLLSIDEPLFRSWFSLLPLSHLVMYMENFIEHLGRFPAHILDCLSGIYYRLPGLEQVLNTQDVQDVQNVQNILEMLLRLLDTYRDKIPEEALSPSYLTVCLKLHEAICSSTKLLKFYELPALSAEIVCRMIRLLSLVDSAGQRDETGNNSVQTVFQGTLAATKRWLREVFTKNMLTSSGASFTYVKEIEVWRRLVEIQFPAEHGWKESLLGDMEWRLTKEEPLSQITAYCNSCWDTKGLEDSVAKTFEKCIIEAVSSACQSQTSILQGFSYSDLRKFGIVLSAVITKSWPRTADNFDDILKHLLTLADVKHVFRLCGTDEKILANVTEDAKRLIAVADSVLTKVVGDLLSGTILVGQLELIIKHKNQFLDIWQLREKSLSPQDEKCAVEEALDWRREELLLLKKEKRCVDSLLKMCGNVKHLIQVDFGVLAVRHSQDLSSKRLNDTMTVRLSTSSNSQRATHYHLSSQVQEMAGKIDLLRDSHIFQLFWREAAEPLSEPKEDQEAAELLSEPEEESERHILELQEVYDYLYQPSYRKFIKLHQDLKSGEVTLAEIDVIFKDFVNKYTDLDSELKIMCTVDHQGQRDWIKDRVEQIKEYHHLHQAVHAAKVILQVKESLGLNGDFSVLNTLLNFTDNFDDFRRETLDQINQELIQAKKLLQDISEARCKGLQALSLRKEFICWVREALGGINELKVFVDLASISAGENDIDVDRVACFHDAVQGYASLLFKLDPSVDFSAFMKHLKKLWKALDKDQYLPRKLVSLILSLMQILLNRALLSNVRAVTVEMVAHLCGRFVHSRFQ

SEQ ID NO: 4869 - DNA, 1958 bp, Homo sapien
  Unsure 185-207, 366-424: Unknown base
gcacaagtggcagaaataatttcctctgggctgtaatatggctaatatccaggttgatcagatactaagctaaaaccagatcaaccttgcctgggaagggacgcaacctagggatggagagcaacccaggcagagagggagaaagaggctgacacaaattagccaagaggggaccccctgaactnnnnnnnnnnnnnnnnnnnnnnnggaaagtgagaaaagccagcaagccagcaattgtatggtaagaataaagctagagaaattaatgttgccagtactgtgaccctatttttaccacttctaggctgatgtgggctgggaaatgggttatgcttagaaatgtggagcctgccaagtgtggtnnnnnnnnnnnnnnnnnnnnnnnnnnnnnnnnnnnnnnnnnnnnnnnnnnnnnnnnnnngagttcagcttttattcacattttttccccgaagtgatttattcttcaaagtagacagttatgttctatagagtgttttgttttttctttaagaaaataatttacataaacagagattatggtaaacattttaaatcttaggctgttggttaaatttaatggtttaagcactgttgggttctctttaattaatatttgcagaaggagaacatatgtgtttcactgatatgtatggtccagaaaaattacttaattctcaaaaatatgttgcattctcatattgtgttagggaaaattccataagtagtctattttttttttcttttgctgactgttaacatccaaacacctgaatgaaaactgactcatttctgtattggtgtttaaaaatattgatttgcagatgttcacagaacacttgcattttttgattcacattgctaaatcaaatgtaaaggcaaatatgtatatttaataaatgagaagtatttttttattactgaaatttattctcaaagcaaatgtattttgtagatgtttcatttgggagattttgctttgccttaaaacatacaaaataaacctgtcttgtggtctgcccacctcaaaacctctgttaacttgacatgtagaaggagttcagaattctttgataatgtgtggttttcacttttgtttggattaaacaaaaataaaattagagtccatagcactttgtaaactaatgtgaagtttcttgttgaatcataaaagctacctgtatgtactttataatttaatgttctgttagtaaaaattgtcagcattttatctttttctcttctcattacattttagtctccaatctttcccactctcagcagtcacagttttgcagagcaaaacatttttagaaactgaatatgtgtgagttctatataaaatgaatgtgttagtaacatccatctgctgatcaaggaggcattggatctggtactagaaggtgaaattgattgtagctatcaaagcattttatcaatgtaagtcaagaaaaaagaagaaaactgtgaacctctgatatttttaacataaaaactgttcccaatgagtgttctcttgctgattttgtgttaatgttattgtctatgatttttaagctaatgctaatataaaatctaaaatttcaacatgatgacaacaattcctgtagcctgtttttaccattaggatgtttttgaaaacagatgtcatcttagaaattatatttttaagtgcaaataaatcatcctgacttgaaagtcaacacattttatttttcattccgtagtatcacagaatatgctgcatttagatacaggtttaatttgccagattttctcaaaattctgtatttttatattgctacaactggtttacttaacatgcaattgaattgttatttaaataaattacatttgatggaattggagtcttattctggttggtctacatgtggaagcagtacacgacatctgttttgctggtcttagttgtcaatgtgatataaacttgaatt

SEQ ID NO: 4870 - protein, 21 aa, Homo sapien
  Unsure 185-207, 366-424: Unknown amino acid
TSGRNNFLWAVIWLISRLIRY

SEQ ID NO: 4871 - DNA, 1469 bp, Homo sapien
ctttctttttctcttggagctgagctataagacaacaggactgaacagggagccaactgtttctttgaacagtaaatcaggaacaccaatggaccaaaatgaacacagtcactggggaccacatgcaaagggccaatgtgccagcagatctgagctgagaatcatcctggtgggcaaaacaggaactggcaaaagtgctgcagggaacagcatcctcaggaagcaagcatttgaatcgaagctgggttcccagaccttgactaagacttgcagcaaaagtcagggaagctggggaaatagagagattgtcattattgacacaccagatatgttttcttggaaggaccactgtgaagctctgtacaaagaggtgcagaggtgctacttgctgtctgcaccaggaccccatgtgctgctcctggtgactcagctgggccgctatacctcacaggaccagcaggctgcacagagggtgaaggagatctttggagaggatgccatgggacacacaattgtcctctttacccacaaggaagacctcaatggtggctccctgatggattacatgcacgactcagataacaaagccctaagcaagctggtggcagcatgtggtgggcgaatctgtgcctttaataaccgtgctgaagggagcaatcaggatgaccaagtgaaggaactaatggactgtattgaggatctgttgatggagaaaaatggtgatcactataccaatgggttgtacagcctaatacagaggtctaaatgtggacctgtgggatcagatgaaagagtaaaggaattcaaacagagccttataaagtacatggaaactcaaagaagttacacagccttggctgaagcaaactgcctaaaaggagccttaatcaaaacacaactgtgtgttttattttgtattcagttgtttctcagattgataattctgtggctttgcatactgcacagcatgtgcaatttgttttgttgcttactctttagtatgtgcaatttattctgcagtttgctgtttattatacccaaaaagttaatgatatttttgagaacagttattagactagaacgcaagactcctaggttatagttacagatcccagttattatttactcactatcatttagtgggtgaatcacagtaatttccctgtaaaatgtggtacctgaagtcatatttgagattctatgaaatgtttaaatctgaacatcactccaattattaatgaaccaaatcatacgataagttactgtttgcattgaaatataatatcaaagccttttgaaatctgtaaacataaaattcctctcattttcaaatatctaaagccagttttatgttcctaaaatctcattttcttctttctagtactactatttctactgaatataatgaaaatggcaataaaataatattacataaactgaaaaaaaaaaaaaaaaaaaaaaaaaaaaaa

SEQ ID NO: 4872 - protein, 337 aa, Homo sapien
MDQNEHSHWGPHAKGQCASRSELRIILVGKTGTGKSAAGNSILRKQAFESKLGSQTLTKTCSKSQGSWGNREIVIIDTPDMFSWKDHCEALYKEVQRCYLLSAPGPHVLLLVTQLGRYTSQDQQAAQRVKEIFGEDAMGHTIVLFTHKEDLNGGSLMDYMHDSDNKALSKLVAACGGRICAFNNRAEGSNQDDQVKELMDCIEDLLMEKNGDHYTNGLYSLIQRSKCGPVGSDERVKEFKQSLIKYMETQRSYTALAEANCLKGALIKTQLCVLFCIQLFLRLIILWLCILHSMCNLFCCLLFSMCNLFCSLLFIIPKKLMIFLRTVIRLERKTPRL

SEQ ID NO: 4873 - DNA, 1985 bp, Homo sapien; identical to SEQ ID NO: 4011

SEQ ID NO: 4874 - protein, 362 aa, Homo sapien; identical to SEQ ID NO: 4012

SEQ ID NO: 4875 - DNA, 672 bp, Homo sapien
catacgcaaagatagtcaccataagtcgaccatgtttttcaccttttagtcaatgttagaagcaaggggtaacttaagtcctggtgggaagaccatccattgagttctttgaaagtcaacatttttcagcccacgatagtgaaatgaaagtaaatataaatgaataacaattctaacaaaaagagttttttgattcaaatccattagtttgaacttttcgagcttattatccatttccttaaatcccatagcttatcagagttaacatcagagggaggtaaaatatttctgtgatattctttgtataaaatctacactttgaaatggattagtaacctgtgaacaatacatattttagttaacatataaattatgtgagcaaagtggttttcagtgtttttttcttattttagttttgaacctgtcttaaactcacagacttgtagaagaaatctctaattcagtatttattaggagttcacttttgccctattacagccttaattagtgacatcccagtgctgttacagcatagcagtgtcttaatatgtaatctaattgaaataacacatttgtaaaataattactagaaggtaaacttacgttaatgtcctgtgtggtttctacaaagtgtgtcattgtagacctcttggccactagatattttaagat

SEQ ID NO: 4876 - protein, 21 aa, Homo sapien
MSCVVSTKCVIVDLLATRYFK

SEQ ID NO: 4877 - DNA, 1960 bp, Homo sapien
ggcacgaggggaagttgccggcggccgcgcggcctcccgggcgggcctacagccatgtcccgggacccggggtcgggcggctgggaggaggccccgcgcgcagctgccgcgctctgcaccctgtaccacgaggccggacagcggctgcgccgcctgcaggaccagctcgctgcccgcgacgccctcatcgctcgcctccgcgcccgcctggccgcgctggagggggacgccgcgccgtccctagtggacgcgctgctggagcaggttgcgcgcttccgggagcagctgcgaaggcaggagggcggcgccgccgaggcccagatgcgccaggaaattgagaggctgactgagcgactagaagaaaaagagagggagatgcagcagctgctgagccagccccaacacgagcgagagaaggaagtcgtcctgctacggaggagcatggcagaaggggagcgcgcccgggccgccagtgacgtcctgtgccgctccttggccaacgagacccatcagctgcggaggacgctgaccgccaccgcccacatgtgtcagcatctggccaagtgtctggatgaacgacagcatgcacaaaggaatgtgggggagagaagtcctgaccagtcggaacacacagatgggcacacctctgtccagagtgttattgagaagttgcaggaagaaaatcgactgttaaaacagaaggtgactcacgttgaagacctcaatgccaagtggcagcgctacaacgccagcagggacgaatacgtgagggggctccatgcgcagctcagggggctgcagatcccccacgagcccgagctgatgaggaaggagatctcccggctcaacagacagttggaagagaaaataaatgactgtgccgaagtgaagcaggagctggcggcctccaggacggcccgggatgctgcgttggagcgggtgcagatgctggaacagcagattctcgcttacaaggatgacttcatgtcagaaagggccgatcgggaacgggctcaaagtaggattcaagaactggaggaaaaggtcgcctctttgctgcaccaggtgtcctggagacaggattctcgagagccagacgccggccggattcacgctgggagcaaaactgccaagtatttggccgccgacgcattagagcttatggtgcctggtggctggaggcctgggactgggtcccagcagccagaaccccctgcagagggcgggcatcctggcgcggtccagagaggccagggggaccttcagtgccctcactgcctgcagtgcttcagtgacgagcaaggggaagagctcctcaggcatgtggccgagtgctgccagtgaccgagactcacccgtgcccttgcggcctcctggcccggtgcagctgccctcagggacagggtgggtgctctcagatgccatgggttgagctctactgagagccaaggcccctagaatagttgcggggcactctgatcgttcactttggtccctttggctatggaacaggctgggtcacagggaactgccagtgaggctggaggctggaggtggagatggggtcaggaacatctggcagagggaggtcccagtctgtgtctccatcaggcttaagccagagctatctggtgctggtgtgccagcccctcccccagcctgcctagaaaggggtggctgcctgagggagtcacttgtatggtccccagggtgggagccccatcctgttctatggaataaagcgtcgcctctctgcctcgaaccagtcaaatggagtattgcggctgcacgtcacactagggtggccacccccgccattgcgagccacatgtctgcactgagaaactgcatttcagtagcatttgtcatccagccggaagttaaagcacacttactttattcacctatttttataataaacgttcttgctgctgtgactgcaaaaaaaaaaaaaaaaaaa

SEQ ID NO: 4878 - protein, 322 aa, Homo sapien
MQQLLSQPQHEREKEVVLLRRSMAEGERARAASDVLCRSLANETHQLRRTLTATAHMCQHLAKCLDERQHAQRNVGERSPDQSEHTDGHTSVQSVIEKLQEENRLLKQKVTHVEDLNAKWQRYNASRDEYVRGLHAQLRGLQIPHEPELMRKEISRLNRQLEEKINDCAEVKQELAASRTARDAALERVQMLEQQILAYKDDFMSERADRERAQSRIQELEEKVASLLHQVSWRQDSREPDAGRIHAGSKTAKYLAADALELMVPGGWRPGTGSQQPEPPAEGGHPGAVQRGQGDLQCPHCLQCFSDEQGEELLRHVAECCQ

SEQ ID NO: 4879 - DNA, 1688 bp, Homo sapien
gcccaggctgctcaatgcccgccgctgccccatcgccttctccgtgcctctaccctctcttttctcgggtttacctccttcactatgggcaaccttccaccctccattcctccttcttctcccttagcctgtgttctcaaaaacttaaaacctcttcaactcacacctgacctaaaacctaagtgtcttattttcttctgcaacaccgcttggccccaatacaaactcgacaatgattccaaatagccagaaaacggcactttcgagttctccatcctacaagttctagataattcttgtcataaaatgggcaaatggtctgaggtgcctgacgtccaggcattcttttacacattggtccctccctagtctctgctcccaatgtgactcatcccaaatctttcttctttctctcctttctgttccttcggtctccaccccaagttccgagtcctctgaatccttcttttctatggactcatctgacctccccccttctccccaggctgctcctcgccaggctgagccaggtcccaattctcacttagcctctgctcccccaccctataatccttttatcacctcccctcctcacacctggtccagcttacagtttcgttcctcgactagctctccccgatctgcccaacaatttcctgttaaagagatggctgactatcctgacttcatcagagcaggctggtgcctggccttcctggaatgagtgggtgttctgacaggcccccagtttgtcccatctgcaccgccaagaggtctccgggtggccagaggagcaaagttgccttccaagtgcctgttggtgcctgggagaacacagcaggagtgtcgtgcggcccacagcgcagtgcatggtgattccaggcgctgaacaactccccttgacccttgggcctgcatctgactcccggctgcagaatcagaagctgagtccaggcaaccgctcggccactcccggtcactcctctctggacacccagttactaaagtcagcaaagaagatgcggtaatcaccgcctgatctccacatggtgaacacaacactctcactaacacctccttgaccagtcagtcttcagcactgggggtggacaggcaggttttctgtgtttaccagaatcgcacaggctaagcacaaacatggaaccagagttccaggtgaggaaacctcactcgcagaagcccaggctgcaccccaccaggtgatgcagtgcgcctaggctgtgggtgctaggagccaagtgctagggactcgtcatgagtgggaatccccacgttcctgtcactgctgtcaaacagaaggtaaacagtcttacgaatgtaattccttaggaagacttgtacaaacttttattaggatatctatttatttaatactgaactttggcctactttgtgataagactataaacaaattgaggaaatcactatttctcacttctgtatttctcaaaaaataattttgttacagagttcaatatactgtgtactactgatcttctattgtgaaagcaaagcatttcatcaaaacaaagtattttaaattatgagtgaaaattgtgtatgttaattttgcagctgtaatattaatcaaactttgtgtaattctaatcacaaaatgatgtgccttaaatgcccctccagctgtgggttggcagtgtccagacagg

SEQ ID NO: 4880 - protein, 81 aa, Homo sapien
AQAAQCPPLPHRLLRASTLSFLGFTSFTMGNLPPSIPPSSPLACVLKNLKPLQLTPDLKPKCLIFFCNTAWPQYKLDNDSK

SEQ ID NO: 4881 - DNA, 2463 bp, Homo sapien
gcttggtaccgagctcggatccactagtaacggccgccagtgtgctggaaagggacgccaccgggcgctgacagacctatggagagtcagggtgtgcctcccgggccttatcgggccaccaagctgtggaatgaagttaccacatcttttcgagcaggaatgcctctaagaaaacacagacaacactttaaaaaatatggcaattgtttcacagcaggagaagcagtggattggctttatgacctattaagaaataatagcaattttggtcctgaagttacaaggcaacagactatccaactgttgaggaaatttcttaagaatcatgtaattgaagatatcaaagggaggtggggatcagaaaatgttgatgataacaaccagctcttcagatttcctgcaacttcgccacttaaaactctaccacgaaggtatccagaattgagaaaaaacaacatagagaacttttccaaagataaagatagcatttttaaattacgaaacttatctcgtagaactcctaaaaggcatggattacatttatctcaggaaaatggcgagaaaataaagcatgaaataatcaatgaagatcaagaaaatgcaattgataatagagaactaagccaggaagatgttgaagaagtttggagatatgttattctgatctacctgcaaaccattttaggtgtgccatccctagaagaagtcataaatccaaaacaagtaattccccaatatataatgtacaacatggccaatacaagtaaacgtggagtagttatactacaaaacaaatcagatgacctccctcactgggtattatctgccatgaagtgcctagcaaattggccaagaagcaatgatatgaataatccaacttatgttggatttgaacgagatgtattcagaacaatcgcagattattttctagatctccctgaacctctacttacttttgaatattacgaattatttgtaaacattttgggcttgctgcaacctcatttagagagggttgccatcgatgctctacagttatgttgtttgttacttcccccaccaaatcgtagaaagcttcaacttttaatgcgtatgatttcccgaatgagtcaaaatgttgatatgcccaaacttcatgatgcaatgggtacgaggtcactgatgatacataccttttctcgatgtgtgttatgctgtgctgaagaagtggatcttgatgagcttcttgctggaagattagtttctttcttaatggatcatcatcaggaaattcttcaagtaccctcttacttacagactgcagtggaaaaacatcttgactacttaaaaaagggacatattgaaaatcctggagatggactatttgctcctttgccaacttactcatactgtaagcagattagtgctcaggagtttgatgagcaaaaagtttctacctctcaagctgcaattgcagaacttttagaaaatattattaaaaacaggagtttacctctaaaggagaaaagaaaaaaactaaaacagtttcagaaggaatatcctttgatatatcagaaaagatttccaaccacggagagtgaagcagcactttttggtgacaaacctacaatcaagcaaccaatgctgattttaagaaaaccaaagttccgtagtctaagataactaactgaattaaaaattatgtaatacttgtggaactttgataaatgaagccatatctgagaatgtagctactcaaaaggaagtctgtcattaataaggtatttctaaataaacacattatgtaaggaagtgccaaaatagttatcaatgtgagactcttaggaaactaactagatctcaattgagagcacataacaatagatgataccaaatactttttgtttttaacacagctatccagtaaggctatcatgatgtgtgctaaaattttatttacttgaattttgaaaactgagctgtgttagggattaaactataattctgttcttaaaagaaaatttatctgcaaatgtgcaagttctgagatattagctaatgaattagttgtttggggttacttctttgtttctaagtataagaatgtgaagaatatttgaaaactcaatgaaataattctcagctgccaaatgttgcactcttttatatattctttttccacttttgatctatttatatatatgtatgtgtttttaaaatatgtgtatattttatcagatttggttttgccttaaatattatccccaattgcttcagtcattcatttgttcagtatatatattttgaattctagttttcataatctattagaagatggggatataaaagaagtataaggcaatcatatattcattcaaaagatatttatttagcaactgctatgtgcctttcgttgttccagatatgcagagacaatgataaataaaacatataatctcttccaaaaaaaaaaaaaaaaaaaaa

SEQ ID NO: 4882 - protein, 527 aa, Homo sapien
MESQGVPPGPYRATKLWNEVTTSFRAGMPLRKHRQHFKKYGNCFTAGEAVDWLYDLLRNNSNFGPEVTRQQTIQLLRKFLKNHVIEDIKGRWGSENVDDNNQLFRFPATSPLKTLPRRYPELRKNNIENFSKDKDSIFKLRNLSRRTPKRHGLHLSQENGEKIKHEIINEDQENAIDNRELSQEDVEEVWRYVILIYLQTILGVPSLEEVINPKQVIPQYIMYNMANTSKRGVVILQNKSDDLPHWVLSAMKCLANWPRSNDMNNPTYVGFERDVFRTIADYFLDLPEPLLTFEYYELFVNILGLLQPHLERVAIDALQLCCLLLPPPNRRKLQLLMRMISRMSQNVDMPKLHDAMGTRSLMIHTFSRCVLCCAEEVDLDELLAGRLVSFLMDHHQEILQVPSYLQTAVEKHLDYLKKGHIENPGDGLFAPLPTYSYCKQISAQEFDEQKVSTSQAAIAELLENIIKNRSLPLKEKRKKLKQFQKEYPLIYQKRFPTTESEAALFGDKPTIKQPMLILRKPKFRSLR

SEQ ID NO: 4883 - DNA, 3463 bp, Homo sapien
ctcttacaacattggctgccggcgtgactttgaccgcttcccggtgcgttaccggcagctgaacccacccggcgccacgggactttgacgcgtgctctgcgcttgccatgagactcctgggagctgcagccgtcgcggctctggggcgcggaagggcccccgcctccctaggctggcagaggaagcaggttaattggaaggcctgccgatggtcttcatcaggggtgattcctaatgaaaaaatacgaaatattggaatctcagctcacattgattctgggaaaactacattaacagaacgagtcctttactacactggcagaattgcaaagatgcatgaggtgaaaggtaaagatggagttggtgctgtcatggattccatggaactagagagacaaagaggaatcactattcagtcagcagccacttacaccatgtggaaagatgtcaatattaacattatagatactcctgggcatgtggacttcacaatagaagtggaaagggccctgagagtgttggatggtgcagtccttgttctctgtgctgttggaggggtacagtgccagaccatgactgtcaatcgtcagatgaagcgctacaacgttccgtttctaacttttattaacaaattggaccgaatgggctccaacccagccagggccctgcagcaaatgaggtctaaactaaatcataatgcagcgtttatgcagatacccatgggtttggagggtaattttaaaggtattgtagatcttattgaggaacgagccatctattttgatggagactttggtcagattgttcgatatggtgagattccagctgaattaagggcggcggccactgaccaccggcaggagctaattgaatgtgttgccaattcagatgaacagcttggtgagatgtttctggaagaaaaaatcccctcgatttctgatttaaagctagcaattcgaagagctactctgaaaagatcatttactcctgtatttttgggaagcgccttgaagaacaaaggagttcagcctcttttagatgctgttttagaatacctcccaaatccatctgaagtccagaactatgctattctcaataaagaggatgactcaaaagagaaaaccaaaatcctaatgaactccagtagagacaattcccacccatttgtaggcctggcttttaaactggaggtaggtcgatttggacaattaacttatgttcgcagttatcagggagagctaaagaagggtgacaccatctataacacaaggacaagaaagaaagtacggttgcaacggctggctcgcatgcatgccgacatgatggaggatgttgaggaagtatatgccggagacatctgtgcattgtttggcattgactgtgctagtggagacacattcacagacaaagccaacagcggcctttctatggagtcaattcatgttcctgatcctgtcatttcaatagcaatgaagccttctaacaagaacgatctggaaaaattttcaaaaggtattggcaggtttacaagagaagatcccacatttaaagtatactttgacactgagaacaaagagacagttatatctggaatgggagaattacacctggaaatctatgctcagaggctggaaagagagtatggctgtccttgtatcacaggaaagccaaaagttgcctttcgagagaccattactgcccctgtcccgtttgactttacacataaaaaacaatcaggtggtgcaggccagtatggaaaagtaataggtgtcctggagcctctggacccagaggactacactaaattggaattttcagatgaaacattcggatcaaatattccaaagcagtttgtgcctgctgtagaaaaggggtttttagatgcctgcgagaagggccctctttctggtcacaagctctctgggctccggtttgtcctgcaagatggagcacaccacatggttgattctaatgaaatctctttcatccgagcaggagaaggtgctcttaaacaagccttggcaaatgcaacattatgtattcttgaacctattatggctgtggaagttgtagctccaaatgaatttcagggacaagtaattgcaggaattaaccgacgccatggggtaatcactgggcaagatggagttgaggactattttacactgtatgcagatgtccctctaaatgatatgtttggttattccactgaacttaggtcatgcacagagggaaagggagaatacacaatggagtatagcaggtatcagccatgtttaccatccacacaagaagacgtcattaataagtatttggaagctacaggtcaacttcctgttaaaaaaggaaaagccaagaactaactttgcttactgtgagttgactgactctaattgaatctgcgtggttttgatactttgatggattccagtggaataaattcaggctgctgaaacaagaaattctgagcccaggaagcgggctcttctttcttcaaaagaagcccttcttgttcatattcaggagcttctgttatattcaaaggtaattctatgtctatctcaactctattgattggttttatagtttattgaaaatcctcaaataaaatataattattactgaaatatgtttaatatttaaggggaaaagagactaatttcagttatacttttaagcttagaatgtatgttcatttccaaattttgtatcataagagttttcaacatagagaaaagctgaaaaaatgcaaagaataaccacatactttccatctaccttcctttgttaacgggttgtttatcatataataatttgttttgtcatatttgctttcactgtctattatctgtttaagtctcataactctatttttagtttgctgaagacttgaaagtgaatcgcatatatcatgacacttcttggagtgtcattaatgggcaggcttttctgttgaagagtggattccgtatgttcttcatagagagtgtttttcagattcttcattgggatattaaaatattagccaaatttctctctgttttatatatgtctgtttatttcagtttgtggtttctgcaaatttgtaactgcctctgttttaggagtataagtattacttccttgtggtctattgtgaagtaaaaagtagacccttgcatatactattcttgtttgtgttcatcttaatgtttttgtacagctaaatcaaatgtaatttatagagttagtttcatcaacctaatgaatgctagttaaatttgaattccttggaatttatcgtatattgtattcactgagattatgaagggacaaatgttaatcttttgtttccagaaaaagttgggctttcccaagcagttctattacccggttcagaattgcttcatccaaaaatcatctgatggtatagatggatcctagtccttttcattacctgatggtagaaataaaataattgatt

SEQ ID NO: 4884 - protein, 751 aa, Homo sapien; identical to SEQ ID NO: 4137

SEQ ID NO: 4885 - DNA, 736 bp, Homo sapien
acatgttatggagaaatggtcataagatctgaacaacaaaagtatgtttactacttagcaaacatgtctgttggacaggttctgctaacataatgagagtgcatttgtacattcaggtagctaagacttaacaaatctaaaaattccttacttcaaaagttcagctatttaaagtgtttggttcacaattaaaggagattgtgttttaaacaatacatactgtactttttaaaggttgtattagcacatgcaaacagttcaccttaaaaaaacagaatgagtcataaggagtcagacatgccattaatcagctcttaattatcttccataaaagagggaaggaaaaaaatagagataacacgaatctgtgtataatccaaaaggttctctgtgacttggaatgaagccagaaaaagaatctcattttgtttcacacactggcacctggtatggagatcaacagttgctcaaaggaattttaaataattataatgtgttaatagataattaattgggaattgattctgcaaggcaaagtcaaacatttgttttataattgtgcagttcttgcaagagatcacctatactttttttcccccatcaggtataatgggtctctcccaaatggcgatagaggaaggaggaaaagtaggtttgctttgtttaaaagacctaaggcaaatggggtgaagcccagcactgtgcatattgcttgtactcctcaggctgcaaaggt

SEQ ID NO: 4886 - protein, 111 aa, Homo sapien
MKPEKESHFVSHTGTWYGDQQLLKGILNNYNVLIDNNWELILQGKVKHLFYNCAVLARDHLYFFSPIRYNGSLPNGDRGRRKSRFALFKRPKANGVKPSTVHIACTPQAAK

SEQ ID NO: 4887 - DNA, 3967 bp, Homo sapien
ccacgcgtccgatttttggaaatcaagtgcaatattggaagccatttctactaattttatttcacttttaaatttatgatttgatttgaatactatcatgggaggagctgtgagtgctggggaagataatgatgacttaattgataatttaaaagaagctcagtatattcgtactgaaagagtggagcaagccttcagagcgattgatcgtggagattactatttggaaggctacagagacaatgcttacaaagacttagcctggaagcatggaaacatccacttgtcagcaccttgcatttattctgaagttatggaagcattgaaacttcaaccaggattgtcttttcttaacctgggaagtggaaccggatatttaagtacaatggtgggcttaattttaggtccttttggaataaatcatgggattgagcttcattcagatgtggtggaatatgccaaggaaaaactggagagcttcatcaaaaatagtgatagctttgataaatttgagttctgtgaacctgcatttgttgttggtaattgcctccagatagcttctgacagtcatcagtatgatcgaatttattgtggagctggagtacagaaagaccatgaaaactacatgaaaatattactaaaagttggaggcatattagtcatgcctatagaggatcagttaacacagattatgcgaactggacagaacacttgggaaagtaaaaatatccttgctgtttcatttgctccacttgtgcaaccaagtaagaatgataatggcaaaccagattctgtgggactccctccctgtgctgtcaggaatctacaggacttggctcgtatttacattcgacgcacacttagaaatttcataaatgatgagatgcaggccaaggggattcctcaaagggctccacccaaaaggaaaagaaagagagttaaacagagaattaacacttacgtatttgtgggtaatcagcttattcctcagcctctagacagtgaagaggatgaaaaaatggaagaggatatcaaagaagaggaggaaaaagatcacaatgaagcaatgaagccagaggagccacctcaaaatttactgagagaaaaaatcatgaagctgcccctccctgaatctttaaaagcttacttgacatattttagagacaaataacttagatcaagaagaaaaatgcctactgataattcctttagtcttgaaaatgtagcatttgttaggagttaaaagagagaattatttctttcatcagagcaaattatagtggaaaaaaaaatcacttgtttctgtcagtaacacaaatgatgtattcagtgaataaaagaatcccttttataaaatctatttttctttaaatcttggaaaaatgttgttttagctcagagtgatttcaaagtggaatgcaacagtagtcaagacttgtgtactataaatccttttctgattccttacagatttgtagtgatgaggtttagatttaattttatatatggtttaaataattgttaagcttatataacctgatctgaattgcagttgtttgcatttcctctatgaaaacttcatttatctaataaggaagtcaaatgctttgtagactatttaccttacttttgttgcaatcactgttgttgggttgctgtatatatattccgggcaatatatgagtgcaataacaatacaagatattgaataatttagctttaaaaaatcccacaaattttatgaaattttacagccctgctacttttgcttttgaatctcttgccaaaagacatgggtaaaatatctgcctctctcatagagattttaagagcacagcaagtgaattattaaaacaaagtctatacttaatacaactctttatatggaccctttacattttcagtatttaaaaaaataactctatagaattttaaaagtatatttagaattgttttttctgtagttcactgtataaagtatttggttttttaaaaaaagcaaaaccattgttatgtgtgactcttgataggacacagaacgagtgaatgagcatgagtgaggccactttcttggatggctgtaagtagcagggccagggtagacctggtcagcggatgcactttagcagatggaacttctagtttatctgaatatttatctttgacaaggtagggctgagcctacatttgcttttgatctatctagtataagaaatattcacagaaattgtatgtagataccctttgttttgaaaatgctgttcagaatcatagtgtaatctttgggacctatgccatgttcatttcactccttcccatattttttgtgtttcttttggtaaaactataatggttttcattttttacttaatatcacacagttaaactgtccatatttgagctttattttagcttatcagtgataaaaaacaggtagtaactgccattgtttgtttgttttcctaataaggcctgaaaacagccattccttgttaagaaagtgtacaatgtaacatatttgctagagttacatggattatatatttcttaaagggaaaaatttgagagtatcatggactaccaccagcattattattacagtagttactcagatttggttaaggaagcccaagcaatgtatagtgaaaggattattatctctctgctaagattcagatattgtttcagaaatctcagctccagtaattccacaacatctaaaaacaaatgtttgtgatcatgtgtaagcatgaaattgttccaagtaagtgaggatattttagttatgtgaaagacagtttcatggaaggtatttgttttgtaccagtggctgggatggtggaattggggttatttctacaattattcttagacgattactaaactgttaagaaatgccccatatcatttttgtatctaggaaagaaaaaaatcagtttcatactgttgtcatctgtcagaaatgctcattttattttgaattaaatgtggcttttgaagtacctagttaccttgaattcctggtgaccacatgtttttatctggaaaacctggagaaagttatctgtcccatctcccctgcttgttttttttttttttttttttggttggagctgctgtttagatgatgcttttactatgcaggagagagtttttgttaaggatatatttgaagattggcttttccatattgtccttcattctttgaccgtggcaaagtgtacagtagattttcatgatcattgcatatttcttgtcattgaaatgtatcttttatgtttttaaatgcattcattttacacttgtgagtttatcattgactttaagaggtagaaatgaaaaatgaaaattaaagctaaagcctttttatctattaatgcagatatattagaataagaatattttgggtttgtgtttattttttaatgaatttatgtttacttgatatggaaaattacgctttataggtggaaaagtagcaaataaagattaagtaaaagtaagtgaaaatgatggggaatatagtattggaattttatagctagttaaaacaataagtatcatctaatttgggtgtttattttgcagatgagaaaacagacctagaaccgtggcatgttttgcctgaaacatacagtgagttagagacagggcctaagatagcttctagcatcagatcaatcccaagaatccatcagcaacctcagaccaacccaagaagataatttaaatctatactgcttattggtcaatatatttggttctagtattaataaagaaaaatgttattaaaatagcatacatagtagtaaaataaaatacaaaaagtgtgttgatttatagctgtttgagatgataaaagtgaagcaaagcctgttaaatcattggaagacttggaaaattattttaaataaacaattacatgtaaaaaaaaaaaaaaaaaaaaaaaaaaaaaaaaaaaaaaaaa

SEQ ID NO: 4888 - protein, 357 aa, Homo sapien
MGGAVSAGEDNDDLIDNLKEAQYIRTERVEQAFRAIDRGDYYLEGYRDNAYKDLAWKHGNIHLSAPCIYSEVMEALKLQPGLSFLNLGSGTGYLSTMVGLILGPFGINHGIELHSDVVEYAKEKLESFIKNSDSFDKFEFCEPAFVVGNCLQIASDSHQYDRIYCGAGVQKDHENYMKILLKVGGILVMPIEDQLTQIMRTGQNTWESKNILAVSFAPLVQPSKNDNGKPDSVGLPPCAVRNLQDLARIYIRRTLRNFINDEMQAKGIPQRAPPKRKRKRVKQRINTYVFVGNQLIPQPLDSEEDEKMEEDIKEEEEKDHNEAMKPEEPPQNLLREKIMKLPLPESLKAYLTYFRDK

SEQ ID NO: 4889 - DNA, 1581 bp, Homo sapien
gttggtagaacaccttttcaccttatgtcaaaagcatgaaatatgaaggcctagaaacaaaggttaatttatatacatagtactaataattataccaagtctactattatttcctactagtcagatgatttttatgaatgtaaaatattagaaaggcacagtaagtgacaccaagattaataagacaaataggtatggcagaaacagagaggtatatgagctgcatagggatctctgttgataagaatctgtgtagacttttttctccttccttcctttgatctttgatcatgggaagacatggaaaaagaaagctaactacagtgattttgtccactacactgttatttggttaaaaattttagtttcctaatgagtattagcatgtatgagaaattatgggagaaaaaggcgcatcctagaaaaggtgtgcttaattactattggggattggttaacatagcatgggagctggattgtcagagattcattatctagaaaatggcaacaagagtttataaaacgaacttctgtgagattactttttagctagcaaagacaaagatgtccttcagtaggtgaagtgataaactatgatacatccagatgatggaatactattgaggactaaaaagaaataagctgtcaagccatgaaaacacatggagggacgttaaatgcatattactaagtgaaaaaagctaatctgaaagggctacatactgtgtgattctaactatataacattccataaaaggcaaaactgtgaagacagcaaaaaaaaatcagcggttgccagggtttagaaggaagggagggataaatgtgcagagcacagaggatttttaggccagtgaaaatacttcgtatgatactacaatggtggaaacatgtcattatacatttatccaaacccaaagaatgtccaccaccaagagtgaaccctcaactatggactttgggtgatgatgtgtgggacaggaggtatatgaaaaatctctgtaccttcctcccaattttgctgtgaacttaaaactgctctaaaaaaagtcttttttaaaaaaagctctatgaactagttggtattataaaccttaggccatttcaagtaaaaattacatatcaatgtttattaaatactgagttaatagctgaatacctctttcatatacaaataagtacatttgcaattttttaaaaaagtcttaattccattagtaactgtggtttcatagttgccaaataactgtaagctatggatgttgcacaagactgtgattttatttaatcatttcatatctatttaaacatttccaaagcgcacattcatcttaatgttttcacactatttttgctcaacaaaaagttattttatgttaatggatataagaagtattaataatatttcagtcaaggcaagagaacccgataaagatcattgctagagacgtttaatgttacctgtagcggtacacttgttaaagaagtgattaagcagttacataaaattctgatcatagctttgattgataccatgaaggtataattcagtgcctggatactaacaactttacttgttta

SEQ ID NO: 4890 - protein, 52 aa, Homo sapien
MILQWWKHVIIHLSKPKECPPPRVNPQLWTLGDDVWDRRYMKNLCTFLPILL

SEQ ID NO: 4891 - DNA, 2716 bp, Homo sapien
gaccagaacttcctcgggggaggctgcaggggagcaggcgcatcctgcacagaacgctctagagcgcgcaggccaaagcaccaggctgctcctgacacgtgctgcaagagggtccccgacccgggggtccagaccctgcacgcatgatggggaaggtggaggcttccccctcagctccgcggagagaagctgacactgccaggctggaaccttccattccggcccagcctcttcctccctcgctgtgccgaggagggatctagaagggactttccagagagggttagcgtgcagggtgtggaaatggaataaaagcatatgcaaataggccttagctgccttcctctaccccagcaaataagagtctctccagaaagatgctctttctccaagacgcttgaccgctcttcctttcctggatggcaccagcagggccgattggagtggtaaaccctgggccggaaggcatgccaaagggtggacaggatggacaggagacagtagcacaacgaggagggggagaacagcggctgaattggaaatgataaaataaaatgaaattttaggagctcgctggctgggacaggcctggactgcaaggaggggtctttgcaccatctctgaaaagccgatgtgtatcctcagctttgagaactgaattccatgggttgtgtcagtgtcagacctgtgaaattcagttcttcagctgggatatctctgtcatcgtgggcttgaggacctggagagagtagatcctgaagaactttttcagtctgctgaagagcttggaagactggagacagaaggcagagtctcaggctctgaaggtataaggagtgtgagttcctgtgagaaacactcatttgattgtgaaaagacttgaattctatgctaagcagggttccaagtagctaaatgaatgatctcagcaagtctctcttgctgctgctgctactcgtttacatttattgattacttacgatgattcaggtactgttgtaagtgctttacatgctgttatacgagactcttgggagaaatcactttaatgaagcttgagacacatggcattgccatgcaatgatttttcccccctcttcacgggatcagagggaactaatagaatgtgacaatgattctttagcagggactgctgaggcttctggttcctttttaagatctgcagtgaaagaagatgagaaacatggatatgcccttcttttggtccccctcttcctttatttgatctctacttccttctataaatatattagggctacattgtccctttgtatttcaaacaaggcaaaaagaggttgtaattacactttactgcaatcctcagtttctccagggaacaggaatgcaaaggctttgaaggcctctctatttgctgacatggtcagctgggtgccatgggccaagtccttctgttgccctcctctgtcaccaagtaagctaggtcctttctgaggctcaggtttgctgtgatgatgatcacttttaggcagaaggttagaggcctcatgagtgctatatggactttattaggctttagatttgatggggaataagggatgtgatttgtcttttgggaactcatctttgattcatcattgtctcttggtatcttggaatttccatgtcattacagtctacagaatgaaagagtaacctgtcccagaggagaggcaggtgaaagactccacagcatgctcattctcattctgtcttctcagtgacaccgaggtttactgagtgcccactatgtgccaagcactgtgctcagggctttctttgtatgcatgatctcagtgaatctcaccaagcctcatctggaaaacggggacaaattaacaacaggatggcaaattgaaaaacacgtaaccatgttctacagatggaaaggggtgcttggttattatgaaggccccctcgcaagcgtgtgggacatgggtgtgttctctgggttgtactgatcagatcaaggacctcccccacccttctcacactctgcccacttccgccctttgcttatcagacccttagccagtgactcattccagaaccagaaccttggtgaaatctcaaccgacaccagagatcggtgtcttcagtcctagactgatggagaaaatccagaatatatactagaagctccaaatgctctgggtttcagctcctctgtgctgtggacactgactttggctcagaactccgatttagtacaaaaggctcatttttatttcaggggcactcttcctaaagcaaacctaataaatgaaatatggaattcacagatacacacacacattaaaaaattaacctagtgtatctgtgaggagtaggcagaaattcactgtataaaagaatgcttcatttcatagagaatttgtgttaagattccattagatagtacatttctcaaagatttttgaggttgtatttgctttaccaaaacttggtttatgtaagtggaaaaagcatgttgcaaaataacttggtgtctatgattcagtttatgtaaaataataaatgtatgtaggaatacgtgtgttgaaagatgtacatcaatttgctaacaatggttatctctgacgtggtgggatttgagatgtgtttttctttttggttgtatttttctctattgtttgacttaacacagaacatgtttggttacaacaataaagttattgaagacaaaaaaaaaaaaaaa

SEQ ID NO: 4892 - DNA, 2684 bp, Homo sapien
cggaagcaggaagtgagtttgcgaacggagcagctgctgcagggcccatggcggacacccagtacatcctgcccaatgacatcggcgtgtctagcctggactgccgtgaggccttccgcctgctgtcacccacagagcgcctctatgcctaccacctgtcccgtgccgcctggtacggaggcctggctgtgctgcttcagacctcccctgaggccccctacatctatgctctgctcagccgcctcttccgcgcccaggaccccgaccagctgcgccaacatgccctggctgaaggccttaccgaggaggagtatcaggcgttcctggtctatgccgcgggtgtttactccaacatgggcaactacaagtcctttggtgacaccaagtttgttcccaacttgcccaaggaaaagctggaacgggtgatcctagggagtgaggctgctcagcagcacccagaagaagtcaggggcctctggcagacctgcggggagcttatgttctctctggagccaaggcttcgacacctcggactggggaaggagggaatcaccacctatttctctgggaattgtaccatggaagatgccaaattggcccaggactttctggactcacagaacctcagtgcctacaacacccggctcttcaaagaggtcgatggagaagggaagccctactacgaggtgcggctggcttctgtgcttggctcagagccttccctggactctgaggtgacttccaagctgaagagctatgaattccggggaagccctttccaggtgacccggggggactacgcgcccatcctccagaaggtggtggagcagctggagaaagccaaggcctatgcagccaacagccaccaggggcagatgctggcccagtatatagagagcttcacccagggctccatcgaggcccacaagaggggctcccgcttctggatccaggacaaaggccccatcgtggagagttacatcgggttcatcgagagctaccgcgacccctttggttcccgaggagaatttgaaggtttcgtagctgtggtgaacaaggccatgagtgccaagtttgagcggctggtggcgagcgcagagcagctgctgaaggagctgccctggcccccaacctttgagaaggacaagttcctcacccctgacttcacctccctggatgttctcaccttcgctggctccggcatccctgccggcatcaacatccccaactacgatgatctgaggcagacggaaggctttaagaacgtgtcgctggggaatgtgctggctgtggcctacgccacgcagcgggagaagcttacctttctggaggaggatgacaaggacctgtacatcctctggaaggggccctccttcgatgtgcaggtgggcctgcacgagctgctgggccatggcagtggcaagctcttcgtacaggacgaaaaaggagcattcaactttgaccaggaaacagtgatcaacccagagacgggcgagcagattcagagctggtatcggagcggggagacctgggatagcaagttcagcaccatcgcctccagctacgaagagtgccgggctgagagcgtgggtctctacctctgtctccacccgcaagtgctggagatctttggctttgagggggctgatgcggaggacgtgatctacgtgaactggctcaacatggttcgggccgggctgctcgctctggagttctacacacctgaggccttcaactggcgacaggcccatatgcaggcccggtttgtgatcctgagagtcttgctggaggctggcgagggactcgttaccatcactcccaccacaggctccgatgggcgcccagatgcccgggtccgcctcgaccgcagcaagatccggtctgtgggcaagcctgctctagagcgcttcctgcggagacttcaggtgctgaagtccacaggggatgtggccggagggcgggccctgtacgaggggtatgcaacggtcactgatgcgccccccgagtgcttcctcaccctcagggacacggtgctgctgcgtaaggaatctcggaagctcattgttcagcccaacactcgccttgaaggctcagacgtgcagcttctggaatacgaggcgtcagctgctggcctcatccgatccttctctgagcgtttcccagaggatggacccgagttggaggagatcctcacacagctggccacagccgatgcccgattctggaagggccccagtgaggccccatctggccaagcttgaggaagatgtgtggccttgcccccaattccatcagaccaaggctgcaagtggccctccattcgtgtgtgtatttaggggctggggagggggaggggcaggagcttggaccttggtactacctcagctgagggtggtgacacaaccccttccatttgtcagcactttccagcctgccaattgcttcccctctgtgatctcatttcatctgcactgccatacgtggagtgagcaagacagggcttaccatcctgtctaccagatgaggaaatggcagttctgagaagtcactggtctagatcccgcaggtggcacgtgacagctagggttcaaaacgttctcaccaaatccaatgctcctcacatattaattttataaccagacaaataaatattagagacaaccaaaaaaaaaaaaaaaaaaaaa

SEQ ID NO: 4893 - protein, 737 aa, Homo sapien
MADTQYILPNDIGVSSLDCREAFRLLSPTERLYAYHLSRAAWYGGLAVLLQTSPEAPYIYALLSRLFRAQDPDQLRQHALAEGLTEEEYQAFLVYAAGVYSNMGNYKSFGDTKFVPNLPKEKLERVILGSEAAQQHPEEVRGLWQTCGELMFSLEPRLRHLGLGKEGITTYFSGNCTMEDAKLAQDFLDSQNLSAYNTRLFKEVDGEGKPYYEVRLASVLGSEPSLDSEVTSKLKSYEFRGSPFQVTRGDYAPILQKVVEQLEKAKAYAANSHQGQMLAQYIESFTQGSIEAHKRGSRFWIQDKGPIVESYIGFIESYRDPFGSRGEFEGFVAVVNKAMSAKFERLVASAEQLLKELPWPPTFEKDKFLTPDFTSLDVLTFAGSGIPAGINIPNYDDLRQTEGFKNVSLGNVLAVAYATQREKLTFLEEDDKDLYILWKGPSFDVQVGLHELLGHGSGKLFVQDEKGAFNFDQETVINPETGEQIQSWYRSGETWDSKFSTIASSYEECRAESVGLYLCLHPQVLEIFGFEGADAEDVIYVNWLNMVRAGLLALEFYTPEAFNWRQAHMQARFVILRVLLEAGEGLVTITPTTGSDGRPDARVRLDRSKIRSVGKPALERFLRRLQVLKSTGDVAGGRALYEGYATVTDAPPECFLTLRDTVLLRKESRKLIVQPNTRLEGSDVQLLEYEASAAGLIRSFSERFPEDGPELEEILTQLATADARFWKGPSEAPSGQA

SEQ ID NO: 4894 - DNA, 879 bp, Homo sapien
  Unsure 187-247, 338: Unknown base
atttcccagactttgttttctcattagcaaaacagacctaataaaaggactcatttcataggttttttatgaggattaattgagataaaccagataatacgcttaacaccgtggtacttgcaatgaagaaaatggtgaatggtacatacatggtaagtggtcaatacattttagtcattctattaannnnnnnnnnnnnnnnnnnnnnnnnnnnnnnnnnnnnnnnnnnnnnnnnnnnnnnnnnnnncccttctgggtagttgggagaagtcaagcattaataccagtgaagcacttcaaatggtgctttgcatacagcgagtgctcaattaaatgtnaaaattcttaaaatcatcaccacgattctgaccttatggactttgaagggcagatgttgtgtctcattgctttcgtgtccacaagacctggcacatagacgatgctcaataaatattatttgaaggagtgaatgatggtgacatggttcttaggagttaaaatgagaaaacccaaggagccgaaagcatgtctctacggggaaaggttagagagcactgactcaaaccatcgtctccaattatgcagttttaatgaggaagcaagcccaaccttgaacattatttaagccagagttatcccaataagcattttcctaccatgagtggtagattaagtagcattgagtcatgtagtgaaagtaatgtcccttcttcataccatttcaatgcctctggtaagtcaagagaaagtctttgataatagcctatttttaacacctctcacccttgtttgtcagaaagagcagacctcagattcagagactttagcaagcaaagatatccagtaaagaaatgaaataatggccgggcacagtggcta

SEQ ID NO: 4895 - protein, 51 aa, Homo sapien
  Unsure 187-247, 338: Unknown amino acid
MMVTWFLGVKMRKPKEPKACLYGERLESTDSNHRLQLCSFNEEASPTLNII

SEQ ID NO: 4896 - DNA, 2013 bp, Homo sapien
  Unsure 777, 811, 831-832, 857, 1634, 1721, 1769, 1990, 1992-1994: Unknown base
ttttaagatggagttttcgctcttgttgcccaggctggagtgcagtggtgcaatcttggctcactgcaacctctgccccccgggttcaggcgattctctcctctcagtctctcaagtaactgggattacaggcacacaccaccacggccagctaattattttgtattttgagtcgagaggagaattcaccatattggcctcaggtaatccgcccgcctcggcctcccaaagtgttgggattatgggcgtgagccagccacggtgcccggcccgttttattgtttgaaaaacaagtacaggttgttattatccaagaattgttgatagagtatatactgtatttgaagtgtagaactgaggcagaggctgattaatataactagtttacatttgttagcctttcacatctgtgaaggaataaagtacagacaaaagtggaaaacaaaccagaaaaaaaaaaattgtgaagcacagagctgcttaaaagagtggtgtcacattaaaagaaaaaagtcacagaaataagtcagtattttgtttagagactagaactccaactgctagccaactgcctagaatatagtaaatattttctagtttcttaaatgactagtaatattcctacattatgtgatggcatttcccaaactgtttaattagatgttagatttgtagccaaatatgtctaggaaatgcttaaacaatataaaacagttttaatgattggctttttagaacgttatatattagtgtgctttatgcatatccaagaggtgngtgaggtatttggggtttttcagacttacttgantacagatctggagtatctcnnaacagttgttttgtggaaaacactntggcaaactctgagtcttagtcattaaaaatagtttttgggtaaacaacagtgtaatagaaatggaaattactgattcacattgagccatgaagaatttattttcagcgatttttatagaagttgctttatgacaaagaaagctttggttaactggcatttggcatttcacacccctaaattttctacatgaggatttatttctctggttctctcactttctcactcagttatactgaattcatttatgatgagcgctctcaaccattcttattcatcaaagctgaagttggcagagccctctctggtacctgattagaagtccgtcttccgtctcatagggaagtgttagagatggataatgtttctgtgtagcagaagtagtcattatgtccccttaaattcggtcactttgactgcagtagagcttcttagtgagcagtctgtgatggagtatactttcggagaagctcatggtgggggaaacctggaatttatctaaatatttcatttctttgataaattacattaaaaaattaataagagtatctatttggtgaaatcattttcctccacgtgaccaaatgagaaatttagtgaaagatttaaaatcatttttcagactttttccacattagttgggaagcaaaccccttttttaaggcaatgtcagttattaagctttagggaaccacatgccactttaggtaacacatgattggagagattgaagagtgaagtccctgctttaaagtgtactcctgtggacacagtaatncatatatttaaaatggttcatgttaagagtaggtatatttctatctaaatactctgtagcttttgtgattcagggaaatgagtggancctcacaggcacaagaatctagtaaattctaggtttcttgtgtggaantcagtgggcaaaatcttaactgagtgaattcttgattattggtatcacatttgttagtctgtatgtatctgtgtcatcgatctccttaagaagagactcgtagatattgactgggagacccaagctgaatgctaaaatctgctccatggatataagctgatgcagtcatcatttcacattaaaatgtaccacagctatatatgcagcaaaaaaaaaaaaanannncgcccggccgcgaatataa

SEQ ID NO: 4897 - DNA, 2503 bp, Homo sapien
  Unsure 1499-1533: Unknown base
gggggcgctcggggaattaaaagaggggaaaaaaagcccgaagaaaactcacgccccaaacaaaacgcaaggagaggagggcgcgcggcctgcagccctcgcccgcgtccccggccgcggcgtgatgcgcgcggaccagcccgcgacgcccgggctgccgctgtccccgcacctggacgctggcgcggtggccgcgccccagcctcgatcgctcgccgcggcgactcggccccaggcttccggcgccggtgggggccctcgctctccatggggctgagggactggctgagaaccgtgtgctgctgctgccggtgcgagtgcttggaggagcgcgccctgcctgagaaggagcccctcgtcagtgataacaatccatattcctcatttggagcaactctggtgagggatgatgagaagaatttatggagtatgccccatgatgtgtcccacacagaggcagacgacgacagaaccctgtacaatttgatagtcattcgtaatcagcaggccaaagactcagaggagtggcagaagctcaactatgatatccataccctgcggcaggttcgaagggaagtaagaaacagatggaagtgcatcttagaagatttaggttttcaaaaggaagctgactctttgttgtcagtgactaaactcagcaccatcagtgattctaaaaacacaaggaaagctcgagagatgttgttaaaactggctgaagaaaccaatattttcccaacaagttgggagctctcagagagatatctctttgttgtggaccgtctcattgcacttgatgctgcagaagagttctttaagcttgctcgtcgaacttaccccaagaagcctggggttccatgcctggcagatggccagaaagaactgcactaccttccgtttccaagtccctaaaggagaggctcaggggcagaatgggaattcttccatgaggactcagcagtcaaccaaagttggacaattacatgtagaagagagtgagcaaatagagtttgcttagtgaaaaatgatactgaattctacataaatgtaaagtctttaatctgaggaccctgccccatgaattgtgcaggctgcattgaaacgccttggtgatctcatatttaggaagaaagttaaagagttggtcagatggatagttcataatgggtggttccattctgagagcccattgccccagctttggttttagttgtgtcataatctctgatcattaatcctactgactgagtggactatttcagttaataaaacaatatgattaatagagagagctgtcattgagtcccaaaatggattgccagttttaaaataattattataaaatgtatgctaaccccaaaataatactaggcatgaggtgacctctctgatttggtcaccttgtagaaccttggagggtgtcagggcatctctttgagtatcagttatgattattcagaagtatagatgtatcaaatgatagaaatgacaaggcatgnnnnnnnnnnnnnnnnnnnnnnnnnnnnnnnnnnnaagcccttggcattttatctggaatagcatctgtaaactgaagtgtttgacctctgttttcttctctcctctttcatctgtttctgattcgttggctggcagctgcacctgtggggggacctctcatgcagacttgcacatatgcagggagtattgcactgaagatctttgctggaccttcttctcttcagaagataattttcaaaagggagcaatgctgtgaatgcagcttgcttctctctacagattgagaagtccagcttcaaaagttacttgccacttaagcaaggaacttgtcaagagatcatggttcatgttactgaaaagactttaaggatttgtaaggttaatccatagattgctgagaacaatggaaatatttttatttttacagattttgcacttctgaattcaggttaaaaactaacttgtatttagtctgcttagaggactgtgacttgaaaatttttatataccaatgagctttttggtagcgtccacaatgtttaaaatatttcataggcgagatccgtgttctccatttattaatgcattgtagaccaatttaactgctgtgtttcaggaaaattcttcctagtttaataagcaagctaaaagttttattttttatatttagtgcttaatctttgcctcatgttatgtaaaattagcctgcagatattttctctcaattctgtagactctcgcaagataaacattcaaacagtgaaacaaacaataaaataaataaacctaaggatgtcgtattgttttactctctgtctcagaatttgtattttgcctttctgccttttttatgtcaaaatagatgagattgtgtgcatctataaattgttaccacagtatttttgataatgaataaggataggactatctctgtgattattaaaatacatggaattatccaggaaattttccttacaaggaattaaaagactcctgtatttac

SEQ ID NO: 4898 - protein, 303 aa, Homo sapien [sequence omitted]

SEQ ID NO: 4899 - DNA, 1809 bp, Homo sapien
ctcaaagtaaatccagtgcatctgtatatatgtgtagatagcagcaacaaacaatcctgaaacattatttttggctgttaggtaagtaaacgtgatgataattataaacaacattcaaataaccttggaccttggtgaaatgacttgtggtggccagaatggtgcaacaagatgttatttgcaagtttttttaagacacaaatatctcagatactaataatgagaataaagactgttgaatatgaaattaaagccaagcaataatgtgccaaaaagaggcagttataccagcaaatgcatctattatgggcacaccattatataatgatggtttgctttatgaagactgactgtaacccacaggataaaataagcaaaggcatagtttctgctttcttcctggaaaaacttgtttagaagcttcataaagaggtacagcactaatgagcattagtcaggatacagttggcatctatgtttttatgtgagcccagagggaagaggagccactcaaagtcttgctggcttaaaactcaagacagctgcaaccagaagttttgttgaaatggagactttaaacttatggtaattactctttctggacactagcatgtagaaagcaattcagttaactctgcccagaggattaccagctttagctgtgaaaaaatgggctcccggatgtaaaatcactaaaacatgagatcttgtatccaaagaggcttcaaatgatgccttacagaaaacgatgctccagatgggcacttctaaatgctaactcttcatcaagtatctttctggattcaagctcaaaattaattggctgcaaaatagtaggaataaaaatcacatattttacactttagaaaaggatattgatgatcaacctgcatggtgataattatgatgagataccccagtgatttaatgatgttagaaagaattaaatgggagagaattgctaacagctttcttgatctcttaactatggagatgtcattcatttatttctggggtgaaaattatagcttgctttttgacattgctgctagtattgttctttgttgctttaaaaattgtctctctttagaaaaactcttgagcagttaaacagttttttttctgattcatatcattgcttttaataacatgtaaaggctgtgtgtagagcaaactatataaaatgagtagaaagggcttactcatgttaattggcatccttgatgattttagttgagattccttaacatttattttagatcacatctttacgtaacttatttttcctaatgttttccatcgtgtcttaaaatgatgctggtatatcaggagattgcagtattatagtcatactccccaatccctagaggagaggaaagactaattcttgttttaagggcccctggagataccttttattaaggttgaaaaaggtcaacacagcctgaaaataagaaaaatatatactagcaattactaattttctaaatgtgtgtatctctgctgtactaatgtgtgaacaatatgtcgtgcataatactgtagctggtcgtggtatgtcaatacattctgtgagtgtgtacagtctgagtgatcagttttctatttttatgtgtaaaaaaaataacttgtcgtatcccatttaaaggccaatttctgtattcaggcaggcatatgtacatacatgaataaagccaacaaaagtgtgcacatgtattcagtaacagaatttgtccttttatttttgaaggtcagaaagggctgtttgatttgtgtttttgttttatcatctccttgagtaggtaacat

SEQ ID NO: 4900 - protein, 67 aa, Homo sapien
MRYPSDLMMLERIKWERIANSFLDLLTMEMSFIYFWGENYSLLFDIAASIVLCCFKNCLSLEKLLSS

SEQ ID NO: 4901 - DNA, 3180 bp, Homo sapien
atacagtttctctttgccagactagactaaagaaggagcactactttattctgataaaacaggtctatgcagctaccaggacaatggaatctacgttgactttagcaacggaacaacctgttaagaagaacactcttaagaaatataaaatagcttgcattgttcttcttgctttgctggtgatcatgtcacttggattaggcctggggcttggactcaggaaactggaaaagcaaggcagctgcaggaagaagtgctttgatgcatcatttagaggactggagaactgccggtgtgatgtggcatgtaaagaccgaggtgattgctgctgggattttgaagacacctgtgtggaatcaactcgaatatggatgtgcaataaatttcgttgtggagagaccagattagaggccagcctttgctcttgttcagatgactgtttgcagaggaaagattgctgtgctgactataagagtgtttgccaaggagaaacctcatggctggaagaaaactgtgacacagcccagcagtctcagtgcccagaagggtttgacctgccaccagttatcttgttttctatggatggatttagagctgaatatttatacacatgggatactttaatgccaaatatcaataaactgaaaacatgtggaattcattcaaaatacatgagagctatgtatcctaccaaaaccttcccaaatcattacaccattgtcacgggcttgtatccggagtcacatggcatcattgacaataatatgtatgatgtaaatctcaacaagaatttttcactttcttcaaaggaacaaaataatccagcctggtggcatgggcaaccaatgtggctgacagcaatgtatcaaggtttaaaagccgctacctacttttggcccggatcagaagtggctataaatggctcctttccttccatatacatgccttacaacggaagtgtcccatttgaagagaggatttctacactgttaaaatggctggacctgcccaaagctgagagacccaggttttataccatgttttttgaagaacctgattcctctggacatgcaggtggaccagtcagtgccagagtaattaaagccttacaggtagtagatcatgcttttgggatgttgatggaaggcctgaagcagcggaatttgcacaactgtgtcaatatcatccttctggctgaccatggaatggaccagacttattgtaacaagatggaatacatgactgattattttcccagaataaacttcttctacatgtacgaagggcctgccccccgcgtccgagctcataatatacctcatgacttttttagttttaattctgaggaaattgttagaaacctcagttgccgaaaacctgatcagcatttcaagccctatttgactcctgatttgccaaagcgactgcactatgccaagaacgtcagaatcgacaaagttcatctctttgtggatcaacagtggctggctgttaggagtaaatcaaatacaaattgtggaggaggcaaccatggttataacaatgagtttaggagcatggaggctatctttctggcacatggacccagttttaaagagaagactgaagttgaaccatttgaaaatattgaagtctataacctaatgtgtgatcttctacgcattcaaccagcaccaaacaatggaacccatggtagtttaaaccatcttctgaaggtgcctttttatgagccatcccatgcagaggaggtgtcaaagttttctgtttgtggctttgctaatccattgcccacagagtctcttgactgtttctgccctcacctacaaaatagtactcagctggaacaagtgaatcagatgctaaatctcacccaagaagaaataacagcaacagtgaaagtaaatttgccatttgggaggcctagggtactgcagaagaacgtggaccactgtctcctttaccacagggaatatgtcagtggatttggaaaagctatgaggatgcccatgtggagttcatacacagtcccccagttgggagacacatcgcctctgcctcccactgtcccagactgtctgcgggctgatgtcagggttcctccttctgagagccaaaaatgttccttctatttagcagacaagaatatcacccacggcttcctctatcctcctgccagcaatagaacatcagatagccaatatgatgctttaattactagcaatttggtacctatgtatgaagaattcagaaaaatgtgggactacttccacagtgttcttcttataaaacatgccacagaaagaaatggagtaaatgtggttagtggaccaatatttgattataattatgatggccattttgatgctccagatgaaattaccaaacatttagccaacactgatgttcccatcccaacacactactttgtggtgctgaccagttgtaaaaacaagagccacacaccggaaaactgccctgggtggctggatgtcctaccctttatcatccctcaccgacctaccaacgtggagagctgtcctgaaggtaaaccagaagctctttgggttgaagaaagatttacagctcacattgcccgggtccgtgatgtagaacttctcactgggcttgacttctatcaggataaagtgcagcctgtctctgaaattttgcaactaaagacatatttaccaacatttgaaaccactatttaacttaataatgtctacttaatatataatttactgtataaagtaattttggcaaaatataagtgatttttttctggagaattgtaaaataaagttttctatttttccttaagtcccctaaaagccataatttttattattcctttttctcttttttcaattctatgaatatgtattattttaaagttatatttttcacacagagatgatgctatattacaccttcccttttttgttggtttcttaaactctaatctcatgacagattataccttccttattacttgttttatcttactcagaatctttgaatatatttttctgcccagaattatctaaacaaaagggagaacaaaagaagtatgtctcacttgggaactgaatcaactctaaatcagttttgtcacaaaactttttgtatttgactggcaatgctgattaaaattaaaaatgcacaaaaaaaaaaaaaaaa

SEQ ID NO: 4902 - protein, 875 aa, Homo sapien
MESTLTLATEQPVKKNTLKKYKIACIVLLALLVIMSLGLGLGLGLRKLEKQGSCRKKCFDASFRGLENCRCDVACKDRGDCCWDFEDTCVESTRIWMCNKFRCGETRLEASLCSCSDDCLQRKDCCADYKSVCQGETSWLEENCDTAQQSQCPEGFDLPPVILFSMDGFRAEYLYTWDTLMPNINKLKTCGIHSKYMRAMYPTKTFPNHYTIVTGLYPESHGIIDNNMYDVNLNKNFSLSSKEQNNPAWWHGQPMWLTAMYQGLKAATYFWPGSEVAINGSFPSIYMPYNGSVPFEERISTLLKWLDLPKAERPRFYTMFFEEPDSSGHAGGPVSARVIKALQVVDHAFGMLMEGLKQRNLHNCVNIILLADHGMDQTYCNKMEYMTDYFPRINFFYMYEGPAPRVRAHNIPHDFFSFNSEEIVRNLSCRKPDQHFKPYLTPDLPKRLHYAKNVRIDKVHLFVDQQWLAVRSKSNTNCGGGNHGYNNEFRSMEAIFLAHGPSFKEKTEVEPFENIEVYNLMCDLLRIQPAPNNGTHGSLNHLLKVPFYEPSHAEEVSKFSVCGFANPLPTESLDCFCPHLQNSTQLEQVNQMLNLTQEEITATVKVNLPFGRPRVLQKNVDHCLLYHREYVSGFGKAMRMPMWSSYTVPQLGDTSPLPPTVPDCLRADVRVPPSESQKCSFYLADKNITHGFLYPPASNRTSDSQYDALITSNLVPMYEEFRKMWDYFHSVLLIKHATERNGVNVVSGPIFDYNYDGHFDAPDEITKHLANTDVPIPTHYFVVLTSCKNKSHTPENCPGWLDVLPFIIPHRPTNVESCPEGKPEALWVEERFTAHIARVRDVELLTGLDFYQDKVQPVSEILQLKTYLPTFETTI

SEQ ID NO: 4903 - DNA, 603 bp, Homo sapien
  Unsure 551-552, 554, 559, 566: Unknown base
tcacacacagagaaggcagcagaactggttccagagcctttatgctagaatagaaagtgcctgttattttgttcattctcctcctcgtccagtgtacagctgtagtgatggggaaacaggaaatcaattactaggttgccactaagtctacaaactattgaagaccagaatttacataaatcgtatgcagtcccacatctgacaggcttgcaaaaccttccacatttccatgagtaagcctatccaaatagtactacttctcaattgcaaatcataacaacctcttgtgtggccgtcagagctgactaagcagaaactatgatcctctgaatttagtatttttcctgtttgccaaaaatgatgtgtcattagtgacgaagttattcttaaagttcctttaacaaaactgtgatttatatcaaataacaatggcttggagggggtatggaaaattgattattcttcctaacaaatctattaattttattaaacttggtctccctccctttttcttggatgtttataaaatttaagtctttctaaaaaaaatnnanaaatnaaaaatntgtatcccactgccttctggcctccatggattctgat

SEQ ID NO: 4904 - protein, 47 aa, Homo sapien
  Unsure 551-552, 554, 559, 566: Unknown amino acid
HTQRRQQNWFQSLYARIESACYFVHSPPRPVYSCSDGETGNQLLGCH

SEQ ID NO: 4905 - DNA, 2731 bp, Homo sapien
tttaaccattctaactttgccttgggatattgaaaattctgaatcagtgaggtatctaaataatttatattttcaaaaaataatgtttattttataattctgagtgtaaaacactatcagaaaagtaatcctcatgctcactaaacaaacctactctaagacactcaacaaccagaacagttttattattgagttgtgtacaaaaatcttgactgtccagatgaaatagtttttcagcctgcagtgtgttagtgatatatctcaaggagatgaaccaataaagtacagactttgtggtctgaagctctgttgtgaaaaaataagctaaaccaattcacactgacagtataatttgattcaagtgcagctccagttcaataaaaactaatgtttttaaaattaactttgttttgtatttggttcaactccttgctagttctctctctatataatttataaaaactgcatgttgctaatctcatgatcctgtgcatgtggactactctgcctttaacttttttacaaaaacatgtttgttcatagattaaataaaagtatgttttcaacttaatgtctaatgttttctgacaattgtaagaataattttgaaatggaaatgctgctgtttagtttccacagtgcctacacaacctgataatccattttctcaccctgacaaactcaaaaggatgagcaagtctgttccagcatttctccaagatgagagtgatgacagagaaacagatacagcatcagaaagcagttaccagctcagcagacacaagaagagcccgagctctttaaccaatcttagcagctcctctggcatgacgtccttgtcttctgtgagtggcagtgtgatgagtgtttatagtggagactttggcaatctggaagttaaaggaaatattcagtttgcaattgaatatgtggagtcactgaaggagttgcatgtttttgtggcccagtgtaaggacttagcagcagcggatgtaaaaaaacagcgttcagacccatatgtaaaggcctatttgctaccagacaaaggcaaaatgggcaagaagaaaacactcgtagtgaagaaaaccttgaatcctgtgtataacgaaatactgcggtataaaattgaaaaacaaatcttaaagacacagaaattgaacctgtccatttggcatcgggatacatttaagcgcaatagtttcctaggggaggtggaacttgatttggaaacatgggactgggataacaaacagaataaacaattgagatggtaccctctgaagcggaagacagcaccagttgcccttgaagcagaaaacagaggtgaaatgaaactagctctccagtatgtcccagagccagtccctggtaaaaagcttcctacaactggagaagtgcacatctgggtgaaggaatgccttgatctaccactgctaaggggaagtcatctaaattcttttgttaaatgtaccatccttccagatacaagtaggaaaagtcgccagaagacaagagctgtagggaaaaccaccaaccctatcttcaaccacactatggtgtatgatgggttcaggcctgaagatctgatggaagcctgtgtagagcttactgtctgggaccattacaaattaaccaaccaatttttgggaggtcttcgtattggctttggaacaggtaaaagttatgggactgaagtggactggatggactctacttcagaggaagttgctctctgggagaagatggtaaactcccccaatacttggattgaagcaacactgcctctcagaatgcttttgattgccaagatttccaaatgagcccaaattccactggctcctccactgaaaactactaaaccggtggaatctgatcttgaaaatctgagtaggtggacaaatatcctcactttctatctattgcacctaaggaatactacacagcatgtaaaagtcaatctgcatgtgcttctttgattacaaggcccaagggatttaaatataacaaaatgtgtaatttgtgactctaatattaaataagatatttgaacaagctaggaaaattgaatttctgctgctgcttcaaagaaaaagctgccccagagcattaaacatggggtattgttaagaagcaaaatgttcttgtttgccatcatgtgtttcacaccacaattctgtgccacagttaagagggtctggtacccttgcaggacctttgtaggttgtgggaaaaagtcgcagaaagatactcaaagtggagcagggaatggagacagacatcagtgatgataaaaaaaaaaaaggaccttaagaaactatttactctgtaatctctaataaaatatggaattccatattagggcaatgagactgaaactactggtgtttttctgccttgagaaaacaaacagttaaaacaagcctcaaatgtattttagtgccacccactggccataggtacaattcagttgttggcttgttttgacttaattctaaaataggtctcaagcctgtatttttatgagtttatttttttaaaaccctgcatatatatgattgtttttcttataactttactatatgaaagcagcataagagtagtcacaaacatgttttgcaacaaagttttaattagaatgtaagttgctcagttatactgttcttcttatgtatgtaaaattttcgtattttgtaaaaacccttagaataaattatcatttgatttaaattgt

SEQ ID NO: 4906 - protein, 376 aa, Homo sapien
MSKSVPAFLQDESDDRETDTASESSYQLSRHKKSPSSLTNLSSSSGMTSLSSVSGSVMSVYSGDFGNLEVKGNIQFAIEYVESLKELHVFVAQCKDLAAADVKKQRSDPYVKAYLLPDKGKMGKKKTLVVKKTLNPVYNEILRYKIEKQILKTQKLNLSIWHRDTFKRNSFLGEVELDLETWDWDNKQNKQLRWYPLKRKTAPVALEAENRGEMKLALQYVPEPVPGKKLPTTGEVHIWVKECLDLPLLRGSHLNSFVKCTILPDTSRKSRQKTRAVGKTTNPIFNHTMVYDGFRPEDLMEACVELTVWDHYKLTNQFLGGLRIGFGTGKSYGTEVDWMDSTSEEVALWEKMVNSPNTWIEATLPLRMLLIAKISK

SEQ ID NO: 4907 - DNA, 2158 bp, Homo sapien
actagcgaccggtgacctctttttcccccttgcctggctcctgtggtggcaggctgggcacgaggaccatgctgggccggagcctccgagaagtttctgcggcactgaaacaaggccaaattacaccaacagagctctgtcaaaaatgtctctctcttatcaagaagaccaagtttctaaatgcctacattactgtgtcagaagaggtggccttaaaacaagctgaagaatcagaaaagagatataagaatggacagtcacttggggatttagatggaattcctattgcagtaaaagacaatttcagcacttctggcattgagacaacatgtgcatcaaatatgctgaaaggttatataccaccttataatgctacagtagttcagaagttgttggatcagggagctctactaatgggaaaaacaaatttagatgagtttgctatgggatctgggagcacagatggtgtatttggaccagttaaaaacccctggagttattcaaaacaatatagagaaaagaggaagcagaatccccacagcgagaatgaagattcagactggctgataactggaggaagctcaggtgggagtgcagctgctgtatcggcgttcacatgctacgcggctttaggatcagatacaggaggatcgaccagaaatcctgctgcccactgtgggcttgttggtttcaaaccaagctatggcttagtttcccgtcatggtctcattcccctggtgaattcgatggatgtgccaggaatcttaaccagatgtgtggatgatgcagcaattgtgttgggtgcactggccggacctgaccccagggactctaccacagtacatgaacctattaataaaccattcatgcttcccagtttggcagatgtgagcaaactatgtataggaattccaaaggtaactttttcctttcattactttacagaaatactgtcaagtccaatagagagcacagactagggaggcggattgggtgggtttgaatctctgctctgccacttttattaatcatgtgagttgagtatgtgacttaatctcttttagctcaatttccccatctgtaaaataggaataataaaaatactgacttcagagaggtttgtgaggatcaattagacagtcatgttaagtctgtaaattgtttctgtaatgggcaagatagcaaatattttagattttgtggaccatgcagtctttatcataactgcttaactgccattatagtgagaaagcagccacagacaatatgtaaatgaaaaagtgtgtctctgttccaataaaactttattttcaaaaaccagctggcttgtcacatctggcctatgggccatagtttgcccatccctaatgtaaagaaaggactttagcccaaagccacaacttgcatagtaatgcctcaaaaaatgttaacatctttactgttattattattactactgcatctattacagtagcaattgagtaatgaatacatgaatgttataatgttaaattactaaccttttaaaaatattaagcattgcaatatattaatactttaaatcttttaggaagataagttaccctgcagaataatgaagtttcacaacctcagcactgttggtgtttggggctggtaattgtttgttgtgggagactgtcctgtgcattgtaagatgtttagtagcatccctggcctctacccctacatgcaagtagtaccccaccaccaaaaccacaatcccacaaccaaaaatgtctgcagacattgtcaagtgtctcctggttagggaaaaggagacaaaagtaacccccaggtaagaccactgctatagagaaatactaccttatttaaaatcttccattaaggtaatatatgtaaggccaggtgcgtacacctgtaatcccagcaccttgggaagccaaggcaggaggatcgcttgagatcaggagtttgagaccagcctgggcaacatacagagccctatgtctacaaaaagttttaaaaaaattgtggggtgtggtggtgtgcacctgtggtcctagctgtttgggaggctgaggggggaggattgcttgagtccaggaggttgagactgccgtgagccatgattgcaccactgcactccaccctaggtgacagagcaagaccctatctc

SEQ ID NO: 4908 - protein, 303 aa, Homo sapien
MLGRSLREVSAALKQGQITPTELCQKCLSLIKKTKFLNAYITVSEEVALKQAEESEKRYKNGQSLGDLDGIPIAVKDNFSTSGIETTCASNMLKGYIPPYNATVVQKLLDQGALLMGKTNLDEFAMGSGSTDGVFGPVKNPWSYSKQYREKRKQNPHSENEDSDWLITGGSSGGSAAAVSAFTCYAALGSDTGGSTRNPAAHCGLVGFKPSYGLVSRHGLIPLVNSMDVPGILTRCVDDAAIVLGALAGPDPRDSTTVHEPINKPFMLPSLADVSKLCIGIPKVTFSFHYFTEILSSPIESTD

SEQ ID NO: 4909 - DNA, 3019 bp, Homo sapien
gcgccaccagggcagcagccgccgcagccgccgccgctgggcagaggagccggagacgcgagcgggcgaggtggcggcggcggcggagcgggagcgggtaccgggcgcgggcagagcgcggcggcgcggagacggggttttgccatgttgacctggctggtctcgaactcctgaacgcaagtgatccgcctgcctcagcctcccaaggtgctgggattacaggcacgagccactgtgcctggcctcaactgttgcttcttataaaggtgtgttccagagaacaagccttcagacatttgctatattgacgctgagctgtcaggggactcaggcttatgaggaggtattgttacacaaaacagtgtctagtgaagacgacaagaaagaggggaaaggatcggaaaaagaagctaaaatactatagaaaaccatgagatctattcgatcttttgctaatgatgatcgccatgttatggtgaaacattcaacaatctatccatctccggaggaacttgaagctgttcagaatatggtatctactgttgaatgtgctcttaaacatgtctcagattggttggatgaaacaaataaaggcacaaaaacagagggtgagacagaagtgaagaaagatgaggccggagaaaactattccaaggatcaaggtggtcggacattgtgtggtgtaatgaggattggcctggttgcaaaaggcttgctgattaaagatgatatggacttggagctggttttaatgtgcaaagacaaacccacagagaccctgttaaatacagtcaaagataatcttcctattcagattcagaaactcacagaagagaaatatcaagtggaacaatgtgtaaatgaggcatctattataattcggaatacaaaagagcccacgctaactttgaaggtgatacttacctcacctctaattagggacgaattggagaagaaggatggagaaaatgtttcgatgaaagatcctccggacttattggacaggcagaaatgcctgaacgccttggcgtctcttcgacatgccaaatggtttcaggcaagggcaaatggattaaaatcatgtgtaattgtcctccgcattctgcgtgatttgtgcaacagagtccccacatgggcaccattgaaaggatggccactagaacttatatgtgaaaagtctataggtacttgtaatagacctttgggcgctggggaggccttgagacgagtaatggagtgtttggcatctggaatactacttcctgggggtcctggtcttcatgatccttgtgagcgagacccaacagatgctctgagctatatgaccatccagcaaaaagaagatattacccacagtgcacagcatgcactcagactatcagcctttggtcagatttacaaagtgctggagatggacccccttccatctagtaagccttttcagaagtattcctggtcagttactgataaagaaggtgctgggtcttcagctctaaagaggccatttgaagatggattaggggatgataaagaccccaacaagaagatgaaacgaaacttaaggaaaattctggatagtaaagcaatagaccttatgaatgcactaatgaggctaaatcagatcaggcctgggcttcagtataagctcctatctcagtctggccccgttcatgccccagtcttcacaatgtctgtagatgtggatggcacaacatatgaagcctcaggaccatccaagaaaacagcaaaacttcacgtagcggtgaaggtattgcaggcaatgggatatccaacaggctttgatgcagatattgaatgtatgagttccgatgaaaaatcagataatgaaagtaaaaatgaaacagtgtcttcaaactcaagcaataatactggaaattctacaactgaaacctccagtaccttagaggtaagaactcagggccctatcctcacagcaagtggcaaaaaccctgtaatggagctcaatgaaaaaagaagaggtctcaagtatgaactcatctcagagactggtggaagccatgacaagcgctttgtaatggaggtagaagtagatggacagaaattcagaggcgcaggtccaaataagaaagtggcaaaggcgagtgcagctttagctgccttggagaaactgttttctggacccaatgcggcaaataataagaaaaagaagattatccctcaggcaaagggcgttgtgaatacagctgtgtctgcagcagtccaagctgttcggggcagaggaagaggaactctaacaaggggagcttttgttggggcgacagctgctcctggctacatagctccaggctatggaacaccatatggttacagcacagctgcccctgcctatggtttacccaagagaatggttctgttacccgttatgaaatttccaacatatcctgttccccactactcattcttttagcaaatgacagaagctaattcctattgaacaacaatacagtacaacacagaatgttagagaaaaagcctttttatcctgctttctttgaacacatacttgatcaaaattatttgtaaagaacatctttcctactttttgattttaacaaatgcaaatttagttctctaaaacttgaaaaaaaaaagaaaccagttctgtgaaaacggtacctcatttctggaaaataacttataccagcccttctgttctagggaaataaaagtctagcagttcaaagtttaagttttaagagacgtatcagattatgtaaaattaaatttgtgaaggatgtatagagtctcaaacactgatcacaaataaactgctttgttgtaacacagagtactgcctggttcctgatgcagtcactgattcttagttgattgatatgtatttgccccagggcactttaatttgggctgtagttattttttttaatacaatagagacttttcatttaactttaactttgtaaatattgaagtgtgtaataaagccaataaaatatgggtttgaaaaaaaaaaaaaaaa

SEQ ID NO: 4910 - protein, 672 aa, Homo sapien
MRSIRSFANDDRHVMVKHSTIYPSPEELEAVQNMVSTVECALKHVSDWLDETNKGTKTEGETEVKKDEAGENYSKDQGGRTLCGVMRIGLVAKGLLIKDDMDLELVLMCKDKPTETLLNTVKDNLPIQIQKLTEEKYQVEQCVNEASIIIRNTKEPTLTLKVILTSPLIRDELEKKDGENVSMKDPPDLLDRQKCLNALASLRHAKWFQARANGLKSCVIVLRILRDLCNRVPTWAPLKGWPLELICEKSIGTCNRPLGAGEALRRVMECLASGILLPGGPGLHDPCERDPTDALSYMTIQQKEDITHSAQHALRLSAFGQIYKVLEMDPLPSSKPFQKYSWSVTDKEGAGSSALKRPFEDGLGDDKDPNKKMKRNLRKILDSKAIDLMNALMRLNQIRPGLQYKLLSQSGPVHAPVFTMSVDVDGTTYEASGPSKKTAKLHVAVKVLQAMGYPTGFDADIECMSSDEKSDNESKNETVSSNSSNNTGNSTTETSSTLEVRTQGPILTASGKNPVMELNEKRRGLKYELISETGGSHDKRFVMEVEVDGQKFRGAGPNKKVAKASAALAALEKLFSGPNAANNKKKKIIPQAKGVVNTAVSAAVQAVRGRGRGTLTRGAFVGATAAPGYIAPGYGTPYGYSTAAPAYGLPKRMVLLPVMKFPTYPVPHYSFF

SEQ ID NO: 4911 - DNA, 3857 bp, Homo sapien; identical to SEQ ID NO: 3772

SEQ ID NO: 4912 - protein, 503 aa, Homo sapien; identical to SEQ ID NO: 3773

SEQ ID NO: 4913 - DNA, 2883 bp, Homo sapien; identical to SEQ ID NO: 3913

SEQ ID NO: 4914 - protein, 459 aa, Homo sapien; identical to SEQ ID NO: 3914

SEQ ID NO: 4915 - DNA, 902 bp, Homo sapien
gactcttacctacttcggggcccactttgctgtcatccgccgagcgtccctggagaagaacccgtaccaggctgtgcaccaatgggccttctctgcggggttgagcctggtgggcctcctgactctgggagccgtgctgagcgctgcagccaccgtgagggaggcccagggcctcatggcagggggcttcctgtgcttctccctggcgttctgtgcacaggtgcaggtggtgttctggagactccacagccccacccaggtggaggacgccatgctggacacctacgacctggtatatgagcaggcgatgaaaggtacgtcccacgtccggcggcaggagctggcggccatccaggacgtgtttctgtgctgtgggaagaagtctcctttcagccgtctggggagcacagaggctgacctgtgtcagggagaggaggcggcgagagaggactgccttcagggcatccggagcttcctgaggacacaccagcaggtcgcctccagcctgaccagcatcggcctggccctcacggtgtccgccttgctcttcagctccttcctgtggtttgccatccgctgtggctgcagcttggaccgcaagggcaaatacaccctgaccccacgctctccagggcagaagtcgcggtgggctcagtgggtgccctgagcggggtctctcagactgacgtcaggccttggtgggctgcactctcacctggaggctccggggaagcatctgcctccaggaccattcaggctgttgacaagtcaactcctcatggctgtaggactgaggttcccaagtccttgtccctggtcctgtggtccctccaccttcaaaccagcaatggtgcattgagcaaattgtggtcaaatatacatcacatcaaatttaccatctt

SEQ ID NO: 4916 - DNA, 3873 bp, Homo sapien
atctgctggcatttcctgcagccaggcccgcgccgccagtggagcccccgcgcgcccggccggcccggagcaccgagctcgcggcacggtaggagaagcccccgagcgcccacagcatgaaggaggaggccttcctccggcgccgcttctccctgtgtccaccttcctccacccctcagaaagtcgacccccggaagctcacccggaacttgctcctcagcggagacaatgagctctacccactcagcccagggaaggacatggagcccaacggcccgtcgctgcccagggatgaagggcccccgaccccaagctctgccacgaaggtgccaccggcagagtacaggctgtgcaacgggtcagacaaggaatgtgtgtcccccaccgccagggtcaccaagaaggagactctcaaggcgcagaaggagaactaccggcaggagaagaagcgcgccacacggcagctgctcagcgctctgacagaccccagcgtggtcatcatggctgacagcctgaagatccgcggcaccctgaagagctggaccaagctgtggtgcgtgctgaagccgggggtgctgctcatctacaagacgcccaaggtgggccagtgggtgggcacggtgctgctgcactgctgcgagctcatcgagcggccctccaagaaggacggcttctgcttcaagctcttccacccgctggatcagtccgtctgggccgtgaagggccccaaaggtgagagcgtgggctccatcacacagcccctgcccagcagctacctgatcttcagggccgcctccgagtcagatggtcgctgctggctggacgccctggagctggccctgcgctgctctagcctactgagactgggcacctgcaagccgggccgagacggggagccagggacctcgccagacgcatcaccctcatcgctctgtgggctgccagcctcagccaccgtccacccagaccaagacctgttcccactgaacgggtcttccctggagaacgatgcattctcagacaagtcggagagagagaaccctgaggagtcagataccgagacccaggaccatagccggaagacggagagtggcagcgaccagtcagagacccctggggccccggtgcggagagggaccacctatgtggagcaggtccaggaggagctgggggagctgggcgaggcgtcccaggtggagacagtgtcagaggagaacaagagtctgatgtggaccctgctgaagcagctacggccaggcatggacctgtcccgcgtggtgctacccacgttcgtactggagccgcgctccttcctgaacaagctctccgactactactaccacgcagacctgctctccagggctgcggtggaggaggatgcctacagccgcatgaagctggtgctgcggtggtacctgtctggcttctacaagaagcccaagggaatcaagaagccgtacaaccccatcctgggggagaccttccgctgctgctggttccacccgcagactgacagccgcacattctacatagcagagcaggtgtcccaccacccgcccgtgtctgccttccacgtcagcaaccggaaggacggcttctgcatcagtggcagcatcacagccaagtccaggttttatgggaactcgctgtcggcgctgctggacggcaaagccacgctcaccttcctgaaccgagccgaggattacacccttaccatgccctacgcccactgcaaaggaatcctgtatggcacgatgaccctggagctgggtgggaaggtcaccatcgagtgtgcgaagaacaacttccaggcccagctggaattcaaactcaagcccttcttcgggggtagcaccagcatcaaccagatctcgggaaagatcacgtcgggagaggaagtcctggcgagcctcagtggccactgggacagggacgtgtttatcaaggaggaagggagcggaagcagtgcgcttttctggaccccgagcggggaggtccgcagacagaggctgaggcagcacacggtgccgctggaggagcagacggagctggagtccgagaggctctggcagcacgtcaccagggccatcagcaagggcgaccagcacagggccacacaggagaagtttgcactggaggaggcacagcggcagcgggcccgtgagcggcaggagagcctcatgccctggaagccgcagctgttccacctggaccccatcacccaggagtggcactaccgatacgaggaccacagcccctgggaccccctgaaggacatcgcccagtttgagcaagacgggatcctgcggaccttgcagcaggaggccgtggcccgccagaccaccttcctgggcagcccagggcccaggcacgagaggtctggcccagaccagcggcttcgcaaggccagcgaccagccctccggccacagccaggccacggagagcagcggatccacgcctgagtcctgcccagagctctcagacgaggagcaggatggtgactttgtccctggcggtgagagcccatgccctcggtgcaggaaggaggcgcggcggctgcaggccctgcacgaggccatcctctccatccgagaggcccagcaggagctgcacaggcacctctcggccatgctgagctccacggcacgggcagcacaggcaccgaccccaggcctcctgcagagcccccgatcctggttcctgctctgcgtgttcctggcgtgtcagctgttcattaaccacatcctcaaataggagccctgggggcagagctcctggccagtcccgagccctccctcccaggcacccagcactttaagcctgctccatggaggcagagaggcccggcaagcacagccactgtgacggggagtccaggcgcaggagggacccggggccacaaggcgctgcgggcccaggtgtgctgggcccctctcaggggcactggcctctctgcagggccttccgcccagcgctggccttaatgctaaagccaaatgcagcttctgctgtgcgacgcactcctggccatcttgccgtgtcaccccctgtccggcctccacttgccatgggggatggatggatttagggtgggagggcctgtgggggccctggacagtcacaccccagcagcagtgagtgggcaggtttggaggagcagccagggagccccgagtggcccaggagtccccccacacacagatgcataggcctgccttccggagaccctgtccacattgccgggaccaccctggtggggccactggtgggtgccagggacaggttagggccactctggggaaggcattttggttttttattccacgctgtgctgtttggatgggagccccacagaggcaggtcctggaaccaccccacccccacacctggacgctcgctctggtgggggcacacgcaggtggaggtggttgtgggtgcaggtgtgtgcaggggtgtggggggcgcaggggtgtggcttagctggccccgcacccaggccggggaggctcaagttcgccactttactcagaccgatgcacagtcttcccattttacacttttttaataaacataattgcaatattttaggtgggctgcgagctgcagtcagccttcacgtctggcctcagtccccgtgtcagtgccgctctgcgtgtgcgtgtgcgcgtgtgtgagcctctacacatatatatacgtacagagccttaaaccacatcgtggcggtgccgtctgagctgtagcgggtggctttgtttccagtttttgtacccgtgtccttgtctcccctcctcccccatctggggatgtgtctgtgttccacaccttgaaataaacagacacatacgtgttctcttaaaaaaaaaaaaaaaaa

SEQ ID NO: 4917 - protein, 879 aa, Homo sapien
MKEEAFLRRRFSLCPPSSTPQKVDPRKLTRNLLLSGDNELYPLSPGKDMEPNGPSLPRDEGPPTPSSATKVPPAEYRLCNGSDKECVSPTARVTKKETLKAQKENYRQEKKRATRQLLSALTDPSVVIMADSLKIRGTLKSWTKLWCVLKPGVLLIYKTPKVGQWVGTVLLHCCELIERPSKKDGFCFKLFHPLDQSVWAVKGPKGESVGSITQPLPSSYLIFRAASESDGRCWLDALELALRCSSLLRLGTCKPGRDGEPGTSPDASPSSLCGLPASATVHPDQDLFPLNGSSLENDAFSDKSERENPEESDTETQDHSRKTESGSDQSETPGAPVRRGTTYVEQVQEELGELGEASQVETVSEENKSLMWTLLKQLRPGMDLSRVVLPTFVLEPRSFLNKLSDYYYHADLLSRAAVEEDAYSRMKLVLRWYLSGFYKKPKGIKKPYNPILGETFRCCWFHPQTDSRTFYIAEQVSHHPPVSAFHVSNRKDGFCISGSITAKSRFYGNSLSALLDGKATLTFLNRAEDYTLTMPYAHCKGILYGTMTLELGGKVTIECAKNNFQAQLEFKLKPFFGGSTSINQISGKITSGEEVLASLSGHWDRDVFIKEEGSGSSALFWTPSGEVRRQRLRQHTVPLEEQTELESERLWQHVTRAISKGDQHRATQEKFALEEAQRQRARERQESLMPWKPQLFHLDPITQEWHYRYEDHSPWDPLKDIAQFEQDGILRTLQQEAVARQTTFLGSPGPRHERSGPDQRLRKASDQPSGHSQATESSGSTPESCPELSDEEQDGDFVPGGESPCPRCRKEARRLQALHEAILSIREAQQELHRHLSAMLSSTARAAQAPTPGLLQSPRSWFLLCVFLACQLFINHILK

SEQ ID NO: 4918 - DNA, 799 bp, Homo sapien
aatacaaagcaggcccgttaaccaacagttgaaattaagggcccttccagaccccccagctgagaagaagtctgctactgaaaggagctcacaatttaacaggagagagagagaaagatacactgtgaaggatagtcaaaagacattgcaaagaggaggactggtactgtccccacccccactaagagcttaagatagaacagtctgaatgagactctgaaatatatttaaaatgatgaaagaaaaatgtcagctttcctctttccagtcaagacaggtgggatcccattgtttaatctagaaatacctgtgtgagatactagtattgatggtgagacgtcaatagtaaaatatcttggaggtaaaactaaacattcttcagtcatttaaataccagcacagcaggcctgtttgccagttcactaactaccttgttgccacagtagttgactgcctttttttcagcaaagggaataatgatttagagggtagacgagtgagtcacaatgtaacttggctcagacaagaagaataaagcaaggattactatgcagatggaattggctgttactatgatgacagtaatgtgttaaggggcttttccagcacaggatcctgaagaaacttaacccaaatctacatctgttcccttttcattgaaatctaacctcccattggccacagagcctcaagcctaatatttgaggacagtcagcatgcacgcaagaatgctttacctcataagtaggaaagagaatttgggtcacagaaaccagggcaaattttctgctcttaaatg

SEQ ID NO: 4919 - protein, 63 aa, Homo sapien [sequence omitted]

SEQ ID NO: 4920 - DNA, 5534 bp, Homo sapien
caggaaaagttttttacatacgaattaaagatgcttctttatgcaaatttttaaaccccaggtttgaagtaggataaaaggtaacattaaatctgagatcatttctagctctggaattctgtgattgtaatgagttttgatttctaaatgttttttcctttcataatttcagggttagtcagcaacataaaatcaacctaatgacagcagacaacttatccatctgtttttggccaaccttgatgagacctgattttgaaaatcgagagtttctgtctactactaagattcatcaatctgttgttgaaacattcattcagcagtgtcagtttttcttttacaatggagaaattgtagaaacgacaaacattgtggctcctccaccaccttcaaacccaggacagttggtggaaccaatggtgccacttcagttgccgccaccattgcaacctcagctgatacaaccacagttacaaacggatcctcttggtattatatgagtaggaagtgattgcaaacaggctggatttggacaaaaagcaaatctagacatgcatgtttcagggttcagtagtatacttcatgtttcatacagataattcacattcaaaattacattttctctttgaactagatggtattccttattcacttacattacaaatctaagaccatgtgataagcatgactggagaggtttaatttttataaacaaaaatagctataaagtacaaagctgctgctgcatgcaaccttattgcaatcagtatatcattcctgtggcaatttctgtcaccttatattgtgaataaaatttttctatagaaattaaatgatttaaaaactcacctatatgaaacatttaatgcttttcagcctgctttctggctgattttgttatttgatgtgctaatttgggcaacttaatttacattctggcagtcggtgtagataactaaaagcccagttaagtattttataatttcaggctactgaggccatgcttgggatgttgtttgaaagaaagaaaaaatacacttgacatatttcacatttctgtaccttcatctttacttccaagtaaacccgtggatgatttgatgagggataaatgaacctatttcttttacacacataccaaggacatgcttgtggctaaagtgagttgataatgttgtgcaaaggatagttgtcaccaactcatttctttatggtccataatgaaataaaaattttgtatactgttaattctgtaaacagatgcatgttcaaaagatctatgatggtcttgtaatcttaatctaatatattttagatattttaattttttccctcttggggaacacatttagtatagtgtagaaaatacttccatgacattttcatataaggttatataacttttcatacataaacatgaaatttgttgtagaaaattctttaaaccaaacatttaaatctaggacttcaatttaatttgttccttgaatctatttttatgtggcccttaaaaaatatccaaaaaacccattgctaatatagcaataaaaatactttgggtactgacagactctttggagtgtttatattacaaatttgtattcatattcttttctgtgatgtgttgtactaaaatccaaaatggcttttgcaccatttttaagccaattttttcctttgatgttggtaccagaattactataagtgactgctgcttttgggggtaaacattttgttagtgaagataaaaccagaacactaaattatggataaaattttcagaataggtggcacaggtaaatttcactaggttatattttgtgtagtaaagaaaaaaattatttggtcaatgttatcttaattcatactacaatttaagattatcttatgtgtattatagtaaatagatgattttcagattcaaggctcctaagagtttgatttgctctgttttttcctaaaataaatattgtctctcccaactgttaagttctaggtattgtacttccaattttaacttcagaaccaagatgttggcatgaaccaggctgctgttgaagtacatgtatattataaattatcttatttgtgttatactcttacatgttatcttttctaagaaaacaaagtccctattattcctattgcaaagcacacaggaattaagaaagtacagtaatttttaaaaaaaaatccggtaaatgtagtattcttaacctgttctatattacttatacctattgtctatatagctttaatttatagttgtcagtttaactattggcatgtctggcaaagaaaattaaactttaagagttttataaactgtttctaggttgctaaagaatttatttttctactatatatggtatagacaaagcatcaaactatgtacaggaaaaaagcctgactatttctatttggaagtaggctgaaaagagaattttcaaaactgttcgtgtcttcagttcattctgtcataactttgctattgtaatatgtgaataccagtttatttaagctgttctcttttatactgtattaatttaatgttcatctgcgtttagtaccatttttgttattaaaactggcatttaccgtttttcacattaacccaccttgcaccttcccccaaacttatctccacttttctatgcattctatcattgatttgacacacttcatagtgagtcatttaaatactctacgtttggttcaattaaccagtaggttacagttattgaaaattaaagtacagtttaaagctcagtctgttacactgaattgattgtgtttgtttttgccaagggtttagatatgcttttaaatattagaaacatctaagaacagaataacataattaaacttttttctggtaagttactggaaggtttcactgtttagggacctatcatatgagacttcttaaaggattaaaagaataggatagtctcataattgtgagtaaacatcaaggcattatattttacaatactgaataaaatttcatctacacacatgttgccattgtttcatttaaggttcagtgcttatagttaactacaatattggacctaacaggatctagattagcaatataaagaagcatagtggtactctgtttcacactttcagtagatttattagaagtcaaattctattcaacagacacttattaggatatacaactaatttaagaataaaattccaggcacaatatattttttttaaatggtatttgttagtagtgcttcttccccttaacatttacagtgtaaatactgcaggtaaccgcaatctaagttagccaaaaagcagctttttttcccatactgtatgtaaataatgtagacctgggtttttttgtttatttgggtttgtttttttttttgaggtactggaatctaattaatatctcttaggtatcaacaaaagggaacaattggaatgagaatttaggccttagcttccatggtgatttttagttttttatacagtaataattgtgatgctatttgtcaactggatataaatacacatataattttaaaaagtcaaaagtgcttttgtttctttgtttaatgtaatttttgtgcttcacctacaggatgctgcagtaaattaaatatcagtgaagcttctgatgtataaagaatgctatgaataaaacattaagaagctgtgtaattttaagttatagttgcctctatttttaccatttcattggtaaaaattagctaatttttttcaagtgaaatgaaaaataaaaatataaatttatcaatatgatggaaatcttattaaggagatgtattattgaattttcactgtacctgaaaaggagattcaaaattttttctggggatgtatataggtgaaaatttgattttttaaattatcaggaaaacaagataatgcacagatttctaagactaagatcttacctggatgtgatttttgagctgtggctagacattctttagagccactggaaatattttgaaaactattctagttatagcagagctgctaatattaacgaatatatttgtgtcttcatggtttgtgactattaggccaaattttgtggtatatgttgtcagtctggatctggtgaggtctgttcaacatgaatctttgtgttatcttgaatttagtagtttcaaggtacttaaattcttaacagtttctaatttgtttcaatacatatgggacatggttgatttttttactgtattagaactcttggaagttcttagccttttcaggttatgaaatacctgaaagtaaaattttctaagatttaataagggaagatactattcaaatcattttcttaggatagcatctttacatacaatgagaggattgtacaagcattaatctcatattccaacatccagttacttgatgtgatccaagtaccctggtctttttgaagcagttaaaatctaattaattaactttgggagtcttcactattcaattgatcctcatcattgtcctatttgcatgactccattttttcctccactatatgagttttctttgtcagggggagaggagtgggaagagtcacagaatctcatattcacatcttaattaaattgtgtgaaattagtcttttgtggaaattctgtaggcagtatgattttgaaaagctaaccaatgataattagcattttagttaatactaaatgcataaaattataacccttgaaattaatttggtgctggcagttctggtttagtcatttttaccagtagttagtagtattaagacctgcagtatatgcactttttgagtagctgtcaaataattgtagttgagaaacaacttgtttattctcacaattcagattttctattcagttttgtctcaaatagtaagttattgtgaacaatttaataacggccctcctgttctagtttgcctaatattttagttaagatttagtgttttaacctatttttttaagtttattttttgtattagattttatttgaataagttatgtgggtttagtaattgacctatttattcattgcttcactaattcatccagattagttttaagtgtgtatatgtatttgctcaccagatcattttcttgggaccttgaactgtgaatgttttgtcctaaccatttaatattttctaggtacttgctgcaagttcttgaactattttaccagctttaactttggggctcttagtttcttttctccagattcttgttattttattttatccaaataaatatttaggtgttctaagaagtagacttctgtctaattccgtaaaataggtaaaatcagaagctgtacacactatcatactgttattatttgggattgtttataaatgtaggtgaaaggataaaaaatacctatctgagagaatacagcctttagatatccttcttggaaatttgacttagagatttttcatttgttggcagtcacaggcatagctgctgaatgtcttttggtctgtaatatttgaagtgagaaacattaccagcaatgtactt

SEQ ID NO: 4921 - protein, 99 aa, Homo sapien [sequence omitted]

SEQ ID NO: 4922 - DNA, 2742 bp, Homo sapien; identical to SEQ ID NO: 4584

SEQ ID NO: 4923 - protein, 587 aa, Homo sapien; identical to SEQ ID NO: 4585

SEQ ID NO: 4924 - DNA, 4628 bp, Homo sapien
cattttctagcacactgcactgtcgtgtagacttgtgggaagaacttttcccgttttcaagctccacgctgcatcacaggaaatgacactgaccagattaagctacaaatacaagtctcgcagccagtctcaaagtctgtaaccccaataacattttttaggtaaataaaaattgttactgggtggtcttcccttctccaggaagcagagctgaggctggtaaagttcctgcctgagattttggccttgcaaagggatctagtgaagcagttccagaacgtccagcaagttgaatacagctccatcagaggcttcctcagcaagcacagctcagatgggttgaggcagctgcttcacaacaggatcacagtctttctgtccacatggaacaaactgaggagatcgcttgagacgaacggtgagatcaacctacccaaagactactgcagcactgacttggatctggacactgagtttgagatcctcttgccacgccgacggggcctgggcctctgtgctaccgctctcgtcagctacttgattcgcctacacaatgaaattgtctacgccgtggaaaaactctccaaggaaaacaacagctattccgtggatgccgccgaggtcactgaactgcatgtcatcagttatgaagtggagcgggacctgactccactgattctctccaactgccagtaccaggtggaggagggcagagagaccgtgcaggagttcgatctggagaagattcagcggcagatcgtcagccgcttcctccagggcaagccccggctgagcctcaagggaatacccactctggtgtacagacacgactggaactatgaacatctctttatggacatcaagaacaaaatggcacaggtgatcccgataaacctgatcctgtgcacggggctttctgccttctcagtgtgtttccctccgtgttaggcctactccagccttgccccgggtgtttgctgtgagcccacagtttctgcggcctcccttacagagagcaagcaagacagcaaatcagcaagttttcttgtagagtaaaagcagattgacatcttgtgggtttgattcttaggaatgatgttgatgcatggccatgcctgctgaagcgggaagtccatggaaccgatttgttcctgctctccgcatgcgggtactgataggtagacctgtgtgtctccatggcctccaggaactgcctgcacaccgtgcgcccaagtgtcagctgttagagagttggccccccgcatgtggcttgggcagtgaaggggctcggctctcttaccaggtggtgagatgccagaaacccagcccacagacatccctctcctgcttttcatttcccaggactccctccccagctcggtcattagtgccatcagtggacagctgcagtcctacagcgatgcctgtgaagtgctgtctgtcgtagaagtcactctggggtttctgagcacagctggtggggatccaaacatgcagctgaatgtgtatactcaagacatcctgcaaatgggtgatcagacgattcacgtgttaaaggccttaaacagatgccagttaaaacacaccattgccctctggcagttcctgtctgctcataagtctgaacagctgctgcggctgcacaaagagccatttggggaaatcagttcaaggtacaaagcggatctgagcccggaaaatgctaagctcctcagcacattcctaaatcagactggcctagacgccttcctgctagagctgcacgaaatgataatcttgaaactaaagaacccccaaacccaaaccgaggagcgcttccgccctcagtggagcctgagagacactctcgtaagttacatgcaaactaaagaaagtgaaattcttcctgaaatggcatctcagttcccagaagagatactgctcgccagctgtgtctcagtgtggaaaacagctgctgtgctgaaatggaatcgagaaatgagatagaattatttcctcagctatctttggatgactttggagagaagactcctctctcctcgtctgcggcgtggacttgatcatggactggtgcctttgcattcagaaggagagctgtcagcgtagcaccgaattcaagaccaaggcgtgctacctgagctgacagctttttgaaagccgagctgtttctgaaccatgtacatacatgttctgaaactttctcatcattttatgagtactgttcattgagagatgacaatgaagattagatgaaattggaaataaaccaacattgtttacattccaggagacttgtagctcagccacacacgcagtaatgacctgtgcccgttcgcctctggcactgcccacccctctttttttttttcttctaattctgtactcacaaaagagaatctcattttcttctttcttccattcccttaaattctgagtactgtacatatatttctgggttcccacgatgatgtgaaaaactaccagactgttttttgtcttctcacaaagacaagaaaaatcagggcattttgtgagtgccttaagatcaaactaacaagatctgaccctctcccctcacagtgagccactgccccacttcagagggtaagagccaaaagcctcattgtgaaaggcactggacttggaccagggacaccatcagggccttggttttctcacgcataaaatggagagtggattaatcgccaaagattcttctgatctgacattttgaaattgtgagagaaactagatgactgtaaacttggtcacaggcctggttctggcagttctttgcggacttttttctagcattatgccaaataaacatgcagtctcagtgtgctctcgcatgtatgaatatctagtcctttctgtggttctcagccaagacataaaaactaggactcagagcacatacaaaaccagttatgtttcggaaagagggaaaagagtccccgagcccggatcttgtgctgcttttctcactgacgtgttgccttttttctttacaaaatctgctttgatacttaggacctctctggactaatttctcttcctagacagctcagcacagctattgatatgttagaggcagtatccttaatattcattctaaatgagttaacgacttaacttgaaattgggcctaaggagtgagaactacaaaaatacaaaatgcttgtccaggactcagccatgcacaccttgagcagcgccggcaggaggcacggaaggaactgtgctccgttctcctcactgtcatggtgccaccagtgtctgatgaagggcagagtgacccagactgcaggcagtaactgacttcacacagtccctggcatttagtcatctgtgattgttttatcactctggactgtgcagagccacctgccaccgagatctgcattccgactgcctatgaacgggtgtgggggccgggggctggcttgctgaagtcttcaacttgcactcggagctcctttgatacctcagagctggctgtcaggtggcagctcacacccagactcactggccacacctcagcagggggggagtcgagtgtcagtctctttctgtgaaggctttttttttcctttggcctgggaatttttcccatttttatgaaggggttttaaattgtttcattttgtgtgctgtgcttcaaagccttaactgtcaaatcttgcattatcttgtttgtacagaaatatactggcctagcagaggcaaaaaaaaaaaaatgaattttattttacttgtcacacctgtcttaataaactggagttttgctgctaaagaactcttctctctgggggcagagcttctatttatggcacatagacatcagctaggcttttgggaatcgtttgtgttctttgtggaaatgtcctttagaagcacccatgaagtagtgtgttcagactgtgcacacagaaaacaggctctgccttcacatgtgagacggtggacttttcctctggacaaaatgacagcatcctggcgactccacagtggagctgagcgccactccctgtagccgatctgggactgaaacgcttacacctctgcctcagaaggagtcccccatgccctgcctgaaatgacttcactggacacagcggggctgcagctaacggggtacaggtaggagctaactaacttcacccctgagtccacttgcggggtaagagataaacagtaacccttccaggagcccactgacgttggagtgctaaaaatgccccttcagggggaaaactgcattttctcttccaaaaaggaaaggttcttccaggcgagaaacctgtggtctagaaccacagcaagaagaggaggcatgctggcctgcaccggaagactcactttgtctgccctgcgccagcctcacctcaccctgcagttcccgtttccgccatggatgcctcatcaccaaccctgaccttccccctcccaaccctttattcatcctcactcccactcatacccgcctccctggacagttccctgctgcagagttctttctgctttcagccctaccttggtggtgatttacctgaaaatcttcacaactgatcattatctccttctctttgagacctgactgaaaaaattaggtgtgcacacctgta

SEQ ID NO: 4925 - protein, 224 aa, Homo sapien [sequence omitted]

SEQ ID NO: 4926 - DNA, 2311 bp, Homo sapien
cgtgggggcggtgccggtcggagggctcctagtgcgccaggttgtgggaagtgaggctggcggtggcgacaaccgaggaggaggggcgggacgccgtggagcacggcgaccggctgagcgtcatggagggctcaggggagcagccgggcccacaaccacagcatcccggagaccaccgcatccgcgacggcgacttcgtggtgctgaaacgtgaagatgtgtttaaagcagtacaagtccagcggagaaaaaaagtaactttcgaaaaacagtggttctacctggataacgtcattggccatagttatggaactgcatttgaagtgaccagtggaggaagtctacagcccaagaagaagagggaagagcctactgcagagactaaagaagcgggcactgataatcgaaatatagttgatgatgggaaatctcagaaacttactcaagatgacataaaagctttgaaggacaagggcattaaaggagaggaaatagttcagcagttaattgaaaatagtacaacattccgagacaagacagaatttgcccaagataaatatattaaaaagaagaaaaaaaaatatgaagccatcattactgttgtgaagccatccacccgtattctttcaattatgtattatgcaagagaacctggaaaaattaaccacatgagatacgatacactagcccagatgttgacgttgggaaatatccgtgctggcaacaaaatgattgtgatggaaacgtgtgcaggcttggtgctgggtgcaatgatggaacgaatgggaggttttggctccattattcagctataccctggaggaggacctgttcgggcagcaacagcatgttttggatttcccaaatcttttctcagtggtctttatgaattccctctcaacaaagtggacagtcttctacatggaacattttctgccaagatgttatcttcagagccaaaagacagtgctttggttgaagaaagtaatggcacactggaggaaaaacaggcttctgaacaagagaatgaagacagcatggcagaggccccagagagcaaccacccagaagaccaggaaacaatggaaacaatttctcaagatccagaacataaggggcctaaagagagaggaagcaaaaaagattatattcaggaaaaacagaggagacaagaagagcagaggaaaagacatttagaggctgccgctctgctgagtgaaagaaacgcagatggtttaattgtagctagtcgtttccaccccactcccctgctgctgtctttgctggactttgtggccccttcaaggccgtttgtggtctactgtcagtacaaagagcctctgttggaatgctacacaaaactgcgggagaggggaggggtcatcaacctcaggctgtctgaaacctggctcagaaattatcaggttttgccagatcgaagtcatcctaaactgctgatgagtggaggtgggggttatcttctctccggcttcaccgttgccatggacaaccttaaagcagacaccagcctcaaatctaatgcaagcactttagaatcacacgagactgaggagcctgcagctaaaaaacgaaaatgcccagagtctgactcttaacccttttgagaattgctctgaattttgttctcaggcattatacagttagtaattaaactttaaatgccattactacttgttttttcatatcccaagaataagaacatgtctatgtacccgtttctaggaaggaggagtatatgccttttgtctatttctgacacagatgcatttggtctgtcaaaactgcaaccatggggtatgtagtatgaccaactgcatttaacaaaactcctctaagtacttctaaatattctgtgcaaatatcttgagaacttcaacatcctaaaaatgtgtttctacaagactttatattttaagctaagtggaataatacaacgtaactaaaacatggcgggtaccgaaaggagggcaattcatggaagaaatttcctctgttcattccgttctcttcaacctaagcaatatggatgtgtgagtgtgtgatttattatggtaccaaaaatgtccaccttctttcctgcagcggaataagcttttttgaaatgctgaggttttattttaatagttgacaacctgggaaagttctgagtatttattttactgctcttttttgtgcatagaaaggtttagtagggtacttttttgcattaatttgccaatactcttattctttgttctaaataaagtgactagaatttttgtgtactattcaattaaaggaaacaaatgtc

SEQ ID NO: 4927 - protein, 497 aa, Homo sapien
MEGSGEQPGPQPQHPGDHRIRDGDFVVLKREDVFKAVQVQRRKKVTFEKQWFYLDNVIGHSYGTAFEVTSGGSLQPKKKREEPTAETKEAGTDNRNIVDDGKSQKLTQDDIKALKDKGIKGEEIVQQLIENSTTFRDKTEFAQDKYIKKKKKKYEAIITVVKPSTRILSIMYYAREPGKINHMRYDTLAQMLTLGNIRAGNKMIVMETCAGLVLGAMMERMGGFGSIIQLYPGGGPVRAATACFGFPKSFLSGLYEFPLNKVDSLLHGTFSAKMLSSEPKDSALVEESNGTLEEKQASEQENEDSMAEAPESNHPEDQETMETISQDPEHKGPKERGSKKDYIQEKQRRQEEQRKRHLEAAALLSERNADGLIVASRFHPTPLLLSLLDFVAPSRPFVVYCQYKEPLLECYTKLRERGGVINLRLSETWLRNYQVLPDRSHPKLLMSGGGGYLLSGFTVAMDNLKADTSLKSNASTLESHETEEPAAKKRKCPESDS

SEQ ID NO: 4928 - DNA, 330 bp, Homo sapien
atgatatccttgagagttttactggtgatcctgtggcttcagttaagctgggtttggagccaacggaaggaggtggagcaggatcctggacccttcaatgttccagagggagccactgtcgctttcaactgtacttacagcaacagtgcttctcagtctttcttctggtacagacaggattgcaggaaagaacctaagttgctgatgtccgtatactccagtggtaatgaagatggaaggtttacagcacagctcaatagagccagccagtatatttccctgctcatcagagactccaagctcagtgattcagccacctacctctgtgtg

SEQ ID NO: 4929 - protein, 109 aa, Homo sapien
MISLRVLLVILWLQLSWVWSQRKEVEQDPGPFNVPEGATVAFNCTYSNSASQSFFWYRQDCRKEPKLLMSVYSSGNEDGRFTAQLNRASQYISLLIRDSKLSDSATYLC

SEQ ID NO: 4930 - DNA, 1335 bp, Homo sapien
cctgtgaggctcagtaagccgcagcctagattggaacagcgtgactgcctggtaggataaaggagacgacatctgaaaagagggtttcaggtgtttgcaaagaggtcagatccctacacatgaaacgctgcggccacagctgcagccatgctacctgccacatgccctggcctgcgtcagcgttatggagtaggcaacctggttcggcgcaaagaggaaatgcgcgttctgtgcccagtcctcgctcccctttgccaaccgggctgctgagtgtgatgctccctttgtgaagtggacatctgtctaatgggaactggacggtgaccaccagtccgttttacacaggccaccatacagctgccaggtggcgctggctcttagctgttctgcaagtccagcacagggtgtattcagctctagaggtggcaaacacggggcccttccaccaggcccactccctgcaaaggaagtgcttccgagagccaaggctttgctctaatctctgtgaaggaagaaaaagacttggggaaaggtaatgaataaattaaagacacacttttgtaatcgtatattttaggctttcctctctacctaattgtgctctaatctgtacttaggagtatagttttttaagtgggacatgtcaggcttttatgccacagattaaactccaaggcaaataaatgtgtgacagcttaagaggcgaaaagaagagtcttcgtcaaatggcagagtttgattgtttaacctagactaatcagtctttggagggcctgccacatgtcttccagacggctagaatgctcaggagataagagtggggcctatcgctctgtggctttctccccctgcattagccgcagagctgagtgagtctatgaaaacccattggtcgggctgccctagcaacacagaatgctgtgctgacacatactccatcacatgtttgcgatgaaaatgctgtatttttagaacacttcaaagtcaggaaaccgttaaaccacactgcatcctctcttgccctctggccacttcctccacacccccaggaacattgcccccatttcacagaaaaggagcctgagacaaagattaagtgatattttaagcaaagctgataatcccagggaaaattgctgatcaagtcttgaaatccaacacatccttcggagtaatttttaatgctttcgcttcttttacctaagccatgtgtgttccatatgaccttaaatctaagccctaatattgtaaatggagttcagaagacaacttagtctcccattttctttcctggcattcattcaaataaaaataggcacgtaatactgtactgtt

SEQ ID NO: 4931 - protein, 19 aa, Homo sapien
PVRLSKPQPRLEQRDCLVG

SEQ ID NO: 4932 - DNA, 351 bp, Homo sapien
tgtaaagtagaagggaaaattaagaaagttagatgatcaacccaggaagtacaaaatctgcctaaagttacaaaaaagaggacaaaaggcattggaggataataaattatcaaagtaatactacaggaaaatttccctagtaaattatcaaagtaatactaggggaaaatttccctgaactacaaaacaaaacaaaacaaaaaacagtagtctcttggttgaatgaaaaagaacccatactactgagtgaaatttcagactatctggacaagtcacttagctatttaatcggttataccacgagatacttatggagggtattagaacaattaatgatagtttcattaaaag

SEQ ID NO: 4933 - protein, 11 aa, Homo sapien
CKVEGKIKKVR

SEQ ID NO: 4934 - DNA, 4358 bp, Homo sapien
gtttttggagctgcgacgccaaacatggcgtgttcctagaagccgctttcggcatcagtaggcggcggcgtggggtctggcagcgtggggagagggaccaaccgacgccacttcgtgttgggaagtgggagcgggagggccgggcaattcccgaccgaaccaaacggtttccatggatctcaatagtgccagcactgttgttcttcaggtgttaacacaggccaccagtcaggatactgctgtgttaaaaccagctgaggagcagttgaagcagtgggagacacagccaggtttctattcagtgttgctgaatattttcaccaaccacactttggatataaatgtaaggtggcttgctgtactgtattttaaacatggaattgatcgctactggagacgtgtagcacctcatgctctctcagaggaggagaaaactactctgcgtgcagggctcatcaccaacttcaatgaaccaataaaccagattgcaactcagattgcagtgctcattgcaaaagttgctagattggattgtcccagacagtggcctgaactaattcccactcttatagagtctgttaaagtccaggatgatcttcgacagcacagagcattacttaccttctatcatgttaccaagacactggcatctaaacgacttgctgctgatagaaaactattttatgatttagcttctggaatttataattttgcctgctctctgtggaatcaccacacagacacattcctgcaagaagtttcttctggcaatgaagctgcaactttgagttcactagaacgaacactgctatcattgaaagtgctgcgtaagttaactgttaatggatttgtggaacctcataagaatatggaggtgatgggttttttacatggaatatttgaacgtctaaaacagtttctggaatgcagtagaagtataggtacagataatgtttgtagagatagactggaaaagaccatcattctttttactaaagtgcttttggacttcttggatcagcatcctttttcatttactcctctaattcagagatcactggaattttctgtaagctatgtttttacagaagttggtgaaggcgttacatttgaacgattcattgtccaatgtatgaatcttattaagatgattgtcaaaaattatgcttataagccatccaaaaattttgaagatagcagccctgaaactcttgaagcccataagattaagatggcattcttcacatatcctactttgacagagatatgtagaagattagtctctcattatttcctattaactgaagaagaactgacaatgtgggaagaagacccagaaggctttacagtggaagaaacaggaggagattcttggaaatatagtttgaggccatgcactgaagtattatttatagatatattccatgaatacaatcagactcttactcctgtacttctagaaatgatgcaaacacttcaaggacccacaaatgtggaagatatgaatgcactgttaatcaaagatgctgtgtataatgctgttggattagctgcttatgagctctttgacagtgttgattttgatcagtggtttaaaaaccagcttcttccagaattacaagtcattcacaataggtataagccattgcgacgcagggtgatttggctcatcggtcagtgggtttctgtgaaattcaagtctgacttaagacccatgctttatgaagcaatctgtaacttgcttcaagatcaagatttagtggtccgtattgaaacagctacaactttgaagttaactgttgatgattttgaatttagaacagatcagtttctaccgtatttggaaaccatgttcacactactttttcagttactgcagcaagctacagaatgtgacacaaagatgcatgttttgcatgtcctttcttgtgtgatcgaaagagtcaacatgcagatacgaccatatgtgggatgtttggtacaatatttgcccctcctttggaagcagagtgaagaacacaatatgttgagatgtgctattttgacaacacttattcatcttgttcagggattaggagcagacagcaagaacctgtaccctttcctgctcccagttattcaactgagtacagatgtttcacagcctccacatgtttatcttctggaagatggtttagaattatggttagtaactttggaaaacagtccatgtattacaccagagttgcttcgtatatttcagaatatgtcaccacttcttgaactaagttcagaaaatcttagaacttgctttaagatcatcaatggttatatctttttatcatcaacagaatttttacagacatacgcagtaggtctatgccagtccttttgtgaacttttaaaggaaattactacagaaggtcaagttcaggtgctcaaggttgtggaaaatgcccttaaagtgaacccaatactaggtccacaaatgtttcaaccgattttaccctatgttttcaagggtattatagaaggggagaggtatcctgtagtgatgtccacgtatcttggagttatgggtcgagttctactacaaaacactagttttttttcttcactacttaatgagatggcccataaatttaatcaggagatggaccagcttttgggaaatatgattgaaatgtgggttgatcgaatggacaacattacccagcctgaaagaagaaaactttcagctttggctttgctctctcttctgccatctgataatagtgttatccaagataaattctgtgggattataaacatttcagtagaaggcctgcatgatgtcatgacggaagatcctgaaacaggaacttataaagactgtatgttgatgtctcatcttgaggaaccaaaagtaacagaagatgaagaaccacccacagaacaagataagaggaaaaagatgctggccctgaaggaccctgttcatacagtgtcactgcagcagttcatctacgagaagctcaaggcacagcaggagatgctaggagaacaaggtttccagtccctcatggaaacagtggatacggagattgtcacccagctacaggagtttttgcaaggattctaagagcacatgacatgtggctgcctcccctttcagaaacaagctgagtaacccagcctgccgtttgtatgtgagagcctgctgagatgaagaaatcacttcatgaaaataagcaaagaccacacattttttactacaaaatgtaaaggataaatgtaaatcctgcataactaaaatcacaaacctattcctcaaaagaatttaattttatatttatgagggggcccttcactaaaaagtacatgtaaaagtacatttgatgacaatagctgcttagtttcctgttaagagaagaaactttatcttttaattatgtgctcttaatatttgaagatgagagttaatacctgagatgtttttctgcaaccaaaattcattaaatttggctgccttatcctttttttaagctaatgaaactacaggtttgaaaaatgacaaagctgttcagatgatgctattaaagaaatgtgtgtactaagcaaaaatatataaatagtgacaaatacacattaccaagcttatcttgcaagggagttattttcatctaacatagaaagtgtgttttatcagacaaatgcttttattttcattctaataatttgatacagaaattagtaaaggcatttttttctttttttttccagtaaatacattgggtctataaatgtgcatttgtaagggccacaaaagtgaacgtgtggtactgtagtaccacgtgggagacctctggttatggtttagtcctagttcctttgttactcctgtgagcaccgagaagaactgggcgactcccagtcccacctgtgctgtgacagtcccacgtggctatgacagactgtttagtacttacccttctcaggttcctcagtgcaggggtgcatcagggcctcaataataggggtatacctgggaggatccagcagtaatccccagggtactaggattactagtactctgatggaactagtcttccttccttattcctcgaacatgcagtacataaaaaggggaaaaggagaaaaaaaaagccttactttgttttacttgccatttattgtaaggaaactttaaagcattttttaggaaatactcaaaagcaaggttggaaaatgttttatctttctatagaaagttgggtacagtatgtaactgcgggaaacccactgcccctttgtaagctgtggaacccaaactgtatggggatatttgatgttttcagaaagaggaagaaaatatggtccaaattaaattttccaaagat

SEQ ID NO: 4935 - protein, 975 aa, Homo sapien
MDLNSASTVVLQVLTQATSQDTAVLKPAEEQLKQWETQPGFYSVLLNIFTNHTLDINVRWLAVLYFKHGIDRYWRRVAPHALSEEEKTTLRAGLITNFNEPINQIATQIAVLIAKVARLDCPRQWPELIPTLIESVKVQDDLRQHRALLTFYHVTKTLASKRLAADRKLFYDLASGIYNFACSLWNHHTDTFLQEVSSGNEAATLSSLERTLLSLKVLRKLTVNGFVEPHKNMEVMGFLHGIFERLKQFLECSRSIGTDNVCRDRLEKTIILFTKVLLDFLDQHPFSFTPLIQRSLEFSVSYVFTEVGEGVTFERFIVQCMNLIKMIVKNYAYKPSKNFEDSSPETLEAHKIKMAFFTYPTLTEICRRLVSHYFLLTEEELTMWEEDPEGFTVEETGGDSWKYSLRPCTEVLFIDIFHEYNQTLTPVLLEMMQTLQGPTNVEDMNALLIKDAVYNAVGLAAYELFDSVDFDQWFKNQLLPELQVIHNRYKPLRRRVIWLIGQWVSVKFKSDLRPMLYEAICNLLQDQDLVVRIETATTLKLTVDDFEFRTDQFLPYLETMFTLLFQLLQQATECDTKMHVLHVLSCVIERVNMQIRPYVGCLVQYLPLLWKQSEEHNMLRCAILTTLIHLVQGLGADSKNLYPFLLPVIQLSTDVSQPPHVYLLEDGLELWLVTLENSPCITPELLRIFQNMSPLLELSSENLRTCFKIINGYIFLSSTEFLQTYAVGLCQSFCELLKEITTEGQVQVLKVVENALKVNPILGPQMFQPILPYVFKGIIEGERYPVVMSTYLGVMGRVLLQNTSFFSSLLNEMAHKFNQEMDQLLGNMIEMWVDRMDNITQPERRKLSALALLSLLPSDNSVIQDKFCGIINISVEGLHDVMTEDPETGTYKDCMLMSHLEEPKVTEDEEPPTEQDKRKKMLALKDPVHTVSLQQFIYEKLKAQQEMLGEQGFQSLMETVDTEIVTQLQEFLQGF

SEQ ID NO: 4936 - DNA, 2672 bp, Homo sapien
cttccagagagcaatatggctggttccccaacatgcctcaccctcatctatatcctttggcagctcacagggtcagcagcctctggacccgtgaaagagctggtcggttccgttggtggggccgtgactttccccctgaagtccaaagtaaagcaagttgactctattgtctggaccttcaacacaacccctcttgtcaccatacagccagaagggggcactatcatagtgacccaaaatcgtaatagggagagagtagacttcccagatggaggctactccctgaagctcagcaaactgaagaagaatgactcagggatctactatgtggggatatacagctcatcactccagcagccctccacccaggagtacgtgctgcatgtctacgagcacctgtcaaagcctaaagtcaccatgggtctgcagagcaataagaatggcacctgtgtgaccaatctgacatgctgcatggaacatggggaagaggatgtgatttatacctggaaggccctggggcaagcagccaatgagtcccataatgggtccatcctccccatctcctggagatggggagaaagtgatatgaccttcatctgcgttgccaggaaccctgtcagcagaaacttctcaagccccatccttgccaggaagctctgtgaaggtgctgctgatgacccagattcctccatggtcctcctgtgtctcctgttggtgcccctcctgctcagtctctttgtactggggctatttctttggtttctgaagagagagagacaagaagagtacattgaagagaagaagagagtggacatttgtcgggaaactcctaacatatgcccccattctggagagaacacagagtacgacacaatccctcacactaatagaacaatcctaaaggaagatccagcaaatacggtttactccactgtggaaataccgaaaaagatggaaaatccccactcactgctcacgatgccagacacaccaaggctatttgcctatgagaatgttatctagacagcagtgcactcccctaagtctctgctcaaaaaaaaaacaattctcggcccaaagaaaacaatcagaagaattcactgatttgactagaaacatcaaggaagaatgaagaacgttgacttttttccaggataaattatctctgatgcttctttagatttaagagttcataattccatccactgctgagaaatctcctcaaacccagaaggtttaatcacttcatcccaaaaatgggattgtgaatgtcagcaaaccataaaaaaagtgcttagaagtattcctatagaaatgtaaatgcaaggtcacacatattaatgacagcctgttgtattaatgatggctccaggtcagtgtctggagtttcattccatcccagggcttggatgtaaggattataccaagagtcttgctaccaggagggcaagaagaccaaaacagacagacaagtccagcagaagcagatgcacctgacaaaaatggatgtattaattggctctataaactatgtgcccagcactatgctgagcttacactaattggtcagacgtgctgtctgccctcatgaaattggctccaaatgaatgaactactttcatgagcagttgtagcaggcctgaccacagattcccagagggccaggtgtggatccacaggacttgaaggtcaaagttcacaaagatgaagaatcagggtagctgaccatgtttggcagatactataatggagacacagaagtgtgcatggcccaaggacaaggacctccagccaggcttcatttatgcacttgtgctgcaaaagaaaagtctaggttttaaggctgtgccagaacccatcccaataaagagaccgagtctgaagtcacattgtaaatctagtgtaggagacttggagtcaggcagtgagactggtggggcacggggggcagtgggtacttgtaaacctttaaagatggttaattcattcaatagatatttattaagaacctatgcggcccggcatggtggctcacacctgtaatcccagcactttgggaggccaaggtgggtgggtcatctgaggtcaggagttcaagaccagcctggccaacatggtgaaaccccatctctactaaagatacaaaaatttgctgagcgtggtggtgtgcacctgtaatcccagctactcgagaggccaaggcatgagaatcgcttgaacctgggaggtggaggttgcagtgagctgagatggcaccactgcactccggcctaggcaacgagagcaaaactccaatacaaacaaacaaacaaacacctgtgctaggtcagtctggcacgtaagatgaacatccctaccaacacagagctcaccatctcttatacttaagtgaaaaacatggggaaggggaaaggggaatggctgcttttgatatgttccctgacacatatcttgaatggagacctccctaccaagtgatgaaagtgttgaaaaacttaataacaaatgcttgttgggcaagaatgggattgaggattatcttctctcagaaaggcattgtgaaggaattgagccagatctctctccctactgcaaaaccctattgtagtaaaaaagtcttctttactatcttaataaaacagatattgtgagattcaaaaaaaaaaaaaaaa

SEQ ID NO: 4937 - protein, 335 aa, Homo sapien
MAGSPTCLTLIYILWQLTGSAASGPVKELVGSVGGAVTFPLKSKVKQVDSIVWTFNTTPLVTIQPEGGTIIVTQNRNRERVDFPDGGYSLKLSKLKKNDSGIYYVGIYSSSLQQPSTQEYVLHVYEHLSKPKVTMGLQSNKNGTCVTNLTCCMEHGEEDVIYTWKALGQAANESHNGSILPISWRWGESDMTFICVARNPVSRNFSSPILARKLCEGAADDPDSSMVLLCLLLVPLLLSLFVLGLFLWFLKRERQEEYIEEKKRVDICRETPNICPHSGENTEYDTIPHTNRTILKEDPANTVYSTVEIPKKMENPHSLLTMPDTPRLFAYENVI

SEQ ID NO: 4938 - DNA, 2025 bp, Homo sapien; identical to SEQ ID NO: 3599

SEQ ID NO: 4939 - protein, 223 aa, Homo sapien; identical to SEQ ID NO: 3600

SEQ ID NO: 4940 - DNA, 647 bp, Homo sapien
gtttttctgctgtgggtacgtgagcaggaaacatggagaagaatcctttggcagccccattactaatcctctggtttcatcttgactgcgtgagcagcatactgaacgtggaacaaagtcctcagtcactgcatgttcaggagggagacagcaccaatttcacctgcagcttcccttccagcaatttttatgccttacactggtacagatgggaaactgcaaaaagccccgaggccttgtttgtaatgactttaaatggggatgaaaagaagaaaggacgaataagtgccactcttaataccaaggagggttacagctatttgtacatcaaaggatcccagcctgaagactcagccacatacctctgtgccttcccgggcagctgggggaaattgcagtttggagcagggacccaggttgtggtcaccccagatatccagaaccctgaccctgccgtgtaccagctgagagactctaaatccagtgacaagtctgtctgcctattcaccgattttgattctcaaacaaatgtgtcacaaagtaaggattctgatgtgtatatcacagacaaaactgtgctagacactgaggtctatggacttcaagagcaacagtgctgtgggctggagcaacaaatctgactttgg

SEQ ID NO: 4941 - protein, 202 aa, Homo sapien
MEKNPLAAPLLILWFHLDCVSSILNVEQSPQSLHVQEGDSTNFTCSFPSSNFYALHWYRWETAKSPEALFVMTLNGDEKKKGRISATLNTKEGYSYLYIKGSQPEDSATYLCAFPGSWGKLQFGAGTQVVVTPDIQNPDPAVYQLRDSKSSDKSVCLFTDFDSQTNVSQSKDSDVYITDKTVLDTEVYGLQEQQCCGLEQQI

SEQ ID NO: 4942 - DNA, 426 bp, Homo sapien
agaacaatgaagacatttgctggattttcgttcctgtttttgtggctgcagctggactgtatgagtagaggagaggatgtggagcagagtcttttcctgagtgtccgagagggagacagctccgttataaactgcacttacacagacagctcctccacctacttatactggtataagcaagaacctggagcaggtctccagttgctgacgtatattttttcaaatatggacatgaaacaagaccaaagactcactgttctattgaataaaaaggataaacatctgtctctgcgcattgcagacacccagactggggactcagctatctacttctgtgcagagaagaactctaagttgggaggaagctacatacctacatttggaagaggaaccagccttattgttcatccgtatatccagaaccct

SEQ ID NO: 4943 - protein, 139 aa, Homo sapien
MKTFAGFSFLFLWLQLDCMSRGEDVEQSLFLSVREGDSSVINCTYTDSSSTYLYWYKQEPGAGLQLLTYIFSNMDMKQDQRLTVLLNKKDKHLSLRIADTQTGDSAIYFCAEKNSKLGGSYIPTFGRGTSLIVHPYIQN

SEQ ID NO: 4944 - DNA, 735 bp, Homo sapien
atgacagtgaagaccctgcatggcccagccatggtcaagtacttgctgctgtcgatattggggcttgcctttctgagtgaggcggcagctcggaaaatccccaaagtaggacatacttttttccaaaagcctgagagttgcccgcctgtgccaggaggtagtatgaagcttgacattggcatcatcaatgaaaaccagcgcgtttccatgtcacgtaacatcgagagccgctccacctccccctggaattacactgtcacttgggaccccaaccggtacccctcggaagttgtacaggcccagtgtaggaacttgggctgcatcaatgctcaaggaaaggaagacatctccatgaattccgttcccatccagcaagagaccctggtcgtccggaggaagcaccaaggctgctctgtttctttccagttggagaaggtgctggtgactgttggctgcacctgcgtcacccctgtcatccaccatgtgcagtaagaggtgcatatccactcagctgaagaagctgtagaaatgccactccttacccagtgctctgcaacaagtcctgtctgacccccaattccctccacttcacaggactcttaataagacctgcacggatggaaacagaaaatattcacaatgtatgtgtgtatgtactacactttatatttgatatctaaaatgttaggagaaaaattaatatattcagtgctaatataataaagtattaataat

SEQ ID NO: 4945 - protein, 163 aa, Homo sapien
MTVKTLHGPAMVKYLLLSILGLAFLSEAAARKIPKVGHTFFQKPESCPPVPGGSMKLDIGIINENQRVSMSRNIESRSTSPWNYTVTWDPNRYPSEVVQAQCRNLGCINAQGKEDISMNSVPIQQETLVVRRKHQGCSVSFQLEKVLVTVGCTCVTPVIHHVQ

SEQ ID NO: 4946 - DNA, 653 bp, Homo sapien
ccctgatatgaagaaaagatgattcttactgtgggctttagctttttgtttttctgtaagtagattcatttgtttacattccacttgctctataaccccatttctccttctctgactcttgaaggctttttctcttgcactcttggtttttggttatttgctgcctttggctttatttctgtgtccttctcttgcctctgctcattgagttcttctgggctaggcatgtgctgtactcactgtctggggggtgcagaattcactatttcctcattgtctttttcccagacaggggcacgctgtgtgacaaagtaacccagagttccccggaccagacggtggcgagtggcagtgaggtggtactgctctgcacttacgacactgtatattcaaatccagatttattctggtaccggataaggccagattattcctttcagtttgtcttttatggggataacagcagatcagaaggtgcagattttactcaaggacggttttctgtgaaacacattctgacccagaaagcctttcacttggtgatctctccagtaaggactgaagacagtgccacttactactgtgcctttagcactatgatgcaggtgcccaggaagtcataacacaaactcctggggcacagctcagcagag

SEQ ID NO: 4947 - protein, 113 aa, Homo sapien
MILTVGFSFLFFYRGTLCDKVTQSSPDQTVASGSEVVLLCTYDTVYSNPDLFWYRIRPDYSFQFVFYGDNSRSEGADFTQGRFSVKHILTQKAFHLVISPVRTEDSATYYCAF

SEQ ID NO: 4948 - DNA, 7320 bp, Homo sapien
cgctgctggggttaggattctgcgcggcgaggcaagatgctcaagtccaagacgttcttaaaaaagacccgggcgggcggcgtgatgaagatcgtgcgcgagcactacctgcgagacgacatcggctgcggtgcgcccgggtgcgcagcgtgtggaggggcgcacgaggggccggccctggagccgcagccccaggacccggcgagcagcgtctgcccgcaaccgcactacttgctgcccgacactaatgtgttactgcaccagattgatgttcttgaggaccctgccatcaggaatgtaattgtgctacaaacagttcttcaagaagtgagaaatcgcagtgcccccgtatataaacgcatccgagatgtgactaataaccaagagaagcatttctatactttcactaatgagcaccatagagaaacctatgtagaacaagaacagggagaaaatgctaatgacaggaatgatagagcgattcgagtagcagcaaaatggtacaatgaacatttgaaaaaaatgtcagcagacaaccagctgcaagttatcttcataacaaatgacaggagaaacaaagagaaagccatagaagaaggaataccagctttcacttgtgaagaatatgtaaagagcctaactgctaaccccgaactcatagatcgtcttgcttgtttgtctgaagaagggaatgaaatagaaagtggaaaaataatattttcagagcatcttcccttaagtaagctacagcaaggcataaaatctggtacataccttcaaggaacatttagagctagcagggaaaattacttggaagctacagtatggattcatggcgacagtgaagaaaataaagagataatcttacagggacttaaacatttaaacagagctgttcacgaagatattgtggctgtggagcttctccccaagagtcagtgggtagcaccatcttctgtggttttacatgatgaaggtcaaaatgaagaagatgtggagaaagaagaagagacagaacgaatgcttaagactgctgtaagcgagaaaatgttgaagcctacaggtagagttgtaggaataataaaaaggaattggagaccatattgtggcatgctttccaagtctgacattaaggagtcaagaagacatctctttacacctgctgataagagaatccctcgaattcgcatagaaaccagacaggcttccacattagaaggacggagaattattgttgctattgatggttggcccagaaattccagatatccaaatggacactttgtgagaaatttaggtgatgttggagagaaagagactgaaacagaagttttgttacttgaacacgatgttccccatcagcctttttcacaggctgttcttagttttctgccaaagatgccctggagcattactgaaaaggacatgaaaaaccgagaagacctgaggcatctgtgtatttgtagtgtagacccaccaggatgtactgatatagacgatgctctacattgtcgagaactcgaaaatggaaatttggaggttggtgttcatattgctgatgtgagccattttattaggccaggaaatgccttggatcaagaatcagccagaagaggaacaactgtgtatctttgtgaaaagaggattgacatggttccagagttgcttagctctaacttgtgttccttaaaatgtgacgtggacaggctggcattttcatgtatttgggaaatgaatcacaatgctgaaatcttaaaaacgaagtttaccaaaagtgttattaattcaaaggcatctctgacatatgctgaagctcagttgagaattgattcagcaaacatgaatgatgatattaccactagtctccgtggactgaataaactagccaaaattctgaagaaaagaaggattgaaaaaggggctttgactctatcctctcctgaagttcgattccacatggacagtgaaactcacgatcctatagatctgcagaccaaggaacttagggaaacaaattccatggttgaagaatttatgttacttgccaatatttctgttgcaaaaaaaattcatgaggaattttctgaacatgctctgcttcgaaaacatcctgctccacctccatcaaattatgaaattcttgttaaggcagccaggtcaaggaatttggaaattaagactgatacagccaagtctttggctgagtctttggatcaggccgaatctcctacttttccatatctaaacactctgttgagaatattagccactcgctgtatgatgcaagctgtgtacttctgttctggaatggataatgattttcatcactatggcttagcgtctccaatatacacacattttacttcacccattagaagatacgcagatgtcattgttcatcggcttttggctgtggctattggggctgactgtacttatccagagttgacagacaaacacaagcttgcagatatatgtaaaaatctaaatttccggcacaaaatggctcaatatgcccaacgtgcatcagtggcttttcatacccagttattcttcaaaagcaaaggaatagtaagtgaagaagcctatattttatttgtaagaaagaatgccattgtggtattaattccaaagtatggtttagaagggacagtcttttttgaagaaaaggacaaaccaaacccacagcttatttatgatgatgagataccctcacttaaaatagaagatacagtgttccatgtatttgataaagttaaagtgaaaatcatgttagactcatctaatcttcaacatcagaagatccgaatgtccctggtagaaccacagataccaggaataagcattcctactgatacttcaaacatggaccttaatggaccaaagaaaaagaagatgaagcttggaaaatagctatattcaacaaaaatcttcaaagactggtttcttttttaaaagaaaaaacttgaaagaacacttctaagcctaagtgtgtgatacagtttgttacttttaagtacattttaataatttcagacatctgcatttttattgaacagttgactgtatctgacccatcatactactatacttctgggttgaacagaattatttatgcagaataattcaattgaatatccatcacttaaatacagtgacaggacagcaacttcagggatctgtaaagatcatttaaatggagtgctcatctcattgaggagcagattaattttgcgtaagtactttgattatttaatatttgtaagaaaaaactttcattttcctacagaggaaaatagaacaattttagaagcaaggaacaatctcttttctaagtcttggaagctgtcagtgttgaggatgtaatctcctttgccatctttaattcacctaacttacactaggtgttctcttactgtctttaaaagcttcctgtattttattagtggtccttgaaaaactgtgaatgtttgggaattggtagaaaggcaaaaagtaggatattttgacctgactggaaagatggttgtgtttttattgccaggtaataagtgtgatcattgttgaacttcagctccagtgtctctccagaataagacattggcattcaaatgtctatatcttgttacttacaaaataaaaaacagataattagtggcttttaaattgtagttatatcagtgtatatacacgaggggaactgtataaagacatactaaagggaacagattaaaataagtattattaataaaatttggtgtgccagactgactacttcccttgctaatcacagagattagtaatgattaaattaatatcttcaggaatattttgggatagggttgccttaaaacattttacttggcttattcaatttctaaagcacttacgttgtgccaggttccactcaagtaaactatctctgccttcaaggagcttgcagtatagtgagaaaagcctgccaagtaaatcagcaggtatactaaataggtagtcatttaggcactcaataaatgttgactaatttttccagtttcctattactgaggaaaacctccatacactgaggcagaaacttgtgtcagttggaggaaaatagacttgagtagtctttggtccaggtaaaatgggtcagtagacactgaaacagtagagtaggagtcaaaaagccttttctgtgaagtgctagaacattttagactttgttggctatggtctgtattgcaactatagtacacaactctgccgttgatagtgtgtaaggagccatatacaatatgtaaacaaatcaacatgactgtgtttcaacaaggcctgatttgttaagtttcatatatagtcatatgtcacttaatgacagggatatgttctgagacatgtcacttggcaatttcatcattgtgtgaaaatcatgatgtagttacacaaacctagatggtataccctatggtatcctatatgggatagcctattgctcctaacctacaaacctgtatggcatattactgtactgattactgtaggcagttgtaacacagtgctaagtatttgtgtatctaaacatatctaaacatagaaaaggtacagtaaaaatatatatatagatatatataagatataaaatggtacacctatttaggacatttaccatgaacaagttggcaggactggaagctggctctgggtgagtcagtaagtggttagtgaatgtgaaggccatgatattactgtgcactactgtagacttttataaacactatatacttaggctacataaagtaatttcactatgatgttaccatggctgtgtccgcaggcaataggaatttttcagctccattgtaatcttacgggatcatcatcgtatatttggccattgttgaccaaaagttatgcagcacatcattataattttgatgtgtcacaaaacattactcatttgatttcccccacccccgccaaccatttaaaaaagtttgccggctaggtgcggtggctcatgcctgtaatcctagcattttgggaggacgaggcgggtggatcactcgatgtcaggagtttgagaccagcctggccaacatggtaaaacgccgtctctactaaaaatacaaaaacttagctgggtgtaacggcggatgcctgtaatcccagctacttgggaggctgaggcaggagaatcgcttgaacctgggaggcggaagttgcagtgagccgagattgcaccactgcagttcagcctggatgatgagagtgagactccatcgcaaaaaaaaaaaaaaaaaaaagaaaagaaaattagccaggtgtggtggcaagtgcctttaatcccacctcaggaggctgaggcaggagaatcgcttgaacctgggaggcagaggttgcagtgagccaagatcgcgccactgcactccagcctgggtgacagaacaagactgtctcaaaaaaaaaaaaaaagaagaaaaactgcctacaggccatagttaacctgcaatagagaagaaagggaagtagggcagtgcatgactggccttaggttttttctttccaagtttattttcttgtgcttcagctactagaaaggtttaattcagggataagtcccaattgagtagttcaagatgatcagagactttgctattttcccctaagttctattccataatctaaaatgttctgtttctagtgccagttcttatgctaagcaggttacgtggaatatatcacttaactcaaaaagccctgttaagccaggactgttatctccatttaacagatgagaaaatggaggtttatggtctgttctcacactgctacgaagaaataccccaaactgggtaattattataaaggaaagaggtttaatggactcagttccgcattgctggtgaggcctcaggacacttatacaatcatggcagaaaaaggagaagcaggcacctttttcacagggcggcaggatgaaaatgactgccagcagtggaaatgccagacgcttataaaaccttcagatctcatgagaccggctcactatcacaggaacagcatggaggaaaccgcccccatgatccagttacctccacctggtcccacccttgacacgtggggattgctacaattcaaggttagatttgggtgaggacacagagccataccatatcagcccagatcaagtagtgacagagtagggatttgaatacaggttatagtcactattgtgttatttcttgacttttgtactattaaaaaactgtagccagtgaggcttctacccttagtacccagaactccttttaggtatagcaattgtttttaggtaaatttatattgagtttaacacctgtgtgattaaagacaactttccaatgtagtatctgtagccatgtcccctaatggctattagtgttcatggttagtgtgttgaagatgagccaggtacataacgcggcacattttctgcaggtcagcagtaaggtttcaaggtacagttatggaggaaagaagaaaatgacacattgataacacaggtctttattcccttttgaatgagacagtttttaaaagttgatttataaatacaaaaatacattctccaaagatagtatttccaaactgttatatacccatctactcccaacatggatataagttttttaaaaaaatagttgtatataacatacatatctgccccagtgttacttcacaggcctatgccctacgggaactccactctcccagccccactttttctcttggttctcccacattcttattctcccacatccctacccacgtttgagctggaaaggatgtccctaccctaggcatgaggtatattttattctgggcaccacacatttgccccatagataacaatacacgtgatgatgtcactagtactacctttctagtatttacatacttaaaagtagtaactagaacagttatcactggaactaagaattttccccacagaggtgaacaggaccaaggaactaaaatttcaggaaacctgtttaatttcttttgtatctttgaaaagttagttttatatctaagatttcttcacataggttataattcatctgtatgttcaagcttttatgtaaaaatatatagtgccttcagttttaacatagtttcacatgttctcagaactgctaaattcagtgctaccagtaaggcttaataagtagttcattgaccctgtaagataggagcactcagctctgtcacaatttgttgttaaacacatcactcaatgtaagtataaaaatatttattgataaaaaataaacttataattcagcaaaaaaaaaaaaa

SEQ ID NO: 4949 - protein, 958 aa, Homo sapien
MLKSKTFLKKTRAGGVMKIVREHYLRDDIGCGAPGCAACGGAHEGPALEPQPQDPASSVCPQPHYLLPDTNVLLHQIDVLEDPAIRNVIVLQTVLQEVRNRSAPVYKRIRDVTNNQEKHFYTFTNEHHRETYVEQEQGENANDRNDRAIRVAAKWYNEHLKKMSADNQLQVIFITNDRRNKEKAIEEGIPAFTCEEYVKSLTANPELIDRLACLSEEGNEIESGKIIFSEHLPLSKLQQGIKSGTYLQGTFRASRENYLEATVWIHGDSEENKEIILQGLKHLNRAVHEDIVAVELLPKSQWVAPSSVVLHDEGQNEEDVEKEEETERMLKTAVSEKMLKPTGRVVGIIKRNWRPYCGMLSKSDIKESRRHLFTPADKRIPRIRIETRQASTLEGRRIIVAIDGWPRNSRYPNGHFVRNLGDVGEKETETEVLLLEHDVPHQPFSQAVLSFLPKMPWSITEKDMKNREDLRHLCICSVDPPGCTDIDDALHCRELENGNLEVGVHIADVSHFIRPGNALDQESARRGTTVYLCEKRIDMVPELLSSNLCSLKCDVDRLAFSCIWEMNHNAEILKTKFTKSVINSKASLTYAEAQLRIDSANMNDDITTSLRGLNKLAKILKKRRIEKGALTLSSPEVRFHMDSETHDPIDLQTKELRETNSMVEEFMLLANISVAKKIHEEFSEHALLRKHPAPPPSNYEILVKAARSRNLEIKTDTAKSLAESLDQAESPTFPYLNTLLRILATRCMMQAVYFCSGMDNDFHHYGLASPIYTHFTSPIRRYADVIVHRLLAVAIGADCTYPELTDKHKLADICKNLNFRHKMAQYAQRASVAFHTQLFFKSKGIVSEEAYILFVRKNAIVVLIPKYGLEGTVFFEEKDKPNPQLIYDDEIPSLKIEDTVFHVFDKVKVKIMLDSSNLQHQKIRMSLVEPQIPGISIPTDTSNMDLNGPKKKKMKLGK

SEQ ID NO: 4950 - DNA, 2705 bp, Homo sapien
ttttttttttttttttggtggtttagccaagagctggctcagctggacagcaaggcttctggctaacgcagcatttttggcagcctaagctgttcccagggcgcttagcacacagatcttggccttcaaaatgcagactttggccctcagaatgcatgctccctggcactgttactaggcttggagatcccctcataaatttcttcttatttagggaaattaggtgttccctggtctttcttgggctgacccataagtatgtaacatgtcatcaataccatctatgcttttcaaccaacttcaaatcaaagaaacaggttaccttcagactgttaagtatgagagatcaaatctttcgagcacagtaacagtgccatgtgaagatgttgtgtgcaatttgcctgactctttttgacttagaacagaattggccatagttacagcatagagctttgctgctgcagctgctactgctgctgctaccagtactacctctattactactgactgatgtttattgcagacttactgtgtaggacagtcttttaaattctttccaggaatttagtcttttaaattttcaacaaccctaggaggttgataatattattatcaccattttaaagatgataaaagggagatgctgagagatcatgtaatttgcctggtcactctgagagtggatggatagtgtttcattgtattggtctcggtgagaacttattttctttttatgaaaaattattattatttcttgggacagggtctcactttgtcacccaggctggagtgcagtagtacgatctcggctcactgcaacctccacctcctgggttcaagcaattctcctgtcgcagcctcccccgtagctgggactacaggcacgtgccaccatgactggctaatttttgtatttttagtagagacagggtttcaccatattggtcagactggtcttgaattcctgacctcaggtgatccacccaccttggcctccaaaagtgctgggattacaggcgtgagccactgcgcctggccaacttttctccttaatgatatgcgtcattcattcaataaaaatttagtgatcatcttctatgtgccagctatatcctagaagttggagatatattatagtgaatgaaacagtatagatccctgctgtgatagagcttacattttacagggaagaaatatacaagcaagtaagcaattaataaagaaaatcattccagttcctgacagaaaaaacacagtggtatgataaagaacgattgcattggagaagctgctttagattagatttgattggcagggaagtcctctcataaccaagacctgaatggcaagaaggagcctgccatgtaaggatctggggagagaatgactcaggtagagaacaaaagccaaagccctctgccattcaggagtttggtgtgtccaggaacaaaagagctatgaagagaagttcttccaccaaacatacaaaatcaggatatgcaacttctagagttcccatctggaagtaataagagaatgtatcaaaacatgggcacttctggtccccaactttcctctcacacccctccaacctcattttgagagaacaattcacattttaatttttgatggccattcccaaatggtatagtttgtttgttaataatgactttattgagatacaattcatagaccataaaattcgcccctttaaagtatacaattctgtgattttttaggatattcactgttgcataaccatcactacgatctaattcagaatattttcatcattccaaaaagaaactccgagtttaacaagatttcttgagatcaatatgcaaaaaatcatttgtatttctctacactagcaatgagcaatccaaaaataaaattaagaaaacaactccatttacaaaagcacaaaaaataataaaatattttggagtaaatttaacaaattaaatgtaagacttgtacattgaaaactgcaaaacatcattgaaataaattaaaggagacttaaatgaaaagacatcccatgtgcatggattggaagatttaatattgttaagataatgcagtaaatagaataatggtccccaaaagaattctatgtctaatctccagaacctgtgaatatgctaccttacctggcaaaaggaactggtagatgtgataaagttatgaagattatcttgggttatctacatggacctaatgtaatcacaagaatccttatgaaggagacaaaaaggtcaaaggcagaagaaggaaatgcgacaaagaaagcagaggttggaatgatatactttgcagatggaggaaggggctgtgagtcaggaaatacaggctgcctctagaagcttcaaagacaagaaaatgaatactcccctgcagcctccagaagtacagccctgctgacacctttattttagccatataaggcacattttggtattctgactcccagaactgtaagataataaacttgtattgttttaaacacccagtctgtgagtttgttacagcagcagtaggaaactaatatacatgacaatagttcccaaattaatctacaaattcaacacaatcccttgcaaagtcccagctggcttttttacagaaattgacaaactgatcctaaaattcatatgaaaatgaaagggagaagccaaaacaatcctgaaaaaaaaaaaaaaaaa

SEQ ID NO: 4951 - protein, 127 aa, Homo sapien
MKNYYYFLGQGLTLSPRLECSSTISAHCNLHLLGSSNSPVAASPVAGTTGTCHHDWLIFVFLVETGFHHIGQTGLEFLTSGDPPTLASKSAGITGVSHCAWPTFLLNDMRHSFNKNLVIIFYVPAIS

SEQ ID NO: 4952 - DNA, 410 bp, Homo sapien
atgaagttggtgacaagcattactgtactcctatctttgggtattatgggtgatgctaagaccacacagccaaattcaatggagagtaacgaagaagagcctgttcacttgccttgtaaccactccacaatcagtggaactgattacatacattggtatcgacagcttccctcccagggtccagagtacgtgattcatggtcttacaagcaatgtgaacaacagaatggcctctctggcaatcgctgaagacagaaagtccagtaccttgatcctgcaccgtgctaccttgagagatgctgctgtgtactactgcatcagagccaatgctggtggtactagctatggaaagctgacatttggacaagggaccatcttgactgtccatccaaatatccagaaccctgaccc

SEQ ID NO: 4953 - protein, 135 aa, Homo sapien
MKLVTSITVLLSLGIMGDAKTTQPNSMESNEEEPVHLPCNHSTISGTDYIHWYRQLPSQGPEYVIHGLTSNVNNRMASLAIAEDRKSSTLILHRATLRDAAVYYCIRANAGGTSYGKLTFGQGTILTVHPNIQNP

SEQ ID NO: 4954 - DNA, 545 bp, Homo sapien
ggcatctctgtagaaacataatgtatattgtttgcaattattgtgtattcctaggcctgtggggtagaaacatgagtggttttttctctaacaaagggacgactggggagagtggggggcccatgaaaagatgatttaaattctgggtacgaagtgtcccctacccaatctgtcttctctgttctgactgctgtcttttttcacaggggtttggagccaacagaaggaggtggagcaggatcctggaccactcagtgttccagagggagccattgtttctctcaactgcacttacagcaacagtgcttttcaatacttcatgtggtacagacagtattccagaaaaggccctgagttgctgatgtacacatactccagtggtaacaaagaagatggaaggtttacagcacaggtcgataaatccagcaagtatatctccttgttcatcagagactcacagcccagtgattcagccacctacctctgtgcaatgagcgcacagtgctccccagacacttgcttgcagtctgtacccaaacccagga

SEQ ID NO: 4955 - protein, 111 aa, Homo sapien
MYIVCNYCVFLGLWGVWSQQKEVEQDPGPLSVPEGAIVSLNCTYSNSAFQYFMWYRQYSRKGPELLMYTYSSGNKEDGRFTAQVDKSSKYISLFIRDSQPSDSATYLCAMS

SEQ ID NO: 4956 - DNA, 7338 bp, Homo sapien
ctcgatcactgggccgtgcacagcctcttgaattccctccccttcctgggcctggactcaggttcccagggagggggaagcccctcagggtgatcaagttataggggcttggggggggcccactcttaggtgtggaaaaaacagcaaagcacgtagggtggtatgttcaaaactggaggcggtgttggtggaatggaaacagctcctgggctgggaagcaggggcttgggttccactgactcattgggtgaacttggatgagtctctgctcctctgggggccgcagtttcggcttctgtataagggggggtcttcccagctgtgtcattctccaatctatttcacagatggctgactccaaaaggcatcaaattcaaccaggaggtcaaggccccttggcaggtcccccctgtgccattgacccctgagggtcccatgcaggctggccagctgatgagtttacaacacagggtgggggcggggcagcctctccccctgcatgactgtcatagctccttacttgagctgactcataacggagcccaaattgcgtcatggaggctcagccaaggaaaccaatgtttatgatgccctcaccccgtgcctgtccctttgaagaaggtgttatccccattttacagggaagaaaactgaggcccagagaaaggaagtgactttccccagggtctggctgctcagattcagcagagctggggctggaagccaaatctgactctagagctctgtggctgtcaccataaacctgcttcctctctggccaaattagaactcttgtccccaccacccccaccctcagcaccaattgacccaccattcagggacagaagactgaatcttcatgaggcttgagatgaggctgagtgagcgtttccaaggccatcttctgcacatgtgccttgggcagaaacaagtctctttgggaccttggaccagcccatcctcttccagggatgtccccaccccatccttgttggcctacagaggctactgtgagtcagaggctggtgctaggttctagccccaagcctggggtccctgggagaggccaggggttggtggccaggctgcagagggactttctgaagtcttcatttaaagggcatggaagggcactctggtgtcatgcccaaggtcggggctggtgagtcagaggctgaagttccaatcccattccagaataccacatgaccttagacaagctggcgtcaccaccctgggcctcgcagcctggcctgtgaaatgggagagtagagcttgcaagggaaatggtaaaagccgccacctttcccccactctccaccctctctcccatcctgacatgactttggggaacatgcaagtatagggttcaatcgtcttcatgacttttctacttttgagcctctctgggccttgactcctcaaggacatgaagacacaaagggcgcttctggtgaggggaacagcatgagcgaaggcccggaggcagggaagctcccgagcatcatgctggggcagagacccccaaggggatgcgcaggtggcaacaagaggagtaaagggccctgaatgacatgctggggactcagcccccagccctgcagagggccccccagtgcgggcaggccaccaggtttccacaggaaggcccttctcggtgggcaggccgaggccaggcgtgagtgctggcaatgccacttcatgtgtttcccgttgtacttagtcccaactcccataaaagccccagaggtgccacccagccacacatgtggacacctctccctggcaacaatggtggtggacaatggcagggagtcagccgcagcccaggggcgaggtggcatggcagggagctctccggccgctggtggatccgggctctgggcactcggtgaggggcccgcggggctcctagcccgcccaggccaatgctggccttaattaagaaggagtctcccacccaggagccaaaccaccctcctggccacgcccactgcaaccgctttcagttctgtttcttgggccgcgtgctgaggccagcctcacaaataaaagccatcacttttctatttctctctctctctctctttcttttttttttttttcttttccaaaaagagaggcagccacaagatcttctaaaaggccgtgacatcacggcccaggtgaccgcggcccagccaatgagccaaggccgcgagcaggcttctcgcatcctgtgagctgaggttgggttgacactgggaaggcctggtccctcaaccacagaaccacaaggccaggcccttgccgcctccagggccctgcgcgggagctggttggctcctggtgctccccacccccggccgccctcgtacccaccagagcctgggctctgtcaagggtaagcctcattcattcattccccgtggcactggaggcggcccactctgctctgtcagcttcggagctcctccaccctggctgccgaaagccccttcccgccatctaatgatacactctgcatacgcttctgttgagaatttgtggctagacattcctgtgggaccgggaatccaaattcttgggtacaaacagaaacttactttccttggggatttttttctctctctcactcacacacactctcgcgttctttccttttttctttttcgtagcagcaggggggaaaaaagagacaaaaacaaaacaaaaaacaacaaaaagcaacaccccccccttttattttcaaaagtagctagaggaaaaaaaaataaaacaacagccaaccaagtgaatcccaacccaaccccctgaagggctgaaaattctcgccttcttcagagcggggcatggcatcgaacagcatcttcgactccttcccgacctactcgccgaccttcatccgcggtgagtaacaatagcccagggccctgggtggggagctgtggccaggccccggaccacgtccctccactgaccgccctggctgccctcaagcgcacagcctgtccgcctaaatccgctggcctctgaaagcctgaggtgggaagaggggttggtggtctctgtggtctcttggcgtggaacatcgctgtggcactttcatcctccgctggtggggacagtaagccgtgggggcgatggatactccaagacctcaagacctcaaagggcagccctcagaggggccaagggaaactctcagggaccctcggcttgctgcttcactaacagggccccagggcctgcagccccagcccctgtcctgcctgggactccccacctgggctcaggaggtcactgctggcaacttctggggagagctgtgggatgcaggggtcttcctggagaccaccgccaacattttgtgtgtaactcctggggtatcagaagcagagggaggagaaggaagccacaggcttttgtggaaaactgcacagagctgggctgcactgaagctggacctgcacggggcagggggacagacctcgagaaagttcgtggatttggccacggaagaggagaaagtgtttctgggcagcttttgccttttttggtggctgcagggatgcagagttctgggttgtgtctcccagcaaggatagggggtctgggatccccgacctggagcctctaatggggctgggactcatggggagacttctcctgcctctgtctggcatttagggctgatgcaccctggcctcagacaccccctgctgccttcctcctccctagcaggagcccagatggggctgtgacacctgagactggggatcaagagtccctgagctcaagtcccacggctcagtggcttccttgctgagagaccttaggaggggagttacttaacctctctgtgccccaaatagagtcccctctgcttgtggaattctcattgtctgagcctgggggtggaccatgtataagggcagtgcctctggatggttccagaacagagaggctgcatgagatctagaacttcagggttgggggctggtgctgcctttcctcagccgaggcagtcagcagagatgcagaggtgggtctgcctgcctgcctaccctccagcccattggcctgccctgccgctggctgaccgagtgattcagggctgctgcctgggtggccggctcggggcagggacccagacacatttgggtgtttgagtcctcaggcttctgggaaggcttgtctgagagcggggcctgttcttcttccctggtgaggccaaggaaggctgtgctgctgcagatggggactgagtcggggagtgaagggggcctgctgtcccctgaaatgggggcactcccatcaaacctagctgtagctgatgatgagcggcagccccaggtctgagagctgagagctgtggctgcttccttggagttgctgctattataacgttgttccctttgtagtcctcggagctaattaaaggcagttctgtggcaagaaaataagagtttataaaatccatttgccgggtctttgtaatctgtatttctccttccgtgcgcaagatggagaaatgtagggtttaaaacaaaggaaccttgggagacagggctagagccccggtcggcctgggctgggtcctgatcctcggagcctgggaggtggctggcagtagcacaaagggcacaaagggagaggtggctttggcccaacatgtcatgtatgcgcccagagacaggaggccgctgggcagagcgggctgatcctggccagcagtggcacagaaggcgcctcataggctagggtctgtggagatgtttggatctggggtctgtggcccgagggccttccctccacttttgtggagacctgtctcccctcttcagccttctctctcctgttcatttctgctcacgacgtgctcgccatgggggcctgtctcccaaatcccatccctggaggcttacagggctccagctgccaattccttcctcaaagagacgcagccccagggtcccatttgcagggtgccaaccccacgctgccccctacagggtccctaacccaccgacccttggcagtctcagggaaccttcaggttcctcctcggagttgcgtttttaaacgcgtaagacaaaatccaaaggattacaaaggaaaagaaatcgatggaaataccattgtcaaactcagaaagcaagctggtgacatattgactcacgttttccatttgttgaactccatttgtctgtgcctcttcaagaactcactgagtgacaagaccccgcggtgggccatgcagttgtgatgagcatgaacaatatttcaggtcatccctgaccccgctgtgataccagagaacacctgtgatttccactggtggaaaatcgccatggaatatgatgctaaatttcagctagaggccagggaaaggaaagacacggttatctccagcccagtgtcacagaccccctaaattatacgcaagacaaaaactccaggtccatccgggtctcgggttctcagaatcttactcgggctgttctctcgtccacaggcttttaccagaaggggaagggtctccctgtgccccccactgcctcctcttcctcctacctgtgtcttccaaatgccatcccatctcagtccctgagcaaagtgtgatggagccagcaggttttctgaaatcaccgcccctagagagttttaaacactggattcccagttcctacctcaggctgtggaggattctccattcctacctcagactgcggaatcagaatctctagggtttgggcctgggcaggtgtggttttgcaaatcccctaaagcgattctgatgtgcctctcaggcaggcttggggactgctgccagggaagcccagtcccctacctgcctctgccgcctgtgtgctgtgagactgtgtctgagtcacttgacatctctggatccgtgttctctcatgagtaaaagggcacgagtgagttgcatttggtgcctcctatgtgggcttctctgtctcccccacctgacaacccagggtggtccctagaattatcaccgagctcctactacctcagggtccccatagaccaacggaagatgacttcccttttgtcttcactggcaaaaacaggctgagaatgaagcatcccatccatgcctctgccttcaggcacctgtactcagccagtgccacagcctgtgcaggggccttcaaggcagcaagggagagatccagacccctggagagtccgactgcttgtgcatgacattcccacggctcccacccagccctcccctctcagtttctctgactttgagctaagggatcagaaactcccctcagttcactgtggagagaaggggtgtgggaaaagggtggagaggcatttggttcccatcctgcagtagaggcgtgagcaggaggtgagaagagggcaacgcctaccctcagggctggtgcatggatggtggaattctagaagctggaatggaaggtgtgagagggcacaggggccccctggggtctacccccaggcaggacaagggggatttattctccctgtgtgacaaatggggaagctgagacctaagagctgtgatccagacactctgtgtaactaaggacaagtcccttcctctctctgggcctcagtttccccgtctgacaattatgggccaatggccctgaggaccccttgcccatgcacggttccactgggggccagaaccttcattctgaatctgcctcatgaggccctcctctgcaccccctggggcacccccccctcacaccaggtcacctttgctgaaccctcacttgtacccccacaggcaaacactcaccagggacactggcagtgggtgcccctccagggagggaagccaaggaaatgggcccaaactgccacatgtaggctttaagggggctctggggcggcgggggggcaaacgcgttcatctgtttagtcagtcatttcccaaaaacttatcgaggtgtagagtatcgagattccagcttgggctttagagccaggctctccaggttcaagtcctgactctgccctctgccgtcacctgcatgagttacttcacttctctgtctctggtttcctcatctgtaggggttacaccaaccttgcagagctatggagagaattaaaggagcatgatgcctggcacagagtagttgctcaataagcattttccatttgatgaacaccatgagcatggccttgtactgggagcccgggggaaactgggtcaggatctccatcctaagagctcaccatctggtgtagaaaaagatgggtcaacagaaaattgccctggggcgtgacaaaggttttttgggagaagaaccagggctgtgagttcaaagaggggtactagcc

SEQ ID NO: 4957 - protein, 18 aa, Homo sapien
MASNSIFDSFPTYSPTFI

SEQ ID NO: 4958 - DNA, 1074 bp, Homo sapien
  Unsure 691-721: Unknown base
tttgtaaatctgaaaactcaggattgagtagtctttccttagctgcagttgcctgtctggccacacctgccagctgttgcttgtacccctgtaatttgcacggccttccgggcctttctcacaagatcactgcaggtcacattcatgaggaaaatgcaggcagttcctgccatcagacccctcaggatgtcatggtttggcctgaaaacaagattcctgcaactctaattttcctttgctagatcaaatgaaggatttgatctaatgtttgcattctagcagcaaaatcattgaatattttatttcttaagagccctgcctaaccaccgcccccctcctcccccgcgatcacacacacctgggttaggccctgcctctcacgcctgtgcctcctgccaagtcctcagaggtctctgatcccatgtgcctccaggcatggcatagggggactgtgacacagcctctcggcccacagacccctgattgtgggcttgctcactgccccagtcagtcctcttattgaggattccgtgccagttcctgcctctgccttcctgagattacaggtatgagccactgtgttaagcaaaaaaacttttttaaatgaaaatcattttttaaaagacaggctttccaggggagggtattattccacttatatgaagtgtcaacagagcaaaactcgatctcnnnnnnnnnnnnnnnnnnnnnnnnnnnnnnngcagctctctctctcgggagagggaggggacttccgagaggaaaaggcctgcaagagcctttgggttaactgagaaagcacagcccggccaacgcttgggaagaaagacaggcaagcactggaaacaggagctattagggtgaggagagagccttgcctttcacagcacagtgaggatgacattgcaccagggacagagattgtatgtgacaaggctggggctccttctttcctagacaatcaaagtatcagtgatgggttttggttggtgattttgaaaaaaaaaaaaagtatgttatgttatactagtgtatgctgtactgaattgaaataaaaccaaaatctgcatcttc

SEQ ID NO: 4959 - protein, 79 aa, Homo sapien [sequence omitted]

SEQ ID NO: 4960 - DNA, 3120 bp, Homo sapien
gtgagaccaggactgagaacagggagaggcgacccgacccccagggcccggtgctcaggacagcacacagagccgctgaaaacgactgaagagagcaagggatttcctgggacatctggctctggagagtaaaaggccaagctatgatagcaactggtggagtgataactggcctggccgccttgaaaaggcaagactctgccagatcacagcagcatgtcaacctcagcccgtctcctgctacccaagagaagaagcccatcaggcgccggccccgggcagatgttgtggttgttcgtggcaaaatccggctttattccccatctggtttttttcttattttaggagtgctcatctccattataggaattgccatggccgttcttggatattggccccaaaaagaacattttattgatgctgaaacaacactgtcaacaaatgaaactcaggtcattcggaatgaaggcggtgtggtggttcgcttctttgagcagcatttgcattctgataagatgaaaatgcttggcccgttcaccatggggattggcattttcattttcatttgtgctaatgccattcttcatgaaaaccgtgacaaagagaccaaaatcatacacatgagggatatctattccacagtcattgacattcacacgctaagaatcaaggagcaaaggcaaatgaacggcatgtacactggtttgatgggagaaacagaagtaaaacagaatgggagctcctgtgcctcgagattggcagcaaatacgatcgcctctttctcgggttttcggagcagttttcgaatggacagctccgtggaggaggatgaacttatgttaaatgaaggtaagagttctgggcatcttatgccccctttgctctctgacagctctgtgtctgtctttggcctctatccacctccttccaagacaactgatgataagaccagcggctctaagaaatgtgaaaccaagtcaattgtgtcatcgtccatcagtgcttttacattgcctgtgatcaaacttaataactgtgttattgatgagcccagtatagataacatcactgaagatgctgacaacctcaaaagtaggtcaaggaatttgtcaatggattcccttgtggttcctttgcccaacaccagtgaatccttccagcccgtcagcacagtgctaccaaggaataattccattggggagtcgttgtcgagtcagtacaagtcatctatggctctcggacctggggctggacagctcttgtctcctggggctgccagaagacagtttgggtccaatacatccttgcatttgctctcgtcacactcaaagtccttggacttagaccggggtccctccactctaactgttcaggcagaacaacggaaacatccaagttggcctaggttggatcggaacaacagcaagggatatatgaaactagagaacaaagaagacccgatggataggttgcttgtgccccaagttgccatcaaaaaggactttaccaataaggagaagcttcttatgatttcaagatctcacaataatttgagttttgaacatgatgagtttttgagtaacaacctaaagaggggaacttctgaaacaaggttttaatgttaaaagaatatatcattttacaagggtatatattttaaaacgattttcactggtgtttccttcttaaagtattggctgtaagcctttttaatcaaatggtttgtagtgtattagaattggctgcttagttctgtaatgaagatggttgtatgtttgggttacttgtgactgcagtactctatgttaccacacatgattttatttttctcttcctttgaaagcatgatctcttttattaatatgaatgcaaaatgcttgcatccaaattaaagcttattttctttacttttaagttctttgattgccctattcataaaatgaaatgtccagtatggaaaacatagggtaccaaagtgtggaccaggagtacaaattcagtcccaatactcaatacgtattatagatgactatgagtgcaaaccttaggatgtgattttctgaataattgttctttgtaggatttggttacattatttaaaatgaaaaagatctagttttagtgtgagctcagtaatgttaattggttaagttcattgtgaatcttgagttttagataagtagttatttttttcaatatcacttctgtttttagtgatattatatcaagaaacaacgtattcaagagccatggctgacagtgccagatatacttagggataaacatcaaaatgcaattatagttgctataacgttagatactcggaatcaaaatttatttgcaagctgacttgataaactaaatgaaccaataaaatttgtagaaatgctatcctgaaataattatatacatgaagacaatgttgactaatgaattaagatacattatatactagttaatgctaactagtctcagtacctgtttttagccatctgttactgtccaatagcacctcattcccacattctattttcccccggtattctttagatcctagtatttggaaaacaatcggctaaccttgacatttctttttaccttcatatgccactatctcggtagttcaaaaaaatttaaattcttgataaattgccttgaagtttaccttgtgctggagagccttatgataactccaaagactttcttacggtataatacatgttgtttaggattgtgtttcttagtcactgaagataataaatattaaaatggatgttttcatcagaaaattttcatgttttcctttaaggtaacataattgtaagaattgtttaataaaatactcaggaaattctaaaggtttctcctaatacctaaacatttctgaacatcagtattgcagttgtggaagagcagaaggaggatacatttgtttgtgttgctccccaaaattccaccttgcatttgcatcacaaacttccctcaattgaggcagttttctttgttagaacattaagtctgtgtattgtaatagagtgggctcaatattttactataaagcatttaataaactgttattaatagaaaaaaaaaaaaaaaaaaaaaaaaaaaaaaaaaaaa

SEQ ID NO: 4961 - protein, 491 aa, Homo sapien
MIATGGVITGLAALKRQDSARSQQHVNLSPSPATQEKKPIRRRPRADVVVVRGKIRLYSPSGFFLILGVLISIIGIAMAVLGYWPQKEHFIDAETTLSTNETQVIRNEGGVVVRFFEQHLHSDKMKMLGPFTMGIGIFIFICANAILHENRDKETKIIHMRDIYSTVIDIHTLRIKEQRQMNGMYTGLMGETEVKQNGSSCASRLAANTIASFSGFRSSFRMDSSVEEDELMLNEGKSSGHLMPPLLSDSSVSVFGLYPPPSKTTDDKTSGSKKCETKSIVSSSISAFTLPVIKLNNCVIDEPSIDNITEDADNLKSRSRNLSMDSLVVPLPNTSESFQPVSTVLPRNNSIGESLSSQYKSSMALGPGAGQLLSPGAARRQFGSNTSLHLLSSHSKSLDLDRGPSTLTVQAEQRKHPSWPRLDRNNSKGYMKLENKEDPMDRLLVPQVAIKKDFTNKEKLLMISRSHNNLSFEHDEFLSNNLKRGTSETRF

SEQ ID NO: 4962 - DNA, 1417 bp, Homo sapien
  Unsure 334-426: Unknown base
cttttagtaatgctattattgctgcatttaaagtaatgtcttttttcttttggctgcttttaatatttactctttgtgtttgttttcaacagttaaactttgatgtgcatgggtgtggttttctttcctgcctttggttcactgagcttctttatctttcattagttttagaaaattcatagccattatcttttcaaatattgctgcttcattctctctctcttcttcattaacctacgtatagtagaatttttgactatgttctgtgtgtctccaacactgtgttctgtcctttttgcccttggtttctgtgctcagtttggatttgacctgnnnnnnnnnnnnnnnnnnnnnnnnnnnnnnnnnnnnnnnnnnnnnnnnnnnnnnnnnnnnnnnnnnnnnnnnnnnnnnnnnnnnnnnnnnnnntggtgctgataaatattgatgaattctgctctctgctctctatggttgtcaacactgcagagttgaggcctcatatctcacctgcactgctgcaacagcttactggtcccttgctcccagccttctcctcttcagtccatcgtccacacagcactggggaaggggagccacttgaaacaaaagtcaacaactggttgtagttcataaacacagagctgtttgtgtcccctgtatctggaatgccattatgacccactacattttttctttcctacccctcttaaaactcagttcaggtagcagctccactaggaagccttggctgaccataatcccattcaattccatttcacctcttcgcaggcagtctggggttagggaccctttctctttgctccccaaaataaactggttatctctactattggatttacaacattgtattataatcttctccatgtgtgccttctctagtagaatgtgagctctttgaggccaaggtctatttaatttgtttgaaaaattcattgttatatcctcaaagcctagcacatagtaggtactgaatgaatgaatgaacaaggggtgccaggagactgctactcccagtccttcccagaaactgcctagggctttgagtcattttatgaagctaggtcttaatgcgtaggcaacctcccagctcactatgaacgctgacagaagagtgttttcatgtctataatcaagaattccagatacattccttttactgaaccttgaattgatcctaagattggtagtaaaggtattatgttacctcctaacagcactacaaagtacctttttttatcagaaaaaaattttaccattaggactcaatttgaagtactaatgcttctcaagttctccactatgagagttaccctgtattagaccgttacctataagaattaaggggtaaagcactaaacagaaaagaaaaaaaaaatagcaactctggtgagcagat

SEQ ID NO: 4963 - DNA, 4061 bp, Homo sapien
  Unsure 3593-3611: Unknown base
gggaccctggtgaccaaagtggctccggtcagcgcccctcctaaagtcagcagcggccctaggctgcctgctcctcagatagtcgccgtgaaagcccccaacaccacgacaatccagtttcctgctaatttgcagcttcctccaggaaccgttttgattaaaagtaacagtggtccgttgatgttggtatctcctcagcaaactgtaacaagagccgagaccacaagtaacataacctcaaggccagcagtaccagcgaatcctcaaacagtcaaaatctgtacagtgccgaactctagctcacaattaatcaagaaagtggcagtgacacctgttaaaaaattggcacaaataggaactactgtggtaaccactgttccgaagccttcctcagtacaatctgtggctgtgccaaccagtgtcgtcacagttactcctggaaagccattgaatactgtaactaccctgaagccttcaagtttgggagcatcatccactccttcaaatgagcccaatcttaaagcagagaactcagcagctgttcagattaatctttctccgacaatgctagaaaatgtgaagaaatgcaagaacttccttgcaatgttaataaaactagcatgtagtggatcacagtcccctgaaatggggcaaaatgtgaagaagctggtggaacaacttttggatgcaaaaatcgaagcagaagaatttactaggaaactgtatgttgaactcaagtcttcacctcagcctcacctggttccttttcttaagaaaagcgtggttgccttacgacaacttctgcctaactcccagagcttcatccagcaatgtgttcagcagacttctagtgacatggtcattgctacctgtactacaacagtaacaacttctcctgtggtgacaactacagtgtcctcaagccagtctgaaaagtcaattattgtttctggagcaacagcacccagaactgtgtcagtgcaaactttgaacccacttgctggtccagtgggagcaaaagctggagttgtgacacttcattctgtgggcccaactgctgcaacaggaggaacaacagctggaactgttttgcttcagacttcgaaaaccacttgtgacatctgtaccaaacacagtgacaatggtctcactgcaacctgaaaagccagttgtccctggaacagaagtaacactgtcccttccagcagtaactttgaagaatcttcaggtgcagctatttgtcttccatctgtgaaacctgttgttacatctgctgggaccacatctgacaagcctgttattgggactccagttcaaatcaaacttgcccagccgggccctgtcctttcacaaccagctgggattccaacaggcagttcaagtcaagcaactagtagttcagcagccttcaggaggcaatgaaaaacaagtgaccacaatttcacattcctcaacattgaccattcagaaatgtggacagaagacgatgccagtgaacaccataatacctactagtcagtttcctccagcttccattctaaagcaaattactctgcctggaaataaaattctgtcacttcaagcatctcctactcagaaaaatagaataaaagagaatgtaacatcatgcttccgagatgaggatgacatcaatgatgtgacttctatggcaggggtcaaccttaatgaagaaaatgcctgcatcttagcaacaaactctgaattggttggcacactcattcagtcatgtaaagatgaaccatttctttttattggagctctacaaaagagaattttagacattggtaaaaagcatgacattacagaacttaactctgatgctgtgaacttgatctcccaagcaacacaggaacgactacgaggccttctagaaaaactgactgcaattgctcagcatcgaatgactacttacaaggcaagtgaaaattacatcctgtgtagtgataccaggtcacagctcaaatttcttgaaaagctggatcaattggagaagcagagaaaggatttggaagaaagagaaatgttacttaaggcagccaagagtcgttctaataaagaagatccagaacagctgagattaaagcagaaagccaaagagttacagcaattggaacttgcacagatacagcatagagacgctaatctcacagctcttgcagctattggaccaaggaagaagagaccactagaatctggaattgagggcttaaaagacaaccttcttgcttctgggacatccagcctgacagccaccaaacagttgcatcgtccaagaatcacgagaatctgcctcagggacttgatattttgtatggaacaggaacgggagatgaagtattctcgagctctatacctggcccttctgaagtgaccactccactcttccatccagatccttgctatttactgccaaagaagacacaaagcattgttgcactgtcctgaaatttcaatttctggaaaataatcaccaacatgaaagagcattgtttacagttagaaactttattaactcttacctatccatctcatgggactcttacagactcagattcatctttgtcttctgaaaatcagttatgaaatacactttgcacagaattaggcatctgcctatctgtgcattaaattaaagcaagttaaggccctatttgttactacctgcctcatttgccaaattgtagcaggtgaggtgtccttccctaatacagcatgcattgagatgcaggagaaaggaagaggcataagaaaatacaagaatgactatttcattctatattgaacctgtcccaaagtggtaggttttctgggctggaatcagaagttgcttagctaactatgacagtcaccctctgtacgtgacaggccactgtggtgactttggtcggctgagttccagtgttgtcaaaacaagacaaatggggatagattgtgcctggggttgctaattctctgcttcatatcaccatatgccgtttctggtaccaagtgaggggacatgcttgtcagggaaaccttaaaattgaatctactgatatatcttgttgaaaaaatggaaaaggtgcaaagtattagaaggaacgttagggcgttgctttcaaactgatgaggggaatgtgaaaatggtatcataaaacaggaaatgtgcttcatatgcccaagaggggaagaggtggaatcggaactccaaaacaactggtacatgttttgttgatgggcaaaaaaaatcacagcacaaccagaaaggagaatgtaccagatgttttcaaattagagtatttcaaaaggaaaatgttattttttgttttgtattgttttaaatcccaaggatagtttttatagttccttctgtcataatatattttagttatcctaatttttaagcatgttggcacatttaaaaaatcctaattgatgatgagaaatttttaacaataggactttatgttggattctgtacttaaaaggtactgtcaatatctcactcttggggatatgagctctaaatatgagaagcaagttatatgtgttcacctgaggaagaagctgacggacaaagcaaaccctctttnnnnnnnnnnnnnnnnnnnttccacgtgtgtggaatacagccggtgaaaaataatcactgtagttagaatcacatacagaaaaaaaatgattgaatcctccaagaaggtatttcaaaaatgggaaatgctatacttataagaattgaaggaaaaaaaaaaaaacacctcacgtatgttattcttcatcctgttcttcccattgggactgttatggccatattctacagtatagtaaattttaaattggccacatttttttttgtttcagcaagttatgtaaaatgctataaattatgtgtatgttaaaggagtactttaagaagagatctttatccaaagttgtttttgtatatttaaatgcttacctttatttttttgtaaagtgcagcatactcatttgtgtataatcttactgatcagatgtttaaaattattccaaatacttcattaaaataattattttattat

SEQ ID NO: 4964 - protein, 386 aa, Homo sapien
  Unsure 3593-3611: Unknown amino acid
GTLVTKVAPVSAPPKVSSGPRLPAPQIVAVKAPNTTTIQFPANLQLPPGTVLIKSNSGPLMLVSPQQTVTRAETTSNITSRPAVPANPQTVKICTVPNSSSQLIKKVAVTPVKKLAQIGTTVVTTVPKPSSVQSVAVPTSVVTVTPGKPLNTVTTLKPSSLGASSTPSNEPNLKAENSAAVQINLSPTMLENVKKCKNFLAMLIKLACSGSQSPEMGQNVKKLVEQLLDAKIEAEEFTRKLYVELKSSPQPHLVPFLKKSVVALRQLLPNSQSFIQQCVQQTSSDMVIATCTTTVTTSPVVTTTVSSSQSEKSIIVSGATAPRTVSVQTLNPLAGPVGAKAGVVTLHSVGPTAATGGTTAGTVLLQTSKTTCDICTKHSDNGLTAT

SEQ ID NO: 4965 - DNA, 2791 bp, Homo sapien
atctcatatcatgctttttgcttttaaatatcgccttgaggtttgtctacactctgccaaaacaatccctgaacataagtttggtcagcctcataattcagtgagtcgagcaaccatttgttccaagtgataaattgtactaaattacaaactgcccaatcagggcagagctccatggacccagcctccagcccttattttataagactaacccctcttctgaaaaactctgaaggcttaaaagctagcatttggatggaggatacttcctttttatccttcagctatgtatggcactttacataaaataagaggtaaaaaaggagagaaactgatgtgtataaagtaatgcctttcttcccaagcaaatcaaacctctccctatgtaaaagttgatagtgtaccaagagacacaataccactggtgggctggaactagctcgttctgatgcataaaagttgataattaaagtaccagaaattttgtaagctagttgttaaacattaccattattaaatatgaaattataaaacacagtggaatacattaaaaaccaatgtaataatcaaaacataccacttcccaattattttactaccttatactatttattagtactcttgagtctatttaggtctattacatctttacagtgaaaacaggatacaatattgtgctactgtgggtctcttcctgactgcagattcagtaacatggtgttcgtagcttgaaactgtccacagtgggagtatttacaccatagaaactggctggcaaatgctacaaactagcaattttaattcctggaaaggcaattgttgagcatttaccagcacacaatgaatgccatattcttttttttttattaggaaataaattattggaggcagtataaaattatttaaaaagtatcaaatgcaatcccttatcttcagatggctataattttggttatataaatgttttggtttttaccttctttaaagactcctattaggttaaaagtcatatttgatgactatattttattcataattaaattattaaatcaccttttctcctgataatgctttgccagagaattcttagcaattcaactgtagtctaagcaataactcagggctaaattcagggaactgttagcccaatcagatatcactaaaaatgtacttcaccatctattttggagtttataattttggcatttgctaaaagtaggaaaaacagtaacatattactgtgcccagattctaataaatatagctcaattgaaaccaaaactgttacattaaacaaattacactctggcactatgctaaatcaccacagatgttttaggtgtttgatttccaagcaggatggtatatcatttgtttggttcaatatatgaggcaccatttgtagtcttttaggaaataaattagcttttatcacagatttaggaaacttgtctaaaaaaactgtgatcatcagttacagagggaaggaaacatattgaacacaaggcatcatagtagctggaggccttaaaaattatgcacgaccaaaaagaatgatttggtgagagatgtgtagctgattgacaattttagtgtgaattcatattcatttaacccagcagcaatctacataagctatgctttttcccgcctgtatttatgtttcttagcttataaagtcccaatatattatatcttttgttgctttggcagttttaatttagagctctgcgttcacagagatgccacctatagcaaaaactatctttaagaattggaaaataaaatgaatgttttagataaaatattgcaagccattatgtgtagagttaatgtatggaaatttgcatttgtttttctgaatcatggtgtacattaatcactcattgaattctatttctaagcaaataagagaatcaaacatttctaaaaggaacatatgtcttgctattaataacaaggagacaggtaaaatagtaaggtaatataagcaaaaaaaaaaatgtaatgaatttagctatcctaaattggaatttttacagattgcatgcatacttagaattttaaatttttaaaagatttacaattgagtatggtacccacagagagtgagtaccaagggaaggaagacctaatacaagtgatgttgcctgataaatcacatcttgccaaaaaaaatatattttagtaaatacagttctttaggaagaaaaatgttgccctttcacactcacagtgtaaatacattcataatattccttcaatcatctaaattaccgccaggtcatgaaaggacgcgatcaatgatgacctattgcactcacaggtaacattgactcaaattttggcaatattgctatattatctagataattcttgtgatgtttttatgtcactatcaacattaaaaatattttgttaaacaactatgaaactttcaaaagtttgcatataactgtatgggcactctcatttcactgcatacatacaatactttgtatacacatacttctcgtgtggatattttataattttatttaatctaacatttaacttttaggtttttgtggtactcatctgaaaggttggcatttgttttctttttatgttatatatgtattttagatgaatcaataatgtgtattcctagaaattttttctaggcataaatagatcattttatgttggcatttaagagatatcatttttgttttattgttctgtgtaaaccatattcattgtacactgtgtgtatatttttgtttaaataaatgatttttatttttaaaaa

SEQ ID NO: 4966 - DNA, 6654 bp, Homo sapien
cgcggcgacccgcgacgaaggagccgggcgtccggggcgagcgggaggcagccgcactcgccctggcagccgcgagctgtgcggcctgggaccggccggaggtcgccagcgagcagccgccggctccattcattcgcgcggctccgcctcctttcccgggctcttccagcggctcccggggcgcgtctgagaggatggcattccctgtggatatgctggaaaattgcagccatgaggaattggaaaattctgctgaagattacatgtcagatttaaggtgtggggaccctgaaaatccagagtgtttttctcttctcaatattacgattcctattagcctgtcaaatgtaggctttgtacctctttatggtggagatcagacccagaaaattcttgctctctttgcacctgaagattcactgacagctgtggcactttaccttgctgatcagtggtgggctattgatgatattgtgaaaacatctgttccttcaagagaggggcttaagcaggtgagcactcttggggagagagtggttctgtatgttctgaatcgaattatttatagaaaacaggaaatggagagaaatgagatcccattcctgtgtcatagcagtactgattatgctaagattctgtggaagaaaggagaggccattgggttttattcagttaagcctacaggaagcatatgtgcctcttttcttacccaaagttaccaattgccagttcttgatacaatgtttctaagaaagaaatacagaggtaaagattttgggcttcacatgctggaggactttgttgattcctttacagaagatgcgcttggcttgcggtatccactgtcttctctcatgtatacagcttgcaagcaatactttgagaagtatccaggagaccatgaactcctttgggaagttgaaggtgttggacactggtaccagcgaataccagtcaccagagcattacaaagagaagcacttaaaattctagcactttctcaaaatgaacctaaaagacctatgtctggagaatatggtcctgcatctgttccagaatacgaagcaagaactgaagacaatcagtctagtgagatgcagctaactattgattctctaaaagatgcctttgcaagcacttccgaaggtcatgataaaacatctgtttccactcatactcgaagtggtaatctaaagcggccaaagattggaaagcggtttcaggattctgaatttagcagttctcaaggtgaagatgaaaagacctcccagacttcacttacagcttcaataaacaaattggagtctactgcacgcccatcagagagctcagaagaattcctggaagaagaacctgaacagagagggattgaatttgaggatgaaagcagtgatagagatgcacggccagcactggaaacccagccacagcaagagaagcaagatggtgaaaaggaatctgaattagagcctatgaatggtgagataatggacgattctcttaagacctcacttataacagaagaggaagactccactagtgaagttttagatgaagaattaaaattgcagccttttaattccagtgaagactctacaaatcttgttccactggtggtagaatcttcaaaaccccctgaggtagatgcaccagataagaccccacgtatacctgactcagaaatgttgatggatgaaggcacatctgatgaaaaggggcacatggaagagaaattgtccctacttccaagaaagaaagcacatcttgggagttcagacaatgttgctactatgtcaaatgaagaacgatctgatggtggttttccaaactctgtgatagctgaattttccgaagaaccggtctctgagaatttgtctcctaatactacttcctcattggaagaccagggtgaggagggggtatctgagccccaggaaacatctactgctcttcctcagagttctttgatagaggttgaacttgaagacgtgccattttcacagaatgcaggacagaagaatcagtcagaggagcagtctgaagcatcttccgagcaactggatcagtttacacaatcggcagaaaaagctgtggatagcagctcagaggaaatagaagtggaagtgcctgtggtagacaggcggaatttaagaagaaaggccaaagggcataaaggacctgctaagaagaaagctaagctgacctgaaggaagaagaaagtggatgataaatcctcttctttgtaacatagttgttgtttttaaaatatggtaattaataaacagcatggggcacaggacaaaaatttccaaaatttcaatttgaacttacttactatgcagttttttgcttccctttagaacgtagaattcaccattgtttttaattttccaggctatttttggtaaatgcaattttttatttttattaaccatgtttcaattttgggaaaccagatcatattatattttctttatcaggtggtacatctgaccattatttcaaaaatataattaaaaagctgtgaaagtagtaggatttccattacttataaggatcacagaaatcttttatactaagggttttaatagtaaaacttggtgagggttctagaagttttaaatttcaaaactaatcaccaattttttaaaatgtaggcatgcctaaacaaaaataagtgtcaataaattagaaaaaatataacttcaagtaaatgagagcacaaaaacagaaacttacggtcaaaggttcatgaagatattttggttttggcctcttaatcctagatatagatgcagttttttcctttgacttcactatctatggaaaggtacacataaaatctgtttctgattcattctatcatctgatgttaacagtactgtcagggatttaactgtggcatgtggggactaattatttaaaatttcatttgaagtattagtttgctgtaattttttttgtctgcatatgtgcagacgcctagaagtttagactttcacctttaatcaggtaaaaatcacaactatactttggagacatggtttaatttggacttctggtcctgatcagatagataaattaagctggagattttacttttatcccaacccagttaacatctatatttcagaagtatgaggctccttcctaaggcatctccttaaatcttgccacctccctaattctacagtcttatttatattcccccacagctttcatctacttctgtaactcatggagtgattctccaatcaacagatcttcctgcctgccggcttatgcccttgatgtccatttttgggtaggtttggaggtgcaccccacaatgttagacctatatggcaggagtaaaactgcccccagtgttagacctatatggcaggggtaaactgcctttgggggagctgtggttacaagggcttcaatcatattggaggcttcaatcatcctttgatttgtactgagtactggttgcaagctggcctgttaagtatatattgtgttgccataacaaaggcctaggaaaatttgaagaaaaaaaacactgaactgttattttttgtaatttatttaaaaatggacaaaatggttattagaatccaaagataatctaaaaacagttctactctttggaaatattatgtgtactcaaatttgcacttaagttggagaatgttttgagaccatttaaattgttttaaaaatagcttgatcttgatccttatgcaaaagaaactaagactttgtgtcattatttgaggtagctaaggactgatgttgaaagtgtattcagtctatagtaagctgatgtcaggtcagtaaattttgtttggggatgttggtattttcgatcaagttaaaatcttaaagcagacaaaaatagtaaacgctcctatttgtgttagattttgaacaattgtattaccctatattttctttaattagtcaaaggtaagccagattatttcattctaaatgaaaattaaagcactttggccatttattttttcaacaaatgctaatactaagtaaaaaaaaaaagtatgactactattagtcaatctaccaaacatttatgctgttttatacattttatgagaaacttctgtcaatatcacaaagggaaatattctgttaagattcagtaaattcttaatctttacatgtttcatttcttagatttgaaaacacttgtagatattttatttttacttggatttgtttaaaatactttcttttcaaattattttaaacatggaaacgcttcatgaatttgtgtcatccttgcacaggggccatgctaattttccctgtattgttctaattttagtatatgtgctgccgaagtgagcactaaaagactttctttagacaagtgtagttttttaaagattgagctcactggctcaactcttgatgtgtgaatatagttgagtttacaaaaaatgtttattaatcatatatgaccattgggggctaacagtataaacttattcttgttaaacttgtttgggttaaatagtaagtgaattgtaaacaatttagaagttttttgttcagcacacaagaacacttctgttacagattctctctgacagaaattgttattttggggtttatagattatagagggaaaagttagatcacttggaaaaacctaactctcatgttcagtaacttgagtatagaatttataccacaatttatcttcaataaggaacctacatgaacttaatcagttatctgtagtttttgcaaggcattagaaaaaatttcacaattacagaggactgaaaatgtgatttcaaccggctagtctagttgttgaatgtccagtcacattacacatagtcctttgtgaacttatttgtgaagggagttcactttttatgtacatacgtgtatatttccttgtgtaatataaagcagatggttattagtattttagttctttcaagtttaaattattcaattgctagacatcacagaaattagtatatttaagaatttattataaagctcctctacaacttttaaaggtgagagggtctattatgatttttttataaaatcaaacagcatgatttagaacgtcagtcttctacttaaaatgtgtctatattcatggtatttccattcagtgtagatggtaaggaaaacatctagtcattaaagatttacttatagcagactccagaacactacctacaatggggtttcagtgactagaaatcttgaaggtttatgattgcatcaaattgagcctgtactaatatctaaatatctgctcttatgttctgctttatcccttgggattaccttctaaggtttggtcacaccagcaaactgaaacagatcttaatgtacataaaaaatttatactaatattactcatctgtgttacagtattttgaaaaatgtttcaggtgtcatctagtcgtctttcatgggtgtgattagttacaaatgttatgcttatgttttcatacttaatatcaagctttctttgtaccttacaagatagtatttttggttctaaaaaaaacaagcaaacttcatttttgtagtatccagaaattacctggagtcagtatttttattcgccttctagaacttgtgatccacacatcacccatttatattagtggtaaaattatctgctaaaatctaattgtaagaaaggcttaccttctgtcatcaagtgattgtatcatcctggatcgtcatttccaaggaactagcctttcttttcctaagcgtctgtatgtgttctaaaacttccagtatatatttatagaacttagaaaaaatgttacattattcagagtagcaagtcttactggagtacctatgtttgttttcttggtttttatttttttttaagtttaaaagtagtaattaaacctatattttgtgattgtttcctggtctgtgtttttaaattcctttccttcagttttcctcatgaagatgtttcagatactgaatttgtttagacattgaatgactttgttaaaggcacaattaatcacattggttgtactctgaagacagacttctttaaaaaaaaaataaacaatttaaaacaatgtggtgattatagattaatgtaatatacgccatccttaaaaccacaacatataacagatcacaaaagtgctttcaccaagttacaaccgtaaatccttacctttttacatcatctaagtaactgcaaataaatttctcctcagggaatcagtgcagtcttctttttccttttaaaacttagctggagttacttaaactaattcttaatactattctgaaagtataaatatattgtttagaatacagaaaatgctaagagagtacaaagactttagtatatttttttcattttcatgattcaagtagaaaatagtgccaagtaggtattattatacatggtaaatgagatgaaaaaaatgtttagaatgtgaattcactagacctttgctgtactggatttcacaggtgaaaagatttctctaagatttctgaacttttagtgtcttctcacatacttctagtgtaaacaaacactataaacttaacatctgtattaatgctacctaccttttttaggattaatgattaacgagattttgaagatacttcagttaaattctc

SEQ ID NO: 4967 - protein, 734 aa, Homo sapien [sequence omitted]

SEQ ID NO: 4968 - DNA, 4564 bp, Homo sapien
catctggaaacccgggtcctgcaagaactgcttctgcctgcggagcgaccaccagctggtggccggccctccccagcccagagcgggcagcctgccccctccaccgcgcctgcctcccaggcctgagaactgccgcctggaagatgaaggtgtgaacagctcaccttactccaagcccacaattgccgtgaagcccaccatgatgagctccgaggcctctgatgtgtggacagaggccaacctgagtgccgaagtctcgcaggtcatctggagacgagcccctggcaagctccccctcccgaagcaggaggatgcccccgtcgtctacctgggcagcttccgaggtgtacagaagcctgctggtccctctacctcccctgatggcaattctcgctgtcccccagcttacaccatggtcggcctgcacaaccttgagccccgcggcgagaggaacattgccttccacccggtgagcttcccggaggagaaggctgtgcacaaagaaaaaccctcatttccttaccaagaccggccctccacccaggagagcttccgccagaaactggctgcctttgctgggaccacatctggctgtcaccagggccctgggcccctgcgggaatccctgccctcggaggatgacagtgatcaaaggtgctcgccctccggggacagcgagggtggagagtactgctccatcctggactgctgccctgggagccctgttgccaaggctgcctcccagactgcaggttcccggggcaggcatggtggcagggactgctcacccacgtgctgggagcaggggaagtgttccgggcccgcagagcaggagaagcggggcccgagcttccccaaggagtgctgtagccagggccccactgcccacccatcctgcctgggccccaagaaactgtccctcacctcggaggctgccatttcttccgacggcctctcttgtggcagcggcagcggcagcggcagcggcgccagtagccccttcgtcccccacctcgagagtgattactgctccctcatgaaggaacctgccccagagaagcagcaggaccctggctgcccaggggtgacccctagcagatgccttgggctgacgggggagccccagcccccggcccacccccaggaggctacacagcctgaacccatctatgctgagagcaccaagaggaagaaggcagctccggtgccttccaagtcacaggccaagatagaacatgcagctgctgcccagggccaaggccaggtatgcacaggtaatgcctgggcccagaaagcagcatctggctggggccgggacagcccagacccaactccccaggtgtcagccaccatcacagtcatggcggcccacccggaagaggaccatcggacgatctacctgagcagccctgactctgcagtgggggtgcagtggccacgagggcctgtgagccagaactccgaggtaggtgaagaggagacttcggctgggcaggggctgagctccagggaaagccatgctcacagtgccagcgagagcaagcccaaggagaggcccgccattccccccaagttgtccaagagtagccctgtagggtccccggtgtcaccgtctgctggagggcccccagtgtcactactggctgaccttagtgatgggagctgtggcggcagcagcattgggccccagcctccatcccaaggtcctgctgaccccgctccttcctgccggaccaacggtgtcgctatcagtgacccatccaggtgtccccagcctgcggcctcgtcagcctcggaacagaggcggcccaggttccaggcaggcacctggagtcgtcagtgccggatagaggaagaagaggaggtggagcaggaattgctgagtcacagctggggaagagagaccaaaaatggccccacggaccattcaaactccacgacctggcaccgtctccaccccacagatggctcctctgggcagaacagcaaagttgggaccgggatgagcaaatccgcctcttttgcctttgagttccccaaggacagaagtgggattgagacattctcacctcctcctccgcctccaaagtcgcggcaccttctaaaaatgaacaagagcagctctgatttggaaaaagtgagccagggctctgcagaaagcctcagcccatccttcaggggtgtccacgtcagcttcaccaccggctccacggacagcctggcctcagactctaggacctgcagcgatggaggtccctcgtctgagctggctcactcgcccaccaacagcgggaagaagctctttgctcccgttccgtttccttcaggctccactgaggacgtgtcccccagtggcccccagcagccccctccactcccccagaaaaagatagtgagccgggcagcctcttcaccggatggcttcttctggacccaaggctcccccaagcccggaacagcaagccccaagctgaacctaagccactcggaaaccaacgtccacgacgaatctcactttagctattcgttgagccccgggaaccgccaccatcctgtcttctcctcttccgatcctctggagaaagctttcaaaggcagtggccactggcttccggcagcagggctggcgggcaacagaggcggctgcgggagccctggcctccagtgcaaaggggccccctccgcctcatcctcccagctgagcgtgtccagtcaagcctccaccgggagcacccagcttcagctgcacggtctcctgagcaacatcagcagcaaggagggcacctatgccaagctggggggactctacacccagtccctggcccgccttgtagccaaatgtgaggacctcttcatgggcggccagaaaaaggagctccacttcaatgagaataactggtcgctcttcaagctgacttgtaacaagccctgctgtgactcgggggatgccatttattactgtgccacctgctctgaggaccccggcagcacctatgctgtgaaaatctgcaaagcccctgagcccaaaacagtctcctactgcagcccgtccgtgcccgtgcactttaacatccagcaggactgcggccacttcgtcgcctcggtgccgtccagcatgctcagctcccccgacgcgcccaaggaccctgtgcctgccctgcccacacacccccctgcccaggagcaggactgcgtggtggtcatcacccgagaggtgccacatcagaccgcctccgacttcgtgcgggactcggcggccagccaccagacggagcccgaggcgtacgagcggcgcgtgtgcttcctgcttctgcaactctgcaacgggctggagcacctgaaggagcacgggatcatccaccgggacctgtgcctggagaacctgctgctggtgcactgcaccctccaggccggccccgggcccgcccccgcccccgccccggctcccgcccccgccgccgccgcgcctccctgctcctctgccgccccgcctgctggtggcactctcagccccgcagccggccccgcctccccggaagggccccgggagaagcagctgccccggctcatcatcagcaactttttgaaggccaagcagaagccgggcagcaccccaaacctgcagcagaagaagagccaggcccggctggcccccgagatcgtgtctgcttcccagtaccgcaagttcgatgagttccagacaggcatcctcatctacgagctgctgcaccaacccaacccgttcgaggtgcgcgcccagctgcgggagagagactaccggcaggaggacctgccgccgctgcccgcgctgtccctctactcacccggcctgcagcagctggcacatctgctactggaggccgaccccatcaagcgtatccgcatcggcgaggccaagcgcgtgctgcagtgcctgctgtgggggcctcggcgcgagctggtgcagcagccgggcacctcggaggaggcgctgtgcggcacgctgcacaactggatcgacatgaagcgggccctgatgatgatgaagtttgcggagaaggcggtggatcgcaggcggggcgtggagctggaggactggctttgctgccagtacctggcgtctgcggagcccggggccctcttacagtcgctgaagctcctgcagcttctgtgagccaagccccagcctgcaccgtcgctgccccttccctgcctaaccctttcctgtctcgccttggaagcacccatgtctcccctgggaaatggtacagatgactgggatacctggatgtaaaatatataaatatatatatagaaaatacatataccatatataaatatgaaagactaaggatgctgttgcccgtccacactcgtctcctctctgcactaagtcctccctgttttcttctgtaattatacacatttccagttccatgcaacgtcctgaggacagttctgtgaactgaatgcagcctggacactggcctcaataccttgtttaggatttcttcacccttttgtcaaattgttatttaaagaaaaaaaaaaaagaagaaaattccattaaaattttttttggttg

SEQ ID NO: 4969 - protein, 1383 aa, Homo sapien
IWKPGSCKNCFCLRSDHQLVAGPPQPRAGSLPPPPRLPPRPENCRLEDEGVNSSPYSKPTIAVKPTMMSSEASDVWTEANLSAEVSQVIWRRAPGKLPLPKQEDAPVVYLGSFRGVQKPAGPSTSPDGNSRCPPAYTMVGLHNLEPRGERNIAFHPVSFPEEKAVHKEKPSFPYQDRPSTQESFRQKLAAFAGTTSGCHQGPGPLRESLPSEDDSDQRCSPSGDSEGGEYCSILDCCPGSPVAKAASQTAGSRGRHGGRDCSPTCWEQGKCSGPAEQEKRGPSFPKECCSQGPTAHPSCLGPKKLSLTSEAAISSDGLSCGSGSGSGSGASSPFVPHLESDYCSLMKEPAPEKQQDPGCPGVTPSRCLGLTGEPQPPAHPQEATQPEPIYAESTKRKKAAPVPSKSQAKIEHAAAAQGQGQVCTGNAWAQKAASGWGRDSPDPTPQVSATITVMAAHPEEDHRTIYLSSPDSAVGVQWPRGPVSQNSEVGEEETSAGQGLSSRESHAHSASESKPKERPAIPPKLSKSSPVGSPVSPSAGGPPVSLLADLSDGSCGGSSIGPQPPSQGPADPAPSCRTNGVAISDPSRCPQPAASSASEQRRPRFQAGTWSRQCRIEEEEEVEQELLSHSWGRETKNGPTDHSNSTTWHRLHPTDGSSGQNSKVGTGMSKSASFAFEFPKDRSGIETFSPPPPPPKSRHLLKMNKSSSDLEKVSQGSAESLSPSFRGVHVSFTTGSTDSLASDSRTCSDGGPSSELAHSPTNSGKKLFAPVPFPSGSTEDVSPSGPQQPPPLPQKKIVSRAASSPDGFFWTQGSPKPGTASPKLNLSHSETNVHDESHFSYSLSPGNRHHPVFSSSDPLEKAFKGSGHWLPAAGLAGNRGGCGSPGLQCKGAPSASSSQLSVSSQASTGSTQLQLHGLLSNISSKEGTYAKLGGLYTQSLARLVAKCEDLFMGGQKKELHFNENNWSLFKLTCNKPCCDSGDAIYYCATCSEDPGSTYAVKICKAPEPKTVSYCSPSVPVHFNIQQDCGHFVASVPSSMLSSPDAPKDPVPALPTHPPAQEQDCVVVITREVPHQTASDFVRDSAASHQTEPEAYERRVCFLLLQLCNGLEHLKEHGIIHRDLCLENLLLVHCTLQAGPGPAPAPAPAPAPAAAAPPCSSAAPPAGGTLSPAAGPASPEGPREKQLPRLIISNFLKAKQKPGSTPNLQQKKSQARLAPEIVSASQYRKFDEFQTGILIYELLHQPNPFEVRAQLRERDYRQEDLPPLPALSLYSPGLQQLAHLLLEADPIKRIRIGEAKRVLQCLLWGPRRELVQQPGTSEEALCGTLHNWIDMKRALMMMKFAEKAVDRRRGVELEDWLCCQYLASAEPGALLQSLKLLQLL

SEQ ID NO: 4970 - DNA, 1792 bp, Homo sapien
gaaaaagaaaagaaaagaaaaggtacatcagacatgactgcctgcatgaagtcaaacagggtaacaccagtgaagctcaagtcaagagctgtggatattttgtctaaccaacaagaagtctcaagaaatcaggcagtgcagctgcctgctctcagctatcgtatccagccaaaagatgcatgatgatggagtggtgggggaaggccagttcagtatcctatttaaaagtaaacttcctgaataatggatatatgtggagatacagacatagatatatagatacagctgtaattatttagcctcaagtgactttctccattgcttcacgctatgccactattttgcttctttaatttttttaaccttgcttagtattctatagtttgcccaaccagttttacgtccaaggaaaattagccaatgcataaaatatacaaactatgaaaggcaaggatcaggaaaccagagactttgccaccaaatctcagattattagaaactaggtgtcagggtttatcaagaaggccaggaaggccttttgggttaagccttacattcatgaagaacctcgagggtagatttttgagagcattccaaatgaatggtctctggtcaaatgaatgaatggtcaaatgaataaatctgccctcacagagatacaaaaggaaaaggaatataattcataccatttggtttaagccttacattcatgaagaacctcaagggtagatttttgagatcattccaaatgaagtcgaatctgccctcacagagacacaagaaaggaatataattcatacactattgcatttttaataaatcttttgaaatttgcagaattagattgtattgtgtattttcggttaaatgataattgaatgtaaatatttagatgcagcaccatattttataacccagctttagcatttcttcatattttaaggaaaccccccacctccttcttttaagggcgcttcttgctctctgaaatgccctgctaaatgcttctcttaattatttgaataaggtagtttggaataaagaaagaaaagatcactctacatacagatagtaaacttaatttgtgatcctatatatgagacagtataaaaatacagataagttttagaaagactcaaaacaatatgtaaatgactgatgtttgcattattaaggaaaacttgggatgttgggtcaagaggggaaagtgttagtcaatccactttggagcaatatcatgaaggtcaattataattccatatacctttctttgatgccacagtcagagatagaatacagtttgggtggccatggatgtgccccaatacagtacacattttttggttaaatttgttttcagatcatttcatggaatctttgaagtatctttgactctaactttgacttggtggtggaccttccttggtttttataacacctaagagatatcctttagaattacatgtattttagcataaggaaattgaaaaagtaaaacatactggtttttttcaacaagaccatatgtaaattaaatagtgaaatgtgtatgagtttcagtagaactgtaccatcaacaatgtttccataaatatgcagagttctttcttttgtattgttatttacaatattgttaaattgaatgcatttgcaatttctaggattctaaagaattgagtacagaaagtagcaattttattatttgatgataatatgagaattactgtgccaatactgttttgataaataaatagatttttaaaaataaatgtattgtacttattagtgtagt

SEQ ID NO: 4971 - protein, 60 aa, Homo sapien
EKEKKRKGTSDMTACMKSNRVTPVKLKSRAVDILSNQQEVSRNQAVQLPALSYRIQPKDA

SEQ ID NO: 4972 - DNA, 1311 bp, Homo sapien
gggggcgcggccggttactcgcttaccggaggcttcagtccccggcggcgcggcgacagctagggttcacggccactggggcagaggagccgcgagaagatgtgggtttttggttacgggtccctgatctggaaggtggatttcccctatcaggacaagctggtcggatacatcaccaactacagcaggcgcttctggcagggcagcacggaccaccgcggggtccccggcaagcctggaagagttgtgactcttgttgaagatcctgcgggatgtgtatggggtgttgcttacagattgccagtaggaaaggaagaagaagtaaaagcataccttgacttcagagaaaaaggaggctacagaaccacaacagtcattttttatccaaaagatcccacaacaaaaccattcagtgtattgctatatattggaacatgtgataatcctgattatcttggtcctgcacctctggaagacattgctgaacaaatttttaatgcagctggtccaagtggaagaaatacagaatatctttttgaacttgcaaattctattaggaaccttgtgccagaagaagcagatgagcatcttttcgctttggaaaaattagtaaaggaacgtttagaagggaaacagaacctcaattgcatataatttagtcttcagagaattaacttcagtgcacaatgacaatatgatttggaaatacgtttacttaaagatcttatttttaatgtagtgaggatattatttaaacttttattttaactggaaatgtcctgaaacacatatttaaaatattgggatacagtgaaagaaaaattcaaattttaataacataaagatttcctaactttatgttattgaacacttactcactagaagtgagttctttagaaaaatacagtgaaggactcagttcagtcttgtttttatcagagtgataatcatcctgtttcacatcccaatactattttgaaattctaaacaattaaaccaaaattccaataaatataaggttatgccttcaatatattcctatacaattctgtaaccatggtttaaaatacacaagcttaaaataacatgcttagaaatacacaataatatgaacagtatttcagccttaattgtgaatttccttgttattcaagtattaaatgaaatcttttgagtttttagccaaaaattggcatttttaaaatacgaaaatttccttggaattataatgtactgtacctcttcttttttaaataaaggcattttactatatggaaaactaaaaaaaaaaaaaaaaaaaaaaaaaaaaaa

SEQ ID NO: 4973 - protein, 184 aa, Homo sapien
MWVFGYGSLIWKVDFPYQDKLVGYITNYSRRFWQGSTDHRGVPGKPGRVVTLVEDPAGCVWGVAYRLPVGKEEEVKAYLDFREKGGYRTTTVIFYPKDPTTKPFSVLLYIGTCDNPDYLGPAPLEDIAEQIFNAAGPSGRNTEYLFELANSIRNLVPEEADEHLFALEKLVKERLEGKQNLNCI

SEQ ID NO: 4974 - DNA, 982 bp, Homo sapien
aaataattaaatataaataaaaataaagcaaaatctgttgggaaacgagaaaaaggagaggaatttttcaggaataatcataaaaagaaatgatcatcagactgaaagtccagagcctgagaaatgaaaacatatttttaagcattggtgttgaccatgcagacaaacttttgttaattcagagcgatacaaaaggcactttgaatctataaaacttgaaaaagttaaaaattgtatgtcggataaagctttaagtcatctgtcactattaacctcagtgcagcaattctgactcctgtgcctggattccttttatgataattttgccacctacaggacagattaggtgctggtcgcctgaattattttgtgttctgaattattttgagctctaaaatggtaaagtacaaatactcattgttttactgtgcctttggccttttataaaaaggtatttataattcgttgataaaaaccaatatttgaagctgttgattaccaacaaaaaagtttcactctctttatagtgcttcaggatacaactttttcagggccttattagagaaaaactgattcacatgttattcttctaaagctaaattattaaaatgtaggttgaaagattggattgattgtgaatctacactaaagatatggttccaggcagacctccttagagacctccaggcagacctccttactgtcttcagtgatgtttaatttcattactgttactgggtgccaagtgtctttcatttggaagtgaacttactccagttattgaatgtttatcatatcataatttgcatttttccaacattgaaggtattttaaaaagtcactaagagattcattcttttattattcaactacaaaaaaatagtgtaatgatcagaatttaaaatgtgtgattctttttcttctgtaagtatgtattgctatgataaataaaaaatggcaggaccattgtttttattaaaat

SEQ ID NO: 4975 - protein, 8 aa, Homo sapien
MAGPLFLL

SEQ ID NO: 4976 - DNA, 924 bp, Homo sapien
ctttccttatgtgtagtttcttcctgtgacagggagaaacctggctctcagattgacaggacattcgcttaggccatgtcagtgctgtaggtgaactgttcaacctgtgccccagggaggcgcagtcactatggaggcaccttacttccttaatcgtgtactgttgtttttgtgtttgacctgtagcatctaagtactggtttcaaaagttgcctagatgagttcttttctttctttccacctcctgcaaattatgtgatttgcataatttgtacatagttaggttcatttgttagtttgtattccttttggcttcccccatatcctcgttgactttttctttcttttgtaacttacatatgttatgaaatttatatgaggatatataattttcataaatgtttatggtttacatgtattagttgttattattaagatcaccctgggattgactggccaagcatttggtggaagatagcaataaataatacatcataaaagactttaatgtaaaaataaagccatgaaagtaccaagaaataaatcttctcattttaattacatcagcttgtctgtgatcatgtagcctaaggtaggccagagttaatttttgtgttatctatacacgttattgaagcgaattataaaatgttttagcatgttaattacttgtaaattaatatctacatataaaaatgtgagcatatattctatttagtatattaatccttcataaacaagtaatgcaagttagtattaatgatatcttaagacttaacattccttttttagtttgtgttgaataaatgaacatctaagagttcatgatgatgcttaaggaaagaagcctcatgtttacctttggaagttgtaaggcactgactcataaaaattggcaaataaaaggaaagaatcgggcattta

SEQ ID NO: 4977 - protein, 31 aa, Homo sapien
MLKERSLMFTFGSCKALTHKNWQIKGKNRAF

SEQ ID NO: 4978 - DNA, 2295 bp, Homo sapien
agagaaaaaatccctgctgcattatctacccataaaagaaatacagaaccatctggaaggtgaagaacaaagaaagggaatcaagccctgggaatgcaagtttgttgcttattcctgtgactgctgccacagggataagggtgctaggcttgggtttaggagacttgggtgaaattccagtctacacatggctagcaagctctctgaaaaatggggagagtaagtgtgacctcatggagtggtgagcgttcaattatgtcatgtttataaaagtgcctagcactgtacctggtacatagtaggggtgtagtagtagtggtttccttttgttcagttgcagggttggggattactttaaggcttagactcaaagcgataggaatgaattgcttggtcagcagaagtgcacactgcacaccagcctcaagggacaaggtcaaccacgacacgtttgcaaagtgtttgtgcggggaagaccactctgatgtttcttacttaaaggcagggtcttccaactttgtctgatacggaatgacttgttacaatcatttcacaggcaagccaacactcaggcttttgactaacttgtctggcgtgtttctcaacaactccattaagaattcactgttagaaatctgatcttttctcctctgttgagctttacttgggcattttattgatttgatatcacttagtagaaacccattcaacaaaaggtatctcttcaggccactagtcaatacagcattttttatttgctgagatttttacttctattttgccccacatcagctggtaagttttataagtaagcaaaaagtaggagctatagacaataaggaagcagaatgaacctctgcaattcatatttatgtatgatttcacttggagtgggaggagatgttttttttccccatctttgaataagtagaaaaacatctcacgtaacctggggtggtggtggtgaattttcagctgaagggaatccttcctcgtgaagctcactgctatcctgttaatctagcattttacttttgtggtaagattctgggtggaaagggaaaatgaaatgatacagcatctcaaacataggca[450 bp omitted]aatctctcttggtatgctgctgagttggtgggacctgggcaattacaagggaggtcactgcacccccaggcagttcccagcaagtgttttttccaatttcactgacattctttccgggctcaactcaatttgttttcaacttctctatggcaattgatgactgactgtgtaattcagcaggatctcctgtgaagtgcttcttccccagttgaataggagctggtgtttgtctaagcctctgcttatgcatgaggtataatgctttttatatgttatataatgctcttacgcgttagctatctgaatgatagatttaataaaatatacctcataatattatggggaaaggatgacgactgttatagagaggaacttgggagtatcacttctgtaatccttatctaacctgaatctgttagcaggaaactgaaaaggcctgtgtatgacaatgagataaacaattttaatctcttagcaatgtcaagtggaaaatctaactacctgccagtagtttaagaaatggctaagagattttgttgggcacaaataatcctgagacccagattgctgagccaagggtaggaaaattggttttgctatgtgttacagctgggaagtgagaaggtcactgtttgacaaactactaaaaaaaccttatggattaaacattcgccagtgtaggggacattttgaatgtgttataattgatattttagtctatatgcggccgctgaacgctttttcttttac

SEQ ID NO: 4979 - protein, 56 aa, Homo sapien
EKKSLLHYLPIKEIQNHLEGEEQRKGIKPWECKFVAYSCDCCHRDKGARLGFRRLG

SEQ ID NO: 4980 - DNA, 1626 bp, Homo sapien
ttacaaccattgccttgggacacacagagtgaactgtttgagtgataagtaatttaggtagaaactttacccttaatttcaaatgataccaaacagctcattactaccccaagggacgctctccgtagcttctggattccccagtttccttctagaaacaaggactccaatagcactataaccctaaacaggccctaacccagaagaatacaccacaaaatgcgattgattttctcaaaatatcacagtcttagacactatacaaataattcaagaaaattctttctaccctgcagtggatatagtattctattatattctccagcaaaacttttaggacttttcaaactcatttctaagccaaatagtttagataaatatttacccttatatttggggggaattcaggctcaccatttgccgaggcaagcccatcaacagtctagaggcatattctgtgtcattccttcccgtctccttcatagaatactactttttccttttgtctcctggccattctccatcatctgctgattattgctaaccacaggatgctggcaaagcttacagtgataggcacatgtgttcagtgatgtccaatacactcttatcacagtggttattgcttcttactcttttcaaatgcattattctacccctcaacctatatccaatcattagaactatacctgactggagcccagaacttgggaccaatacttaattcaaatagcaggggcttgctcacaaacattaagcccaaaaagaagcacagcactttgaaaagtcaaataggcctttggtagctctgtacatttgcaattttacatttgttattagtttatagcactaataacacttcagtcgtgaatctacagtctcaatatgataagtcttagaacatgttctagaaatagtggtaccttgctgctattatacttagtaacttataccccaatataataataagtattaaatacagattgtgtatgcattctttgtgtgtatatgccaactgtactacttaacctcactgatgagcaattagaaaaatacacaaattgtcatagtgaaaataagtcttggtcaattcagatgatacgtgaacctgataaatgctctaatagatatgctattttgtcctgtattgcttgttttacagtatggtgcatgttgtttgctaagtaaaatgataataataataaagtataccaattttaaggttagaattaaaattttgcacatatgcttcttgatattctgaaatgtattctgtggcttaattatcttattcatacacatttcacttggctttttacccctaggaaataactgtccaagtatatatctcgtcttctttcttgtaactttgattaaactgcttacttcaacttacaacattgtaaagccagaatacctcattttaacagtgaaaaaaaatatgatgacctgatgtgttctcttgtatttgatttgaactacctaaataggcttaactgtaataataaatatacaattttggcaggcattttttcctttgtttggatgaacattttgttattggtccacttctaattttgtcttaaagagttataaactcagtgtcaataaaacatcttgttatat

SEQ ID NO: 4981 - protein, 104 aa, Homo sapien
MRLIFSKYHSLRHYTNNSRKFFLPCSGYSILLYSPAKLLGLFKLISKPNSLDKYLPLYLGGIQAHHLPRQAHQQSRGIFCVIPSRLLHRILLFPFVSWPFSIIC

SEQ ID NO: 4982 - DNA, 1932 bp, Homo sapien
cctctagcttagcgagcgctggagtttgaagagcgggcagtggctgcacacgccaaactttccctatggcttcggtgaccagggccgtgtttggagagctgccctcgggaggagggacagtggagaagttccagctgcagtcagacctcttgagagtggacatcatctcctggggctgcacgatcacagccctagaggtcaaagacaggcaggggagagcctcggacgtggtgcttggcttcgccgagttggaaggatacctccaaaagcagccatactttggagcagttattgggagggtggccaaccgaatcgccaaaggaaccttcaaggtggatgggaaggagtatcacctggccattaacaaggaacccaacagtctgcatggaggagtcagagggtttgataaagtgctctggacccctcgggtgctgtcaaatggcgtccagttctcgcgcatcagtccagatggtgaagaaggctaccccggagagttaaaagtctgggtgacatacaccctggatggcggagagctcatagtcaactacagagcacaagccagtcaggccacaccagtcaacctgaccaaccattcttacttcaacctggcaggccaggcttccccaaatataaatgaccatgaagtcaccatagaagcggatacttatttgcctgtggatgaaaccctgattcctacaggagaagttgccccagtgcaaggcactgcattcgacctgagaaagccagtggagcttggaaaacacctgcaggacttccatctcaatggttttgaccacaatttctgtctgaagggatctaaagaaaagcatttttgtgcaagggtgcatcatgctgcaagcgggcgggtactagaagtatacaccacccagcccggggtccagttttacacgggcaacttcctggatggcacattaaagggcaagaatggagctgtctatcccaagcactccggtttctgcctggagactcagaactggcctgatgcagtcaatcagccccgcttccctcctgtgctgctgaggcctggtgaggagtatgaccacaccacctggttcaagttttctgtggcttaaggaagtgtgaagatatgatccagtccagggctaggctcagccacctgtctcctgtccagaaaaaaggtgaagattaagaagctttcagaatgattctatggattaaaatcatacaaatggtggctgttctgagaatcagtctgggtattgatttccttttccagtgactggctccaggccatgtctaatgaccagctcgattccctgtgcagttcagagagcaagtgaacccaaccaacaatgtcgtcatctaagccctgaccctagccagggactcccatgctgctgttggctccatctctccacactgcctctttcttttcaactttttgcccttcctttctttaaagctattctcacattgcttttatttcctcctccttcacctccaaccactgtcagcagcactctggagttttcaaatgtcacattagcctcaccctgcatgctaggagatggacctgtctctatacagcagtagatgattgataagtgaggaaactgaggcttacagaggttgaagaccaacaagctaataaataaaaagttgaggccgggcacggtggctcacgcctgtaatcccagcactttggaaggccgaggcaggcggatcacgaggtcaggagatcgagaccatcctggctaacacggtgaaaccccgtctctacataaaaaattagctgggtgtggtagcacgcacccgtagttccagctacttgggaggctgaagcaggagaatcgcttgaacctgggaggtggaggttgcagtgagccgagatcatgccactgcactgggcaacagagcaaaactcgatctcaaaaaaaaaaaaaaaaaaaa

SEQ ID NO: 4983 - protein, 342 aa, Homo sapien
MASVTRAVFGELPSGGGTVEKFQLQSDLLRVDIISWGCTITALEVKDRQGRASDVVLGFAELEGYLQKQPYFGAVIGRVANRIAKGTFKVDGKEYHLAINKEPNSLHGGVRGFDKVLWTPRVLSNGVQFSRISPDGEEGYPGELKVWVTYTLDGGELIVNYRAQASQATPVNLTNHSYFNLAGQASPNINDHEVTIEADTYLPVDETLIPTGEVAPVQGTAFDLRKPVELGKHLQDFHLNGFDHNFCLKGSKEKHFCARVHHAASGRVLEVYTTQPGVQFYTGNFLDGTLKGKNGAVYPKHSGFCLETQNWPDAVNQPRFPPVLLRPGEEYDHTTWFKFSVA

SEQ ID NO: 4984 - DNA, 2757 bp, Homo sapien
agaaatcgccgccagggctaggctggtgtttgtcctaagtgggtacttgcttgggttgagaaatcacattttggctattccccgacttgaaccaggggatagaaatcgtagtcaccggctgggcgcagcggctcatgctgtaatcctggcagtttgggaggccgaggcgggcagattattgaggttaggagttcgagaccagcctggtcaatatgatgaaacaccgcctctagtaaaaatacaaaaattatccgggcgtggtggcgagcgcctgtaatcccagctactcaggaggctgaggcagtagaatcccttgaacctggggtgcggaggttgcagtgagccaagatcgcgccactgcactccaggctgggcgacacggcgagactctgtctcaaaacaaaacaaaaggaaaagaagagaaaagaaaaagaaacgcaggcaccctgaaatcgaaacttgttaggaccaacaagccaacgacagacgaatctgcggggtcctgcgacagacacgccagccccgccgccacagcacagggttctggaggtcgagctgttctgcgggttctgcggcggcgctgggaagagacggcgcccgggcagctcccctgtcaccggcttggaggagcggcgggctcccctagcccagcgccgccgccgccgcccgggaacgccaggctcaccccagctggggaagctccgaatccctcagatcggcgacctgagtgctgtcgccccgagaaaatggaggcatcgagcaacgagctgtgctgagaccgagagacctcagttctgcgaaatgtcggtgcctggagcttgcgaatgactgcggccggcgggttgtcaaggacaacattccttatggcgcaaccaacagcgctgtcaccaagaaactggactctgagaaaaaagagggtttcggccaccgagaaactccgtgccacatgtgccgtgacagcaaaaccgcccgctccgcgccgctggtgaaagagctaacgaacgccaggtgctgcgacagtgacaccgggactagaaggcctcggatggagaatgggacgcccagagcaagcaggaaaacgttttgtttggctcaactagcgctgtcgcaaccggaaaactgtcaggccagtgctgctgcggatgtgagaaaccggtgatccgaaggaggagtggcgctgggcgctggactcgctggtgtgaaaatctggctgctctaggacccggcaagcgcgggcaccaggcgaacgccagcgactttgccagacaaatgcatgtcttttttggtcgccattcaaagatgcagccggcagtcagccccggctctgagaaacaagtggaggtgtcagccataaaccctccgttcagggaaaagagagtcgctgcgacggatcgattggccgttgggtggaactttctttggtggcctagtgactagaaaataaaaacgaaaacgaaataaaaaactgctactgacattactcccacgctccctcctcaagtcagtggcttcaggcttaagaaaacctgtatttttcttggctgatccgtgatccctaattactgagggccccgcgacccaccaagtgcgattcgcagagggaaaggagctggaataaggatccagaatgggacggatttggctcctccaggaagaaagcaaaacaaatgcaggtcgcgaacactttacattgcaggaagctgctcttccagtggccgcggctgggtccttccacaccacctctctgtcctaggccttcgtcccggttcagccctcacggattctaggctagcggtcaacaaccgcatccctccggaatctggaaactctaggtccgagatctcggtgaagaatgaaaggcacagcgccgctcaacccaggcttcaggcctgccccgctggtcccgtcccttccctgtgggatggaactctgtgggaatcgctccttattctgatggttcactcattcagatgtccttgatatttggggatatttctaaaacagctggggagaaaaatggactgcgaggctccggtgttggacgtgaaattggcagtgagacatccgcctctaagcccagggaaaagcttaaattgtggttctctgtctctagcaccgtgatctttgaaatgcgttattgattttcttctttcttctgggaaatgcaatgcaggtgaacttgtaagtgttgaatcctccctctcctcactgttcaatcagactgaggcctacttcctttctgataagaaatatggaactgccattgctcagtaggaaaatgtcctttctacaagcattcatatttcaataaaaatctgcactttgtgagttgagccccctcaaagagacctacagaccctgccatgagcatctccatccacactcatcatttcccattttcaccacttctgctcctgtgcaaaccagtactatccttttctgggggatcctaggcagaagcgatggcaggacaaaggcagagaaggcactgccaggtcctgcatgccagtaaaactactcatgtcagctgttctgcaggatcccatgagaaggtgagtcaccagaaaatgcagtttccacatcctgatgatttcatctccctaccccaactgatcaatttctccaattttccagcctctcaccctccacaatccccttaaaaactgtagcccagaactctctggaatgatgaatttgaaggtttgctcctgtctcctcactcagaagcctgtaatcattaaactctttctctgatgc

SEQ ID NO: 4985 - DNA, 2332 bp, Homo sapien
gaaaaagaaacgcaggcaccctgaaatcgaaacttgttaggaccaacaagccaacgacagacgaatctgcggggtcctgcgacagacacaccagccccgccgccacagcacagggttctggaggtcgagctgttctgcgggttctgcggcggcgctgggaagagacggcgcccgggcagctcccctgtcaccggcttggaggagcggcgggctcccctagcccagcgcgcgccgcgccgggaacgccaggctcaccccagctggggaagctccgaatccctcagatcggcgacctgattgctgtcgccccgagaaaatggaggcatcgagcaacgagctgtgctgagaccgagagacctcagttctgcgaaatgtcggtgcctggagcttgcgaatgactgcggccggcgggttgtcaaggacaacattccttatggcgcaaccaacagcgctgtcaccaagaaactggactctgagaaaaaagagggtttcggccaccgagaaactccgtgccacatgtgccgtgacagcaaaaccgcccgctccgcgccgctggtgaaagagctaaagaacgccaggtgctgcgacagtgacaccgggactagaaggcctcggatggagaatgggacgcccagagcaagcaggaaaacgttttgtttggctcaactagcgctgtcgcaaccggaaaactgtcaggccagtgctgctgcggatgtgagaaaccggtgatccgaaggaggagtggcgctgggcgctggactcgctggtgtgaaaatctggctgctctaggacccggcaagcgcgggcaccaggcgaacgccagcgactttgccagacaaatgcatgtcttttttggtcgccattcaaagatgcagccggcagtcagccccggctctgagaaacaagtggaggtgtcagccataaaccctccgttcagggaaaagagagtcgctgcgacggatcgattggccgttgggtggaactttctttggtggcctagtgactagaaaataaaaacgaaaacgaaataaaaaactgctactgacattactcccacgctccctcctcaagtcagtggcttcaggcttaagaaaacctgtatttttcttggctgatccgtgatccctaattactgagggccccgcgacccaccaagtgcgattcgcagagggaaaggagctggaataaggatccagaatgggacggatttggctcctccaggaagaaagcaaaacaaatgcaggtcgcgaacactttacattgcaggaagctgctcttccagtggccgcggctgggtccttccacaccacctctctgtcctaggccttcgtcccggttcagccctcacggattctaggctagcggtcaacaaccgcatccctccggaacctggaaactctaggtccgagatctcggtgaagaatgaaaggcacagcgccgctcaacccaggcttcaggcctgccccgctggtcccgtcccttccctgtgggatggaactctgtgggaatcgctccttattctgatggttcactcattcagatgtccttgatatttggggatatttctaaaacagctggggagaaaaatggactgcgaggctccggtgttggacgtgaaattggcagtgagacatccgcctctaagcccagggaaaagcttaaattgtggttctctgtctctagcaccgtgatctttgaaatgcgttattgattttcttctttcttctgggaaatgcaatgcaggtgaacttgtaagtgttgaatcctccctctcctcactgttcaatcagactgaggcctacttcctttctgataagaaatatggaactgccattgctcagtaggaaaatgtcctttctacaagcattcatatttcaataaaaatctgcactttgtgagttgagccccctcaaagagacctacagaccctgccatgagcatctccatccacactcatcatttcccattttcaccacttctgctcctgtgcaaaccagtactatccttttctgggggatcctaggcagaagcgatggcaggacaaaggcagagaaggcactgccaggtcctgcatgccagtaaaactactcatgtcagctgttctgcaggatcccatgagaaggtgagtcaccagaaaatgcagtttccacatcctgatgatttcatctccctaccccaactgatcaatttctccaattttccagcctctcaccctccacaatccccttaaaaactgtagcccagaactctctggaatgatgaatttgaaggtttgctcctgtctcctcactcagaagcctgtaatcattaaactctttctctgatgcaaaaa

SEQ ID NO: 4986 - protein, 131 aa, Homo sapien [sequence omitted]

SEQ ID NO: 4987 - DNA, 2027 bp, Homo sapien
  Unsure 985: Unknown base
cccagctaatttgttacctacactctaattaataatcaataatttcttattttaaaaagtagtactatttaatataatcaagataggagatttaaaatgagcaagtgattcatttgctcttttaaagaagcccgttgacttacgcttttaaaaaagaagttggtgggttacctcaattattgttcatgcttaaacatatccatttgtacaggcttatttctacgtgggacccaatcatatatactatatttctcaaataatttttctaaaactctggcctatattctaaacacttgaccaacaccttagttattgaataggtaaccatttttaaagtacatgtggttcattttttaaaattcaatctctcaagaccgttagatatttaataatttaagctgataagggtatcaaaatgcacattaactttgatcatcatgatttaagttgtaactttgtgttattatataaatattaggttgtttataaatatattgcagaaagtattcttgttaagctcttttaaatgaggggactgtggtttagagttatatatttttgcttatttttaaacttcaattattccattcttctgccttataataaaacttttaaggcagagaactgaactaattatagaatttctcctttggagagttataatgttacatagtgaacattcttataaaagaaagaataagtttaagttgatgaatatttagctgcaaagattttttacttaaaaaaatccatgaatatctttgattttattataaagcatttgtaaattatttgcatttgagctgtaagattcataaacatttacatttcccaatgatttctattttgatttttaaaaaatatacagggcaagctacatttttaaagcattaatcaacaactttattatattacacattccagtgcacaaacacacaatatcatttaatactcacagtagtacctgtgaaatatatcagatggntattcctatctctattttacagcagaggaaaccgaaattcagagaacttacatttctaaggttgtacagctgcaaaatgaccaaattgtgaagtccctaacatccaggttttcataatgccagtactctttctatgacatgtttatgaccctccaaatgtaccaaaactacctaactaattcactgagaggaagccaactgcaaaaataggatttttaaaagtacaatagagtattactacattttatggatttcagacaaagaaacctccgtttattatatcctgatggtgagtattgccagctctaaattattcatatttctaagaccaaggaaaatataggtaaatgaaaattttgaaataaagaacaatgccttaatttgtaaaatctatcattgctaccaccctgcccaggtctggccatttgccataaatgctggtaaataaatacaatgactgatagagttctgtctcctttctcttttgctacccaaccttggttagagcaaccaaatgtctaaaaggcatgtaacaggagaaaaaaataaaaacattagtcaccaattcgccgattataaaagggatgtagattcctttaaattattactgaccttttgaaagccttcacgtaagtatgcaacagataaaatgactcatttacccacaacaataatctattatcagtcttaagtaatgtgaattcactgtatttctttttatacaacataaaaacttctgctttccaaacttcttccttttcactaatttatcagccactttatttatacacagataacacttttagaaacatttttctttcttgtccatttttttctttcaaaaataaagtttcttagaacctgataaaatggaaacttatggtaatatgtgttctggtaggtgtccaaaaattccacaccatagactatcaatgatatagccaaataaaggccattcaaaaaaatcagtaattgggattccttgccttatatctatggtatagtgtacccatttataacggggttctgccatcttcgaatt

SEQ ID NO: 4988 - protein, 8 aa, Homo sapien
  Unsure 985: Unknown amino acid
PANLLPTL

SEQ ID NO: 4989 - DNA, 3797 bp, Homo sapien
cctttgcagaaacacccgaaaccctcctgccaggaagaccagggcctgggaagagggtcgctctccggccattctcccctcaccctcctcaccttcctcacatcctgtgccctgggggaccagcagctgcttccacccagaacaagcgggagcctgtgtcaggaaagcatgtcagagcagagctgccagatgtccgaactgcggctcctcctcctggggaaatgccgctcgggaaaaagtgccacaggaaatgccattctgggcaaacatgtgttcaagtccaagttcagtgatcagacagtgatcaaaatgtgccagagagagagttgggtcctgagagaaaggaaggttgtggtaattgacacccctgaccttttctcctcaatagcttgtgctgaagacaagcaacgcaacatccaacactgcttggagctctctgctcccagcctccatgctctgctcttggtaattgccatcggccatttcacaagggaggatgaggaaacagccaagggcatccaacaagtgtttggagctgaagccaggaggcacatcattattgtcttcactcggaaggatgatttgggggatgacttgctgcaagatttcattgaaaaaaacaaacctctcaagcagttggttcaagactatgagggccgatactgcattttcaacaacaagaccaatagtaaggatgagcagatcacccaggtgttggagctccttcgcaaggttgagtctttggtgaatacgaacggaggaccctatcatgtgaacttcaaaactgaaggcagcaggtttcaagattgtgtgaatgaagctgcatctcaagagggagacaagccacagggcccaagggaaaggcagctgcagtccacaggacccgagcagaatccggggacatcagaactgacagtcctccttgtggggaaacgcggtgctggaaaaagtgcagcaggaaacagcattctggggaggcaggcctttcagaccggatttagtgagcagtcagtaacccagagcttcttgtctgagagcagaagctggagaaaaaagaaagtttcgatcattgatgctccggacatctcatctttaaagaacattgactcagaagttagaaaacacatctgtacaggcccccatgccttcctgctggtgacaccactgggcttttacactaagaatgatgaggcagtgctgagcaccatccaaaacaattttggagaaaaattctttgagtacatgatcatacttcttaccaggaaagaagatttaggggatcaggatctagatacgttcttaagaaacagcaataaagctctctatggtctcatccagaagtgtaaaaacagatatagtgccttcaactaccgggcaacaggagaagaagagcaaaggcaggcggacgagctcctggaaaaaattgagagcatggtgcatcagaatgggaacaagcattgcgttttcagagaaaaagaaaccctgaacattgtccttgtggggagaagcgggactgggaagagtgcgaccgggaactctatcctggggagcctcgtcttcacctctcggctccgggcccagccagtcaccaagaccagccagagtggcaggaggacatgggacggacaggaggtggtggttgtggacactccttccttcaaccagatgctggatgtcgaaaaggacccatcccggttagaagaggaggtcaagcgctgtttgtcctgctgtgaaaaaggggacacattttttgtcctggtgttccagctgggacgattcactgaagaggacaaaacagctgtggcgaaactggaggccatctttggagcagactttacgaaatacgcgattatgctgttcacccggaaggaagacctaggggcggggaatttggaagacttcatgaagaactcagataacaaagcccttcggcgcatttttaaaaagtgtgggcggcgagtttgtgcttttaacaacaaagaaacaggccaggcccaggaaacccaggtgaaagctcttttaacaaaggtcaatgatctgagaaaagaaagtgggtggtccgggtatccccatacacaggagaacgtcagcaaactaattaaaaatgtccaggaaatgtcccaagccgaaaaactccttaaaaatttaataggtattttacaataggtagccgaagtgcctggggtctcttcaattagagacaccctcaggttggggggaggggcggggcatggtacaacctgtgggaagggaagcgggttcatggctttgagggcctgagaggcaaatgcatcccgccttgtgatgtatcagctatttgtagataaataaattgcaggtgggggcgaatagtagggtattataaaggagaaagaagatacaaggtggggaaatctggaaaaagatttcagacattaggctgataataagtggtagaatcaagtcacaagaatcacctcacttgtgtaggtaggttggaatcaggatagacactgtgatcaaggctgaggccacctgggatgagaatatagatagtcgtacaacaacccaggggatccagatacatgagaccagggcagcgttcagcacactcctgggcatggcggaagcaggaagcagactccagagggcctccctgttgtccagggccgttggctccctgagctctcctgtctcctttgggatgcgacttagggctagagtgttcttttcttcacacgttagccattccttacggctcttcacgttccacgcctagatgtgaagtgggacatagtcttccattgctggctgtccctgaggaaacagacatgagtcttggaggttctgaatgattttattgctaattatcacagtgacatagactagaacagaaattagaagcatagtaagattgccaaaatcagagaatcttgcaaagttctgtaattctaagtgttgttctagatttcctctagagaaggttattagaatctccattgcgtttctctttctccttctctttcccttgaggttaggaaacaggttaaaactcagagaactccaataataatggtttaaaaacatcaggggcttcctgtatctcctgtcaggaagccgaggaataagcaggctggggctggtgggcgtcaacatcccagttttgttctatctttctgtcccacctgcactgggatgtggcttctacactcgaatttgcttcttggtttcaagacagtggtgttctttccatagctgagcagattattttgagaggtgggtgatatgtgagagagaaatctggaaccttcttctgggtagatacaggataagatagatacagggtaaaatgttgagcactttgtacatgctttgagagcataatctttgtcatctgtttttttcccctagacaatatcaggttaccgtcaacattaatccatttaaaaggacatggactgttgccattaatacttttggattccatataacccttaacacaataacttctagaaaatgtgtgtgccgtagacacaaagaagggaacaatagacaccagggtatacttgagggtggagggtggcaggagggtgaagattgaaaagctgcctattgcgtgttatgctggtttcctgggtgacaaaattacctgtacaccacacccctgtgacacacaacttactcatgtaacaaacctgtgcatgtaccccttgaacctgaaataaaaattggaaagtaaaaaaaagtgtgtaaatatatttagttgaatcaaataataaagatgaatcattatgaattcaaaaaaaaaaaaaaaaaaa

SEQ ID NO: 4990 - protein, 665 aa, Homo sapien
MSEQSCQMSELRLLLLGKCRSGKSATGNAILGKHVFKSKFSDQTVIKMCQRESWVLRERKVVVIDTPDLFSSIACAEDKQRNIQHCLELSAPSLHALLLVIAIGHFTREDEETAKGIQQVFGAEARRHIIIVFTRKDDLGDDLLQDFIEKNKPLKQLVQDYEGRYCIFNNKTNSKDEQITQVLELLRKVESLVNTNGGPYHVNFKTEGSRFQDCVNEAASQEGDKPQGPRERQLQSTGPEQNPGTSELTVLLVGKRGAGKSAAGNSILGRQAFQTGFSEQSVTQSFLSESRSWRKKKVSIIDAPDISSLKNIDSEVRKHICTGPHAFLLVTPLGFYTKNDEAVLSTIQNNFGEKFFEYMIILLTRKEDLGDQDLDTFLRNSNKALYGLIQKCKNRYSAFNYRATGEEEQRQADELLEKIESMVHQNGNKHCVFREKETLNIVLVGRSGTGKSATGNSILGSLVFTSRLRAQPVTKTSQSGRRTWDGQEVVVVDTPSFNQMLDVEKDPSRLEEEVKRCLSCCEKGDTFFVLVFQLGRFTEEDKTAVAKLEAIFGADFTKYAIMLFTRKEDLGAGNLEDFMKNSDNKALRRIFKKCGRRVCAFNNKETGQAQETQVKALLTKVNDLRKESGWSGYPHTQENVSKLIKNVQEMSQAEKLLKNLIGILQ

SEQ ID NO: 4991 - DNA, 2263 bp, Homo sapien
  Unsure 535-730: Unknown base
gcttccctcagagtgagtatcccaagagatcacagtcaaagtgcatagcatttatataatctaatcttggaagtcacaaaatgtcattcttgtgatactctcattggtgaagaagtcataaaatcctgctcaggttcaaaaagagggtgtatagaacccaacactcaataggaagattgtcagagttacattgtaagaagagcatgtagttgggagatatcattgtggccattttgggaaagatgtaacatgtcacaatgtcatgttctccatcgtctccccgttccaccttgtactggtttccaagggtagtcgtttaaaagtaccacaaaaactgggtggcttggaacaacagaaatttattgtttcacagttctggaggccagaagttcaaaatgaagtgttggcagaaacatgctgcctctaaagggactgggaaaggatctgttccaggcttccctatcttctggttgttccttgccttctggctgcgtaactctagtcttcatttggtgttctccctgcatgcatggcnnnnnnnnnnnnnnnnnnnnnnnnnnnnnnnnnnnnnnnnnnnnnnnnnnnnnnnnnnnnnnnnnnnnnnnnnnnnnnnnnnnnnnnnnnnnnnnnnnnnnnnnnnnnnnnnnnnnnnnnnnnnnnnnnnnnnnnnnnnnnnnnnnnnnnnnnnnnnnnnnnnnnnnnnnnnnnnnnnnnnnnnnnnnnnnnnnnncatctctacccaacctctgtaggttccctcaatccaccaaaattttttggctccactggattatctagcagttaggaaaccaagatcattaaatgaattcaccgcaactacagtgagactgactaccttagcttacctctgtgaaaggagttaagccaaaggaatctgtggaattttggagagtttgggagcatttgggggcaggaggcaaatgttcttcctttaaatcacaacacttagttctcttccatttataagactcacccctccatcccaacccctgcaccacaggacaaggaagtgttcttggtcttcaactttcatccctgatggtgaaagcagttgctcctgacctatttgcccaccagcttctcctctggagcctgaggcttctgatgcctgcctggctggttctcagtaagaaggtcaagttcaaccagaggggagatgctgatgcctttcagtacttaaatatgagttcagaccctggggcctggacataagatttggggtcccctggatataagatttctgaaaacactcagactgtggagacccctgctgagggagaagctccaaactgtggcttcaggggaatgcaccaaggctctcattgaggccaccttttccaacaagctcccctcctgcttccccatggctggcatggctgaggaaaaaggacactgagcacagcccgtgcatgagcggcttgccatgcaacaggataaaacccataatgccactcagcaagccttggttgtaaatctagtttgattacatttgtaatcaaatgatggccatttgttctgtttctggtttgtgaaccaactgaagacataagcagggcctcagctaacccacaaatagcacatgtgtgcaaactggaaaaatgaacccttcttctgggaggacgccagcccaggccaggtcacccggcttggccagcagaacacagagtggattttggtcccgtttgttccccagtggggtatctatccttgtgcagggcacaagcctacatggtggctctggtcatatcattagaaaatagacagaaatgggctgcacaccagaatgaatgaattgaattgaaagggaggagtgatggtggaaaaaaaaacaagtcaattcatttagactggtagaaccagaaccactgtgtagtacatccaaacggttaaaattccctggaagatgttacataatcctatcatggtgtttatttatggaaatctattttaaaaattttatgtaatactgcacagtctgtttgcatgatgccttgtacgtagtagcaactcagtaaatactttttgaatgaactagtatagtattttaattagctagtcttcatgtactggtacaaaagaacagtgtcatcttacagctgaagtcatagaggggaaatatcccactcaagatcatataacattccaggtactcaggatgaatggtttgaggactggtctgaattcttcaaaggtttcagctgtattaacattctccatctaataaactttatcttgtcattgc

SEQ ID NO: 4992 - protein, 127 aa, Homo sapien
  unsure 41-106: unknown amino acid
  Unsure 535-730: Unknown amino acid
MLPLKGLGKDLFQASLSSGCSLPSGCVTLVFIWCSPCMHGXXXXXXXXXXXXXXXXXXXXXXXXXXXXXXXXXXXXXXXXXXXXXXXXXXXXXXXXXXXXXXXXXXSLPNLCRFPQSTKIFWLHWII

SEQ ID NO: 4993 - DNA, 7260 bp, Homo sapien
gttccgctgcccagtcctgctggtactcactaggtagtagcggcaacggacgccatggggaccgcctcgtcgctcgtgagccccgcgggcggggaagtgatcgaggacacgtacggggcgggcggcggcgaggcctgcgagatcccggtggaggtgaagcccaaggcccgcctgctgcgcaactcgttccgccgaggcgcgggggcggcagcaggggccgggcccgggtcgctgccccgcggggtgggcgcgggcgggctgctgggggccagcttcaagtccactggctcgtcggtgccagagctggagtacgcggcggccgagtacgagcggctcaggaaggagtacgagatctttcgcgtcagcaagaaccaggagttgttgtccatgggccgccgcgaggccaagctggacacggagaacaagcggctgcgggccgaactgcaggcacttcaaaaaacgtatcagaagatacttcgagaaaaagaaagtgctttagaagcgaaataccaagcaatggagagagcagcaacatttgaacatgacagagataaagttaaaaggcaattcaagatttttagggagaccaaagaaaatgaaattcaggacttactgagggccaagagggagttggagagcaaacttcagaggctacaggctcagggtatccaagtatttgatcctggggagtctgattcagatgacaactgtacagatgtcactggtaagtgtatatcctatttatattttgagctttcaacatggctgtaatgacatgtagagccaactttgaattctgctagatttcttttacttatctatattaggttattgctttaactactgttgcaaatagtgtcgtgtgttctctctgtcagctgctaagacacctcttctccacgaagtgtatgaatttggggactgaagttccttctaccttgtcactctgccaaccctaacccataacttttactctctagtctaagatatctaccccagctcccaccagcacatctgcattttagccaagggaaagaaggaaggggagaacacgttcctttcccagaaggtacaacctaagatcacttctcaaatcccattagtcagaactataactgggaagactggatagtgtaatcagcagccaggcagacatgtgtccaactaaaatgtagtgttctgttactgaagaaagaagaggagaatggatattggagttactagtctctgcaatgttatttctttacataatgatgtattctttgcaactatcatttagaatacttgccttatagttcactgagtggtttccagtatagccttgtgaactattcaaaaagtatttgttttataattaaacaaatgaaacatgttttctggaaataaaagcttgaaatcacagagtgaaagggtttacatattctaagaaaatgttaaagtgtgattgatactgaaaaaagaaaaatattctattttaaaatgcagtggaaaaatgtagtcactctcccatttgtaatgaactgtaagcatattctcacaaatggatgcattttggagtaaaatatggtaactgacagttccttcttaattttcattgtagtatcattggaatctgaccaacatcctggaatttttattgctaacttttaaggaaaaaatgaaggccgggcacggtggcttatgcctgtaataccagcactttgggaggccaaggcgggcggatcacgaggtcaaaagatcaagaccatcctggccaacatggtgaaaccccgtctctactaaatacaaaaattagctgggcatggtggtgcgtgcctgtagtcccagctactcgggaggctgaggcaggaaaatcacttgaacccaggaggtggaggttgcagtgagccaagatcgcgccaccgcactccagtgtggcaacagagccagactcatctcaaaaaaaaaaaaaaaaaaaaaaaagattcttaatggccaagagtagctgagaaaatgctcttttataccccaacacaagtcttagtgattatttcagtattgacatattcaaatgtacagtgtttcaaaactattgtaattgtcttggcaagttagaaacaaattcctttctaggtcttttttcatttttgttttaaacatgaagaaggaacacttgagggggaatgtcacccatgtgagattcaaagagctacaaatagtaagctcagttttgccagagatttagctcaaataacaatttacttaaggttatcaaggatgtagatattctgacaaatataattgattagaaaatcatcatgttcataagtagctattgattcagacattaattttgttgctctaggaggttgagaaggaggtacttcctgctgcaaagagtttatgtcctaataaattatgaatatttttatatttatgtgtgttagtaacagtctgcctttgaggttttttccttcagattttaactggtgtctaagctgtacagttggaaatgttttttagaatttttttttgtaaaatgtttttaacttccttcttattatgatttcttttttattgtattcttgtttattttcatctttctctttttaatcctctctttgaatttgagatgataaccagaattatgttaatcagtatctttgaactttgccaaaagtcgatggcaaagtattttcaaaatcatttgaatatttgtaatattttcatattttttaaaatcagcaatcctgttcagtatatgtgatgagtttttgaacattcaataagttggctttcacaagataaaaatctcttgctgaacagctgctggaacccaatgtgaatattggactggcggagccttgggaagtgaaccttccataggaagcatgatccagcttcagcagtccttcagaggccctgagtttgcccatagttctatagatgtggaaggaccctttgcaaatgttaatagagatgactgggatattgctgtagctagtttattacaagttactcctctgttttcacattctctgtggagtaacactgtcagatgttacctcatttatacagatgaaacccagcctgagatggatcttttccttaaggactattcacctaaacttaagagaatgtgcgagacaatgggatattttttccatgctgtttattttccaatagatgttgaaaatcaatacctcactgtaagaaaatgggaaattgagaaaagttctttagttattttatttattcacttaacattaccaagccttttattggaagactgtgaagaagcttttctgaaaaaccctgaaggaaaacctcgattaatctttcatcgtttggaagatggaaaagtcagttctgactctgtccagcaattgattgatcaagtttctaatctaaacaagaccagcaaagccaagatcattgatcactcaggagatcctgcagaaggagtatataaaacttatatttgtgtagaaaagattattaaacaggacatactgggttttgagaacacagacttggagactaaggatttgggcagtgaggattccattccagaagaagatgattttggtgatgttctgtgggacatacatgatgaacaagagcaaatggaaacttttcagcaggcttctaattcagcccatgagttgggatttgagaaatattaccaacgccttaatgatctagtggcagcaccagccccgattccacctcttctcgtgtctggaggaccaggttctgggaagtctcttcttttatcaaagtggattcaattacaacagaagaattcccccaacacactgattctttcccattttgtgggaaggcccatgtcaaccagctcagagtcctccttgattattaaacgactaactctaaagttgatgcagcactcttggtcagtctctgctctgacactggatcctgctaagcttctggaagaatttccacgttggctggaaaaactctctgctcgtcatcaaggcagcatcatcatcgttattgattctatagatcaagttcaggttgtggcctacacttcatcttgatcccttaagtccaaaagatgcaaaatctattataattgcagaatgccactctgtagacattaaattgagtaaagagcagtgctgggagagcaggcaatttagataaaatccttcatcagtgtttccagtgtcaagatactctttcattatatagacttgttctgcactctatccgggagtccatggcaaatgatgtggataaagagctaatgaagcagatcctctgccttgtcaatgttagtcacaatggtgtgagtgaatcagaactgatggaactctatcctgagatgtcctggactttcttgacctcccttattcacagtttatacaaaatgtgtttgttgacttatggatgtggcttgcttaggtttcaacatctgcaggcttgggaaacagtgagattggagtacctggaaggccccactgttacttcttcatacaggcaaaagctaatcaactatttcaccttgcagctaagtcaggacagagtgacttggagaagtgcagatgaactcccgtggctttttcagcagcagggaagtaaacagaagctgcatgattgccttcttaatctctttgtgtctcaaaacctttataaaaggggacactttgctgagttgctgagttattggcagtttgttggcaaagacaaaagtgcaatggcaacagaatacttcgattcattgaagcagtatgagaaaaactgcgaaggcgaggacaacatgagttgcttagctgatctttatgaaaccttggggcgatttctcaaggatctaggccttctcagtcaggccatagtacctttgcagaggtctttagagattcgagaaacagctttagatcccgatcacccaagagtagcccagtccctccaccaactagcaagtgtatacgtgcagtggaagaagtttggcaatgcagaacaactgtataaacaggcgttggaaatctcagaaaatgcttatggtgcggaccatccatatactgctcgtgaacttgaagcacttgcaactttgtaccagaaacaaaataaatatgaacaagctgaacattttaggaaaaaatcctttaaaattcatcagaaagctataaagaaaaaaggcaacttgtacggatttgcccttttacgtagacgggctttacagttagaagagcttacattaggtaaggacacacctgataatgctcggaccctcaatgaactgggtgttctctactatcttcaaaataacctggaaacagctgaccagtttctgaagcgttccttagaaatgagggagcgagttctaggaccagatcaccctgactgtgctcagtctttgaataatctggcagctctatgcaatgaaaagaaacagtatgataaagcagaagaactttatgaaagagctttagatattcggagacgtgcattagctcctgatcacccttctttggcatatacggtgaagcatcttgccatcttgtataagaaaatggggaaacttgacaaagctgtacctttgtatgaattggctgttgaaattcgacagaaatcttttggcccaaagcaccctagtgtagctactgccttggtgaacttagctgttctttatagccaaatgaaaaaacacgttgaagctttgccattatatgaaagagcattaaagatttatgaagatagcctgggtcggatgcatcctcgagttggagaaacactgaaaaatttagctgtgcttagctatgaaggaggagattttgaaaaagctgctgaattatacaaaagggcaatggaaataaaagaagcagaaacatcactcttgggtggaaaagctccttcacgccattcatcaagtggagacacgtttagcttaaaaacagctcattctcctaatgttttccttcagcaaggacaaaggtaatagcagcagttagaattctttgcaaatgtaccttaagacaaaataattaaacatttggaacatttgaatttgaaactttaaaaaaatgttgtacgaaattttactacgtgtgatttaactgctatttgtatgaagttgtattggattacattaagttggaattgtgattatgtctgttttagttgtttaaaagaattttcctattatatggtatccaaggatgtagacacattagaattataagaagacatgaggagcaaatcatgaagagcggattggtctttgttcaacaagagctggcagagtagttaagacaaggagttcaaaaattccatgaatcttggccaggcatggtggctcatgcctgtaatcccaccactttgggagggtgatgcaggaggatcacttgaggccaggagttggagaccagcctggccaacatggtgaaaccctgtctctactaaaaatacaaaaaaaaattagctggacctggtggcgcatgcctgtaatcctagctactcaggaggctgaggcatgagaatcgcttgaactcagcaagtggaggttgctatgagctgagattgtgccagttcattccaccctgggcaacagggtgagactctgtctcaaaaaaaaaaaaaaaaaaaaaagaattccatgattcttttgagctctcaagagctactttagccttgccattcctcttgcttttcagcagtagtctggcccaattctctacctcaaaggaaagtttcaaggattaaagggttaatgtttatgaacgattcaaattgtcttcagtgaaacacattagtcacaagaatccctgattgctgcactttaaaaaattctttaccttttccttgagcagattggtccagtccctctgctttctgttctgtctacattgtgtattatttattactatatagtatatgtatctgcataatgtctgaagtcattaatgcagtaacaggtcaagctctttagcattctttgacttttcccaaaatatagatatgacattctcctttatcttccttcttagatggcctaaatctgtctcttcatttacctcaaactcaaattagtatgccattttcatactgaaaattaaatatttttatggattttataaatattgcaacattttagatattgttttggaccatttgtgtatttatatataataaaatcatcaatttaatacttgtaagatcctaacatgtattgattgtaaaagtgaaatatgtaatagccacacttcactgttttaaaataaaagtgcaatttcaaaaaaaaaaaaaaaaaaa

SEQ ID NO: 4994 - protein, 1025 aa, Homo sapien
MIQLQQSFRGPEFAHSSIDVEGPFANVNRDDWDIAVASLLQVTPLFSHSLWSNTVRCYLIYTDETQPEMDLFLKDYSPKLKRMCETMGYFFHAVYFPIDVENQYLTVRKWEIEKSSLVILFIHLTLPSLLLEDCEEAFLKNPEGKPRLIFHRLEDGKVSSDSVQQLIDQVSNLNKTSKAKIIDHSGDPAEGVYKTYICVEKIIKQDILGFENTDLETKDLGSEDSIPEEDDFGDVLWDIHDEQEQMETFQQASNSAHELGFEKYYQRLNDLVAAPAPIPPLLVSGGPGSGKSLLLSKWIQLQQKNSPNTLILSHFVGRPMSTSSESSLIIKRLTLKLMQHSWSVSALTLDPAKLLEEFPRWLEKLSARHQGSIIIVIDSIDIKFRLWPTLHLDPLSPKDAKSIIIAECHSVDIKLSKEQCWESRQFRKILHQCFQCQDTLSLYRLVLHSIRESMANDVDKELMKQILCLVNVSHNGVSESELMELYPEMSWTFLTSLIHSLYKMCLLTYGCGLLRFQHLQAWETVRLEYLEGPTVTSSYRQKLINYFTLQLSQDRVTWRSADELPWLFQQQGSKQKLHDCLLNLFVSQNLYKRGHFAELLSYWQFVGKDKSAMATEYFDSLKQYEKNCEGEDNMSCLADLYETLGRFLKDLGLLSQAIVPLQRSLEIRETALDPDHPRVAQSLHQLASVYVQWKKFGNAEQLYKQALEISENAYGADHPYTARELEALATLYQKQNKYEQAEHFRKKSFKIHQKAIKKKGNLYGFALLRRRALQLEELTLGKDTPDNARTLNELGVLYYLQNNLETADQFLKRSLEMRERVLGPDHPDCAQSLNNLAALCNEKKQYDKAEELYERALDIRRRALAPDHPSLAYTVKHLAILYKKMGKLDKAVPLYELAVEIRQKSFGPKHPSVATALVNLAVLYSQMKKHVEALPLYERALKIYEDSLGRMHPRVGETLKNLAVLSYEGGDFEKAAELYKRAMEIKEAETSLLGGKAPSRHSSSGDTFSLKTAHSPNVFLQQGQR

SEQ ID NO: 4995 - DNA, 6166 bp, Homo sapien
ctgcaaaaataagtgaaagtgacagtagccaatactatacaaagctgaaccatgtaatttacatcttagtgaaattaaacatactataacagcttggcttccaggcaacaatactattaaatttgcagtagtagattatgacatcatctgaaaccccaggatacacatttagagctggctattatggtttgtaatctgtattgctgttctggttagtttttcatttaattcattgcacgcttctattaaataaaaaaaaaatacaacagccttggaggatgcgagttttttgaaaaatctgttaagcttcaggttgactgatgtcacattttagaatcaataatgataacttatgtctgagaaggattcagaggtcagaattacattgaacggtataatcattcaaatatttttatggtcattaagtataatttggggagtttttctaactcacctttcttttccaaaatgtttcttagctaactaagactatacaatggtggaataacaacaaaacctactgcttttagtagagggtttacattatacagcagcattctcaagcaaatacactgtactgagatcattacaagttcaaacttttgcaggggactgggggatggagaggtaagcatatttgaacttcaaaaaactacttccagaattttgcgtgtaagtcaatttctttggaaaagggatttaaacggatatctaatttttttaaaggcctatttttccaaaaattgtgcagacattgattcattttaacagtgttctcgggttggggagctttattacaatttcttgtggtgggtaggaaaaaggatcatatagtttgaatactcccctctctctccaccatatgattctaatgttcttgtctaaggaatctgtgctcctcttacccattcccaagactgaactaatcaaaattccccatttattgcaagaggacacttgaacatcagggacatgaaaatagcttggcaaaacttcttcaaccagtgactgccagacatgggactagaacctaggcttcttgtcacatagcccagggttctttataaaaagctatgtgagaaagagaaagacccacagaggtaattcaattagacatagcagaaaaagattggttcctgcttctgccgctgccgcccccggatcccagtggccccggcgtgctcggctcccacaggcctgcagccagcatcgcaccgaaccttcggggggccgcggctggagcgctcggccggcgtgggagcgcaaggccgcaggtaatccagggttgggggtctccggcgtgtctttcgggtcgcgtcccgcctgggtgccccggggattcccatgcagaaatggagggtgcccccagcagaggggaaaactctggcgtgggagaaggtgggggcgtgcccacagctgcgctcgcgggtcgccggctgcaccaggcacagctggaaagcaccttgcgcaagggtctcacggggtgcagactcgcgactcctcccccttcctcctccttcccgtatccgcagcgccagggctgtgctggtctgggcagtacgcggggaagcggggacccgctgtcactgcgcctcccgctgccgacgccgcctggacggccgcactctccctgcccgagacccggtgagtgcagctcggaggctggaggacccgatcctcccaaatgctgggtgctttgataatttatgacccttttaggctcccttgacttagagaaccaggaggaaaggagtgggagtgtgggttggcggagcccagagacttgtgaatggctgggactaaattcaagtttgtaacccggactctatcccatgactaaagaggtcatagcagaacacgaaggctgggcttttggtctaagaaagaatactaggagaaaaaaaaatttatttccacggaatttgttttcgagcgatactgcatgatcaggactctgaaatttttctagctctgggcggaaaaggacgcctagggattgtctccatatttaacaggggaaggccaccggctgcctgtaagagagaaacgttgcgatgcttgtctatttcacttttgggaagacaagattaaaggctgctcttgataaaaaacaggacagaaaggttcttgcagttgctttacatacctgtggcctgagtcgtttgtgccaaggagagtgtaatccacttccagctgacgcccccagctctttgcgacggattgaggtttgtgtgcaggacgtctggcatacggcccatgaggactttgtcgtgtaaagcaaatgggaacgttgaggcatgtagaggttttgaagcagagtgtcggtccttccttccatacgcctgaaacgcataatccggggctttttgagagcaaaaacatagtcagaaatgtgccctgagggagcatgtactattttggcacacatatgtatatatgtatatataatttttaaattttttttgagaggggtttcactcttgtcgcccaggctggagcgcaatggcgcgatctcggctcactgcaacctccacctcccgggttcaagcgattctcttgcctcagcctcccgagtagctgggattacaggcgcccgccgccacgcccggctaatttttgtagagacagggtttcaccatgttggccaggctggtcttgaactcctgacctcaggtgatgcaccctccttggcctcccaaagtgctgagattacaggcatgagccactgtgcccggcctggatattttaaatgagaaataacacaagtaatagtcattctttgttaggcagaagcatatgctgttatgctggccattttcattcacacttgccagggaacactcacattttgtttctgtatatggaggcagccaagagtattatgttaatgtttaggaagagaatttcctcgtgattttattgctgatttctgaaataattcagtgtaactaattttgactgtatttgcacatctctccaattccaaaagctggcataattttctgtttggttaggaagtaggaattttatgaggacttttattgtaaactgtgtcaagggaaaaatcatcttatactaaacgtctttattgccaaactagaataccttcacaatctgaactttctttagatggcacagatcatgaataaacacagaaaccattagcatattgtgtgcttaattaaggctggaaagtgctgaggctttttgcaggcgcagttagcaggcgaactggtcagcagggtttctggggaacgtagatttgcgtgacaggggccctgtgttgctaaggaattaatgcaggcactgagaaaagtctcagcgtcagacactcctccacctcccgggtcctgcttccctccctctcccctttccaggcaactcacagtttaggggtgtggttgtgtgtgttcaagctcttgggttttacatataaatgcctgagacttttctgcagggtttaaaaactaacatcttgtcttacagtcttgtaggatttgtcttttagaatctccagtcctcacaggaaaaccccccaattaaaaaaataaaagaataaagaataaaaagaataccactactactataaaaaaaaaaaaaatcctctaaaatttgtcttcccagatcagcagagtgaatttgaactgtgtggacttttttcctctttctttcttgagtcatgttagtactgagaacttttttttttttctgtcaaatcatctgtttgataaataagtccaggagacttggatcctttcaacccctgaggccctaaattaggctgttttttttttaacctctgtgtttccagtaaattcgacaagcagaaactgcaactaaacggctcagtaaaaccgaagtcaaatgttcctccattaatctaagaagttgctctcctaactcagcagactccaagaacctgaatcacaatctccctcgaagatgtacaagatctcaggaggggaagctgccccctcactctagatttcacggtggtgataacagccatgaaagcatttcataggtttctgccttttttttctctctctttatgtcttgttttagatgcaatcttcttaccgcgaagaagccaggggaataggtagccacatcttgtttgcagataagaaaggaagctaacgcagtatctgcaaagccaggagtctgactcagtacttttctcactcatgcatacaagcagctaaaaatgacacagcttatttaccatgcccctgacactgcactgagcactttatgagcttgaactctgttaatctcacgaccacctcatgaggtaggtgctgttattacttccattttacagatggggaaaattgaggtcgagagaggttgcgttacttgctcaacgtcatgcaagcagtaaatgggagtgtggggggaggcaatgagatttgactccaagcagtctgagaccagaggaatgttggattgcaggatgctaaactgctttcctcagacacaattcatacgtcagaaaatgacctacaagtaagtgaatgatgacactaaattgcatggttcttttgtcaaatgaaattcactgagaggcagatggctgggtcatgcgtgcaggtggctctgcagtggagcatttcctggagctttgaaatgaagctccagattgatcagacgtgcgtggctttagccctgagtgtcctgtgtgttaaaggcttgtgcttctcagaacttgaaatacctttcagaaagaggctatgcttttgggagtgcaatcggtgatttaagtaaaccaatgtgcctcgaaattctcttagatctcttaggaccttttgtcttttctccttcagaacagagttgttctaaaatcctgagtaacaacgtcagtttttacccttgctttactttctttttctcatctacagatctccaagtgtggcagctgatttgtatataagagctgaaatgcaattttggttaatatagtcacttggacttgcttatgataaatttgactttcctggcttctttctactactcacagcttctagaaggccatctatttatatattaatcttctgggaccctcaagatgtttgctttgcactattaaagaattctggtcctaagggaggacagctgaatcataggttaaatgtatcatcatctttctcatactcatcactgggagaacaaggtttcctgtcatccttccaattagctgtttaactcatttgcataagaatcattcctgaaacttgacctattgccatcaaatttgtgtagattgaaatccatttttccagcttctggctttcagggcctgagttttatttgccaagttagctcctgcatttagtgaagaggttatttttctttaaagtcaccagaggcataaaaaagccatagcgattcttgcagggagggtgccacttcgggggaatagctgggttgtgtaaggttggaagccctaaagagccggtagcctaaggttttcaaagatttctgagctgctcttgattcgtgtgtatgtttagtgaaagtttgttttcagtgcctgtagctgataccactgactctgtgagtaagagtaagctctctggatctcaggtttccctctgcaaagtgagctggactaaaggttatcttaggtccctttcaactttgcactgtcaaattgaattcatacacacagttgacacagaaccctcgttttctgaacaaaagcatataaaccaaatcctgttgccaatccttgtatgtcagtttcccatgggtcttgaatgcaaatacaaatatcgtaaactaaatatttgtgttttctttcctagactctccagaaagagcaacagtaatggagtacatgagcactggaagtgacaataaagaagagattgatttattaattaaacatttaaatgtgtctgatgtaatagacattatggaaaatctttatgcaagtgaagagccagcagtttatgaacccagtctaatgaccatgtgtcaagacagtaatcaaaacgatgagcgttctaagtctctgctgcttagtggccaagaggtaccatggttgtcatcagtcagatatggaactgtggaggatttgcttgcttttgcaaaccatatatccaacactgcaaagcatttttatggacaacgaccacaggaatctggaattttattaaacatg

SEQ ID NO: 4996 - protein, 111 aa, Homo sapien
MEYMSTGSDNKEEIDLLIKHLNVSDVIDIMENLYASEEPAVYEPSLMTMCQDSNQNDERSKSLLLSGQEVPWLSSVRYGTVEDLLAFANHISNTAKHFYGQRPQESGILLN

SEQ ID NO: 4997 - DNA, 4015 bp, Homo sapien
aaccgccaacggctgtggcgtttaaacccaagccgcagccgctgctgctcgccgagctcccggagctgggtgggggtgccccacgctgaaagagagtgatggagtgcccagtgatggaaactggctcactttttacctcaggaattaagagacatttgaaagacaaaagaatttcaaagactactaagttgaatgtttctcttgcttcaaaaataaaaacaaaaatactaaataattcttctattttcaaaatatctttaaagcacaacaacagggcattagctcaggctcttagtagagaaaaagagaattctcgaagaattacaactgaaaagatgctattgcaaaaagaagtagagaaactgaattttgagaacacatttcttcgcctaaagctaaataacttgaataagaagcttatagacatagaagctctcatgaacaataacttgataactgcaattgaaatgagcagtctttctgagttccatcagagttcctttctactgtcagctagcaagaagaaacgaattagtaaacagtgcaagttgatgcgtcttccatttgcaagggttccattaacttcaaatgatgatgaagatgaagataaagagaaaatgcagtgtgacaacaatattaaatcaaagacattacctgatattccctcttcaggatcaacaacacaacctttatcaactcaggataattcggaagtgttatttcttaaagaaaataatcaaaatgtatatggtttagatgattcagaacatatttcttctatagttgatgtacctcccagagaaagccattcccactcagaccaaagttctaagacttctctaatgagtgagatgagaaacgcccagtctattggccgcagatgggagaaaccatctcctagtaatgtgactgaaaggaagaagcgtgggtcatcttgggaatcaaataatctttctgcagacactccctgtgcaacagttttagataaacaacacatttcaagtccagaattaaattgcaataatgagataaatggtcatactaatgaaacaaatactgaaatgcaaagaaataaacaggatcttcctggcttatcttctgagtctgccagagaacctaatgcagagtgcatgaatcaaattgaggataatgatgactttcaattgcagaaaactgtgtatgatgctgacatggatttaactgctagtgaagtcagcaaaattgtcacagtctcaacaggcattaaaaagaaaagtaataaaaaaacaaatgaacatggaatgaaaactttcagaaaagtgaaagattccagctctgaaaaaaagagagaaagatcaaagagacagtttaaaaatagttcagatgtcgatattggggaaaagattgaaaacaggacagaaagatctgatgtcctggatggcaaaaggggtgcagaagatcccggttttattttcaataatgaacagctggctcagatgaatgaacagctggctcaggtgaatgaactaaagaaaatgacccttcaaactggctttgaacaaggtgacagagaaaatgtactgtgtaataaaaaggagaaaagaataacaaatgagcaagaggaaacatactctttatcccaaagttcaggtaaatttcaccaggagagtaaatttgataagggtcagaattccctaacttgtaataaaagtaaagcttctagacagacatttgtgattcacaaattagaaaaagataacttactcccaaaccaaaaggataaagtaaccatttatgaaaacctagacgtcacaaatgaatttcacacagccaatctttccaccaaagataatggaaatttatgtgattatgggacccacaatatattggatttgaaaaagtatgtcactgatattcaaccctcagagcaaaatgaatcaaacattaataagcttagaaagaaagtaaaccggaagacagaaataatttctggaatgaaccacatgtatgaggataatgataaagatgtggtgcatggcctaaaaaaaggtaattttttttttcaaaacccaagaggataaagaacctatctctgaaaacatagaagtttccaaagagcttcaaatcccagctctttctactagagataatgaaaatcaatgtgactataggacccagaatgtgttgggtttgcaaaagcagatcaccaatatgtaccccgttcagcaaaatgaatcaaaagttaataagaagcttaggcagaaagtaaatcggaagacagaaataatttctgaagtgaatcatttagataatgacaaaagtatagaatacacagttaaaagtcactcactctttttaacgcaaaaagataaggaaatcatccccggaaacctagaagacccaagtgagtttgaaacacctgctctttctaccaaagatagtggaaacctgtatgattctgagattcaaaatgttttgggggtgaaacatggccatgatatgcaacctgcttgtcaaaatgattcaaaaataggtaagaagcctagactaaatgtatgtcaaaagtcagaaataattcctgaaaccaaccaaatatatgagaatgataacaaaggtgtacatgacctagaaaaagataacttcttctctctaaccccaaagaataaagaaacaatttctgaaaatctacaagtcacaaatgaatttcaaacagttgatcttctcatcaaagataatggaaatttatgtgattatgacacccagaatatattggagttgaaaaagtatgttactgataggaaatctgctgagcaaaatgaatcaaaaataaataagctcaggaataaagtgaattggaagacagaaataatttctgaaatgaaccagatatatgaggataatgataaagatgcacatgtccaagaaagctatacaaaagatcttgattttaaagtaaataaatctaaacaaaaacttgaatgccaagacattatcaataaacactatatggaagtcaacagtaatgaaaaggaaagttgtgatcaaattttagattcctacaaagtagttaaaaaacgtaagaaagaatcatcatgcaaggcaaagaacattttgacaaaagctaagaacaaacttgcttcacagttaacagaatcttcacagacatctatctccttagaatctgatttaaaacatattactagtgaagcagattctgatccaggaaacccagttgaactatgtaagactcagaagcaaagcactaccactttgaataaaaaagatctcccttttgtggaagaaataaaagaaggagagtgtcaggttaaaaaggtaaataaaatgacatctaagtcaaagaaaaggaagacctccatagatccttctccagagagccatgaagtaatggaaagaatacttgacagcgttcagggaaagtctactgtatctgaacaagctgataaggaaaacaatttggagaatgagaaaatggtcaaaaataagccagacttttacacaaaggcatttagatctttgtctgagatacattcacctaacatacaagattcttcctttgacagtgttcgtgaaggtttagtacctttgagcgtttcttctggtaaaaatgtgataataaaagaaaattttgccttggagtgctccccagcctttcaagtaagtgatgatgagcatgagaagatgaacaagatgaaatttaaagtcaaccggagaacccaaaaatcaggaataggtgatagaccattacaggacttgtcaaataccagttttgtttcaaataacactgctgaatctgaaaataagtcagaagatctatcttcagaacggacaagcagaagaagaaggtgtactcctttctattttaaagagccaagcctcagagaataacagtgttttatggacaggcacagtggctcacacctgtaatcccaatactttgggtggctgaggtgagaggatcacttgagcccaagagtcggagaccagcctgggcaacacagggagacgctcactctac

SEQ ID NO: 4998 - protein, 653 aa, Homo sapien
MECPVMETGSLFTSGIKRHLKDKRISKTTKLNVSLASKIKTKILNNSSIFKISLKHNNRALAQALSREKENSRRITTEKMLLQKEVEKLNFENTFLRLKLNNLNKKLIDIEALMNNNLITAIEMSSLSEFHQSSFLLSASKKKRISKQCKLMRLPFARVPLTSNDDEDEDKEKMQCDNNIKSKTLPDIPSSGSTTQPLSTQDNSEVLFLKENNQNVYGLDDSEHISSIVDVPPRESHSHSDQSSKTSLMSEMRNAQSIGRRWEKPSPSNVTERKKRGSSWESNNLSADTPCATVLDKQHISSPELNCNNEINGHTNETNTEMQRNKQDLPGLSSESAREPNAECMNQIEDNDDFQLQKTVYDADMDLTASEVSKIVTVSTGIKKKSNKKTNEHGMKTFRKVKDSSSEKKRERSKRQFKNSSDVDIGEKIENRTERSDVLDGKRGAEDPGFIFNNEQLAQMNEQLAQVNELKKMTLQTGFEQGDRENVLCNKKEKRITNEQEETYSLSQSSGKFHQESKFDKGQNSLTCNKSKASRQTFVIHKLEKDNLLPNQKDKVTIYENLDVTNEFHTANLSTKDNGNLCDYGTHNILDLKKYVTDIQPSEQNESNINKLRKKVNRKTEIISGMNHMYEDNDKDVVHGLKKGNFFFQNPRG

SEQ ID NO: 4999 - DNA, 5692 bp, Homo sapien
  Unsure 1911-1939, 4889-5198: Unknown base
taggaaggcgccggaagtggtcccgcagaggcggggtgggagtggggctcccgaggcagtgcagttggctgtagctgggcgcctcggttaggtgcgctgtcagtcctttccgagtgcctggcccagtctctcccgcctcggcccaacatggacttcagagaaattctcatgatagcttccaagggacaaggtgtcaacaatgtgccgaaaaggtatagtttggcagtggggcctccaaaaaaagacccaaaagttaaaggtgtccaatcagcagctgtacaagcttttcttaaaaggaaagaagaggagctgagacgaaaagccttagaggagaaaaggagaaaagaggaactagtgaaaaagcgaattgagctcaaacatgacaagaaagcaagagctatggccaagaggacaaaggataatttccatggttacaatgggattcctattgaggaaaagtcaaagaagaggcaggcaacagaaagccataccagccaaggaaccgaccgagagtatgaaatggaagaagagaatgaattcctcgagtacaatcacgcagagtcagagcaggagtatgaggaagagcaagaacctcccaaagttgaaagcaaaccaaaggtcccccttaaaagtgccccaccacccatgaacttcactgatttactcaggctggctgagaaaaagcagtttgaaccagtggaaatcaaggtagtgaagaaatcagaagagcgacctatgaccgcagaagaacttagggagcgagaattccttgaacgaaagcataggagaaaaaaacttgagacagatggaaaactacctccaactgtgtccaaaaaggcaccctctcagaaagaaagtgtgggcacaaaacttagcaaaggttctggagacaggcatccttcttccaaaggaatgccccttcctcatgctgagaagaaatcaagacccagcatggccaatgagaaacacctcgcttgtcttcatccaaatccatgccaggagagaggatcaaggcaggatctggcaatagctcccaaccctcacttcgtgagggccacgacaaacctgtttttaatggagctggaaagcctcattccagcacctcttcaccaagtgtcccaaagacttctgctagcaggactcagaaatctgctgttgagcacaaagccaaaaaatctctgtcccatcctagccattccaggcctgggcccatggtcaccccacacaataaggctaagagtccaggtgtcaggcagccaggcagcagctctagctcagcccctgggcagcccagcacaggggttgctcgacccacagttagttctggccctgtgcctaggcgccagaatggcagctccagctcaggacctgagcgatcaatcagtgggtccaagaagccaaccaatgactcaaatccctctaggcggacagtcagtggtacatgtggccctggacaacctgcaagcagctcaggtggccctgggcgacccatcagtggttcagttagttctgcaagacccttgggcagctctcgtggccctggccggcctgtgagcagtccacatgaacttcgacgaccagtgagtggcttgggccccccggggcggtctgtcagtggccctgggagatccataagtggctcaattccagctggacggactgtcagtaattcagtcccaggaagaccagtgagcagcttgggacctgggcaaacagttagtagctcaggtcccactataaagcctaagtgcactgttgtctccgaaacaatttcttccaagaatatcattagccggtccagcaatggacagatgaatggaatgaagcctcccctatctggctacagagctgcccaaggtcctcaaaggcttcccttccctactggttacaaaaggcagcgagaatatgaannnnnnnnnnnnnnnnnnnnnnnnnnnnnctctgaaatggaagattttattgaagatgaaggagagcctcaggaagaaatatccaagcacattagagaaatctttggttatgaccgaaaaaaatacaaagatgaaagtgattatgccttacgttacatggaaagtagttggaaagagcagcagaaggaagaagcaaagagcttaagactgggtatgcaagaggacttagaggaaatgagacgtgaagaagaagaaatgcaacgtcgaagggccaagaagctgaagaggcgttagctgctgcttttatttttgtgaaattctagagctgctctgctgcaaggatttcctgccttcagactgaagaagcccccttatcattttagatttatacttgggtactcaaggagaaggaatgcatactgtcatttgcaggctgtcatttgagcataaaatattttcagatattttccagggtgaaatctgtaatgcagatgatataatgcccacttgtgctcttatgaagttaactgttcacagatgccagccttgatcctgatgagctatgcactctaatgtggggccactcaccagtcagccaatcttttattgttcctttgctactttgaaaggaaaaaaaaggttgtctcttgatttctgtaattcttctgctgatctgtgagtagggcactgccctgctcccaatcaaacttagtctttttatgagaaacctggaccttccatgaatgttgccagcaataaagtgacttgtcctaatctatggattgagaacttgaaaatgtagagtagaatttataactatcatatggatgtcatcctgtgactttgaagtacaaagtagaataaattctgtattcatggattggatgctgagcattcttactcattaatttaggtggctaggaattaatgaaaaaattttcaagttaaaatacaggttataacagtataatattcttttctaagttttcctttcagatttactgttatgttggctttagtgtaagacaaggtcactgtgctgattgatttttatctaaaaaaattcatttttatatcgaagaaaaaatattttattcaaacattagatttgaaagagtaatagtttataaaataaggaagtaacatgtgaggctctcccctcctcccctcccccatcataaagatattttgaaatcccaaggtgccctcatacctcttgacattaatgacttcattttttagcttgaatttgttagcaaatattaatggcagaaaaccaaaaactaaatttatggtatcgagagcaccaccttctctttttgcccatattgcactttgatttcaaactatgcactgtgaagagatttttttccccaggtaggaagggatgttccctgttatcgttattttactgagctgtggaaactcatttttaccctttttaaagtcataaatatggacttaatagcccttaaccttcaagtccaagcagttccaatcaggctgacttaggatcatgctggaaggaagccaagtctcaagaactgtcagcaacagaaaatgagatatgatgctagagagcatttgtccttgactgtaagtacagaggcttaggggaagtgagacataagcttgtaggaataataaacgttctacaataaacgttttggctatcttaagccattgtatgggggggattaggaagtaggagggattgtcctacaacaggcccttatacttcaacagcccaaatattttggtttattcctttttatccataaagtctttattcttcaagtttgggtattatagattaccattgttagcctcccttaatgggaccatatgagccaggcttttaagacggactcattttgaattgagtttcaaactttgaaagtgcaaggatttaatttttaagttgaatcccatgaaaggtgtcatcatcactaggaataacaccctttgtaactacatatagaactgttacaatggtagcagaaaatcctattgatttcatctcacccatttcagataccttcagtgaaattaagggtagtgtgatgtcccatgtaataaaacaggcttagaacatcaattcctctgctgccatttatgtgcttttattcccccttcaaaaattttttattggatatatatatttttcagtattcagactctgaaatctgtcattacaatcaagtgcttgtcacagctgaaagatttctggtggcttaaagtttactagcagtaaatttatgatatggtacagttctttgtacagaaaggcaccattatgttagaataaatttccagaacttagtgggaagaatcaggttttaaccttgtgtgtctgttacttctgagtgcatttctataatataaatgttgatttgcgtcaacattataaaagagcacttctgtggctcatttaaaagaaaaaaaaggttaagtcttttaaattttggccttgtttccaaatcctgtcttccatgttgtttttctgcacttcctgaccactcttataaaaagctcacaaacctttgaagaaactggagtaggctgttatttcattaaggtttacaaattaaatgcttgatttttaatgtattctctactgttttgatttttggattttcttaattcaacatttgaagatgtgccttttgggtaatgttaatcacgaatgtagtaatatttcatgattgtaataatgttacatgatcatgggtgtggcattctctaacaaatgatgtgaaaggaaagtagttttcataaaactcatggctctgattgcacagtcccacttgcttttgatattgctatgtcaaagcaaagggcacttcttttaaggctactttcagaactttgtattttcgctaaactataaatgcagttgtgtccagttggaggccagggtaccacatgtcacaggcggccttacatgtgtgccgtgaaaaggttcaaagactgttaacnnnnnnnnnnnnnnnnnnnnnnnnnnnnnnnnnnnnnnnnnnnnnnnnnnnnnnnnnnnnnnnnnnnnnnnnnnnnnnnnnnnnnnnnnnnnnnnnnnnnnnnnnnnnnnnnnnnnnnnnnnnnnnnnnnnnnnnnnnnnnnnnnnnnnnnnnnnnnnnnnnnnnnnnnnnnnnnnnnnnnnnnnnnnnnnnnnnnnnnnnnnnnnnnnnnnnnnnnnnnnnnnnnnnnnnnnnnnnnnnnnnnnnnnnnnnnnnnnnnnnnnnnnnnnnnnnnnnnnnnnnnnnnnnnnnnnnnnnnnnnnnnnnnnnnatgtgggaactcaaattttcatttttaatgtaatccccaagattttctccaagaaataaattgttgttttgtattttgtaacttaaaagcagctattggtaaatttctgagatatagcaggagaccaaaacatgtttggaaagagaataaatatatgaagagagactggttgttttattttcaatgtattgaatatattagactactatttattttctgagtggatgtgattaaatattcagacgtttagtgtatgattaagagtgagatagagatttctttggagtaattaaatccatcctgtcttttacacaatggacaaatcaagttaaaaaaatttttagatagcttagcttgttttctggtgctgttgacctgcaagagaatatacttttgcatatacaggtgaaagttttgcaatttatgtatacaagaaattgtaggcattaaaaatattttattgataaaataataataatacaataataataata

SEQ ID NO: 5000 - protein, 733 aa, Homo sapien
  unsure 637-646: unknown amino acid
  Unsure 1911-1939, 4889-5198: Unknown amino acid
REGAGSGPAEAGWEWGSRGSAVGCSWAPRLGALSVLSECLAQSLPPRPNMDFREILMIASKGQGVNNVPKRYSLAVGPPKKDPKVKGVQSAAVQAFLKRKEEELRRKALEEKRRKEELVKKRIELKHDKKARAMAKRTKDNFHGYNGIPIEEKSKKRQATESHTSQGTDREYEMEEENEFLEYNHAESEQEYEEEQEPPKVESKPKVPLKSAPPPMNFTDLLRLAEKKQFEPVEIKVVKKSEERPMTAEELREREFLERKHRRKKLETDGKLPPTVSKKAPSQKESVGTKLSKGSGDRHPSSKGMPLPHAEKKSRPSMANEKHLACLHPNPCQERGSRQDLAIAPNPHFVRATTNLFLMELESLIPAPLHQVSQRLLLAGLRNLLLSTKPKNLCPILAIPGLGPWSPHTIRLRVQVSGSQAAALAQPLGSPAQGLLDPQLVLALCLGARMAAPAQDLSDQSVGPRSQPMTQIPLGGQSVVHVALDNLQAAQVALGDPSVVQLVLQDPWAALVALAGLSSPHELRRPVSGLGPPGRSVSGPGRSISGSIPAGRTVSNSVPGRPVSSLGPGQTVSSSGPTIKPKCTVVSETISSKNIISRSSNGQMNGMKPPLSGYRAAQGPQRLPFPTGYKRQREYEXXXXXXXXXXSEMEDFIEDEGEPQEEISKHIREIFGYDRKKYKDESDYALRYMESSWKEQQKEEAKSLRLGMQEDLEEMRREEEEMQRRRAKKLKRR

SEQ ID NO: 5001 - DNA, 1568 bp, Homo sapien
  Unsure 104, 112: Unknown base
cattagatttcacttttttaaaaaacccagtggacattgctataaataagatttatttggctacaaataacctgggatgttgcttattatgattgatgcctgcnggtttgtncccaagctgagtgaaattgaacctcgtcctccctactcattttgatgactgaggctggtttataagaaaaggaagtttggagaagaaaaccgagattagaaaatatcatgttttggttggagataagaaccagggatggcaagtaccagtgtgtacaaatgtatttcacggagtttgaaggaacgcataatcaagagggaaaacaatttgtccttcattggacgtattatttggatttgggtgagcaacaaaatggaatgtggtctgttaggagcattctgtttgttcttttgtccctgatgtgatgaatcattgccacatgctagatggactcttcatatccaggttttgtccctcagggctgagcactgtattaaagagtttttgttgagtcatttaaccttagtgtccacatccagatcagctgtaaaatggggaagacgtgtgctgatttggaatgaatgcaaaatatcactatcattttcctaattacagaggagcaaaggttatcttcagccctttcagttctatgctcacatattcaaatatcaaatgtaatttagctgaagttatttaataatcaagtctttcaatatctgttcaaagaaaaagaacacactttgaaaattctgcaaagctgtctcccagtctttaaaatgtctggaagcactctccttctttacaataccaacatcactggcccagaatcttccctgtgctaggttgtaaatataaataaattacttgttttgtaaacttttgtaaagaatattttggtagaaatacttcaaacatattctttgggttatatttatacatatgtgaaataaatatactatcaaaaggttatattttatacaaaaagtaaattgctaccttttgtatgctaatatgcaaagttttgtataatatgatggtttatttttagctctacacttaaaccataggtggttgagtgggaacttttgaaaactatcaagaggcttgttagacaaatttatattctgaaacctcaataagaaagcattccaggtttcaatccttgttttttgtcctgctcccaaattcttttttaaacccatagttcttgtgtcttatttgattcttctgctgtgcacattgtattggtccttgttgcatgtagtctactgtgtgttttccgattttataaggcagcatttctccatacaaaaaraaaaaaaatgatgtacatataaacgcttttrttgtatggctcctccatgttactgtatatatctgccagcacttcccagttacactcctgtgagtcagcttatttttaccctaacataaatagtatgttttgtagtagttatcaaatttaagagataaagcaatcagaatgtttggattttcttctatcttaatgtgaatttcataattaatgtctatttattcagctattcattaaaatacaggattctttggggaaaaa

SEQ ID NO: 5002 - DNA, 2320 bp, Homo sapien
gctcagtgggggcggctactgctcatgtgattgtggagtagacagttggaagaagtacccagtccatttggagagttaaaactgtgcctaacagaggtgtcctctgacttttcttctgcaagctccatgttttcacatcttccctttgactgtgtcctgctgctgctgctgctactacttacaaggtcctcagaagtggaatacagagcggaggtcggtcagaatgcctatctgccctgcttctacaccccagccgccccagggaacctcgtgcccgtctgctggggcaaaggagcctgtcctgtgtttgaatgtggcaacgtggtgctcaggactgatgaaagggatgtgaattattggacatccagatactggctaaatggggatttccgcaaaggagatgtgtccctgaccatagagaatgtgattctagcagacagtgggatctactgctgccggatccaaatcccaggcataatgaatgatgaaaaatttaacctgaagttggtcatcaaaccagccaaggtcacccctgcaccgactctgcagagagacttcactgcagcctttccaaggatgcttaccaccaggggacatggcccagcagagacacagacactggggagcctccctgatataaatctaacacaaatatccacattggccaatgagttacgggactctagattggccaatgacttacgggactctggagcaaccatcagaataggcatctacatcggagcagggatctgtgctgggctggctctggctcttatcttcggcgctttaattttcaaatggtattctcatagcaaagagaagatacagaatttaagcctcatctctttggccaacctccctccctcaggattggcaaatgcagtagcagagggaattcgctcagaagaaaacatctataccattgaagagaacgtatatgaagtggaggagcccaatgagtattattgctatgtcagcagcaggcagcaaccctcacaacctttgggttgtcgctttgcaatgccatagatccaaccaccttatttttgagcttggtgttttgtctttttcagaaactatgagctgtgtcacctgactggttttggaggttctgtccactgctatggagcagagttttcccattttcagaagataatgactcacatgggaattgaactgggacctgcactgaacttaaacaggcatgtcattgcctctgtatttaagccaacagagttacccaacccagagactgttaatcatggatgttagagctcaaacgggcttttatatacactaggaattcttgacgtggggtctctggagctccaggaaattcgggcacatcatatgtccatgaaacttcagataaactagggaaaactgggtgctgaggtgaaagcataacttttttggcacagaaagtctaaaggggccactgattttcaaagagatctgtgatccctttttgttttttgtttttgagatggagtcttgctctgttgcccaggctggagtgcaatggcacaatctcggctcactgcaagctccgcctcctgggttcaagcgattctcctgcctcagcctcctgagtggctgggattacaggcatgcaccaccatgcccagctaatttgttgtatttttagtagagacagggtttcaccatgttggccagtgtggtctcaaactcctgacctcatgatttgcctgcctcggcctcccaaagcactgggattacaggcgtgagccaccacatccagccagtgatccttaaaagattaagagatgactggactaggtctaccttgatcttgaagattcccttggaatgttgagatttaggcttatttgagcactacctgcccaactgtcagtgccagtgcatagcccttcttttgtctcccttatgaagactgccctgcagggctgagatgtggcaggagctcccagggaaaaaggaagtgcatttgattggtgtgtattggccaagttttgcttgttgtgtgcttgaaagaaaatatctctgaccaacttctgtattcgtggaccaaactgaagctatatttttcacagaagaagaagcagtgacggggacacaaattctgttgcctggtggaaagaaggcaaaggccttcagcaatctatattaccagcgctggatcctttgacagagagtggtccctaaacttaaatttcaagacggtataggcttgatctgtcttgcttattgttgccccctgcgcctagcacaattttgacacacaattggaacttactaaaaatttttttttactgttaaaaaaaaaaaaaaaaaa

SEQ ID NO: 5003 - protein, 301 aa, Homo sapien
MFSHLPFDCVLLLLLLLLTRSSEVEYRAEVGQNAYLPCFYTPAAPGNLVPVCWGKGACPVFECGNVVLRTDERDVNYWTSRYWLNGDFRKGDVSLTIENVILADSGIYCCRIQIPGIMNDEKFNLKLVIKPAKVTPAPTLQRDFTAAFPRMLTTRGHGPAETQTLGSLPDINLTQISTLANELRDSRLANDLRDSGATIRIGIYIGAGICAGLALALIFGALIFKWYSHSKEKIQNLSLISLANLPPSGLANAVAEGIRSEENIYTIEENVYEVEEPNEYYCYVSSRQQPSQPLGCRFAMP

SEQ ID NO: 5004 - DNA, 4257 bp, Homo sapien
gacccacgcgtccggtctttgatgttttctcagttcactgatatcaaaagaaaggactttggcattatgttcctgcaccaccttgtatctattttcttgattaccttttcatatgtcaacaatatggcccgagtaggaacgctggtcctttgtcttcatgattcagctgatgctcttctggaggctgccaaaatggcaaattatgccaagtttcagaaaatgtgtgatctcctgtttgttatgtttgccgtggtttttatcaccacacgactgggtatatttcctctctgggtgttaaataccacattatttgaaagctgggagatcgttggaccttacccttcctggtgggtttttaacctactgctattgctagtacaagggttgaactgcttctggtcttacttgattgtgaaaatagcttgcaaagctgtttcaagaggcaaggtgtccaaggatgatcgaagtgatattgagtctagctcagatgaggaggactcagaacctccgggaaagaatccccacactgcgacaaccaccaatgggaccagtggtaccaacgggtatctcctgactggctcctgctccatggatgattaattactcaaaactacaagtcccaagcaaagtgaactatttgttcctggaagtatttaataagttgcaaatgcagttcctttcataatatctcagcaccagaaacaaaaattaagattatcaaagcattttgaatagtgcactgccatgtgtcctgtctgtgaatgaagaagaattaccattctctctttgtaggcatgctgtatgtaattgacacaagggaacagtatttgcatttgtactgtcttagaatattatttatttttttgtatttgtaaatctgtggacaaaagagggtttcctcactccttttactcactgggctcatgacagtgaaggagatgctccatctgcttctccccctttctcttgctgtagtccaatgtgctatgagcatcagcttactttgtcacttagagcaagcaaaacccagtgcaagagtctcgttcagctctaaataggtttgctttcttttagttacagtgcccattttgaaattgcctatacagtcttagtgaccatttaaaccggacgaactaggtgtttaattttcactcttcatgttcaattagcagttcaaattaaagaagatggttattggagaacttttttgaatggttttgtattaaattgctttgaaatagatttcatttcttgtgcacacagccaagatttcttcaatgggtgtgagctagttgagggttaaccttgtaggttgcagagtgtatttgtttgtttgtttgtttttctctgtgatgaggtcagtgctctgattttgaaggaggatattcactgaagctcatagttataaacaaggaaatcactgttaagaatgggaatttgtcctgtgttctgggaataacataaagagagcaactgatttcagccaggttttgccactaccctataattagtgcagtcttatgttataaaagaaagaagttaactatatttggggacaaaaaaatatttcaagagttgataaagattacctgtgcagtgcagagcactttaatgcaaccagctttcaagaaaaagccctatctagtacttgatgttgatgtttttattttgctgagcaaaataaagccaatgggagaaggactattttaccctttgcttttctccttaaacgtaatccagatgactttcctgttactaaacactgagcagcattacactacaatgcttctttggtttccaggaatttttttcaaatggggctgtttctggaaaaatgaaaaattctattggacaatggcaatatcaacaatgaggaaaattactgaagaataagtttccataagtctcctacatagcagtgttatttatgtacagataagaaaaccatatgtcagccaaagattttatctcttcttctaacttttagtaagaggaaaaagggattataaaacccttcataaatcaagaaggccatcacttagaacgaaccccaaacaaaaatgccataatataaatgtgtgaatcagggctgtgaagacaacagcagaaatgctaacaagcgtgcagaaacaccagagagtgcgtatcctgctcagaaccattcacatttaattcaattcttggaaaaaattaaagctttttgcccacaatttgcaatctgtgggttaatagttaaaagaatgttcccaaccaaaaaattcttaccgtaatattatatcttgccctacttatttacaaaataatatgtttctgttatggtccttagtaataattgaagaggcttagaaatacatctgcttgtttattgagaaaacgatgcaaataattctgcttttagagccttgttattttatttcacaaaacaggcatatgtctaggagtgtaatttgtggatggttgagtttgtaagaacaatcataaaaggacttgttagtctccagaacatctgctaaaatgcaagtatatgtataaggtaatagcatattacagctgaaaattttgagaaggtaaaagtttcttaattaaaatatgaacatatttagcttgctttagtgtctggggcaagtcctctcaatggctaaaattaactttagagatccatgtgttcaggtttagatcatatgacactcgagcacagaagaataatttcaaggaggtcatcttgtaaattaaaggtttagaagaattgcataaaacgtagtaaatggggtctgtcattagcaaaggcaaatctaagcaatcatttttccccccagaagttacttagaaggagaactgggaacacttggggtctctctaactgatggcattcacttcacacagtcgtctatgttatccagagatttttatttcattttacattttagggcacagttctttggggctaattaaaatggggtttgcaggctttttatggtgaagaataatatatctctgtctatagctttcccatggtagcctgataaggctgagagagaaaaatatgtgcagtatctcatcctccccctgtaccaggccatagctttgaagtgtattttgtaaattcaactataggttagtcagaatgctgtttttcgttaattaacttagcctgtgttgatatctcctccttcctggtcacattcaaaccttcccagagtacaaaggggtatgtagaaaggattccagaagaagtaatactttattctctaatgttaatagcttttctggatctcttagtagggggaaagtagaaaatcgagtagaatttggcctcaggtcaataaatgatataaaaacatgtgttctatttatgtatatatatgtatgtttctccaaaaagtgataaaaccaaaatatcactgactcatccctacccatattcttttcataaaacccactcaccaggtacaatagaaacttccctccttgtttgtcagcctcctgttcatgttccccacacacctgaaggtggtagaatcttttcagcctcttagccagtgagctaaatatggctaagcacaggtcataagagcacctaaggccagcatataagccaactacagttcacctttccaaatttggtcctatggatgttgagcatagggaagcaactctcagtattttggattattcaagtgtatgtggtaaaaatgcagatgattgctgctttaccccagggtttattagcatcctacttctgctgggctgcatcattatataatgccacaggcatctagtcaaggtaaagaagccagaaaggttaggcaagaagtgagataaaatcagatcacctttgatcaaaatggttggtgaacctccacatgtccagttctgttgccaaactttccattcagagtatttggtggagtttgaatttgagcaaactaaatgccttcatcttaggtagaaagggcctgaatcttccattttatattcaaacctcattgttatttggcctaagtaaaaagtcagatttcatttccatttacctgagttcgctttaaagagcttttcaaagagagctttatagacacccacaattgtccccaatctcttcatgatgttgcattaatagttgtttttgtccctttcttggaaatgttaatgccaaagttgcctgaacattgggcggttttcttaatttgaagtataaaaattataaagagtaattccaaaggtattaaaagattgtttaacagtaaaaaaaaaaaaaaa

SEQ ID NO: 5005 - protein, 199 aa, Homo sapien
DPRVRSLMFSQFTDIKRKDFGIMFLHHLVSIFLITFSYVNNMARVGTLVLCLHDSADALLEAAKMANYAKFQKMCDLLFVMFAVVFITTRLGIFPLWVLNTTLFESWEIVGPYPSWWVFNLLLLLVQGLNCFWSYLIVKIACKAVSRGKVSKDDRSDIESSSDEEDSEPPGKNPHTATTTNGTSGTNGYLLTGSCSMDD

SEQ ID NO: 5006 - DNA, 1438 bp, Homo sapien
cgcagtgccggcgtcatggcggcctccgcgcacggctctgtctgggggccgttgcggcttggcatccccggcctgtgctgccgccggccgcctctgggtctgtacgcgcgcatgcggcggctgcccgggccggaggtgtctgggcggagcgtggctgcggccagcggaccgggcgcctggggcactgaccactactgcctggagctgctgcggaaacgggattatgaaggttatttatgctccctgctgctccctgcagaatcccgaagctctgtttttgcactgagggcctttaatgtggaactggctcaggctggattactcttgctgctgtcttgctgtactgtatgccactgggatctgaacactaaacattgctaagaaacccacccaccaccaggatatttggaagtaacttcacatatggaaaagttaaagactcagtctctgagaaaacaattggactgatgcgaatgcagttttggaaaaaaactgtggaagatatatactgtgacaatccaccacatcagcctgtggccattgaactatggaaggttgtcccagctttggacagcggaaactccttcacagcggctgctatgtccttgtgacacgcttccgtcattttttggagcactttcttattttctgacacaataagatattctaggatccttttgaatctctcccctgcctcacctttggaatcgcccatttctcgagagccctgattcctttaaggagaatggtagtagagacaagtgtctgggcactaggctgttaaaagacataatctgactaaaagatggcttatgaaaatcgtcgatgaaagagaaaaaaatctggatgacaaagcatatcgtaatatcaaggaactggaaaattatgctgaaaacacacagagctctcttctttacttaacactagaaatattgggtataaaggatcttcatgcagatcatgctgcaagtcatattggaaaagcacaaggcattgtcacttgcttgagagcaacaccatatcatgggagcagaagaaaggtgttccttcccatggatatttgtatgctgcatggtgtttcacaagaggactttctacggaggaaccaagataaaaatgtgagagatgtaatatatgacattgccagtcaagcacacttgcacctaaagcatgctaggtcctttcacaaaactgttcctgtgaaagcatttcctgcttttcttcagacggtttctctagaggactttctaaagaaaattcagcgagtggattttgatatattccacccatctttacagcagaagaatacattacttccattatatttgtatattcagtcatggagaaaaacatattaaaataatttcatggcaaaaaaaaaaaaaaaaaaaaaaaaaaaaaaaaaaaaaaaaaaaaaaaaaaaaaaaaaaaaaaaaaa

SEQ ID NO: 5007 - protein, 121 aa, Homo sapien
MAASAHGSVWGPLRLGIPGLCCRRPPLGLYARMRRLPGPEVSGRSVAAASGPGAWGTDHYCLELLRKRDYEGYLCSLLLPAESRSSVFALRAFNVELAQAGLLLLLSCCTVCHWDLNTKHC

SEQ ID NO: 5008 - DNA, 1581 bp, Homo sapien
cattcttgagtttgataaagtaattcatacaaagtattgtcctcaaataagtcttccttagctaaatgcaatttaaaattattcaaagatcctagggcacttctagtttcacgtaaatattcatattaggtggttctcttcatccatttgttttcacactgatacataaaaattaacagcagtctaatctagtgacacctcagtcatatttcgctatagattttacctcaaatcagtccaagactttttcagagatcaccatttgtcttgaaaggtttatttcgttattaaactgcctacttataagtaattaagagaaattaagaaagtagtatgcatttttaattgaaattgttttacattctttgtataataaacctaaaaacaaacatgtcataaacaaattgacgtaaagatataaaatgccaaatgaagtattccaaattttctattctaattatttagcttcaccatcattgtggaaaaaaatactagatcctgcttagtattatatatttttcctagtggatcagtgagtaataagtaccaaacactagactagaaggtaatttctacattgtttagaaagggtgaaacaatttatcccctctggtattgttctagcataagctttagttatacaatgattaagatagaaaacttcatatataaatttgataagcaaacccacatttatagctgcagctaaaatatgtttccttagggcacagtaatcctttctgtgaattttgaccttgtttgtgtttttgtgaatgaagctatatgtctaatcaaaaatgattataaaagaggctcatctctgacatcattccaaaaatacattcattgatctctttttaagaaacatctgttattcactgggcattgggactttttgtgagtaatttgaattgaaattttatgagctatccaagaattctgtatggtctattattttcaagtcaaaatttccagtaaggatttactttacatttcatttggataaatgaatcattatataggtatgtctttgcttccattttgagacatttagatttttacagcctgtttctatagcatttgatgttacaactctaagcgtagttcaaagacatttaaattgacaagttaccagttaaagaatttagaatatattagatcccatctagtattatatattttttctagttgatcattgagcagtaaataccaaatactcgattagaaggtaatttttacattgttttgaaagggtgaaacaatttatctcctctggtattattcttaaaccacagatagggatagtagggtagtgaaacgaataaatacctggtagaagacaagagacttgggctctacacctggctctgccactgatttgctaagtcatattggcaatcaccacacccttcagggaattagtttcatctgtaaaatgcagcggttagtactataaaatcatacaaatttctttgtgctttgagaatctataaaggaatgtctgttgatattctgagtcgattttcatttgcttttgttccagaacggttaaaataaagcatattatttcatttaaaaagt

SEQ ID NO: 5009 - protein, 19 aa, Homo sapien
ILEFDKVIHTKYCPQISLP

SEQ ID NO: 5010 - DNA, 7122 bp, Homo sapien
actgggagaacagaagacttcacaatttaatgcctcagtttttaaaaaaggatccttacacttcatgtctcctagccatcagaagaggaatgagacagcaaaagttcaaatggcctgtttcaagtttctgatataaaacgatgacattttcaggaaaatcctgcatttccagagagagactggctggttaaatttctgaaagaggacaccagctaaaagaaggtattgcatctcacccgagcagactgtgtctgtggaaagtgtaagccccttgccagaagagcagcttcccagcaaaggcagagggtgaaaacagcaaaggtcttaagacactggggacctagagtcaaaagggacctcctccagggaaaacgctgtgtgagaaatggcctcattcggtgactgtgagtgacacagcagaaagttgggtcattccggctgcttttttgagaagtccctgaagagatcaataacagcaagagggaacctggcaaggaagctattcctataatccaggaaagagatgaggaaggcttggaccaggtggtagtggtgtcaggtagtcaaatgctgggtatattttgaagatacaccccataggatttgctccacattgaatgtggaatgctggaagagagataaagtgtacctgtcacatactttttgagttttatttattttcttagaagtaagtacacaaagagatgctacctaggagaagggtattcttttcactattctttcaaattttctgtatgttcgaacattttcatagtagaaagttggggggaaaatctgtttcataaacatttcctcagcagcagtccagtctattgcattttaattggttgtgatatcattgttttatgcaatacgttctcaacaagtatatcctccggcaaactgaacaaggaccaagtctgttctgcctacagctctgcttcctcatagctgctttccagaacgtgactcttgcaaattatcaagaaaggggaactaatctaagggatccagatcaaacagcctcatgaagacttattttatgtttctaatataaagatagaagttttcagaaaagccctgctacacagaggatcagagcaggggtgggcctgctgggctgcagctgggattctgagcatcctttcccggaggcacggaaagtgagtgagtgagcccagtgaggaagaagttgaagctttgatatgagtaaacaagtatctctacctgaaatgattaaagactggaccaaagagcatgtgaaaaaatgggtaaatgaagaccttaagattaatgagcaatacgggcaaattctgctcagtgaagaagtaacaggattagtcctgcaggaattaactgagaaggaccttgtagaaatggggctaccatggggtccagcacttttgataaaacgttcatacaacaaattgaatagtaagtcccctgaaagtgacaatcatgatccgggacaattagataattcaaaaccgtccaaaacagaacaccagaaaaatccaaaacacaccaaaaaggaagaagaaaattcaatgtcatctaatattgattatgatcccagagagatcagagatatcaaacaagaagaatcaattcttatgaaagaaaatgtgttagatgaagtagcaaatgctaaacacaagaaaaagggtaagctaaaacctgaacaattgacttgtatgccatatccttttgatcagttccatgacagccatcgctacatagaacattatactctacaacctgaaacaggagcactcaatctcattgatccaatacatgagttcaaagctctcacaaacacagaaacagccacggaagtggacattaagatgaaattcagcaatgaagtcttccgatttgcatcagcttgtatgaattcacgcaccaatggcaccatccattttggagtcaaggacaaaccccatggagaaattgttggtgtgaaaatcaccagtaaggctgccttcattgaccacttcaatgtaatgatcaaaaagtattttgaagaaagtgagatcaatgaagccaagaagtgtattcgggagccaaggtttgtggaagtccttctgcagaacaatacaccatctgacagatttgtcattgaagttgatactattccaaaacactctatatgtaatgataagtatttctacattcagatgcaaatttgtaaagataaaatatggaaacaaaaccaaaatctttcactgtttgtaagagaaggggctagctctagggatatcctggccaattccaagcaacgggatgtagatttcaaggcatttttacaaaatttaaagtcactggtagcatctagaaaagaggctgaagaagagtatggaatgaaggcaatgaagaaggagagtgaaggactaaagctggttaaacttctcataggaaaccgagactcactggataattcatactatgactggtacattcttgtaacaaataaatgccatccaaaccaaataaagcacttagattttttaaaagaaattaaatggtttgctgtgttggagtttgatcctgaatctatgatcaatggagtggtcaaagcttacaaagaaagtcgggtggcaaaccttcactttccaaatcaatatgaagacaagacaactaacatgtgggagaagatttctactcttaatctttaccaacagcccagctggattttctgcaacggcagatcagacctgaaaagcgagacatataaacctctagaaccacatttatggcagagagaaagagcttcagaagtcaggaaactaattttatttctcacagatgaaaatataatgacaagaggaaaatttttggtagtgtttctattactctcttcagtggaaagcccaggagatccactcattgaaactttctgggctttctatcaagctctcaaaggaatggaaaatatgttgtgtatctctgtaaactcacatatttatcaacgatggaaagatctactacaaacaagaatgaagatggaagatgaactaacaaaccacagtatttccactttaaatatagaactggtaaacagcactatccttaaactaaaatcggtgactcggtcatcaagaaggtttttgcccgcccgtggatcttcttcagttatcctagagaaaaagaaagaggatgtcttgactgcactggaaatcctctgtgaaaatgagtgtacagagacagacatcgagaaagacaaatctaaattcctggagtttaagaaatcaaaagaagaacacttttatcgaggtggcaaagtatcctggtggaacttctatttttcttctgaaaactattcttcagattttgttaaaagggacagttatgaaaagcttaaagatttaatacactgctgggcagagtctcctaaaccaatatttgcaaaaatcatcaatctttatcatcatccaggctgtggaggtaccacactggctatgcatgttctctgggacttaaagaaaaacttcagatgtgctgtgttaaaaaacaagacaactgattttgcagaaattgcagagcaagtgatcaatctggtcacctatagggcaaagagccatcaggattacattcctgtgcttctccttgtggatgattttgaagaacaagaaaatgtctactttctacaaaatgccatccattccgttttagcagaaaaggatttgcgatatgaaaaaacattggtaattatcttaaactgcatgagatcccggaatccagatgaaagtgcaaaattggcagacagtattgcactaaattaccaactttcttccaaggaacaaagagcttttggtgccaaactgaaggaaattgaaaagcagcacaagaactgtgaaaacttttattccttcatgatcatgaaaagcaattttgatgaaacatatatagaaaatgtagtcaggaatatcctaaaaggacaggatgttgacagcaaggaagcacaactcatttccttcctggctttactcagctcttatgttactgactctacaatttcagtttcacagtgtgaaatatttttgggaatcatatacactagtacaccctgggaacctgaaagcttagaagacaagatgggaacttattctacacttctaataaaaacagaagttgcagaatatgggagatacacaggtgtgcgtatcattcaccctctgattgccctgtactgtctaaaagaactggaaagaagctatcacttggataaatgtcaaattgcattgaatatattagaagagaatttattctatgattctggaataggaagagacaaatttcaacatgatgttcaaactcttctgcttacaagacagcgcaaggtgtatggagatgaaacagacactctgttttccccattaatggaagctttacagaataaagacattgaaaaggtcttgagtgcaggaagtagacgattcccacaaaatgcattcatttgtcaagccttagcaagacatttctacattaaagagaaggactttaacacagctctggactgggcacgtcaggccaaaatgaaagcacctaaaaattcctatatttcagatacactaggtcaagtctacaaaagtgaaatcaaatggtggttggatgggaacaaaaactgtaggagcattactgttaatgacctaacacatctcctagaagctgcggaaaaagcctcaagagctttcaaagaatcccaaaggcaaactgatagtaaaaactatgaaaccgagaactggtcaccacagaagtcccagagacgatatgacatgtataacacagcttgtttcttgggtgaaatagaagttggtctttacactatccagattcttcagctcactccctttttccacaaagaaaatgaattatccaaaaaacatatggtgcaatttttatcaggaaagtggaccattcctcctgatcccagaaatgaatgttatttggctcttagcaagttcacatcccacctaaaaaatttacaatcagatctgaaaaggtgctttgacttttttattgattatatggttcttctgaaaatgaggtatacccaaaaagaaattgcagaaatcatgttaagcaagaaagtcagtcgttgtttcaggaaatacacagaacttttctgtcatttggatccatgtctattacaaagtaaagagagtcaattactccaggaggagaattgcaggaaaaagctagaagctctgagagcagataggtttgctggactcttggaatatcttaatccaaactacaaagatgctaccaccatggaaagtatagtgaatgaatatgccttcctactgcagcaaaactcaaaaaagcccatgacaaatgagaaacaaaattccattttggccaacattattctgagttgtctaaagcccaactccaagttaattcaaccacttaccacgctaaaaaaacaactccgagaggtcttgcaatttgtaggactaagtcatcaatatccaggtccttatttcttggcctgcctcctgttctggccagaaaatcaagagctagatcaagattccaaactaatagaaaagtatgtttcatccttaaatagatccttcaggggacagtacaagcgcatgtgcaggtccaagcaggcaagcacacttttctatctgggcaaaaggaagggtctaaacagtattgttcacaaggccaaaatagagcagtactttgataaagcacaaaatacaaattccctctggcacagtggggatgtgtggaaaaaaaatgaagtcaaagacctcctgcgtcgtctaactggtcaggctgaaggcaagctaatctctgtagaatatggaacagaggaaaaaataaaaataccagtaatatctgtttattcaggtccactcagaagtggtaggaacatagaaagagtgtctttctacctaggattttccattgaaggccctctggcatatgatatagaagtaatttaagacaatacatcacctgtagttcaaatacgtttatttatatctttatgattttattctctctctctattctcatggcactttcataacattatggctaacctctaattacagattttgcttttgcctccctgaatgaattacaagcctttttaagatatgaaatatgcctacccgcagagcttggcacaaagtggagtcaatcttttaatgttttaaatatgcattttcagactcaaataattaagaagtttcattgatatccactggtcacatcataactgtctatagggcaataaaatctgtgttaaactcaattgcttttataagttttctaaattatttcttcactgtgacagcaaagatttaaataagatgaatgtaaaagagaaagcttattggactcaaacccacagatccacaccagagttctatttacctcatcttggtatcaataaaaacttatgtggaaggtaaatatattgttccccatccaccacataacactctccccaacacacacacacacacacacacacacacacacacacacacacactccttgtaccccttgcccttctcccagctcattgctccaggagagagaagagttcaaaaaataaagtaatcataaacttgaactctctccattctcttgttcccatttacaggtgaatctcttcctttaagccatttttgtctcctgtgaatacagccttatctccacctgtttcttagatcccatctcccctggcttattttttccattcattaccctctttgttccctttacttctcaacctgtgctatatacatgctgttctctctgttgagattgccttatttccatctaacattctctctcctgctattctgatttgtcattcacaactgatttcaagagtcaccttcaccaggaagtcttccttgaccaccatcattcctgcctgattagagggcttcctcatggtaatatgtgttctcaagttttcagtgtcaaggaatgccatcccagaagctcattctcagatgcacaacagccagaacagtctcaagcagcattctagagcttggaatttaagaactacgcattgcctataaagtgaaacataggctaatatagattaaattgaatattgaataaaaaatatatttatttatccac

SEQ ID NO: 5011 - DNA, 810 bp, Homo sapien
aatataaatgacttacatagcattttagatcagtggatgtttttgtgattcttttatttgagctttggccaaagataacagtacccacaggttttttccagctactcgctcttctcccttcagtggccctcgagcctggaaaatctgacatgacaatgtgcttgctcaacctaccactgtttttcttttgaaaagtttggcagcctgtttctgactcctatgaaggtgaattcctcagcattcacagtttattagaaaaatactttgcttctctccaaactcgaaattcaagataaccaaacctatatataggctgatctttcaggatgcagttgtcatgttgatgccatgcttttcagtatcgtggccatcatctgttcagtaggggaggtgtacttctgtaatgggaggtggtggttatgtgtgtgtgcaagtgtttatttggtgtcttaagttagcctgtgggaagttctaaatcaggatggtacgtggttgccagcagagagctgctcctcaagtgaaggaggtagaatcaaagccaataggaaagagcctcagatgcttatatatgtaccgtggggattcagagtgaaagcagtcattggactaggggtggggttagggagagcctgtctgacagacacaagaaagggatggataacgccacccagagaaaaaagcattttaggcaagaacaaatatgaaaaaggaacaaagtctgtgggtggggagcaaggaggagataagttgacttgaaggaagacaacacttatgaaagtcacctggaggctgggtgccatggctcatgcc

SEQ ID NO: 5012 - protein, 12 aa, Homo sapien
MKVTWRLGAMAH

SEQ ID NO: 5013 - DNA, 3362 bp, Homo sapien
gggtgggtagaggtgcgcgcctgggacctgaacatggacttcccgtgcctctggctagggctgttgctgcctttggtagctgcgctggatttcaactaccaccgccaggaagggatggaagcgtttttgaagactgttgcccaaaactacagttctgtcactcacttacacagtattgggaaatctgtgaaaggtagaaacctgtgggttcttgttgtggggcggtttccaaaggaacacagaattgggattccagagttcaaatacgtggcaaatatgcatggagatgagactgttgggcgggagctgctgctccatctgattgactatctcgtaaccagtgatggcaaagaccctgaaatcacaaatctgatcaatagtacccggatacacatcatgccttccatgaacccagatggatttgaagccgtcaaaaagcctgactgttactacagcatcggaagggaaaattataaccagtatgacttgaatcgaaatttccccgatgcttttgaatataataatgtctcaaggcagcctgaaactgtggcagtcatgaagtggctgaaaacagagacgtttgtcctctctgcaaacctccatggtggtgccctcgtggccagttacccatttgataatggtgttcaagcaactggggcattatactcccgaagcttaacgcctgatgatgatgtttttcaatatcttgcacatacctatgcttcaagaaatcccaacatgaagaaaggagacgagtgtaaaaacaaaatgaactttcctaatggtgttacaaatggatactcttggtatccactccaaggtggaatgcaagattacaactacatctgggcccagtgttttgaaattacgttggagctgtcatgctgtaaatatcctcgtgaggagaagcttccatccttttggaataataacaaagcctcattaattgaatatataaagcaggtgcacctaggtgtaaagggtcaagtttttgatcagaatggaaatccattacccaatgtaattgtggaagtccaagacagaaaacatatctgcccctatagaaccaacaaatatggagagtattatctccttctcttgcctgggtcttatattataaatgttacagtccctggacatgatccacacatcacaaaggtgattattccggagaaatcccagaacttcagtgctcttaaaaaggatattctacttccattccaagggcaattggattctatcccagtatcaaatccttcatgcccaatgattcctctatacagaaatttgccagaccactcagctgcaacaaagcctagtttgttcttatttttagtgagtcttttgcacatattcttcaaataaagtaaaatgtgaaactcaacccacatcaccacctggaatcagggattgctcactccaggttactgcaaccctaactcactctagtgggaccttgactggagaaactccacgatcttcctgaagaagagaaatggatgtttccaaattccacaataagcaatatgtggtgataatgaaaagaatgattcagtcttgacggtgaatggaagacacttacctaacaagtactgctcatttacactcaaattaatcttgaagtagtcttaaaatgtgtaagaagttaaaacttgagaagcaaaaaaatgcctgcaaaaagaagatcattttgtatacagagaaccggatgaatataagcaatgaagatgaacatttattgatcttctacatacaagacttcaccataaggccaggagcagtggctcacaccttgtaatcccagcactttgggaggccaaggtgggcggatcaccttgaggtcaggagttcaagaccagcctgaccaacatggtgaaaccctgtctctactaaatattagcggggtgtggtggcgggcacctgtagtcgcagcctttcgggaggctgagacaggagaatcgcttgaaccctagaggcggagtttgcagtgagccgagatagtgccattgtactccagcttgggcaacagagtaagactctgtctcaaaaaaaaaaaaacaaaaacaaacaaacaaaaaaaacacctcaccatgagtgctacatgtgaatagatattaagtgccatatataattagttctcagaagaagggagaaatgatcataggactgggaattgttttgcaaacgttctaggagatgtgagagaaaatatgtaaccacatcttagtggcccaagaaaatacaggcctgaagggataagattgtgtctctatagagcttcaaagcatacaggtcaattaagaaagcccctctctctccagagccgtttccctagcttttggcacctggatgccacagtcctccattaggctgatgactccaaagatgtaactctagcctcttgcctgagcttcagactcgcgtcccactgcccacaggacacatccacctggatgtgactcacaggtacctccaacccatcatgtggagatactcatcctgttccccctagagctgctcttcctgctgcattctctctctcaattactgggaccaccaagctaggaacctgggagtcatccttgatactttctcttcctccttaatcctgtgtattcagcaagtaactaaaggttggtgttggccaggcatggtggctcatgcctgtaatcccagcattttgggaggccaaggcgggcggatcacttgaggtcaggagctcaagaccagcctggccaacatggtgaaaccccatctctactaaaaaaaaaaaaaaaattagtcgggcgtggtggtgcatgcctgtaatcccagctactggggaggctgaggcaggagaatcgcttgaacctgggaggcagaggttgcagtgagccgggattgcgccattgtactccagcctgggtgaagaagtgagactctgtcttaaaaaaaaaaattggtgctgataaatattgatgaattctgctctctgctctctatggttgtcaacactgcagagttgaggcctcatatctcacctgcactgctgcaacagcttactggtcccttgctcccagccttctcctcttcagtccatcgtccacacagcactggggaaggggagccacttgaaacaaaagtcaacaactggttgtagttcataaacacagagctgtttgtgtcccctgtatctggattgccattatgacccactacattttttcttttcctacccctctaaaaactcagttcaggtagcagctccactaggaagccttggctgaccataatcccattcaattccatttcacctcttcgcaggcagtctggggttagggaccctttctctttgctccccaaaataaactggttatctctac

SEQ ID NO: 5014 - protein, 443 aa, Homo sapien
MDFPCLWLGLLLPLVAALDFNYHRQEGMEAFLKTVAQNYSSVTHLHSIGKSVKGRNLWVLVVGRFPKEHRIGIPEFKYVANMHGDETVGRELLLHLIDYLVTSDGKDPEITNLINSTRIHIMPSMNPDGFEAVKKPDCYYSIGRENYNQYDLNRNFPDAFEYNNVSRQPETVAVMKWLKTETFVLSANLHGGALVASYPFDNGVQATGALYSRSLTPDDDVFQYLAHTYASRNPNMKKGDECKNKMNFPNGVTNGYSWYPLQGGMQDYNYIWAQCFEITLELSCCKYPREEKLPSFWNNNKASLIEYIKQVHLGVKGQVFDQNGNPLPNVIVEVQDRKHICPYRTNKYGEYYLLLLPGSYIINVTVPGHDPHITKVIIPEKSQNFSALKKDILLPFQGQLDSIPVSNPSCPMIPLYRNLPDHSAATKPSLFLFLVSLLHIFFK

SEQ ID NO: 5015 - DNA, 2067 bp, Homo sapien
gttcattccaagcggaagtgatggctggtggatatgacttgaggggaattcctgagggcaaggaaaaggaagaaaggggccccagagaagacgaggcacagctggagaaccctagggctgtgaacactgcgactgccgcgcggggcagctgcgccgtgtttgctggaagcctccggtagctgctgaaaccttcgctccggaggtcgcctcggtaaaccttgcggatgattccaccacggcggaaagacgaaaaggaggcttctaggcacccgggaccgcccgtgtcccgcccttttccccgatgaagtctgacgcggcaggtccctcggcagggttaatgggacggcctggtggggcattgccggtctttcccagccacagacaagcttcgcgcctcgatcccccagcgcccccagacgctggatgccgaggcctggtcctttacagccgccgacgcctcatgagcgaagccagccagatgccagcaccgccttcggccccgccccgagccagcccctcccacatccccgcccggggcacgccctcggcccgcccccatctccgccccgagcacgcccctagattggccccgccccgtccccgcccgcaactccgccccgaccggaagaagccgcggcacccagcgcttatagggccgggaatgggggtgccgccgctgcctagtcagttctgcgtccgctgaggctcggtcaccgcctcgctgtcgtcgcggcgcccccgccccgtcctctgtccgtaccgcccccggagccagggccgagtcctcgccatgccggcccggcggctgctgctgctgctgacgctgctgctgcccggcctcggggtgagtgaccggggagcgtggggtggaggacagctcgcgacggccgggtcggggccggggcagcgtcgcggcgccggggctggagtccgagctgggagcgcgacggcggcggccagatgccccgtgagcccagccgtgggaggctcgggccgggcgtaggaggcggcaccgggccgggagagcttccctgacgggagtcgcggccccaccgaggcgtcggccgcccgaagagcctcccaagccagcgcggctgtcacgggcagcggctccccggaccccgcgggctcgggcgcaacttcgtggcgtcctgcacggcacttgggggtcccagaaggccccggcctgaggaggccgcccacctgcgggaccctcctcctcgcgggcgggcgccggcgctgcctggcgggggccgcggaggagccgaaagggcgttgggatccaggggaagggtctgtcctgcgcttcgaatccttgtttgaactttttaaaaattcgaaaactttggggaacgaatgcaacagggagtaaggactctcacccgagagctggcttctgccacttgccctgccggtttcttggtactgggaggctgcaggcttccttctgtgcaccgagacttccttgagcaagtggagctgtgggaattgcactcttggaagatcccgcatgggttcgaggtgaggccgcttcagaacctcaaatgaaagactgtctcctcgtgggagagcacctggggccatcagaaatgtcttttcatctttttctggaggagacgaatgatagggcctggtttacattcatttaactctttatgaccttcactcagctgtggatttgggggcactttgtgggagacttggcttttttttttcttctggttggaagaacctaaattagtgaatgtttttcacaaaatgtattgttcaggatgtgagcgtggcaaatttgtccgtgttctgtttaatgacctctttaaaggtactgtgtactctttaatagggatatcatgtaccaggtgtcccagtagagcactgacatgtgtgtgcctgagtgccagccaccgtgtgaactctttggaggttttgcattttaggtaaataactgtctgtactcttggagtaacaagaatttggaaacaggagaagtaaataaataaggttgcctttttcaaattcagggttttttttttaaataaaggaaaatttgtagactctttataatag

SEQ ID NO: 5016 - protein, 133 aa, Homo sapien
MKSDAAGPSAGLMGRPGGALPVFPSHRQASRLDPPAPPDAGCRGLVLYSRRRLMSEASQMPAPPSAPPRASPSHIPARGTPSARPHLRPEHAPRLAPPRPRPQLRPDRKKPRHPALIGPGMGVPPLPSQFCVR

SEQ ID NO: 5017 - DNA, 4201 bp, Homo sapien
ggcctgaaaacctccgcgccaccgctgcgctctttacaaaggccccgggcgcgagaggacgtgctctgccagccagtgggaaggcaggccgcgcgcgcgggagcgcgggaggatcggcggctcgcggtcactggtccctggctcggttccccgcaccccggggctcacacttacccgcgcggaggagcagcggccgggtgtccacccccatcctgcgcccagtctcctcgattcccctcgctctgagccgggagagccgaacagctgaagagagttcactgactccccagccccaggtgggccttgtgcacatcatgaccagttttgaagatgctgacacagaagagacagtaacttgtctccagatgacggtttaccatcctggccagttgcagtgtggaatatttcagtcaataagttttaacagagagaaactcccttccagcgaagtggtgaaatttggccgaaattccaacatctgtcattatacttttcaggacaaacaggtttcccgagttcagttttctctgcagctgtttaaaaaattcaacagctcagttctctcctttgaaataaaaaatatgagtaaaaagaccaatctgatcgtggacagcagagagctgggctacctaaataaaatggacctgccatacaggtgcatggtcagattcggagagtatcagtttctgatggagaaggaagatggcgagtcattggaattttttgagactcaatttattttatctccaagatcactcttgcaagaaaacaactggccaccacacaggcccataccggagtatggcacttactcgctctgctcctcccaaagcagttctccgacagaaatggatgaaaatgagtcatgaacacagaaagtctaagaggagaaatatgatggatgaagagctctgtagatgctgtatagacactaaataagagttgattagggtagtatattatagtcatctgttatgctgtgaaatttggaattcagtattatcattttgaagtctgtaaattgtgttagtcattaacttagtcacctgttgtattctggatctacacaaaattattttaactgctcttattaatctgtgaggattaatatacaaaaagtatcctttgagatgaagtcgtgttctcaaaataaggttatattattttctttttctgcttgattttcatcttgtgttttgctttgtttttgtaaggaaccatctcttggtttggtcacatcagttcacaacagccatttgttttcaaggtcaaggctccaggcaggttgttactggtgtttgcagcctgtcagtacttgcagtactggaataggttctaggctagtgtctgcgcgtcactgtggttttagcatgggaggacttatttgagaaatactaccttacttttctatgatttctttttacagagttatagtgtgtttactcctaagatgacagttctctttgtctatattcagcatctaagacaaatatttaaacattttaaagaaccactgtgttaagtttaggattatttacttaccaaattagaagtttgacttttatgtgttatacacaatcttaaaatttcacgaattcacctttttaatagtatccatgtacataataaaatcaaagtttaattagccattttctttgaatttttttctaaataagggaaataactgttcttgggccactttacagagataaatgtatgtgaatgtttatgataaacgcttaaatatttctaaaatgttaacttcaaaaaagtctttttcagttcttaaataaaaatttatttatttaagatacttattcgacttatcttaactaaggtagctatgaatgttaagtagatgaggtaaccattcagttaagttaaattgtagcattgccaggtagtgaggctcactgtacaattttccaggtaaatgaaatttcctgtagtaagaggtccgtatttttgtaacagccttttaaaaatgcttttgggaaccctccagcctcttaccaaaagaggctttaaacctcatcttgattcagactgtcagtctattcctgggcagtagtatgtgatgtccagcaccctaaccccgactccccagccctgggactattccagtagagtgaaatatttgtccctgtacaaagtggcctgaatgactgttggagttcctgtgtctggttttcctgtttattccctgtgatgcccagagtaatggcccatccaaagatgtccagatgtccatgtgctagtctccagaacttgtaactgtgttgttatgtggcaaaggggaatgaaggctgcagatggaagtaaaatagattatgctggattatctgggtgtgcccaattgatcaccggatccgtaaaagtggaagagaggcagatcaggatgtcagcgtgatgaggtgtgagacagacttgacttgctgttgctgggaggaaggggaggtcatgagccaaggaatgtggacagtctcttgaagctggaaagtgtgcattggacatctggaagccagaaaagacaaagaaatatccagaaaggaacaaagtcttgtggacaccttgattttggtccagtgagaatatgtttgacttgttaacctacaaaactttatgatgataaatttgtgttggtcgtaagccactaaatcacagtaatttgttatagcagcagatagaaaactaatatactccctttaatataaggttatctactattgattctttctaggattttagcttctggtctgatgtgggtttacagccagatcacccggcttgaattgcttacagtgtgtagtctcatggtaaaggcgttctatgagtgaagtgtatatactttaatgtgtgtatactgtcacattttgactattttggaagactttcacctctgtttcttgtctttgaggctgatgaatgtgtttctaagttataaatttaatattaagggattcatgtattattgttattggatccaaacaatgtgttaagtaatatttagggccagaaaaatcttgtacagaataatgatttctcctaatgtaaatcttggaaagggttttgttcaacttgagaaatattaaattttttgttctattttcttttcttcaaagattggcaaaggagagagtgggttgctaaaagtttatattgttctccaaagaatagaaacactttccatagcccaactccggtagtaaataataatgaacgctttaataatgaaagagcaattggttagtattagaattgttttgattacaaagttagcatctctgcctgagctacccaaccccaaagcggggttgttagaggaaagctaccatatttcacagaaccgaggaaggaatgcagcagacctcaggtgagattcgaatgctctggctctgaccctcaatgcatattggctccatggccacctgtagctcccaagttttacacgttattgatcccccaaagagaccctgatctcttgatttcagttccagggacgggtcagcttgggtcaggtgcccaccccttcaccaatcaacttgtctcaggtaacgcagtcacattatgtaatggctgctctggtcagtgatcatgtggatagatacagcattttctcaaaaaaatggtcacaggggtgggggtggggcaaacaaaaatattggtgtttgatacaaggtactgaagctaagatgtgaaaccttccatatacactttaaggacttctttgtccctggaaagtgatttttctggggctccttaggtagagaggtgtattaatggtgccagtgttagaatccttggcagtctcttcttgaacctgcaactccagtggttaaatctcataggccatataaccattttctagagaattctgttcctactatctaatgcagtaactgacttaaaagtaagtattactgttagactctaacataagtggtggtatttgttttaatggaggtgggatcaggtatgtgttcacttaagctttacattaaaaaaaaatttatatgtgtaaataaatatatatgccttgtagaaaaattagccataatcttactaccagaagagaactactgttaactttgtgtgtgtgtatatgtggtggatggttttatgttacctcctggctctttttatgtttccaattctctaacacttgtttaattaattacttatattattaagataaaaaaaa

SEQ ID NO: 5018 - protein, 288 aa, Homo sapien
PENLRATAALFTKAPGARGRALPASGKAGRARGSAGGSAARGHWSLARFPAPRGSHLPARRSSGRVSTPILRPVSSIPLALSRESRTAEESSLTPQPQVGLVHIMTSFEDADTEETVTCLQMTVYHPGQLQCGIFQSISFNREKLPSSEVVKFGRNSNICHYTFQDKQVSRVQFSLQLFKKFNSSVLSFEIKNMSKKTNLIVDSRELGYLNKMDLPYRCMVRFGEYQFLMEKEDGESLEFFETQFILSPRSLLQENNWPPHRPIPEYGTYSLCSSQSSSPTEMDENES

SEQ ID NO: 5019 - DNA, 3838 bp, Homo sapien
  Unsure 3608-3632: Unknown base
tactaaaatgtagccccaaaatgacgggccagcctcagcgtatctgccatatgtatttcaaagattacagtcagaatgagttaatgaaaatggcaggttccttttcaaagtttatttgactcacagccatattgctaagtttgggtatagtgaagttaacaacaatcacttaaattaatatcttacagcaagatatactgatactgttttaaatgaaaaagactgtaaattcaatgtaaatattacctaactttatgtaccaagttaggagagtggaagaggggaatttttcaaaaaataagctgtatttgaacaaagcatgaaacttgttgttttaaaatttaagaataattgaatttaccatctaattggcatccgtactgtgcattgatagtaatatccaaatcatcttattcttccatagaggaagcgctcatataaatcacattgctgagaactatataaaactacatagaggtaaatggtgcttattaaatatgagtatagtttgttacttgctggaagtcttctagttcatttggaccattttcttaccctgaggtgaactcaatatctgttggcaatgggtggttaaatgtgaagtgcccttgttcagtgtcccttgttcttgtacaggtattttcttagtttaaaaaaaaaattctagcatgccaacatttgtctttggcctattcctttttttctgaagtgtgtaacttctgattttttctttgctatgttgtaaataacagtagctaaattctctgttttactatctacttttcttttcttcccagatcatttcattctaaaattaaattgcttggttttctttagaggaaattgctacatggtatacttgtagtagtgattcatattaaaaaaatagctggtaaatctttctaggtagtaacttatccaaacaatactttgagtatcatattttgtgaatgacttgcttaaactgggaaactgaatattctttttaaatcatataattcctgtattaaatgtgaaacacacagtctccaaagtcacctgattctctgtggaaaatgaaaggcattgaaggaaaccagatacattaatacttagttttggttgaaagtgcaacattactgtacttagaaggggcttggtttatttttagatatttaagctatcattaattttagaccaatggctaataataagagagatttttggttgctcatttatggagagacaaagaacagcatggcataaacaaacatcccagaaataaatgaaaagttttaagtgataaaattgtgttttctatgaaccagtgttgtacatgaaccaacattgtgtttcttagctctgacctgtacagtgaggtacctgtcaggacccctagtcttggcactggaaatgacaaagttctcctattactaaattctcatgccttccttttctgacttagtagattgaaattggtaggtactaatgatttatgtttgataaacttaagttctgctgatatcctgttactggtaattctggtaccaaaatttcaaacggtttgattattagtagcattttgagtacctaggtgcatataatacagttagcagacccttacagagtcaaaagagattttggaatctggtgatactgttgtttattacactagcctattacattttctttctttataataactgtttatgtgagtttcattgaaaatcgtggctctattgctttattcatggtttccacaactcttttgtaacaccttaattttctctcttaggtattttcctgttaaataagatatcaaaagcatcaatcacaagacagagaaaacgtattaggaaaaacttgtattagtatattctaaactgaaatggaaaaactcattattcatattttaataaataaaactcccaaatgatcttgctaaattatcccactatttagaagtagaaaataagagaagagtgctttcaaggaaatttgtcatattctgccttctatctagaagttgacaatgaattgcaataaaactaagaaataactgaatgctgaaaaataccatgaattaatgttatggcttctttatttttgtatatccattcccacaaaattgaatttaagattattaatgaaaattctatattaagtaataatgcttgtattagtaatgggcaaagaagtctttctttgttacattaaccgttagtaaaagatgtactttgacatttctgatgtaaaacctatatgtaaatattgtaatttaaatatgattggacagctgttaagttttggggagggaagcagatgccagcgttctctgctgaaaagacaagatggcgcttgacggaccacagcagatggagctggaggaggaaaaggcaggcagtggactctgccagtattatctgtccaagattgaagaactccagggtcaactgcaatataaattggatgggggaaagccacaaggaacagttctgaactccaggtgcatttgcagctgattttgaatgataagacccaaaacctctggaggcggcaggtgcacgggaatgaactaaatgttaaagtgtgcctattacaggaggagctacagctgctgcaggaataggactcctgtgtcagggaagtagtccaggccatgggtaagaagaaagtgttggtcaaggtgcatctcaaggacaagtttgtcatagatgtggacaaaaatatcagcatcagtgatgtgacacccagttccttggtggttctaagaaatgacagctacactttgcacaagatcctacccaacaaggtggactcattggtgtcactgatgatggtgaagaaagtaccagattcagcttatgaaatgattggtagactggataggcagatcaagaagatcaaagaagtgatcgacctgcctgctaagcatcccgagctcttcaaagcactgggcattgcacagcccaagggaatgctgcttggaagagactgttggcctgggctctggctcatcatagggactgtgtacctttattcatgtctctggctctgaattggtacagaaattcattggggaatttctgtgatggcagagaaaatgctcatctgtcatcttcatggatgaaattgactcttttggctcctcagagctggagggggatgctggagggaacagtgaagtgcagcagatgatgcttcgagggtggctttgaggccaccaagagtatcacggtttatcacggctgctaatacgattgatatcctggactcggcactgctttgcccagggcacattgacagaaaaattgaattcccaacctgcaatgagtaggcctggctggtcactttgaagattcattctcagaaatgaacctgacccaggggatcaacctgagaaaaattgctgagcttatgccaggagcatcaggctgaagtgaagggcatgtgcacagaaaccggcatgtatgccctgagtagcgagtccatgtcactcagaaggactttgaggtagtccaaagtcctatctcatgccaaaggacagtgaggaaaaacatgtccatcaagaaactatggaattgagggcacatcctttgtgtgtatccctacaataaaactcagtgggnnnnnnnnnnnnnnnnnnnnnnnnngttttggggagggatgatctgctagtgtataatcaataacttttaacatttagcttgtatttagtaacatttcattgtgttttgaaaaaaagtaaaaaatcttttgaagcacattttcatgatgtaaaaggtattgagtttcctagtgtaagaacatgatttctggaaacagtcttagggacctgggcagatagagcctccacccc

SEQ ID NO: 5020 - protein, 132 aa, Homo sapien; identical to SEQ ID NO: 2807
  Unsure 3608-3632: Unknown amino acid

SEQ ID NO: 5021 - DNA, 964 bp, Homo sapien
taaataaataaaatttacaaaattttaaaaatcaaatgaaatatgtcaggtttgtacctaccacatttaaactagggacttgaagaattaaacattttattacaaatgaagcacttcatgcacagactggcacatagtaagtagtcgataggtgttaacaatttgtgttattgttattttctggagtccaactaacaaatcccacagtgaatgacatcacagggatgcaaccaacaagatccagaatatggaaacttctactagataaacaactccatttcttcagcaacaattcaagagagagagagaagagaagctatacattttaaaaggctgaagaaatatatgaaccaaatttgtatgaggcaatcagaaaaactgacaccgactgtattaaggaattatctaattttagtgtggtaatgagattgctgttatgttttctaaaaagtcattatactttagattttcataataaaataattatgaatgaagtatggtatctgaaagtatcttcagaataacccagtgtgcatgtatgattaattgggtgggtttacaaaattgcccatgaattgatcattgttaaagcttggctgttaaaacatggcactcttctctctaatactgttgaagttttctgtaatacaaagtttttcaaaaaatgcattccaggaaagtcccataaacataggcagagaaacattctgtttgaagttatgttagtttttaggcttttctcatttttatcacagttaggaaatcctaagtatccaaatcctgcctaaggctataggaacctctcaaaaatgcaactctaaagaatgtgtatgcaagaactaataatagcaaaggaaagcaaagtactttttcctttattattggctgtactaagcccccagacttgtttatatattccttaattcatcaaaactgcaaaaatggtctttgagtaccattatag

SEQ ID NO: 5022 - protein, 7 aa, Homo sapien
MVFEYHY

SEQ ID NO: 5023 - DNA, 769 bp, Homo sapien
ccatcttagcaggagatccctttgaactagaatgccctgtgaaatactgtgctaacaggcctcatgtgacttggtgcaagctcaatggaacaacatgtgtaaaacttgaagatagacaaacaagttggaaggaagagaagaacatttcatttttcattctacattttgaaccagtgcttcctaatgacaatgggtcataccgctgttctgcaaattttcagtctaatctcattgaaagccactcaacaactctttatgtgacaggaaagcaaaatgaactctctgacacagcaggaagggaaattaacctggttgatgctcaccttaagagtgagcaaacagaagcaagcaccaggcaaaattcccaagtactgctatcagaaactggaatttatgataatgaccctgacctttgtttcaggatgcaggaagggtctgaagtttattctaatccatgcctggaagaaaacaaaccaggcattgtttatgcttccctgaaccattctgtcattggactgaactcaagactggcaagaaatgtaaaagaagcaccaacagaatatgcatccatatgtgtgaggagttaagtctgtttctgactccaacagggaccactgaatgatcagcatgttgacatcattgtctgggctcaacaggatgtcaaataatatttctcaatttgagaatttttactttagaaatgttcatgttagtgcttgggtcttaagggtccataggataaatgattaaaatttctctcagaaactta

SEQ ID NO: 5024 - protein, 194 aa, Homo sapien
ILAGDPFELECPVKYCANRPHVTWCKLNGTTCVKLEDRQTSWKEEKNISFFILHFEPVLPNDNGSYRCSANFQSNLIESHSTTLYVTGKQNELSDTAGREINLVDAHLKSEQTEASTRQNSQVLLSETGIYDNDPDLCFRMQEGSEVYSNPCLEENKPGIVYASLNHSVIGLNSRLARNVKEAPTEYASICVRS

SEQ ID NO: 5025 - DNA, 3480 bp, Homo sapien
gtgcaaataaggtttctgtggtgagacaccagataaactcaacttcctctttcaacaacaaatgtgtcagttatcagcaggatccatgccgccagagtaaagctttctaccctttactccctgcaaagaaacaagagtgcttatcccagctaagctccagggtaatgttatcatgacagcttcaacttttagaccacaggcaaatgctttgttaaaactctatgctggtcattcccttcaggatttggcactcaccaacatacccttctttcaagtgaaaaggcatctcttttaatggtcctgacctttggaataggaagcatgtaccctggacagagcacttcaaactagaggaaccataaatccatggctaaccttgacaaatacactgaaacattcaagatgggtagcaacagtaccagcactgctgagatttactgtaatgtcactaatgtgaaatttcaatactccctctatgcaaccacctatatcctcatattcattcctggtcttctggctaacagtgcagccttgtgggttctgtgccgcttcatcagcaagaaaaataaagccatcattttcatgatcaacctctctgtggctgaccttgctcatgtattatctttacccctccggatttactattacatcagccaccactggcctttccagagagccctttgcctgctctgcttctacctgaagtatctcaacatgtatgccagcatttgtttcctgacgtgcatcagtcttcaaaggtgcttttttctcctcaagcccttcagggccagagactggaagcgtaggtacgatgtgggcatcagtgctgccatctggatcgttgtggggactgcctgtttgccatttcccatcctgagaagcacagacttaaacaacaacaagtcctgctttgctgatcttggatacaagcaaatgaatgcagttgcgttggtcgggatgattacagttgctgagcttgcaggatttgtgatcccagtgatcatcatcgcatggtgtacctggaaaactactatatccttgagacagccaccaatggctttccaagggatcagtgagaggcagaaagcactgcggatggtgttcatgtgtgctgcagtcttcttcatctgcttcactccctatcatattaactttattttttacaccatggtaaaggaaaccatcattagcagttgtcccgttgtccgaatcgcactgtatttccaccctttttgcctgtgccttgcaagtctctgctgccttttggatccaattctttattactttatggcttcagagtttcgtgaccaactatcccgccatggcagttctgtgacccgctcccgcctcatgagcaaggagagtggttcatcaatgattggctaaaattaagatatctctttaattacgcctttgtttacctacgttccttgtctttttccaaaggccagaattgtcaaccaatttctttaattgaacattgtaaaaaacaggaataagtacttttgtgtaatattcacagtcaacaggggtgtgatggtgaaggcagagtgtgaaaaacgtgagagaggaagagaaaatagatttacctgattcctctttaaaattcaagccactttcttatttaagaaacctagatcaagtttttacagatgtaaataaaagttgaatagtttaccttaaatttttttcaataagtaagttattgttaataatgcacagtaaatatgtgaatttttcctagatgtaaaaaaaaaaaatctttcatataaagaccttaaattctgagtgagagtaaaaatgtctaatctttctaacaggtaaatttttctaacaggcaagacagtgtgaagaattgaagcaatatgtgcataaatttcaggaccacaagcctgttattaaagaaaaggcatggaaattcattcattccttgaaaatgtgttgagtgcctattgtgttcttggttgtcactttgttaggtactttctttttttttcataagttattggggtacaggtggtatttggttacatgagtaagttctttagtggtgatttgtgagattttggtgcagccatcacccgagcagtatacactgcaccacatttgtagtcttctatccctcgcccccttcccactcttccacacataacatctcatcttgccctcctaataaacctgtggaagttgccgatacaaatgaataaatggaacttcagagaggttaagcaatttgcctcaggatcaacagtggttagccaaaattggtccagtataatacaccatatatgcttatgttattcccttgcttttgttgttacatttattaggtctatactaaattagccttcaatgatgaagacagactaaagctaagccacatgagatcaaggccatttcaacatggtttgcctggaattctccaaaaaacctgtgggttgtgggtttggcatgtcaagcttcagaccacaaggtcttaagtggtaaatagatgcgttgtcctaatactgttccaaggtagagaatcctgatgataaggagtataggaaactcaaatagttcattatttctaaaaaatgtatattttaaggcatgatacaagtcctacaaacctcataagtaggtgaaaaaaaaaaccctgtggagtgataaacattctataaaacctggaaatttgtgtggagttcgcctaagctcacttttcctaaatatagctatataatattgtaaacaaatttgttttttagaaacttttaagaagatttctgtgagcgtaattgacaatatctgcattagaaacagaaagtattatccatcataaatatgagaaaagtgtgtgtcctctttctgacaatctttttatcttatttttttcaaacgttgtggttgttgtttcagcaccattttaaagaatttgaatacaaacaatccctcagcttatcaggttgacatttatgaagctgacctcatcactctttatcttttatgtctgcagtataaatagcatagacatttggtgtgaagggaggagaaaggaagtagtagttctgagaatattcatttgaacagagtgactatggaagaatgaatagcaaaaaaaggagaatttttttaaaaagatctctcactgggaaaagaaaaagttatgcatttataaagtaattaaactggttttccttgtactttattaatctgaatctaatggcacttccttacgagggttttcagatgtgcttgtagttaatggcaacattatcagaatgactacacagacagtcctactctgaggagatgactttggaagaaacccatttggaactacacaccctgctatgtctgtggagaaatggaactgcaatcctcaagagtcacacttcatattccttcctttcaagtggttgataaaaggtagtgcttcaagcacaggatttatggaatagttggcaaattaaacaacatgctttttattttgactaccat

SEQ ID NO: 5026 - protein, 339 aa, Homo sapien
MANLDKYTETFKMGSNSTSTAEIYCNVTNVKFQYSLYATTYILIFIPGLLANSAALWVLCRFISKKNKAIIFMINLSVADLAHVLSLPLRIYYYISHHWPFQRALCLLCFYLKYLNMYASICFLTCISLQRCFFLLKPFRARDWKRRYDVGISAAIWIVVGTACLPFPILRSTDLNNNKSCFADLGYKQMNAVALVGMITVAELAGFVIPVIIIAWCTWKTTISLRQPPMAFQGISERQKALRMVFMCAAVFFICFTPYHINFIFYTMVKETIISSCPVVRIALYFHPFCLCLASLCCLLDPILYYFMASEFRDQLSRHGSSVTRSRLMSKESGSSMIG

SEQ ID NO: 5027 - DNA, 3170 bp, Homo sapien
cgaggagcggggccaccgcgacgttgcagggtacctgcgcacagccacgggggactgacgccaggttccccagccgcccacaacgactttattttcttacccaatttcccacccccacccacctaattcgatgaaggctgccaacggggagcggcggaaagcctgtaagcctgcaagcctgtctgagactcacaggaaggaggagccgaccgggaataaccttccatacatttttttctttgtcttatctggccctcgacactcaccatgaagcgaaacacagagaagcggatttccagggatatttaggagtgtgtgacattccaggggtcgtttgcttttcagggttttctgagggaaagtgcatatgaaatccttgactggacctggtggctacgaatcttccgatggatgaatctcccactccagcgctgagtgggagaaggcagtgattagcacttgggtgacggcagtcgatgcgttcactccaatgtctgctgaggagttatggtgaacccacaacttaggccctagcggcagaaaggaaaacctgaagactgaggacaaagtggaggagggccgaggtgggcttcagtaagtccccggcggcgctttagtttgagcgcatggcaagtcacatgcgtaaacgacactctctggaagccctggagaccctcgcccaactccaccagatagcagaggggtaagagaggatgtgcaagcgacgacagatgctaaaatccctggatcacgacgctgcagagcacctttgcacaggatgctggcctttgctcttactacactgaggagagattcccgcgggttccgcaggcagactacacaggatgaggtggtggagtggagtgagagcaattgtaacggttaactgtaacgttttctttcacacacacacacacacacacacacacacacatgctaggatgcggaaatccccttatgacttgctactttttgattttgtgatattttgtactttttagttgttcagcaactgtcttatttaatggggagattttaagtaacataactagtggctctcagttaaaatgtgaggaagaactacagctcttaaatgtagcaatggcactgttgcaaactcagtgcaaacgcctagattgctttcttcttaacctatttatttctttgttaaatttttctgattgtttcctttatagagtgtctcagggtgcagaggtcagactaagaaatattccaaatgtcttttagaagatagatgcacttatgcagtaaattatcttgggatagttcccaaaagattgctgaaaaagtagattgagtataaaaacttgaaaatatatgatggctcgtgggatgtcctactatcactgaacaaactaaaggtgcactgctttgggatttaatttccagggttgcttgatcattatatcattggaacaactgatacttcactactttaataaagaattaacagagattgaactccaagaggtgggtaatttggtttaaaaatacatgttcatgggtttaccactaactcctgagaaatgttaaaggttcacaggggttcccttctctcaatgtttgtaataattgctcataagcaataccagcaattcataaaaactgcttacttatgccatagaaaattaaacacaaagtgtatacatgtattatgcttctaaatgctcattctaccagatacacatttaaaagagaaaaaaggaacagaaacaagtcatttgagagtggagacttataagaaggagtacatttgagttgaatacacaaatctttacttctctaccaattcctattcccaaaatgaacatattactggggaaagttagttgagaatcagagcatatgttattggggaaaggatatgtttattgacacataatctgtaccaggtatgcattaaaatatatttgttaatttaatatttaaacctgagagataggtattgtttcccagatgaggacaatgaggcaaagaaatatcaagtaacttgccaaaggttacaagatattcattccatggatgcacaaagaagtgcatctagttccacagctgattatggttgtcttgcttttcttcccattgcaccagcttgtcctccaaaatcatgaatgatacacatgaagataactttttttaaaaaaaagcagaaatacacaatgatctcccttgtaagctcctaaggtggcttttctttctctaacttctagtaaatataaacggtttgtttgaaaactattttaaaatgtcaacaatatggagaataaccccccccaacacacctataaaaacccaaatttttggaacaaagataatggaacctccattttcaaactgaagcacagggacagaaaatatatttctagttatcacttaagcactcaatcattagaggctacaagaataatatttttaaagttacagtattttacaattattagaaaacattctatataaaagaagtcagttgatactttaaaatctcccatttggtttataaaatcccttaatttgacctctatatcttaaattccaagatgtttaaatttgctagttgcattatactgggtcatgaaaaattatcccttgaaatagatatgaaacatgttacttcatttctggtttaaataacttgtggaatctttcctaatgacaacctgatattaagggaaactaaagaaaatgttattgtggatcccacagtactatattacactgttttttttgtttgttttgttagttttttttatttaaagcaaacctcaaacattattgggtatcaattaccacctggttgtattgaaatagtaacttatcaatgccatgtaaaaattaattccattttcgaagccacctggcagacaggtttagctgtttcatcagcagcctaatatatactgttaaatttgttaaggatttcactttgaaggatacatgcaaaacatatagttactattttcatgagtcctgcttctagctccattgtggaatacagaaaattaaatatacctgttaagttcgtatctaaacctaagacattaccaaggtttgtacaaattctactacctgacatttattccaagaagatctggaaagttaaataaatttataaatttaaaaaaaaaaaaaaaaaaaaaaaaaaaaaaaaa

SEQ ID NO: 5028 - DNA, 3722 bp, Homo sapien
ggaactagtctcgagttttttttttttttttttgcaattttaagctcatcagctatcactagtgttagcatattttatagtgtggcccaagacaattattttcctaatgtggtccagggaagccaaaagattggacaccctgatatacttaattaccagggtaatattcctaacaccatcacttttacttgacaattctcctgctctaaaagttatgaacctgacattcttggtcttacacaatctggacccagtctactcttctataaccatcttccacttaatttacaaatctttattaaggcacaggtactcctacttatcccctattgcctctctcatgctgaatcaatcatgccaaaagctaagaaaacatgagcatgcttgggactaaagaaacagaactgaggatttcctacacatcctaactgcaaggacagtccatcaaaagccagagataagtatttttatttgctctttatttcttaaaataatttccccaattttgttaacccctacctcaaatgactttagaggtattttaaaggatatgtaatatagttactaagcatttccactgattgtagctgaaggattttctaatgtctattacatgaaacttctccttaaactctcttttaacgaaactgtcattttcctctccagaacggtcttgtcttttctttctcctatatatcgcatataaaatcagcggccaaatcttctagatcaaacatattcatttcatccattccttcaattatccagtcattcaatcaacattattatgtgtaaagtatgacccacttgcattcctagacatggaagatccaaaattaatgtgaataataatctagtgaaaagataagcatggacaaaagtaattattagacaaaattgatgctataataaatgaacattggaagggctatggttaagtgattaagcttgacttggatctctaaaggtgaatggttctttaccaggctaagaagaaaaggaaacattctaggaaaagagaacagcaagcatgaaaaccataaaagggctgccgcagaagttcctcttcctcctcttcctctcgggcctggtcaccctgtgcttcggggccctcttcctgctgccccactcctctcgcctcaagcgcctcttcctggccccccggacccagcagcctggtctggaagtggtggctgaaatcgccggccatgccccggcccgcgagcaggagccgcctcccaacccggcccccgccgcgccggccccgggcgaggatgaccccagcagctgggccagtccccgccgcaggaaaggggggctgcggcgcacccgccccactggaccccgcgaggaggccacggcggcccggggcaatagcatcccggcctccaggcccggggacgagggcgtccctttccgctttgacttcaacgcattccggagccgtctccgccacccggtcctgggaacgagggccgatgagagtcaggagccccagagccaagtgcgagcccagcgggtagaaaatcaaggagacacagcggtcctggggttgccttccagatgaagatctatcaaagatttgaagtcttgtgtatgtggtcctagaggaccccaggctgttataccgatccatgaggcatctgaccccttccaaaggatgatgcagtttgcttggcagagctataagcgttatgcaatggggaaaaacgaactccgtccactaacaaaagatggctacgagggtaacatgttcggaggcctcagcggggcaacagtcattgactccctcgataccctctacctcatggagctgaaggaggagttccaggaggccaaggcctgggtgggagagagcttccacctgaacgtgagcggagaagcatccttgtttgaggtgaacatccgctacatcgggggactcctctcagccttctacctgacaggagaagaggtgttccgaataaaggccatcaggctgggagagaagctcctgccggcgttcaacacccccacgggaatcccaaagggcgtggtgagcttcaaaagtgggaactggggctgggccacagccggcagcagcagcatcttggcggagtttggatccctgcacttggaattcttacacctcactgaactctctggcaaccaggtcttcgctgaaaaggtcaggaacatccgcaaggtcctcaggaagatcgaaaagccctttggcctctaccccaacttcctcagcccagtgagtgggaactgggtgcaacaccatgtctcagttggaggactcggggacagtttttatgaatatttgatcaaatcctggttgatgtcgggcaagacagatatggaggctaaaaatatgtactacgaagccttggaggcgatagagacctacttgctgaatgtctctcccggggggctgacctacattgccgagtggcgaggggggattctggaccacaagatggggcacctggcctgtttctccgggggcatgatcgcccttggcgccgaggatgccaaggaagaaaagagggcccactaccgagagctcgcagcccagatcaccaagacgtgtcacgagtcatacgcccgctcagacaccaaacttgggcctgaggccttctggtttaactccggcagagaggccgtggccacccagctgagcgagagctactacatcctccggccagaggtggtggagagctacatgtacctgtggcgacagacccacaaccccatctacagggagtggggctgggaaggtggtgctggccttggagaaatactgtcggacagaagccggtttctctgggatccaagacgtgtacagtagcacccccaaccacggacaacaagcagcagagcttctttctagcggagacactaaagtatctctatcttctgttctctgaagatgacttgctctccctggaagactgggtgttcaacaccgaggcccacccactcccggtgaaccactcagacagctccggcagagcctggggcagacactgaccccatctcctgccgccgccctggggccgccgcagggatgccttgccttttcaggatttgagactgttctcaaagggattgggaacgaaggccccatctcgggcagacccccagcagatgtgtcggacaagcaacttcttttcctctgtgaggagacaagacttggagactcagcgatgtcaggccagggccatggccacactggcccacacattcctttctacagagaatttctatgaagcccactcacttgccattccagggccaaaggaccggaggtttgcatatccgccccttgtatttgatttgcttccttttggtttcttggtttttgtttttgcttgattttgtcttttctctacagtttagttttgtcacaattacacatatagttttcaaaatcatgcactttctaaaatggtgtcatcctgaaaaacaaaacccagtgtttgcacacacacaaaatcttgaccccgttatctatattttaaatgctttttgcccaacactgaccctatgttcaactttgtgtcatttaccttataatttgaggaggggtttccctttgggcctcagtgttacaaattactagtgctattttcattattattgtaatggaaaaatctgtggactagaataaaagagtttattgaattagaaaaaaaaaaaaaaaaaaaaaaaaaaaaaaaaaaaaaaaaaaaaaaaaa

SEQ ID NO: 5029 - protein, 390 aa, Homo sapien
MMQFAWQSYKRYAMGKNELRPLTKDGYEGNMFGGLSGATVIDSLDTLYLMELKEEFQEAKAWVGESFHLNVSGEASLFEVNIRYIGGLLSAFYLTGEEVFRIKAIRLGEKLLPAFNTPTGIPKGVVSFKSGNWGWATAGSSSILAEFGSLHLEFLHLTELSGNQVFAEKVRNIRKVLRKIEKPFGLYPNFLSPVSGNWVQHHVSVGGLGDSFYEYLIKSWLMSGKTDMEAKNMYYEALEAIETYLLNVSPGGLTYIAEWRGGILDHKMGHLACFSGGMIALGAEDAKEEKRAHYRELAAQITKTCHESYARSDTKLGPEAFWFNSGREAVATQLSESYYILRPEVVESYMYLWRQTHNPIYREWGWEGGAGLGEILSDRSRFLWDPRRVQ

SEQ ID NO: 5030 - DNA, 2025 bp, Homo sapien; identical to SEQ ID NO: 3599

SEQ ID NO: 5031 - protein, 223 aa, Homo sapien; identical to SEQ ID NO: 3600

SEQ ID NO: 5032 - DNA, 564 bp, Homo sapien
ggagtggaaccatggtctgtagcctaggatactatatcactattagctctggacttcaactagtctatagatttttttctttattatgtattttatgtacaggtaattggccttttaattgctattatatatgagagcaaaatagaagactgacattttcttattagttccaaataactagataagttaatttgcagatgtataaaatttattgaaatcacctttgacatgtgttgtaacatttttaaaaaaatcattagttattgtgctgctgcttctcagatatttttcagtgccacgaaagcttttattatcagttcagtccctgcccttaaggttcatctgacctcccttccccttccacagatttgtattaagtgaatgattttttctgtataagcattgggggggattgggggaggtgggatttaaaggtgaataaggggtaggcccttcactaaagaagcgtatctcctgttaggaaactgactatctaagcatagagttgttgggttagctttgaagttgaagactgtgaatctgtgtctcaagtaaaaatctagt

SEQ ID NO: 5033 - protein, 43 aa, Homo sapien [sequence omitted]

SEQ ID NO: 5034 - DNA, 1260 bp, Homo sapien
aaaaattaacttttcccttttatacagaatctgaaccaaatttaccttactttccttccaaaatatccacattcaggaatataggtgaataacaaataaggcagcatagcaaactgctcagactcaagccaaattgaggtcaacatagtatgccaaatccatagtaaggcaaatccacccccctaccccaatacttaacacacagaatactatgtgatatagaatgcactgaagacctacggtcactggtagtttgagccacaggccttcctcatgtaaccagagacagaatgggctacttgcaaaaacgtaactccttgtgtgtatattaaatccataaaatctctggcagtaaagccagcctgaagggatggcctcaccatcttagaatactgagatctcaccagaacactgtaagccatataaacagtagggaaagagtcagcaacagtgaaaccatctgtttaaaatgggcaaaagcgattaagggaaaaaaaacaggtgaatttgaaaataaaccagggtaaggtaaattctagaaataatagcatttgaaatgaaaacctcacttaagttcactagaacagtaaacaggagattgctgaattttttgaagacagcaatgacctcacctagatgactcaagtttggggaacatcaagattttgacgggtactataatgcttaatatgtccaaattttcaaaatgaagtttctcagatattatttctgccataggagctacagtgtagagtatcacataagtatcttgggctagagaaatgcagtttatatataccgttggatttttataataaagtttcccaagacctgttattttgccagaaatgcttctagtatgcttctagataaaattgccccttcagtgactcatggtgttcaaatgatcattttagtctgttgctttttacaagggagtatttcaaatgtcttaagcttttgataacttataatttaagaacacacataaaacatttcagtaggaaatcctactaagtacactcaaaagagtgcctgcttatcagatagcattcttttcaaacctctaaaataaaagacagtggagagcagaatcggtaatcatggtgactcttgttacccatgctgaagtgcagtggcccactaaaagatccagctcaaactcctggactgctcagctcccgagctgtcagattatgacgcatgctggctgaagttaaactctaaaaaccttaaatatagcacaccacagatctagta

SEQ ID NO: 5035 - protein, 29 aa, Homo sapien
KLTFPFYTESEPNLPYFPSKISTFRNIGE

SEQ ID NO: 5036 - DNA, 614 bp, Homo sapien
ggtgagtccctccccaggtgggtctgcccctaccccgtgtgggcgggattagctcccagaggctggccaggccccacctgggtgaggcttgaggtcagggccccaaggctcagattcaggcttggtggaacagagcaggaaagagacccggtaccgaaagtgagcggggcaggcacctatgtcacatgggtaatgggcaggggtcggtcactggctttggctccagggccagagcagtctgacttagtgttgagctccaagcatggaacactggagttggttcattttgaccagcaagcctctaaatgggtgccttgattactccaccgcaaggagagggcagttgcctttttatgacatgttaattccagccaggtgagtcaccaggtagctctcatcctcctgccaggctcccctgcctgtcggtttggcattgtcagataatgtgatcattcattgaagtgacatttgagttccaaaccagttttctcctttaaccatttcaccctcaggagtgattctcctttgtttggcattgtcagggaatgtgatgatccattcaaatgacttttgagttccaaatagtgtttctactttaacttcctaaatgaaaa

SEQ ID NO: 5037 - protein, 105 aa, Homo sapien [sequence omitted]

SEQ ID NO: 5038 - DNA, 773 bp, Homo sapien
gagacttttaattatgcaatgccagactgcattgcataaaccaaaggccaacagagaggtgacctttcaaattactggcacaagaagagctgagatcagaaagctccaacttaatgcaaacatcgacaagaaatccgacagaaatgacttctgtgtctggtcaacttaacataacatgacatattgtcaagcgcatttggctttttaggtagaattgtctataaaggtttaactgctttagaaaatataaatgtgaagatttgtggtatttgggtttatatataagatatttctacattgaaaagagactggaaaagcttggtataagatttgtaaaatatgtttgtaataatgctaatggaagaggtgagatttgggtggggtggggtgtagatgggaacatggtttggggattggggaaagggaagtcatgctgttaataaaatagtgaggcatgttgtataaagtgtgttttatgtctcaattgaaatgttatagagataaatttaaaatagatcatgatgggttttgaatctgatttctaattttaaaatgttatgagcttttgttgctttcctatttcatacacatttctttatgggtttcacttagactgcatgaaattgcagatgccaattaccttttaacaaaattaaattcacatatatgtataatttgcatgtatatattcatggaattttttattctacacgatatattattttaaaatggtttttcaatgacaaaataaaaagtatttttctatactttca

SEQ ID NO: 5039 - protein, 55 aa, Homo sapien
RLLIMQCQTALHKPKANREVTFQITGTRRAEIRKLQLNANIDKKSDRNDFCVWST

SEQ ID NO: 5040 - DNA, 590 bp, Homo sapien
agtatttcgttatagcagtccaagcaaactaatgcacatatcaaaactactttagtttttccactttgttgcaaacaattgcaagttgtccaggttttctgtcttcccccagcctgcaagtgctcagaggacacccaaccctatgatctcagccaactcatgaagtttgatttcacaacttagtgatgtcttcccagtggaatcctaaatgataaggaaaatggtatagagccaagacttgaacattaacaacccaggagcacagaaacagcacagttagctgagaggcgttatggagagaagcaaccgaatgcacactgagcgctgtgagaagtccacgacagtggggaacagcgcccaccgtcacaaaaagaaagaccctcggcaggtactttagagtcacgttcatgctgtaatatgtggggaagaaagactattccaaatggatctggctttttaaaacaagggaattttccttgctcttgggaaccagcaaaatccagctgctcattgaactgcctgtctggaatctcacaaatttgcaccttgaagttgttaataaaggactaagttgataattcgaacaaaaa

SEQ ID NO: 5041 - protein, 17 aa, Homo sapien
VFRYSSPSKLMHISKLL

SEQ ID NO: 5042 - DNA, 463 bp, Homo sapien
caaggtttacatgaacagggaacttgtctgttttgtttattactgtatcccctatgctggcacatactatgtaataagtgtttgttgagtgcatgagtgaataaccattctaaaaaactctgatgtttaaagccctttgctttatataagaattttacttggaaccctggtatttttgtttgtatttgtttgttaataaatgtcaagagttcagtagtaagataggtttcagaaatgctaagttaaacagaataaagaaagaatatgtattacaggtcctggcagagccttgaatatgctaacatttgacagtgggagtctttgagaattatcacatgaagctgctgtacattacaacacattctaggaaatgctgtcttagacaaaaacctgtcatattagaattggggtaaggggcacgatactgaccgtgaggcagcagattcctatggactacattaaa

SEQ ID NO: 5043 - protein, 31 aa, Homo sapien
QGLHEQGTCLFCLLLYPLCWHILCNKCLLSA

SEQ ID NO: 5044 - DNA, 2321 bp, Homo sapien
caaacatgcattaagctcctgccaagcaccaggatgtgtcaggcacagcagggcagtggggttgccacagagagggaatcaggactccagccaggacactaggtagggaagcaccaggggcctggggcggagaaggcaaccagccagccccgaggggcctggaacatgcagctcagcttccctgggattctgcagagggacaggcaggtggatgaaagctatgtccttcagctctagtcccatcccttccgtcaagccaagcccattcagcaaggagtccttactccctgcctccactttcttgccttccatttcccctctgcccatcgagtgttgctcttgtttctgcctcaccccagtactgttctctgtacattcaggccttttttttctggagatacttaatgatcactcttttcgtcattatggatacagcagtgaaaaagaaaaatgaagcccctgtggttttggagttacttcctagtcaagggagacagataacctggtccccgcccacagggagctggcagcctgatgggggccctaagggtgcaactgtacttccccggggacaaagacagcgctaccttgggcagtgggtgggatgtctaattctgcctgtgggtctggggaaagaaggaagaagagacactggttaggtaggacttttctaggtggagggaagatggagaagagtacttagacaaaaggaaggatgtgtgtgcaggaagctcccaagaacggtatgcatacggtgtattgcggaacctcgtgtagcttcatgtcactttccttccctctcccgttgttgctgtcaccctgttcgtagaaagtgagtgctctttcctcaaagattcccctcagctcacatggggacaggtatttttggagcccctggctggcatgaagcatgggtctgcaatggtagatccatgtttgccagcctggggactcccacaccactatcctgagactgacccctgggccatgatttcctttcagccaccggaaccccttgatccggaaatacgcggctgagcacctctcagctgtgctggagcagatcggcgctgagaagcttctctcgggcaccagagacagcacagacatgttggtgcacaacctggtgaggctggcacaggactccaaccaggacaccagattttatggccggaagatggtgaatatcttgatggcgaacactaagtttgatgcatttctgaagcaatctctcccatcttacgacttgcagaaggtcatggcggccattaaacagcagggaatagaagataatgatgaacttccctctgccaaaggccgcaaggtgttgaggagtctggtggtgtgtgagaacgggctgcccatcaaggaggggctcagctgcaatggcccaaggctggtggggctgcgctccacactgcagggccgcggggagatggtggagcagctacgggagctgacacggctgctggaggccaaggacttccggtcccggatggaaggcgtggggcagctcctggagctctgcaaggccaagacggagcttgtcactgcccacctggtccaggcttcaggattccaacaagaaagtgaaccagtgggcgctggagtccttcgccaagatgatccccctcctcagagagagcttacaccccatgctgctctccatcatcatcactgttgcagacaacctcaactccaagaactcagggatttacgctgctgccgtggctgtgctggatgcgatggttgagagcctggacaacctttgccttctaccagcgcttgctgggcgagtgcgtttcctgagtggccgtgcggtgctggatgtcacagatcgcctggcagtgctggtggcctcagtttacccccggaagcctcaagctgtagagcggcatgtccttcccatcctctggcacttcctgaacaccgccaccaggaatggcgccctgcctggacccagcgggaacatccgcggggtggtgtgccggctgtccaggagcctccaggagcacatgggctcccgcctgctggactttgccgccagccagccaaagcacgtcctcaagacgctccaggaactcttagactcagagtccttgggaggcagccgcaaggccactgacagaggggtggcccctgacagcaagacaactggcagctcatacccttttcagctggattaaagatggatctgaaatgggcaattattatttatcttatttttttgatggactattctcctggttactttcccccttagagttccagatgtacatggtatattttgaagtagaaataaaagaattacttatttttct

SEQ ID NO: 5045 - protein, 214 aa, Homo sapien
MLVHNLVRLAQDSNQDTRFYGRKMVNILMANTKFDAFLKQSLPSYDLQKVMAAIKQQGIEDNDELPSAKGRKVLRSLVVCENGLPIKEGLSCNGPRLVGLRSTLQGRGEMVEQLRELTRLLEAKDFRSRMEGVGQLLELCKAKTELVTAHLVQASGFQQESEPVGAGVLRQDDPPPQRELTPHAALHHHHCCRQPQLQELRDLRCCRGCAGCDG

SEQ ID NO: 5046 - DNA, 891 bp, Homo sapien
gggacagagtgatcaaggcagagtgatctaaaggacacagtagtacttctttaggaccctggcagaatggaagagagcatctggcttctaaggcactgcacaaacttgaatgatcttcttcagaattgacaaggaaaggccatgttatgttcaccctgggttaagttttaagtgtatcttatttaatttttttcaatatgagtcatctccagatactgtgatgatttccaaataaccagaatctagatgactagaaatttactctagctggctttagacaggaagcgtgaggacagaatccagctgcttccactccagggtaggtctgaagccaaccgtcctcggtttcctggcctgtggcatcagtctggttggattacacacaaagccctgcagatctgctgcttttcctgattctcctgtcctgagtgagtgcaaggggctcccctgtcgccgatgtgttctttgaagcagatgctgtgcctgatacctgctggagagtcccaccgccttgagcttctgggtcgagaaaggccaagttgcacactactgagagactgccatgcaccccctggaggcctcagaacattcgacatgctccagtcatggccacggcagtgactgctgattgcctaaccccacatgtgttctcccccttccctgataatcaagcccctgattttcagctgggcacaaaataattcttcctagaacaactccacgtgtgttatcgcccttgcagctgggggtggccaccactggggagaggcagggtgaagaggtcgaaggagcctgagttagcagggatgagcagtggccaggtaaccccagacccattatcctctggatttcttttatgtgaaacaataaaatgtcttgtattcgaaaaaa

SEQ ID NO: 5047 - DNA, 1051 bp, Homo sapien
gacccacttgtgtaatacttaattgcctgtgtttttacaacacaagtcagaagttctggcgatagtggactatcacccaaaaaagattttctgagacatctcatcagagctgctcgagtaccgcgcatgaagacggtgttagctctgcagggcatgtgctaactaccagacgatgaaagaacatttcctctagtttctggataatgagcaggcacacaggtaaagatgcctttctcagggttgacgccttttgtttcctaatgattctgatgattttgttgaactagacttttaaatattaattgttacctgcatatgtttgctgttgtggtttgcagagggctcagaggaacaagcattttaattggtatcctgggactgtaataactttttattaaaagtctggaaagatagtaatcaaaaatagactctcatctctatcttctctgtgcccctggcaaatatcctcttcattaattttgtttttattatttgccgtcaagatggttatctctaaatatcagatgcttcaatccacagtgataaccatgtgtgaattaatgcttgataagcttcaggttatcaggtggagaagtgtggttaaggcatacagaaagaaaaaatgcacagaaggaaagggatagcaaggggatactgtgccttggtaagcgtggtgccaccgcagactaaaagcagatataagtcaagtgctactgacttaagtttggcaaaatcactcctcacagcccgctctgttttagaaatgtttatatttctgatatcacttttgttaatttgaagaacttttaaaataccatcattgtttcaaaacaaaatgtggaaggtgtggatcaccttcctgaatttacagaaaagtttttgggtacatttctttgcggaagattggctgagatgtggttcacggcagggtggtgcccgtgccttgcggatcacgttgtctgtacactgactgacataccaacttagagtctttgaaaatgcccattggtaagtcaacattgttttccctgaaagtcctgagacagaaaaa

SEQ ID NO: 5048 - protein, 17 aa, Homo sapien
MPIGKSTLFSLKVLRQK

SEQ ID NO: 5049 - DNA, 744 bp, Homo sapien
atcaggttcaacgcagtgactgctcagtagaagccatggctcgcagacactgcttctcctactggttactggtatgctggttggtggtaactgtggcagaaggacaagaagaggtatttacgcttcctggagattcacaaaataatgcggacgctaccgactgccagatctttacactcacccctccacctgccccgaggagtccggtcacaagggcccagcccatcacaaagacacccaggtgtcccttccatttttttccacgaaggcccagaatccattttaggtttccaaacagacctttcgtcccttcaaggtgtaaccaccgttttccattccagccattttattggccacaccgttaccttacttataggtatttccccagaagaagactccagagaggaagctcatctgaggaaagctgagagggaagagaaacccaaacatactgaagcaaaaaaaagcctatccttcagaaaaaagcaacaaaaagatttctgttttatctttcgaaactaaaactattggatttgaagattaagtatcctaaacatcactgactagaaactgttctctttgtcagcagtgaagatattggatcataggttattgatggttgcaaaattggacaataaccacgttatttttatcctcaacctcttatggtcacaggatatttatgcaaataaaatctttaaatgggaaaaaaaaaaaaaaaaaaaaaaaaaaaaaaaaaaaaaa

SEQ ID NO: 5050 - protein, 130 aa, Homo sapien
MARRHCFSYWLLVCWLVVTVAEGQEEVFTLPGDSQNNADATDCQIFTLTPPPAPRSPVTRAQPITKTPRCPFHFFPRRPRIHFRFPNRPFVPSRCNHRFPFQPFYWPHRYLTYRYFPRRRLQRGSSSEES

SEQ ID NO: 5051 - DNA, 2408 bp, Homo sapien
  Unsure 473-507, 768-1062, 2175-2286: Unknown base
gttcttcctttccttgtctctcagcaaaatataatcatcttagaaattttcctctcttctattgtctattctatccacatatctagcttatttcctgttactgggatttgcctatgtttttctataccttacttctgtaaaattggtgagtttttctatttatccctctttctccttagttaatgaggtaccctaaagcactagcacttaggaattagtctacttgtcagcaagagcgatctattaacaaagggatatgtaagaaacaggagaactaaaacaatcttgtggaaagggattattttctaagcgtgtgtctactatattagtttacttccgaaaaacatcagttacttctcataaatccatcctgtgtttaagaacataaaatatagtgtggataacaaatgcaaagcatgcaaattttcaggtaatcaggcgagccattacttacggcacaggtgtgccgccannnnnnnnnnnnnnnnnnnnnnnnnnnnnnnnnnnctactcaataaatagagagcataggtgaaagaaggacctaatacagaaatttttaacttttcctgatactgtttcaactttcttttgaatgtctgatttaggctgccctagtcatccttggacgttatccttgggtgattcaattagtagcaaattgagttgattttcaacttctccattaatgtgcaggacctgaaatcaaagcaaaagtgtgctgttgagggaaatgttttgtcacctaggagataagtcaagctgtgnnnnnnnnnnnnnnnnnnnnnnnnnnnnnnnnnnnnnnnnnnnnnnnnnnnnnnnnnnnnnnnnnnnnnnnnnnnnnnnnnnnnnnnnnnnnnnnnnnnnnnnnnnnnnnnnnnnnnnnnnnnnnnnnnnnnnnnnnnnnnnnnnnnnnnnnnnnnnnnnnnnnnnnnnnnnnnnnnnnnnnnnnnnnnnnnnnnnnnnnnnnnnnnnnnnnnnnnnnnnnnnnnnnnnnnnnnnnnnnnnnnnnnnnnnnnnnnnnnnnnnnnnnnnnnnnnnnnnnnnnnnnnnnnnnnnnnnacagtagccctcattaatgggaataaagtatcatctgagagtcatcccaaagcttactccctcgttgagccgatgggctgactgagactctggaacccacgggtcactggggtgtgttagtgctcactgaggagacagagctgttgcaatactgagttcaagcagcacgactgactcacataatgtgaagtgaaaccagacagagctccgaacttggtaccttgggtagcaaaggcggcttccaatgatgattctataccggtgaacaaagaaaaatttgctttgagaagctgagaaaatcgagctagacggcagtgaagtaaaggcttctcttgcaaaatctgagtgccgatctgtgatgggaaaaataacttccagataaagcaaaagttgatgtggacaccagtacccagtaaattactgtgaaaaaaaggcaacttctcttggtccagtttacctttagataaatgttttaagggtaaaaatatgtgtatttcaagatatgtcttatgtaaacttttttaagttatgaaaatcatccatattgaaaaatagaatgttttctattttgaaactgttttgcattgtcagttacttaagcagcctattttacattttggtttttgagaacataatagggacctgtatactccttgtggggccgctattttaagactcctgacagctcatcctgcaaaattaaaatccaaaatctaagtcgcaaaattctcttttctccttcctcagttatttacttagagtgtagaacagacatcctcttagagttttttgtaactatcagttatcattaacatcatatttttattctaaatccttccatagaaacactgcttgtggaaaaaaaaaaggcttttacttggtttcaccattgtacagagggtaaatgaaataactttcgctgaatattgggtctataatactgttacatttcctctattattttaacatctttgtgaaaaattcaaatttttactggttcattcacatatcattttaaattggaggtttagttcacatacgatgaatgcacagctcgtaggtatacagtttaacgacttatgacagtggtataaccacaagaccagcaacatnnnnnnnnnnnnnnnnnnnnnnnnnnnnnnnnnnnnnnnnnnnnnnnnnnnnnnnnnnnnnnnnnnnnnnnnnnnnnnnnnnnnnnnnnnnnnnnnnnnnnnnnnnnnnnnnaccaactattatttaacgtcatgtaaatgcaaatatgtagtatacaatcttctgtggctggattttttttcactcaacatttttttgggagattccttcatttggttgcatgtatcagtggt

SEQ ID NO: 5052 - protein, 111 aa, Homo sapien
  unsure 12-110: unknown amino acid
  Unsure 473-507, 768-1062, 2175-2286: Unknown amino acid
MFCHLGDKSSCXXXXXXXXXXXXXXXXXXXXXXXXXXXXXXXXXXXXXXXXXXXXXXXXXXXXXXXXXXXXXXXXXXXXXXXXXXXXXXXXXXXXXXXXXXXXXXXXXXXQ

SEQ ID NO: 5053 - DNA, 333 bp, Homo sapien
gagccactttgcccagcccatttgtatatctcctttggagaatatctaggttcttttgaaggtagctgtatataaactagccaaattaacagactgtggtttttagatggctttccatatctacaagaactatttagttctcaaaactgggaagaaatgtttcagaggcatcattaattcataatctaaaaatttatcttgggtttccttttttcccccagattctgtatcctccatagtcctattcatgacatgggtcgttcatctctgtattctaaaccctcaatgaactgtagacagtaataaatatttattggatgaatggtctctcat

SEQ ID NO: 5054 - protein, 24 aa, Homo sapien
EPLCPAHLYISFGEYLGSFEGSCI

SEQ ID NO: 5055 - DNA, 5010 bp, Homo sapien; identical to SEQ ID NO: 1609

SEQ ID NO: 5056 - protein, 760 aa, Homo sapien; identical to SEQ ID NO: 1610

SEQ ID NO: 5057 - DNA, 2629 bp, Homo sapien
caggcctggaggagaaatgacatctctcagccctctcagctgcaccggaccaccaacagttgtgattcaatgggcatgaattgctgtgtgatgctggggaggtgtttgtgattcttgacaaagtcatttgaatccatcacttcaagagagtgaaaggagccccgtctgatctgttggtgttgtaggaagaaacatgagtcagcaaaacaccagtggggactgcctgtttgacggtgtcaacgagctgatgaaaaccctacagtttgcagtccacatccccaccttcgtcctgggcctgctcctcaacctgctggccatccatggcttcagcaccttccttaagaacaggtggcccgattatgctgccacctccatctacatgatcaacctggcagtctttgacctgctgctggtgctctccctcccattcaagatggtcctgtcccaggtacagtcccccttcccgtccctgtgcaccctggtggagtgcctttacttcgtcagcatgtacggaagcgtcttcaccatctgcttcatcagcatggaccggttcttggccatccgttacccgctactggtgagccacctccggtcccccaggaagatctttgggatctgctgcaccatctgggtcctggtgtggaccggaagcatccctatctacagtttccatgggaaagtggaaaaatacatgtgcttccacaacatgtctgatgatacctggagcgccaaggtcttcttcccgctggaggtgtttggcttcctccttcccatgggcatcatgggcttctgctgctccaggagcatccacatcctgctgggccgccgagaccacacccaggactgggtgcagcagaaagcctgcatctacagcatcgcagccagcctggctgtcttcgtggtctccttcctcccagtccacctggggttcttcctgcagttcctggtgagaaacagctttatcgtagagtgcagagccaagcagagcatcagcttcttcttgcaattgtccatgtgtttctccaacgtcaactgctgcctggatgttttctgctactactttgtcatcaaagaattccgcatgaacatcagggcccaccggccttccagggtccagctggtcctgcaggacaccacgatctcccggggctaacggaaggacatcctgttcaggggaagaaagccctggccctgaattctggtaacggatatcgcgttccagggttttgatgtggtgggatgatccgcaccatcttcactgatgtgcttccctttgatgcccattgagtgccagctttgctcattataccccaaagaccttttttccactgcccagacagcttataccacccagtgttcagggatctctgaagaacccacagaccaggtgaattactgatttctaagtccaaaaactatagagcagaagaattgagaaagagaatgagaccatgtcaacaaggctgtttccaactctccccattttcctgttcgactgggaggttctggaaagaaagagagagagagaaaagaggtggatggagggaagggtgaggaagagagcgtcaatgaaggggtggaagtggatgtggaggagtgaccagaccagaccagaccagaccagagggatcggaggctcaggccccctgagctgggcctctaagaaccacagccacagagtcaggctctgcagacccagaggtaaggctgcctggctgccccaaaccccagacactcctctccttgcctgcaggctgccctctcccatggccaccctagacagagacaccacccgtgatactctgagggagccagactttcacatgcaacggggcatttggggctggttcgggtcagtgtctacgggtggtggatttagtgaccaccctcctcccacttctttctctgcacgaggagttgggagcctgcctggtggagttgagtgatgcccgtcatgtgcacttgggtctaccaatgtgcttaaggccagatgggcttcctaagagacaagggtgggtggacctaaccaactatcatccccagcgatgttcaaacataaaatcttatctatgtgcagcatgactctctccaggtgacagaaagggctctagacagctgagaggacctgatcatgtagggagggacggggaggggagccaggacccaggagctgcatggctgtaagaggaaggtccttggagggtatcagcagtctcagtgtgatgtgacaactatggacctgtgggtgtgccctggggacccctgacccatcccaaaacactgtggaaagaagggcctcttctccgtggggacccgtgtctgtgggagcgggcacaggtccatgctgcaggccactacggctgctcggcaggagggccgagagtttggacccacatagctgcaacccaagctggcccataatcagcagtggggcccagcagcacaggaggggcggacggttagctttggaaaaaatgacttgattaatctgattcgccaaataaatagattcatgtgatgccttgtgaaaaaaaaaaaaaaaaaaaaaaaaaaaaaaaaaaaaaaaaaaaaaaaaaaaaaaaaaaaaaaaaaaaaaaaaaaaaaaaaaaaaaaaaaaaaaaaaaaaaaa

SEQ ID NO: 5058 - protein, 319 aa, Homo sapien
MSQQNTSGDCLFDGVNELMKTLQFAVHIPTFVLGLLLNLLAIHGFSTFLKNRWPDYAATSIYMINLAVFDLLLVLSLPFKMVLSQVQSPFPSLCTLVECLYFVSMYGSVFTICFISMDRFLAIRYPLLVSHLRSPRKIFGICCTIWVLVWTGSIPIYSFHGKVEKYMCFHNMSDDTWSAKVFFPLEVFGFLLPMGIMGFCCSRSIHILLGRRDHTQDWVQQKACIYSIAASLAVFVVSFLPVHLGFFLQFLVRNSFIVECRAKQSISFFLQLSMCFSNVNCCLDVFCYYFVIKEFRMNIRAHRPSRVQLVLQDTTISRG

SEQ ID NO: 5059 - DNA, 975 bp, Homo sapien
gctaagttgccatgacatgtagatttaaaagataaacataaaaataacttatatttattatcagtcatggattccaagattatttatgagaacttccaatatacctggcccaggaagaatatggctcctaacttaggggatctcaccagccaatgggaaagactaagcagatgtgtttactggcaatacattctgatgagggacacctaatggtgagtagagggtgcgacggctcctagaaagagtcaaagattagagaagttcatcaggaaaaaacgataaagtttccatcaggagaatacaccctagtaaaggctcaaagtctaaagagtttaaggacttctagggactgaaaaaattctgtataacaggagggaaggtgggtgtggaagaatagccaagaaggaaaaatagccaagaagtcagtggaaggaacattgcatcataggccttgctgagaaattggaatgaatgacagtatttgaataacgctttgctcagttctgtagtttcgattcgaaatgcagacttaaaaagtcgatgaacattcagacatttctctttaaacaagacttccccttctattctttagagttggaaattattctctgcttgggaatagttttcaatatgttccagacattataaatgacttcccttctatttccatgtatttcccatgttgattacagccaggctgatcagagtaaagcaccaggtgtcatagcatcctaatattatatgaatcatgcatttatccattcatctatgcatgtatccagggaaaacagatttttccccctactttatcggttctacagattcagattcctgtatatttaggtaacattccaaggggatagatgtgctcttataaaagactgcttacttcagcaagacagtttctaaaccctttacttttgagaacaattctccaggtattctcgggggcggtgggggcagaagggaagcaaa

SEQ ID NO: 5060 - protein, 37 aa, Homo sapien [sequence omitted]

SEQ ID NO: 5061 - DNA, 703 bp, Homo sapien
  Unsure 99-116: Unknown base
agagaataagtggttgaaagtcaacatgcctagacaacccagcaaactagaagacaccataagaatgcgtaattattattctttatatgtttataacannnnnnnnnnnnnnnnnntaacagctcaagacgcaggtagtatagtaatttttgccccatactgctgaatgttttgcctggcaaatactgggaatggggcaattcctgtggcagttttgttttccaataattgttttttcttatatcggggatgacaaatgcttgtcacaaagagtagccttgttgattacacttataaatcttcgggagacttcttcaatgagtcagtgttagagctttcagtttccataaatgcagatttcctttactcagttttcttttaaacatgagctgatctttcttagtttgcactataataccctccactgaagtctcactgcaactgcttttaagtatatgtgaagagaaactagccctttgctaaaatagttgcatgtttcacgggccagtgagtcatttagtcatacacttaagaactttccacctttcaagtgtttatcatcacctcggatttcacggcctaatgccagtcaatttcatggggcatagaagccctgtacgtattagtttgggccattattgtatcagtcttgtttattcccagaaaagtcttatcaagaaaagagggagtgactataatcaga

SEQ ID NO: 5062 - protein, 69 aa, Homo sapien
  Unsure 99-116: Unknown amino acid
MFHGPVSHLVIHLRTFHLSSVYHHLGFHGLMPVNFMGHRSPVRISLGHYCISLVYSQKSLIKKRGSDYN

SEQ ID NO: 5063 - DNA, 4312 bp, Homo sapien
  Unsure 3536-3560: Unknown base
gtgacacgtaagttgggcaggaggtggcggggcggcagaggcaccagccgacccgtcagtgacaccgctgtgccgtccccaaaaccagccgagacagctggcccccacccttccacccattgggcaggccgcacgggggcgcggcccggagtcctggtccctttgttgggcgcgcaccccctcccttaggtggcaacaaagtcgtgcagtgggagccgccgcgatagggcggggagtggccagggcgggactccaagaactgcccgggggcagcggggccaaaaagtgggaagaaggaaaaaaggcaggaggcatctggggacaggcgcgagggcagccggctctgaagtatgcggagggcctcctcccggccccgggcattcgcggagaacgagcctcgcagaagtttggctgcagctgcccgggcggcgtcgatggctgcgcgccccgcgccgcgcgggggctgagcgggcgccacttcccctccgggccggcttttgtgtctggcatctcctcctcatgctgcgtctggccacctactgcggcggccgctgctgagacgctcgctcggaccaaggggaggagacggcgggggcggccgcggctttgggtccaggcgggactatgggaaacgggatgtgctcccgaaagcagaagcggattttccagacgctgctgctgctgaccgtcgtgttcggctttctctacggcgcgatgctctactacgagctgcagacgcagctgcggaaagccgaggcggtggcgctcaagtaccagcagcaccaggagtccctctccgcccagttacaagttgtatatgaacacagatcaagattagagaaatccttgcaaaaagaaagacttgaacataaaaaagcaaaggaagattttcttgtttataagttagaagcacaagaaacattaaataaaggaaggcaagattccaatagcagatacagtgcactgaatgtccaacatcagatgttgaaaagccaacacgaggagctaaagaaacagcacagtgacttggaagaggaacatcgcaaacaaggggaagacttcagtagaacatttaatgaccataagcaaaaatacttgcagctccagcaagaaaaagaacaagaactttctaagctaaaagagactgtatacaatttgagagaagagaatagacaactaaggaaagcacaccaagacatacatacacagcttcaagatgtcaagcaacagcataagaatttactctccgagcatgaacaacttgtagtgactttggaagaccacaagagtgcactagctgctgcacagactcaagttgcagaatataaacaactgaaagatactctgaataggattccaagccttcgaaaacctgatccagcagaacagcaaaatgtgacccaggtggcacattctccacaaggttacaacacagcaagggagaagccaacccgagaggtgcaggaggtgtctcgaaataatgatgtgtggcagaaccatgaagcagttcctggaagagcagaagacacaaaactctatgctcccacccataaggaggcagaatttcaggctcccccagagccaatccaacaagaagtggaacgcagagaacctgaggagcatcaggtggaagaggagcacagaaaggccctggaggaggaagaaatggagcaggtcgggcaagcagaacatcttgaggaggaacacgatccatcaccagaggagcaggatcgggagtggaaagagcagcatgagcaacgagaagcagccaacctcctggaagggcacgcgcgtgctgaggtgtacccttcagccaagccaatgatcaaattccaatcaccctatgaggaacagttggaacagcagagactggcagtgcagcaggtggaggaggcccagcagctgcgggaacaccaggaagctttgcaccagcagaggctgcaggggcacttactacggcagcaggaacagcagcagcagcaggtggcaagagagatggccctgcagaggcaggctgagcttgaggagggccggccgcagcaccaggagcagctccggcagcaagctcattatgatgctatggataatgatatcgttcagggagcagaggaccagggaatccaaggagaggaaggagcctatgaaagagacaaccagcaccaagatgaagcagaaggagatccaggtaatagacatgagcctcgtgaacaaggaccccgagaagccgacccagaatctgaggcagatagggcagctgtagaagatataaacccagcagatgaccctaataatcaaggtgaggatgaatttgaagaagccgagcaagtgagagaagaaaatttgccagatgaaaatgaagagcaaaaacaaagtaatcaaaagcaagagaatacagaagtggaggaacatttggtgatggcaggaaatccagaccagcaggaggacaatgttgatgaacagtaccaggaagaggcagaagaggaggttcaggaagatttgactgaagagaaaaaaagggaactggagcataatgctgaagagacctatggtgaaaatgatgaaaatactgatgataaaaataatgatggagaagagcaagaagttcgagatgacaaccgccccaaaggccgagaggaacactacgaggaggaagaagaggaggaagaagacggggctgcagttgctgagaaatcacatcgaagagctgaaatgtagcggcacccaatttctagacaacgctcagccaacggattcttttcaagctgctcaaacataaatctgcctactgaactctaggatatttaattacaaaaattaagaacttagacttttttaaaacttttgtattagaaatgcgcatacatttatatgaatatattttgataacgtaggtctagagcttcttttatattcaagctaaacatgaaaaagaagaaaaacaataaagtaaacctgagcccccacgtcccaatttttttaatagattatgtgatgttggaaagctcattgattttgtatatgtttcagcgtgttacctttctggcttccagttcccaggtgttctttgtttgcctttgataaaatacaggatttaagaacagagagtactgcaaaatgccatgcagactttaaagagaatggcctgtttactaattgctgcccttctgatgtctttatgtatagctctgatagaattttcaccagtctatgtatctctggagtgagatctatgtacaaagtgacatacaattggaaatccatttttgttgtaaagacattgtttttcagacttttcagatcaattagaaaaatgtcattgctttaaaatcatagctgttctgtttaagaggaattgaatttaaaaatgagagagtattaaaactcatgtggcagtatcctggtcttaatcaggtattgcagtgttcaaacaaggtatggacacatcaacatattcaccttttggaaggactagtgacttggttaaaaactaatgagtgtttgcgtgtggtgtttctatgcgagcacccattctcaannnnnnnnnnnnnnnnnnnnnnnnngaagccattgattgatattcttgtttcagtgtctggttccctataagtaatatatatttcctctttaagctctgtgcctcaatatgcaatcactttgataataagtataaatatgaagacataccaaactgcaaataggattatttttcaaaactatatggtgaaacatatggtgatatgatagacttatggtttttctgtttgctgggattgggtctgctttttgcctatgtgtaaggcattttaatcattgtgaatataatagattccttaaaataagaaaattaaaaatcagaaacttcccttggagtagagacatttcagttgcaagcataaagatttttaaatatataacactaggttatataattcatatatgtgtggttttgtattaataatcaaattaataaaaacatttcattttctaccattgtatgaacgtaattttattttttaataaccacactcatagatggttttgattgttccagttgagtgattgtgtatgtacgcataggaatgttttgttcagttgtactttgtatttccaataatcagaaatcttacctttatgtataaaaacccattatgtaatgtaaaatgtataatattgtacataatattcagaatacaattattttggtaaattagcttgtatttttaatgtcccagttgcagtatttaattatttgaaccatactgaaagttggtaatagtcaataaagctaaaaaaaaaaagtggcaaatctttt

SEQ ID NO: 5064 - protein, 696 aa, Homo sapien
  Unsure 3536-3560: Unknown amino acid
MGNGMCSRKQKRIFQTLLLLTVVFGFLYGAMLYYELQTQLRKAEAVALKYQQHQESLSAQLQVVYEHRSRLEKSLQKERLEHKKAKEDFLVYKLEAQETLNKGRQDSNSRYSALNVQHQMLKSQHEELKKQHSDLEEEHRKQGEDFSRTFNDHKQKYLQLQQEKEQELSKLKETVYNLREENRQLRKAHQDIHTQLQDVKQQHKNLLSEHEQLVVTLEDHKSALAAAQTQVAEYKQLKDTLNRIPSLRKPDPAEQQNVTQVAHSPQGYNTAREKPTREVQEVSRNNDVWQNHEAVPGRAEDTKLYAPTHKEAEFQAPPEPIQQEVERREPEEHQVEEEHRKALEEEEMEQVGQAEHLEEEHDPSPEEQDREWKEQHEQREAANLLEGHARAEVYPSAKPMIKFQSPYEEQLEQQRLAVQQVEEAQQLREHQEALHQQRLQGHLLRQQEQQQQQVAREMALQRQAELEEGRPQHQEQLRQQAHYDAMDNDIVQGAEDQGIQGEEGAYERDNQHQDEAEGDPGNRHEPREQGPREADPESEADRAAVEDINPADDPNNQGEDEFEEAEQVREENLPDENEEQKQSNQKQENTEVEEHLVMAGNPDQQEDNVDEQYQEEAEEEVQEDLTEEKKRELEHNAEETYGENDENTDDKNNDGEEQEVRDDNRPKGREEHYEEEEEEEEDGAAVAEKSHRRAEM

SEQ ID NO: 5065 - DNA, 1294 bp, Homo sapien
cgcggcctttcgggcgaaagttaggaggggccgggctggcgggcgggcgggttccgggggctcctttccgcaccagcggcggtcgctccccgtgggcgggacctcgggcgtgatcgtcgaggagaccgcggctccctcacctgccggcttgttcctcggggtccgcggagcgagcccagctctcggcgcgtgtcggagtctcccagccccgcggccccgagcgcacgatgcgcggacccgggcaccccctcctcctggggctgctgctggtgctgggggcggcggggcgcggccgggggggcgcggagccccgggagccggcggacggacaggcgctgctgcggctggtggtggaactcgtccaggagctgcggaagcaccactcggcggagcacaagggcctgcagctcctcgggcgggactgcgccctgggccgcgcggaggcggcggggctggggccttcgccggagcagcgagtggaaattgttcctcgagatctgaggatgaaggacaagtttctaaaacaccttacaggccctctttattttagtccaaagtgcagcaaacacttccatagactttatcacaacaccagagactgcaccattcctgcatactataaaagatgcgccaggcttcttacccggctggctgtcagtccagtgtgcatggaggataagcagtgagcagaccgtacaggagcagcacaccaggagccatgagaagtgccttggaaaccaacagggaaacagaactatctttatacacatcccctcatggacaagagatttatttttgcagacagactcttccataagtcctttgagttttgtatgttgttgacagtttgcagatatatattcgataaatcagtgtacttgacagtgttatctgtcacttatttaaaaaaaaaacacaaaaggaatgctccacatttgacgtgtagtgctataaaacacagaatatttcattgtcttcattaggtgaaatcgcaaaaaatatttctttagaaacataagcagaatcttaaagtatattttcatataacataatttgatattctgtattactttcactgttaaattctcagagtattatttggaacggcatgaaaaattaaaatttcggtcatgttttagagacagtggagtgtaaatctgtggctaattctgttggtcgtttgtattataaatgtaaaatagtattccagctattgtgcaatatgtaaatagtgtaaataaacacaagtaataaatgaaaaaaaaaaaaaaaaaaaaaaaaaaaaaaaaaaaaa

SEQ ID NO: 5066 - protein, 182 aa, Homo sapien
AAFRAKVRRGRAGGRAGSGGSFPHQRRSLPVGGTSGVIVEETAAPSPAGLFLGVRGASPALGACRSLPAPRPRAHDARTRAPPPPGAAAGAGGGGARPGGRGAPGAGGRTGAAAAGGGTRPGAAEAPLGGAQGPAAPRAGLRPGPRGGGGAGAFAGAASGNCSSRSEDEGQVSKTPYRPSLF

SEQ ID NO: 5067 - DNA, 4988 bp, Homo sapien
tacccagcacctaataccttttaacataagtattgcattaagattttctcttctctttgtagcttaggatttcctggaagctggctgtctatcagtgtgtgttaagtgtgatgcttccataatacatttggatgctgtcagctaagttcacttctgaactaaggggttcctccaaatgttggctgaaattcatcccaaggctggtctgcaaagtctgcaattcataatggagctactgtactggctattggaaggaggagattctgaagataaggaggtaatattatctcttttaaaagaatactttcctctgtaatcctgaatctttattacatgtaagaactttgtgcagtagacagcaatttctttgaatttggtatatggaaacaattttattttcctctgctaagtttttgagcctgcctcttctagtgccatggactgcattggtagagctgagaaatatcatttagccatactcagcacccttaaaatagcttctttctgagaattagatctgtgaaggtgtcctgcacagttcttgtagatgtcattttagtttgtggttgacgtgcatgcatttagcatgttgcttaaccgtcctcattcgcctcccagttctttgttgccttcatttggggggatgtgttttctgctggatgatttactgctagacatgaccaaactctgagtataagacttggtgtttggcagctggttccagtgctctgctgagaagtagttgggcccagcctggggcattgtagtgtcctggaggccgggagctcctgcacaggggttcttttcctggttcagagccttaggtgcctttccacttttcacgtaatcttttcctaggttggcttgctgcttactttgcagctgttgcagggattcacatggaatggagggctcccttttattgtggattatttctttgataatttacccatgtgctttttcattttcaaaaacccagtggtgtttaagaatgaaagattcttgaagaacaaaaattgggttaaatttgtatctatcagaaaagattctatcctctgatgctatgtaggcacattgaatatgcaggctaaattaaaaacagagtaaaacctttttataatatgccaattactatatctaagaatgtttatacaggctgaaattttgtaatggtatttatatctgttttcctttttaaggaaaataatatacttttctaggcatcaaaaatatctgcccctttcactaatgctgatgtaccacttcccccaaccccaacgctaaatttgactggcttaaaaacatctgccccctgaactatatctggggaggaatattaataaaacaatgaaggacttcatggtgtctagttatataattaggaaattggttagaaacgtggctaaaaccagtttctttcattaaaagaactagtgtacatttaaaaacaaaaacttcaggaaaaagactctttgatctttaagtcaaatagtatttttggttaacacagcaggaaggggaaatataccaatttcagattcttttatttatgcctaagtagaggttgtaagcagctaaggaagtgattaaaatgtagtctagtaaaaaatggtgctgattacttggaaagcagtttacatttgcaaaaaaattcagtattatgaccttcaccaacttttacacatcatatacttgggttattacttatggtatagcttgtgtatggaatgcaagggtattttcaaattgactaggtcttgctggtcatcttaaaatatgttacaatattacaaaattgaaatgtaatattttttaatagaaggaaaatataaatttaatatctgggcaattgagacctttaaacttactttaaaagtatgatcttgatgtatatgatactgttttgtctttgctatattaacagaattagaggggtgttctgcaattcaaataccttatatattccaaattttattctctataatggacttttaaaataaaaggtatatgtgcttcaagagggcaaaatttgaatcatgagctaatttgctaagcatcagattatagaaaagcatccttgattaatttggaactgtgaaagggggcgggtaaaactgttttctgcagaaatttactagtgcagcaaccatttaaattaaatgtttgttaacataatagtgatggcattttctcctccccctccttgtggtttgtccaactagatgttacagtggcagttgcactgactgttaagtgtttaaatgatgacaccattatgtgaagtgattttgaaatgagagattccagccaagaattacatctgctcccatctccttcaaatcatactctctggcagtacagattatgattgatttgtttgtgacagattgcaggaaacagtcattgatttttcaatattttaccttaaaattatttacagttgtaaccatggggaggtattttcatgggctgtcagcccctgaaagactaggataatattccctgctctctgacaagacaaattacctgtaatgagtgcagtagctgaagggtatacttttattttaaaatatgtcaataaccccagtgactaaacgaatattgatttagcataatgaagcctgagtaacgtgaaaatgagctttttcaaggggcatggtaaagtctttctttttagctggttgtaagaagcttttgattcttttcagccagctggtaggaatatagaattttataagcaaaccatcaggaatgatagtgttgtttctgataagcaacatccaaatattttgaccctgcttttagtggtttttttcaaatcttattttgagtcttacttttagtcatagaatagctactgatttgatgcggtctttaactgacttaatatttttacaatttcaatatattttgcattggaatctccagtaatgaatattaaaatatatgtacaatcatttgtagatgatatcaattatattaagacatttcagatgggctattgtagtatttaatgtgccgtattttatggtagaataattctcagtctctggacatcaagattgctttcagtgggaatgaagattaatttacttcagtcctgattttttaggcatcaatgcatgttttcatttttgtcagacttttaccctcttttaatgtaattctcaacttcttatggatttacttcccaatacataaaatccttcaaaacaagaatgataataatttttatactttttataaaaataaatttatttttagtccatcaaggtgtctgaagattttatgcctaggtatctccatatctaacttgataaggaaaataggataaacaatgctggtaatagcaggaaagtaagtatttgaataagatgtcaaactgatatttcatgtgaacctaactcattttatggtaactaataattatcttatttaaatcaataggtaaaacctgtttagaaattaaaaatgagttacgatttaaagaaaattcagatgactcattgtgagtgctagttctcttgtaggatgccactggaaatgttgaaatgaaaaatgtaagtatatcttttggtggaaaaaaggatagtctctaggacacaaaattactgttttatttttttctcaggagtttgcctaagggtgtgacagatgatctctgtcacttgtcttagttgtgtcctgcaataaactggatgctttataaaatactagacctgtgatttcgtatgctgtaatatttcatttctccatcacccctccaaattatttcttagtttggagtaaaataataaatgtattatagtcaacatctcttgacccctctttagtttcagctaaactaagcatgtgtgtttgtgtgttcattttatagttcatgtgtagaactatgtgaattaaatttaagaaacatgtaaagtagaggaaatagttttctggagaaatttttcctttttggatattatgcccttttccattgcttttctctgcttgaaagcaaaaaaaagtaccctacccctgttctcctttagggaaaaactattcctataaagtatttttaaatcgtgcaagtcattgcctagggttagctaaaacatttctttttaaaaaggagaaaatgccctggctttaacattttcttgtatttgtatctattaagataaacagtttactttgatacagtacataccaatctacttaattttttttccaggattccttttactatgtttggtctgaccttttatgataacttaatatgggaacaaattagcatataattctattttccatgtgacctcaaccagttgcagaattgtaccactactttagggggggcaatttgacagtttatgtagactatagcattaattgttcccaaatgttcagtgcatcctggctaatgtgttattgaaggtgttttcacgtaagcagttagaggaagcacttcacccctattactaagttattaaaatgcctcctaaaggtagcattttaaattagtatacataattgattagtaatttgtcttctcccaagcataaaacagcatagcagagttaagtgtgaccagtgaagtataagatattagggattgatggtgacaatgatcatagcaactaaatggattttttttttcttttagattcagccgttggtctttgaaatttcctgtgatgtgtttcaatctagatgcaaagaacatggaaaaatcaaagtgctcgagtggtttaaatatgttttgggtattcctgtttatagactataatacttttccaattaaaatcctcagttgtcacgcagaagaaggttaagctgtatttgattgccagttttactgaaaatgcttagtattttacagtatcaccaaatatattttgtttagccaaggtataggaaaaataaaataaattgtataggttgacttttttctaaaatgtctttattggattgaatgaatgtttatacctgaaaaaaaaaggttc

SEQ ID NO: 5068 - protein, 21 aa, Homo sapien
TQHLIPFNISIALRFSLLFVA

SEQ ID NO: 5069 - DNA, 922 bp, Homo sapien
gggaggagaggtgagcccccgcccgggccaggccctctggccgcgccgtccgcccctctagtcgtgtcccctcgtgggccgaacggacgcggcggtgccccgcgcccgaccagacgtcccgtgggctagggcctgggcctcgggccgcgtcggcgccggtcgagcctctccgggtgtcggggttcggggcgggcgcgcgtgggcgtggctcctctgtccacgcctgttcccttcgtcgccgcggctctcgtccgggacacggctttccggagtagagcccttggaggtgttaagtgtgatgcttccataatacatttggatgctgtcagctaagttcacttctgaactaaggggttcctccaaatgttggctgaaattcatcccaaggctggtctgcaaagtctgcaattcataatggagctactgtactggctattggaaggaggagattctgaagataaggaggtaaaacctgtttagaaattaaaaatgagttacgatttaaagaaaattcagatgactcattgtgagtgctagttctcttgtaggatgccactggaaatgttgaaatgaaaaatattcagccgttggtctttgaaatttcctgtgatgtgtttcaatctagatgcaaagaacatggaaaaatcaaagtgctcgagtggtttaaatatgttttgggtattcctgtttatagactataatacttttccaattaaaatcctcagttgtcacgcagaagaaggttaagctgtatttgattgccagttttactgaaaatgcttagtattttacagtatcaccaaatatattttgtttagccaaggtataggaaaaataaaataaattgtataggttgacttttttctaaaatgtcttatattggattgaatgaatgtttatacctgaaaaaaaaaggttcaaa

SEQ ID NO: 5070 - protein, 42 aa, Homo sapien [sequence omitted]

SEQ ID NO: 5071 - DNA, 863 bp, Homo sapien
aggatgtagtgagctatgggagcacggagtgcactccaggtggatgacagaggtgggaccctacctctatgagaaatgttaaaatgtagaacattgataaaattaagtcagttattttaatctgaagccaagaacatgtagaatgttatgattagagtttatcacatattaatgtatactggcaaattgtgttactggagtatacccataggaggaataaattcaaacctgttttatttatttgaacctatttacggtatgcttaagaattgaatcagtataaattctcaaatatgggagaaattttgttcttgagaattatctgagtcattaatatttttcaaaaacagctctcactgacttgaacctcttctgtaagctctaaccttttacctgctttacatttccacttgaatgtctagtaggcatctcttgaccaaaaacagcttttgattcctgttctccaacctgttcctctcctagttttctccatctcagaaatgttacttcctctgcaaagtctttccctgacttatctaaaataataacctcctctgtttgctgtgggaatttgtatagaatggtgggaaaatttcaagtttcatatttggattagctctgacatttatttatctgaacactggtaattgcctcagtaaagacactgataataagtaccttttagagttattttaatctttaatgctttaatgtgtaggaagagtatagtgtcctgttttgcacagaaaggcattctgtaaataataagttgccttaattttcctgtaatgttcattatattgttgtgggaaggtatttactcctattattaaaaataaaaatgtgtaaaatttactacctga

SEQ ID NO: 5072 - protein, 26 aa, Homo sapien
GCSELWEHGVHSRWMTEVGPYLYEKC

SEQ ID NO: 5073 - DNA, 958 bp, Homo sapien
  Unsure 348-475: Unknown base
ttatgcaattagggcttgcttaattttggtaatttgtctatcattttgtgtgcatatcagaagataaatatgtgcctttggaaggccttagcactattcacttggagtttttacagaaaatatttgggggtggccagcatacccagttggtgttaatccttgcttattatatccagtgccttgtagagtgcagtaatttcgttgaaaatctgcttgtgaatctttgatgtatacattatccaaaaataacctgactttaaggtcattgctatctggtttaggagtcacatgtttgagaattctgggactattagcaccacacactttgtaattttatatcagatgttnnnnnnnnnnnnnnnnnnnnnnnnnnnnnnnnnnnnnnnnnnnnnnnnnnnnnnnnnnnnnnnnnnnnnnnnnnnnnnnnnnnnnnnnnnnnnnnnnnnnnnnnnnnnnnnnnnnnnnnnnnnnnnnncacacccagcccaaaattattttttggcttacaaaagaagttgctttaaacttctgtttcatctgtaggatatggataacaatagttaagagttgtgagaattagaagttagagaccttactcagaatactagggagcaggtgttagggattttggagctttaccttttaagaacttttgtccatatagtagacaacatactcaccagtgaggacctcaaatagcaatatttctgtggtgaaatttggggatatttatgttaaataaacagcatgtcagtcaaggttgggttttcctgacaaaatttgaaagaatttctctggattttggttttcaggactggtgtgacttaacatacatggcatagatagtatacgtctgttaagtcagtaattacacttacttgagcacaggtactgttcaaggtgctgagaatacagtatagacaaattcctacccttatgaagctgatgttgcaaaaaa

SEQ ID NO: 5074 - protein, 84 aa, Homo sapien
  unsure 20-63: unknown amino acid
  Unsure 348-475: Unknown amino acid
MFENSGTISTTHFVILYQMXXXXXXXXXXXXXXXXXXXXXXXXXXXXXXXXXXXXXXXXXXXXHPAQNYFLAYKRSCFKLLFHL

SEQ ID NO: 5075 - DNA, 2717 bp, Homo sapien
ttttcccatcaagcgttactttgattctgttctgacctcattccatagtttgcagtgagcatggcatctttgcctggagatactatgctaggggcagctttccaggggcaaagcaagccctcgtgttacacggctctcctccagctcacacgacatgtgaggagatgaccaaatgtgaaaacaggtttcccctgtgttgcccgtcatcctttggcccgttcacaggaatggagtactgtataattttaggctttcattcccagcagtgtttactgaggacctggttttctagaacaggtgtgtcctgtcctcttccatgttccctgggggctggtcagctccaagttgtgggtggcagagctgtgtttcagcatgaactgactagagacccatctggaggcaaatattaagttgccaggactgctttcacttcagggtgattgaaggacacatattgaagtacctagaatgccagaaagtgttctattgcccaaaaaacaaatcagaaaagcctattcttttttgcaacgctgttaatgattagtggagttctgaaattactttgtgccacttggaagtactgtgaaaccgcattcactgggattttgctgtaattcacatccgctggactgaagtttaccttgatgttagctataagaaatagttttctaacacatacgatagcaaatacaagacaaatagcattgaaggccaacaaaaatggcttcagatacaccttagctataatgtttgcattcaaacaatgaatgtattcatcacaagtcacttaccaaagcacttctagacttctccaacctccatgactttgctctgcttcctcctgtccctgtcagcagggttgctgtttgtacttgaaggtaataaacctgtaatccttcaaaaatgccatttagccccaggcttctgagctgagtcagactgacccatcccaccgttagggcaaaagtcaggctgggacacagcgccagtacagagaggatcctgccttcatgcaactccccttttggagttaatgcagcgtgatttcctgggccggtgttttcaggcatcgccccacccccaggtatgctggttcccagctccacgtaggtgtgcctatcacgctgggccactttgctgacaacattcatagcttgacatgagagagaatatcagcagaagcatgagagtaggacctgacgtctttgactctgcaaaagcatttagcacacactcatgggggggaactggctgtgagccacagcagccccacacagacagtggtctctgaacttcaggaaagccatggacagaaaaaaaaataaaattcttttccatcattctattttcaaagaggtcttggcgttttcctacatcttttgtttagaggggaaaaaaaggtttcatttgctgccatttcagaaaggttatgctatcctgttttttccaagcagttgtgagtcaggaactgcctgggcagtgtgcatcaactttgtggccgaaccattacagctgtcatatccttggctgatcgtctctcccagggactactgccctccacttagtgtctgagggtaagcctagaagggtgctgctattgggtctatggaagcttatctatcaaaggagcaaacatccagaaaagtgtttataaagcaaatgtattgcctctgtttagagatttgcccagctgttccagttttaaacattaaaaaataaactcagttgccatggcaaaaatagaatgcacagcttacttataattttccatgcagtatagcataaggatttttgacttgaaacaaccaaagaactcctccttaacgagacagttcaaattcctgaattagtatttcttgactatcaacttaaagaatggacttcctagtacaatgttgcacttatttttttttctgaaataattctgcctgcatgtatgtgttgtgttttagcttctccccttaccccaccccaaagatcttttcttcctaatggttaatgtctcaactcggttactgtttactatcagatggtttttcattagtgaatttagacctctttgagaaagcttgtatataaaaagttaacagatatattttatggaaaaacccatcttattttcaaatatatttaactgctgttatattttattagaggaaggttgtaaatattttctaggagttctattgtaaagaaaagtatttttgaaaaaaattaatgtaataaaaaggaaaacatttttaaatagtggttgtgattgcttcctgttctggcttcgttatgttctattctcagcagatgaattgcatgccttccatatcaggatgtaatttattcaggtttgcactattataagttgacatcataatatctagtgtgcttaactgtattttcccggaatgcaagtcccttggtccatattaaagcactatgtatagcatattcataatttttcttttgtaacgtgtgtatttttaataaggattttatgtaacattttggcaacaagaggaccgtattttctagtgaattttataataacattttgctaaaaatgtttcttcctaggtcagtttttgttaaggtgaaccaaaagtcttattttaccaggggtttaaaaaaagtttgaagcttgaaagcaaagttatatttaaacatcatatgtaacaaataaataaagatgttttatagacttgtcctaaaaaggtgcattcctt

SEQ ID NO: 5076 - protein, 11 aa, Homo sapien
MFYRLVLKRCI

SEQ ID NO: 5077 - DNA, 1081 bp, Homo sapien
gaccgctgacctagagggagttatgcacatgggcttataaggttagccaagagaaaggacaagaagacccaaagtcggcaagcaaatttattaacctgctgggctgctctacagaaatctgaggaggcagacaccgggcttacaggctaaggggtataagtaggtctgcaggggttttgtgtgtgtgtgcgggggtgtcgggggggcaaggccatttgtggagacttttcctcccagtatggccacatcctgcagtttgtcagtttttgcccccgcctggctcagggtaccaggatgtggtttagcttaggggtggttatagtggcacctaagttctgggaacttgcggtgggggcgaccttttggacgaaaaataagctgcagggcagctaggggagggggcttgttatattcctctgggggcagggtgtccctaactgggctcagtcggaaggaacttgaccaaagtctgggctcagttgggcatcactcaggctaatggtcgtgtgctggatgccatcagagggaagtaccaatggtaaagtggaaacaatgtgcagctttcaactgggtggaggctgctattctgtggacagtgagatgtttccttggcactgtcaatagacaatctgcgtagagaaattccaagctgaaagccaataatgttataataaaatagagattcttcagaagatgaaaggaattaccagcatggaaattgtgtcataggcttaagggctaaagaagaagccttttcttttctgttcaccctcaccaagagcacaacttaaatagggcattttataacctgaacacaatttatattggacttaattattatgtgtaatatgtttataatcctttagatcttataaatatgtggtataaggaatgccatataatgtgccaaaaatctgagtgcatttaatttaatgcttgcttatagtgctaaagttaaatgatcttaattctttgcaattatatatgaaaaatgactgatttttcttaaaatatgtaacttatataaatatatctgtttgtacagattttaaccataaaaacatttttggaaaaccataaa

SEQ ID NO: 5078 - protein, 12 aa, Homo sapien
TADLEGVMHMGL

SEQ ID NO: 5079 - DNA, 2377 bp, Homo sapien
cttcagactcaagactgcaacaccgtgcctgccctctagctatgctttaaggcaggcctatcagcccagactggagtcatgtaatacatggctctgtcagtagctctccttcccacaaataagttttgatgatcttacactcatccctgccgttagcattcaggaccaatcttctatagcctatacgccacactggtctaggacagcacctaaataatactcatgctataaaaaattcatcaagttatatatttttaaaaacatccctaaaattatctttttcctttactgaaaagaatttcaggatcccctctctctcactgcctctcttcacacacacctaccttagttggtcacctattttgtaaacatatcttctttaaaaaaagaaagaaatggcagtacatgaaaaactgcttcgtaaacagaaactatattatttatatttgtagcatttttttccccttgaggttaatttcctttgcttcccataactggaagccaatgattcagtgccattatataagcttattttccctcttggaaatagtaaattataagaggtttgacccaaaaatatacatcaaaattaggcagtattcggtgtttagcctccatctgccttgtcttcttgtctttagttgtgcaagtagatgctgatgatttctggcagagctaaagtaagtaaatcatgtgaatttattttttttcctcataaaacagatggcatggtctagctctgggcttgtatgtttcatgaagtacatgggtctgagtgcgtatttattttgtgagccaaggtttatgccttcttctataattttctttcaccgaaaattacctggagagctagaaactccatttgtgtcagcgtaagaagctttagaatctatatccagaccaaggccatggaacaatgtagattcactcagtaaaaactcactagcggccttctttgtactagtctgtcacctttgcttggctttgggaagcttcaaactagggcagtttatgtttgggagtgaccagtcaaatagcaagacagacataggcaaggatgtaatttttaaaaatttaagtggggaatggtgaagcatgaatcaaaacagaaggtagtcttaccttcttggaactgtaaaataaatacatttgaaaaaggcaccctctcaaccttctgcgagtcagaatttttgctgccacccctcattttgaatctctattctgcattttttattcttttttttaggaaggaggaagaaaaatttctcctgaagaattcattggaaattaaaattaacttgcgtattttgtattctttggaatgtgatgaagactgatttgaaagggcagtgctggatttggtcaggcataggaaaggaagacatgcagtcgtcctgcctagctcatccccgccacgatggagaagtggggttgctttcgttgtactttttttcatttgtttcttgccaagcccagtggcttctgttataacatgtggcagcttctcccttggagactgattcagtccaagttaccataatatttaggaccagctacagagacgtttcttcccctaaacccatgccaaatctaaatcaaactatcttcttctccttagccgttcaaatagctccagctcttatataaaaatacgagaaatacacaggcctcttttcgttttattcctgttcaaacagataaacaaacaaggcacatcatgcctaggttgctttgagcttgatcacttcctcctaaagcagtcttacgctgtgttgattttaagaattgcaacttaggtgttctagaacatattctgagagcatagtcatagtctgtgatctcagaatatgtttgcttccttctagaacatctgagttctagaaattgcgtacaataaactgctgtcagtgctgctggaggaaggaagagtaactctgacatcactggccttcaacaggtgtggcgctgagcttctgggcctcagaagccctgacttctagaggctgggggccagcggggcagggaggtgatctcatcatggatggccacagatcatccacctgccaaacagttaaccctgaacaagtcatgtcaatttattttgcttttaaaaaagaaagtctgcaaaatagaaaaaaaaaaaaagattcttcataaatacatttgttctgatctgtaaataccctggtcatttcccccttggcatttgatacacatagtatagacatattttagtcatccttgctcaagtaattatattccataaccaactttattagcataaattaacttcctcatatttttagcaagagttactttccttcattgcttagcttattgttttgaaatatgaattacttcagcacagttcattttt

SEQ ID NO: 5080 - protein, 33 aa, Homo sapien
FRLKTATPCLPSSYALRQAYQPRLESCNTWLCQ

SEQ ID NO: 5081 - DNA, 4126 bp, Homo sapien
  Unsure 2006, 4009-4054: Unknown base
cctaccaccctgggcagccgagcagagtcgtccccagcgggtctccctccctgcctccctgactttgcaacaccgcgttccgggaggaccggcctcggcgagggaggaggcgggggagctgcgaacacccagacccaaaccctggcagccgcgagccgaggttggaggcgcccggggctgcttcgccctccggctccgagcgccgggctccgggcgccctgccctgcgcctgggcagcagccttgctggtcttgggggcgccccccgcttcccgccccgggggtccgcggccggcaggaccatgctgctgaaagagtaccggatctgcatgccgctcaccgtagacgagtacaaaattggacagctgtacatgatcagcaaacacagccatgaacagagtgaccggggagaaggggtggaggtcgtccagaatgagccctttgaggaccctcaccatggcaatgggcagttcaccgagaagcgggtgtatctcaacagcaaactgcctagttgggctagagctgttgtccccaaaatattttatgtgacagagaaggcttggaactattatccctacacaattacagaatacacatgttcctttctgccgaaattctccattcatatagaaaccaagtatgaggacaacaaaggaagcaatgacaccattttcgacaatgaagccaaagacgtggagagagaagtttgctttattgatattgcctgcgatgaaattccagagcgctactacaaagaatctgaggatcctaagcacttcaagtcagagaagacaggacggggacagttgagggaaggctggagagatagtcatcagcctatcatgtgctcctacaagctggtgactgtgaagtttgaggtctgggggcttcagaccagagtggaacaatttgtacacaaggtggtccgagacattctgctgattggacatagacaggcttttgcatgggttgatgagtggtatgacatgacaatggatgaagtccgagaatttgaacgagccactcaggaagccaccaacaagaaaatcggcattttcccacctgcaatttctatctccagcatccccctgctgccttcttccgtccgcagtgcgccttctagtgctccatccacccctctctccacagacgcacccgaatttctgtccgttcccaaagatcggccccggaaaaagtctgccccagaaactctcacacttccagaccctgagaaaaaagccaccctgaatttacccggcatgcactcttcagataagccatgtcggcccaaatctgagtaactttatataaatatctcatggggttttatattttcatttgttgttgttgtttttttttaagaatcttctgatagagaaaaagactgctttgtcactcaaacatgttccttcgacctttcagtgtgcatgtgactcagtaacttcacatagaatatgattccctaagtatgctacacagcatcatattagatgtaagatgtaagacttgcaaaggacagaaggaatcttctgtaaccacatagctgtatgccagagaggaagccttgttattgggcatttgatgaggtttggcatggacttcaaggataaatgaatgaaaactttgcaccacttttgttacaaggtacggtagaaaatagtgaagtcagtttcctctcatcaaatctaaaattctccaaaatactctcaggcataacatacttagctgttaaattttgaactgctaattactaatacttgaataccaatagttactgagattcctattttgtggttagtctgactcaggatttggagcctaattaactctaaacttttgaaaattttaatcatcaagctatagaggctccaagtgcaattaataataactcatttataccttccacagaatttaataaagattctacttgtttctgtcttttaataactttccccttttgtgcccttgtggcctcagaaatccttaagaattgcatggatgaatgtnaccataactgatttgggaatggttcagtttaggaaccaagaggcccaggtgaggcaacatcttttttctctacaggtaccaacaaaccttgacttgtcagcttccatcatcaattaagattctcagaatttgcaattaattgaatagaattcatttactatctgcccactcaaagaagtacaagggtagagtaagctaactgggctttaacatggtcagaatgtctggtgcatgaactataaaaaagagaactgtctcccatccccttccttgttttactcttagtaacatccagaattccctggaacagattgcctaccaccagaccttagaaaagactgtcattctcttgctccttacttgaaatacaaatattgggaatgtcacagacatcaagcaactactgtcaagtgggaggagagaatgagcagaattgctgactcctatttgtagagtgaaaaggaggagtgataatagatgcccttctgtctagctttcctttcttcaactagtggtaatgcaagattagaatcaaggttgacaggaggcaagatcactcactgaagtgacagaaagacaattctcctttgctccaaagagagaaatctgtcacctttgcacctcactgcctttaaacacagacgggagggcaggccaaatctcagcattgacttttgtcctccaagagaggaagagaagaagtaattgggcaacttggaggcccgcgccccagctagccttcctgatcgtaacctccaacctcaggaaagggaccttcccaaaacacagatcccaaaggaaacaaaatagaccaaggagcataatctgcttctctcacacagcctctctgccagtggaccctgcctgcttccctctcagtgctcagcactctgtgtagtgtctttcaggttgatacactctcccaaggtgcaggcgctggccccatgagcccagcaccaaagttttctaagtcataggtcagactgtcaagatcatttctttatctataggttgatatttagcttaaaaaaaaagaataaacctagaactcaaaggaaacctgttgcaaatagcttagatcaacagtgtatctcttccctaagaatgatagtatcttagtaagacaccttctatgcatggtatggaagcatgatttttgcttgtgggaaaacctaatattttatcagacccctcggacttctcaatccctccctctccacacagtagtacttaatgaaaatgttttgctttagagagcaaaatgctactttcagaagacactgaaatagtatatgtatttgcttaccatttgcaagctaaaatcaaggtgggatggggtcattattttcacatagaatgtatttattttgtgcaggctgttaaacacatctggcacctagtttttccattaagagcattgctattttccctttttataaagtagcttctgctgtcaaggttaacaattctatatgctttaggaagctaagttctaatttccttttgtgagtttcatttcttttataaccagtatgttaccacagacatcagttgcaaagctacgatgatagtgtgattcttagccgaaaaaaaagcgtgtgctcttaaagtatgttcagtttttctgtctacatatgctttgtgtgagttaaaaagggggtgggtggtgtaaatattcctttagctgctttgcatatttaacccagtcatcaaaaggcataaatgacttcaatattttatatatcttggttttcaagtatcatttcacattctctatacatgactttgttattgtggaatacaagcctgcaatggatgtatatatacagaacattaataattcttagaaggatggaagccaaatggctgcatgatggaaattagaagaaaaaaaaagcagaaacttgaatttgctaagcatgtttggggggaaatagaatccttaactcagtgcctctgtctgcgatatggaaaccttcaactttgttcaccaaaattgtatnnnnnnnnnnnnnnnnnnnnnnnnnnnnnnnnnnnnnnnnnnnnnngtatagtgaatcagacaccatcagttttaagtctctggtagccaaacttaaataaataatccatagaatatc

SEQ ID NO: 5082 - protein, 432 aa, Homo sapien
  Unsure 2006, 4009-4054: Unknown amino acid
LPPWAAEQSRPQRVSLPASLTLQHRVPGGPASAREEAGELRTPRPKPWQPRAEVGGARGCFALRLRAPGSGRPALRLGSSLAGLGGAPRFPPRGSAAGRTMLLKEYRICMPLTVDEYKIGQLYMISKHSHEQSDRGEGVEVVQNEPFEDPHHGNGQFTEKRVYLNSKLPSWARAVVPKIFYVTEKAWNYYPYTITEYTCSFLPKFSIHIETKYEDNKGSNDTIFDNEAKDVEREVCFIDIACDEIPERYYKESEDPKHFKSEKTGRGQLREGWRDSHQPIMCSYKLVTVKFEVWGLQTRVEQFVHKVVRDILLIGHRQAFAWVDEWYDMTMDEVREFERATQEATNKKIGIFPPAISISSIPLLPSSVRSAPSSAPSTPLSTDAPEFLSVPKDRPRKKSAPETLTLPDPEKKATLNLPGMHSSDKPCRPKSE

SEQ ID NO: 5083 - DNA, 633 bp, Homo sapien
cggacgcgtgggtccttagacttcctagtattatggtggttatagtgaaagagcagtcaaactgtgtgagttccgaaataaaggaaagtgttatattctacagtgcccatattttctatggtaactaaatcaaatatttgtaagttcctctgctttttgaaattatttttcaaagaagcaacacctgttatacaacagaattgtataaactaaaaagacttttggccttggtacatagtctttatctggcctgcaatggagtcatggttctttctgaatcccactctcacttttttctttttacccttagatattgcatccgtggtatttcaggggtatagagaaataatattggaatttaggagctatttttttaagtgaaaatattactaagtggtatcttttgatgattacctactttaatgtgtcttagaaaagcaccaaaacatagcatgattattttttcagttaattaaaattagttaataacatgttcatttaaaaactattcattgactttttgtaccagtcatatgcagggtacagtaactgaggatatgggaaataaaataactgacatagtccctgctctgaaggaacaaaggaaaaggaattgcaaatttttattacaat

SEQ ID NO: 5084 - protein, 41 aa, Homo sapien
DAWVLRLPSIMVVIVKEQSNCVSSEIKESVIFYSAHIFYGN

SEQ ID NO: 5085 - DNA, 1331 bp, Homo sapien
atattatatatatatgtctataacatatagacagagaagataataatatattcattttatagtttaggaaacagacttggaagggcaaataacttgtctaagatgactaagcagctgagtgagaaccacagcctatctgtggcattcagtttcagccatctttcccttgcttcataaggatagttactctggtatcagttgctggattgggattttgggcatttataaatgtttttattttggatattactgaatcacagacaatttcatcttagttaattaaaaattcatcttacgtgacacttgtctaaatcttaaaatattaaaattttaatgtataaggatgttaataatctttatattttaagagactatgaagtcaagtctagctaacttagatctgtaagtttttagctatggaaagcaattctattgtgtacaagtttcagcctgtgaagggaattcattgaaaatgtatagagatcagaagaactaacacctttcttgcatggatttttcttgattattggcagttaacaataaaatgttattagatcactggtgcttctgtgtggggttgagttttttatgatatcttctgttagacccataagggaggctgtgagttgttttctacatccttggaatatataagatcctcttttaaaattatattttatataagcacatgaaaatggaatgaaataatgaattgacataggaattacctacatattttggctgtacatttagtgcacaaaatatcccttttttgaatgccaaatggccaagtgtgaaaaccaatatttgttaaagctggagcagaagtcggtatcatcatcatagagtaaacttctggcatatgtgaagatatgaaatgttatccctgaagttattataatttattctcagaaatattagtaatcttattttaagagtaggacattatagtgcagtaatgataattttctcagtgctgcctgttgctagattgttcctatgattgctgtcatgcacatacagacactaaattgagggtcactttccactgaagttagtggaatacaaaataggtggaggaactttcttcctctaacgtctttatatgtgtctgtgtttatatatacgtgtatgtatataaatatgtatacacatatataatatctggagcaaaaatgattatgttgtaagaacttttggaggttttcctcctcgtaaaattccgaagtggtagagttaacattctgcttttaatttatctacaaaaacatgtgaagaatccccaaataagattttctcatagaagattcatggattttgagtctcagaaa

SEQ ID NO: 5086 - protein, 6 aa, Homo sapien
MDFESQ

SEQ ID NO: 5087 - DNA, 1201 bp, Homo sapien
atcaaaacttcatgctgtacaacataaatatactatacaatttttacttgtcaattaaaaaagtaatcctaacatttaaaaaggcaatgcataaaaactgagaacagactataacaactgaaacaaactgggcaaacatgagatgagaaaccagccagcaagtcaatcagaactctttcttcatctcgtctacaatattttgtatttataactgtaaattagtgtatagtgtttcactccagagacttcaataatacagtgttatcataggacttgtacagatttcagagaaagacacatttagaagatggagagttctccgttatgttctatctgagagtcagtatgaaatgtcaaatctaaaagtacataattcagaggtctatttcaaattaataatcatttgagcataatttctccactgtcagagacgactgttattttattttcaatcaaattaaaagttgtttttatgcatatcttatttttagttatatgttacttgtacatacgtagcagtacaagtgcatataaatcctgtaagagtataaatcctatagaaatatattaagctgataattatgtctgttctgtttgatcacagagttgcaacaaataggcctcatttcctaagttgaggaaatgattttctcattttatatgagacttgtggtgtggaatttcaaggtagaaccaaaatgtgtggaatgaatatttcaatgaagatgcgttctgctgctaatagcaggaaatcccatctagtggctttatttttctttaacccgttatctcacatagccgatagatccaaggctgggcatctccagagttgctcaactcagcaggccagtggcatcaccagcgaccctggaacttcatagctcatctctctatcacacacagtatgtcagctttcctgagatggtagggtgacccctgcagcagctttaggtttgttattctttcacaacaactcccaaaggcaggaaaaggatactcctttctcctgtgtgcctttataaggagcaactaaactgtttccagagtgttcccagtacccactttctcacacattggaatgaccgtgggatcacatgggctcagacaagccaggattcaacctttgcagagtgggcctgaggcacatgggaagaaaaggagcaaaatcatgtattttaaaaaataaagaaatggtggatgg

SEQ ID NO: 5088 - protein, 35 aa, Homo sapien
MGSDKPGFNLCRVGLRHMGRKGAKSCILKNKEMVD

SEQ ID NO: 5089 - DNA, 1044 bp, Homo sapien
gtcttggttattcttggttctttattattcaatataaattttagaagctgaatttgaaaagatttggattggaatttcattaaatctacaggtcaatttagggagagttgataattttacagaattgagtcatctggtgttccaataagaataagagaacaattattggctgtacaattcttgccaaatagtaggcaaagcaaagcttaggaagtatactggtgccatttcaggaacaaagctaggtgcgaatatttttgtctttctgaatcatgatgctgtaagttctaaagtgatttctcctcttggctttggacacatggtgtttaattacctactgctgactatccacaaacagaaagagactggtcatgccccacagggttggggtatccaagataatggagcgaggctctcatgtgtcctaggttacacaccgaaaatccacagtttattctgtgaagaaaggaggctatgtttatgatacagactgtgatatttttatcatagcctattctggtatcatgtgcaaaagctataaatgaaaaacacaggaacttggcatgtgagtcattgctccccctaaatgacaattaataaggaaggaacattgagacagaataaaatgatccccttctgggtttaatttagaaagttccataattaggtttaatagaaataaatgtaaatttctatgattaaaaataaattagcacatttagggatacacaaattataaatcattttctaaatgctaaaaacaagctcaggtttttttcagaagaaagttttaattttttttctttagtggaagatatcactctgacggaaagttttgatgtgaggggcggatgactataaagtgggcatcttcccccacaggaagatgtttccatctgtgggtgagaggtgcccaccgcagctagggcaggttacatgtgccctgtgtgtggtaggacttggagagtgatctttatcaacgtttttatttaaaagactatctaataaaacacaaaactatgatgttcacaggaaaaaaagaat

SEQ ID NO: 5090 - protein, 7 aa, Homo sapien
MFTGKKE

SEQ ID NO: 5091 - DNA, 10434 bp, Homo sapien; identical to SEQ ID NO: 3487

SEQ ID NO: 5092 - protein, 3477 aa, Homo sapien
MANRRVGRGCWEVSPTERRPPAGLRGPAAEEEASSPPVLSLSHFCRSPFLCFGDVLLGASRTLSLALDNPNEEVAEVKISHFPAADLGFSVSQRCFVLQPKEKIVISVNWTPLKEGRVREIMTFLVNDVLKHQAILLGNAEEQKKKKRSLWDTIKKKKISASTSHNRRVSNIQNVNKTFSVSQKVDRVRSPLQACENLAMNEGGPPTENNSLILEENKIPISPISPAFNECHGATCLPLSVRRSTTYSSLHASENRELLNVHSANVSKVSFNEKAVTETSFNSVNVNGQRGENSKLSLTPNCSSTLNITQSQIHFLSPDSFVNNSHGANNELELVTCLSSDMFMKDNSQPVHLESTIAHEIYQKILSPDSFIKDNYGLNQDLESESVNPILSPNQFLKDNMAYMCTSQQTCKVPLSNENSQVPQSPEDWRKSEVSPRIPECQGSKSPKAIFEELVEMKSNYYSFIKQNNPKFSAVQDISSHSHNKQPKRRPILSATVTKRKATCTRENQTEINKPKAKRCLNSAVGEHEKVINNQKEKEDFHSYLPIIDPILSKSKSYKNEVTPSSTTASVARKRKSDGSMEDANVRVAITEHTEVREIKRIHFSPSEPKTSAVKKTKNVTTPISKRISNREKLNLKKKTDLSIFRTPISKTNKRTKPIIAVAQSSLTFIKPLKTDIPRHPMPFAAKNMFYDERWKEKQEQGFTWWLNFILTPDDFTVKTNISEVNAATLLLGIENQHKISVPRAPTKEEMSLRAYTARCRLNRLRRAACRLFTSEKMVKAIKKLEIEIEARRLIVRKDRHLWKDVGERQKVLNWLLSYNPLWLRIGLETTYGELISLEDNSDVTGLAMFILNRLLWNPDIAAEYRHPTVPHLYRDGHEEALSKFTLKKLLLLVCFLDYAKISRLIDHDPCLFCKDAEFKASKEILLAFSRDFLSGEGDLSRHLGLLGLPVNHVQTPFDEFDFAVTNLAVDLQCGVRLVRTMELLTQNWDLSKKLRIPAISRLQKMHNVDIVLQVLKSRGIELSDEHGNTILSKDIVDRHREKTLRLLWKIAFAFQVDISLNLDQLKEEIAFLKHTKSIKKTISLLSCHSDDLINKKKGKRDSGSFEQYSENIKLLMDWVNAVCAFYNKKVENFTVSFSDGRVLCYLIHHYHPCYVPFDAICQRTTQTVECTQTGSVVLNSSSESDDSSLDMSLKAFDHENTSELYKELLENEKKNFHLVRSAVRDLGGIPAMINHSDMSNTIPDEKVVITYLSFLCARLLDLRKEIRAARLIQTTWRKYKLKTDLKRHQEREKAARIIQLAVINFLAKQRLRKRVNAALVIQKYWRRVLAQRKLLMLKKEKLEKVQNKAASLIQGYWRRYSTRQRFLKLKYYSIILQSRIRMIIAVTSYKRYLWATVTIQRHWRAYLRRKQDQQRYEMLKSSTLIIQSMFRKWKQRKMQSQVKATVILQRAFREWHLRKQAKEENSAIIIQSWYRMHKELRKYIYIRSCVVIIQKRFRCFQAQKLYKRRKESILTIQKYYKAYLKGKIERTNYLQKRAAAIQLQAAFRRLKAHNLCRQIRAACVIQSYWRMRQDRVRFLNLKKTIIKFQAHVRKHQQRQKYKKMKKAAVIIQTHFRAYIFAMKVLASYQKTRSAVIVLQSAYRGMQARKMYIHILTSVIKIQSYYRAYVSKKEFLSLKNATIKLQSTVKMKQTRKQYLHLRAAALFIQQCYRSKKIAAQKREEYMQMRESCIKLQAFVRGYLVRKQMRLQRKAVISLQSYFRMRKARQYYLKMYKAIIVIQNYYHAYKAQVNQRKNFLQVKKAATCLQAAYRGYKVRQLIKQQSIAALKIQSAFRGYNKRVKYQSVLQSIIKIQRWYRAYKTLHDTRTHFLKTKAAVISLQSAYRGWKVRKQIRREHQAALKIQSAFRMAKAQKQFRLFKTAALVIQQNFRAWTAGRKQCMEYIELRHAVLVLQSMWKGKTLRRQLQRQHKCAIIIQSYYRMHVQQKKWKIMKKAALLIQKYYRAYSIGREQNHLYLKTKAAVVTLQSAYRGMKVRKRIKDCNKAAVTIQSKYRAYKTKKKYATYRASAIIIQRWYRGIKITNHQHKEYLNLKKTAIKIQSVYRGIRVRRHIQHMHRAATFIKAMFKMHQSRISYHTMRKAAIVIQVRCRAYYQGKMQREKYLTILKAVKVLQASFRGVRVRRTLRKMQTAATLIQSNYRRYRQQTYFNKLKKITKTVQQRYWAMKERNIQFQRYNKLRHSVIYIQAIFRGKKARRHLKMMHIAATLIQRRFRTLMMRRRFLSLKKTAILIQRKYRAHLCTKHHLQFLQVQNAVIKIQSSYRRWMIRKRMREMHRAATFIQSTFRMHRLHMRYRALKQASVVIQQQYQANRAAKLQRQHYLRQRHSAVILQAAFRGMKTRRHLKSMHSSATLIQSRFRSLLVRRRFISLKKATIFVQRKYRATICAKHKLYQFLHLRKAAITIQSSYRRLMVKKKLQEMQRAAVLIQATFRMHRTYITFQTWKHASILIQQHYRTYRAAKLQRENYIRQWHSAVVIQAAYKGMKARQLLREKHKASIVIQSTYRMYRQYCFYQKLQWATKIIQEKYRANKKKQKVFQHNELKKETCVQAGFQDMNIKKQIQEQHQAAIIIQKHCKAFKIRKHYLHLRATVVSIQRRYRKLTAVRTQAVICIQSYYRGFKVRKDIQNMHRAATLIQSFYRMHRAKVDYETKKTAIVVIQNYYRLYVRVKTERKNFLAVQKSVRTIQAAFRGMKVRQKLKNVSEEKMAAIVNQSALCCYRSKTQYEAVQSEGVMIQEWYKASGLACSQEAEYHSQSRAAVTIQKAFCRMVTRKLETQKCAALRIQFFLQMAVYRRRFVQQKRAAITLQHYFRTWQTRKQFLLYRKAAVVLQNHYRAFLSAKHQRQVYLQIRSSVIIIQARSKGFIQKRKFQEIKNSTIKIQAMWRRYRAKKYLCKVKAACKIQAWYRCWRAHKEYLAILKAVKIIQGCFYTKLERTRFLNVRASAIIIQRKWRAILPAKIAHEHFLMIKRHRAACLIQAHYRGYKGRQVFLRQKSAALIIQKYIRAREAGKHERIKYIEFKKSTVILQALVRGWLVRKRFLEQRAKIRLLHFTAAAYYHLNAVRIQRAYKLYLAVKNANKQVNSVICIQRWFRARLQEKRFIQKYHSIKKIEHEGQECLSQRNRAASVIQKAVRHFLLRKKQEKFTSGIIKIQALWRGYSWRKKNDCTKIKAIRLSLQVVNREIREENKLYKRTALALHYLLTYKHLSAILEALKHLEVVTRLSPLCCENMAQSGAISKIFVLIRSCNRSIPCMEVIRYAVQVLLNVSKYEKTTSAVYDVENCIDILLELLQIYREKPGNKVADKGGSIFTKTCCLLAILLKTTNRASDVRSRSKVVDRIYSLYKLTAHKHKMNTERILYKQKKNSSISIPFIPETPVRTRIVSRLKPDWVLRRDNMEEITNPLQAIQMVMDTLGIPY

SEQ ID NO: 5093 - DNA, 4474 bp, Homo sapien
  Unsure 3707-3726, 4456: Unknown base
ttatgttaaaataaaggtcatcaaaagatattttcctaaacctttcctttaccagaaatatctctagtgtcacatggtcctttctcccttcttgcttttgtaggaatccaaagctaatctgtccctgatccggattgcacgcacctgtgccttttggggcccttctgcattagttcttccttctcttctaacctcaaaaatgtgttttctctattggctctttccctttaacatagaagtatactcacgcttttgttgaatcttgaaataaaagtcttcctttaccacatatctccctttaatactacatctctcttctcagccaaatacttgggaagagaagccctgagtttgtgtcattgttttctcacctccagttcactactttgcccactgcctgacatccagctcgctcacacacacacacaagcccaatcactaagttgccatagctaatttgtagctttcctgccttcctggcaaaatttgactctgcattgggataatacatgtcgagtacctattgaacaggcactgtgctaggtgctactgttatagatatgaaaagaaggcatcatctcctttctaacaactcacaggagcagccattcctgattcatacatgtctcttgactcccagtgctcactttttcaagcttcacttaatgccgtgcaaatcaccctattctccaggtcttctttcttcccagttctccttactatacacaacttctcaaggcagtcacctccacacccatggcttcaattgctttctccattctctgagaacaatagaattttaaatggttttatttcatgtattagctttattttatacaaggtgcctcacctgctgtaaccatagattcaaagttgctccatgaaagtaataaatgaaaaatggtgattttttagcatgtaaattttaggaaatttccccagttacgcttaatggcttgatttagtgtgtatgttatttttgaaaacatatgttgggatgtcacaaatggacttagcctacagagatttatattcaacttttgaccagagagttccattttaatgtgacactgagagtaaaaaactatcttttcctccttacctatttctcttcctacattctcggccaggaggaaggcactgctacatacccagtcttccccagcagagcctgagcagctctgttttccttctacttcccctcttctttcacatctcatgaccaagcacttcctattctgtctcccaaatgatcacagactttttcctccacttttgtcactgccactgcccttagcattactctgcctttagagaaagtctcttaattggtttggttgcttccttcagtctttattatacagaccactacacgcacatctgacagagacttttcacctttttatggttgaatgactgaaattcccagaataaaattaaaaccaccccagcatcaaatttgaggtcaaatagaggtgggtttgtatcccaggttcatatactgtccagcagtatggtctcagaaaactgacctccttaagcctttgtttgtgtatctgcctaaactcattgagagttgggactatttcacacatacagtgcctggcatgtagaagggacttaatgttgaaagaaggggaggcattttaaaatccacatcaaaaaaatgttgttctgttcgtgagccactgcgcctggcctgtttattctcttaagagagaaaatgaggggattaatggactgtagttctggacaaggtggaaaactcttaaagtggaagtactggggcaagtgctctgacagggtaggatggtgcagtcagtcccttcacccagaaatcagtagaatgttagcagttcagactcaaaccttgtgaaaaacaggtggtggaaaggaaatccctcacagcaactggcaccataatcaagacaatgtttacaggataaatggagttacctgctttcagccccaggtcgtagctattgtctgccctgctgatatgtgataataatttgtgatcctgttgtcttaaaatggggtcactcatctccagtagaattaagtccacagtgaagttgtccccccatccccaaagagataaacatatatgaatgaactcacgtgataacaactactgctgcctgggatcatgagagacctgaactgaactgataggaagtgaaaggtggctgagataatgagaatagacccatctgcagaggatcataaaaccagcaaagacaagatcttgtctaagatgccttcacaagctttgtccatgagaactcttaaggatttcaccagacctgttggctgctgctgtgatctctgcccaagaggagcctctgaccaacatccaaagggcttctggacccactggactcctctggaggtaccttggtctcccgatccatggctgtggttttttactccctttatcactgcctgtgtgtagaatgataattgcacaattgatagtgtgaagacctcttgataaatggtaaatctgagcatatgtatttggctgacatgtcattgtgaaacctcacagcttcagtcagtgtctctccaaggactaaacaatggaagactgtagaagatgctattcattaagatatcgcaagaatatggaagactattattcgcttctcatgggacaggacttttcagggcacctgaaaaaactcccatgaaaaatcacttttacaaaatgtcaagttatgatatccaagatgaaaccaatgagtcacaacattcacataatacactgtacaaccctgatctcttgactgtcatcaaatgtttcttacctctaaaccaaagtttcattttataatttaatttttctcattttttccattctcttagcttaagaaaagatcattacaaactttttgtaagtttttcatatatgcttgcaaagggtcgtaaaactttattgtgattattcttgctttaagctgaaacatccctaatctttctttagagattgtggcatagcatgttagtttcttttccatatccaattgttgtctgtaatgaatacagaaatacgggcactattttgtaactttaaatagacatcatctcaagtctacaagaattatccaaaatggtatttaatgacatttctaggtcttcagacactattaatgcagattgtagcctctaggtcctgaagattttactagatactggttactgaaactgagctttcttgaattctttttccttccactgtggtttcccgcatttcaacatatcacctatttttgtcctcaaaggttacttaaattttttccacagaattaaattaaatatgaatcatccctcctctgatttttgaaatgaccctttgcttcctatgataatgattcttctggtccgttttgtagttatatgttagagtttgtaaatagtcacacattttgcaactgcatgtaattttcttattattttttcctcttcctctaaaactgctgttatttcttttaactttttgtgggaaaaattaaacccatctttcactttgttgatatacttatttataattgaactccttgatttttgctcgaattgcttttcaagttacccacttttagggaagacattatttgggttttgtttagtgtatcaggctttttttagttagttgtatcaagaagtgtagacttttctatacataatatcctttttcccacagtagnnnnnnnnnnnnnnnnnnnnaaagtctggccgtgagcccccgcacctggcctgtttattctcttaagagagaaaatgaggggattagtggactgtagttctggacaaggtggaaaactcttaaagtggaagtattggggcaagtgctctgacaggctaggatggtgcagtcagtcccttcacccagaaatcagtagaatgttaacagttcagactcaaaccttgtgaaaacaggttctagaaaggaaatccctcacagcaactggcaccataatcaagacagaatttttgcagaataaatagagttacctgctttcagccccaggtcgtagctattgtctgccctgctgatatgtgataataatttgtgatcctgttgtcttaaaatggggtcactcatctccagtagaattaagtccacagtgaagttgtccccccatccccaaagagataaacatatatgaatgaactcacgtgataacaactactgctgcctgggatcatgagagacctgaactgaactgataggatgtgaaaggtggctgagataatgagaatagacccatctgcagaggatcataaaaccagcaaagacaagatcttgtctaagatgccttcacaagctttgtccatgagaactcttaaggatttcaccagacctgttgggctgctgctgtgatctctgcccaagaggagcctctgaccaacatccaaagggcttctgggacccactgggactcctctggagggnaccttggtctcccgatcc

SEQ ID NO: 5094 - protein, 21 aa, Homo sapien
  Unsure 3707-3726, 4456: Unknown amino acid
YVKIKVIKRYFPKPFLYQKYL

SEQ ID NO: 5095 - DNA, 272 bp, Homo sapien
caacatgacatttctataacttaaaaacaacaaattatatttgtatgggttctcttatacatattgatgttctctgcccagtgagaacacagggtgtgtggtagattgatgtcaaaaatatggttggatcagtcttatcaggcagaattggaagtttctgtgtcagaccatgggaaataccataggccattgagcagggaagctatggtgagagtgctgatagaaatgatttggcaagccgggtgcggtggcttcactcctgtaatcccagc

SEQ ID NO: 5096 - protein, 53 aa, Homo sapien
MSKIWLDQSYQAELEVSVSDHGKYHRPLSREAMVRVLIEMIWQAGCGGFTPVI

SEQ ID NO: 5097 - DNA, 1543 bp, Homo sapien
atgaggtattcctttgtatggcacccctttcaagaagaaaacaaaacaaaacccaacctgtgagcctctctgtaggcagcgtactcaccaggagacaggaaagctagaagcaccactagggcccaccgcatgccttcctctcgggggccttggaaggaaagggaccagatgaagaggagcagaagatcctcttaaaactcaggtcccactcaacaaggaagtgatccctagcacagaagacagtaggaggagctggtttcctgagacacaggcagagagaagtgactgaagatgtgtcttaggggactcccaagccttcctcccagaagggttggtgcctgggaggacctgcagaggagctcccgcatctcctcaggccctttcttcggcgccctcttgtggcagctgagagcaggcccagggcagaagggaggcaggggcattaagagctcaggcctccagctgagggactgcagatgttgggaagcctctgattagggcccggaaccaacttccttttcgcatctgcagactcatggaggcaaccactcaaggccactctgagaagggttgaacgtgctttaaattaaaaggactgaggatcatgtgtgttggtgtgtcctggactctgctctaagagctgcacgggggcttggatcaatgcctgaatccagtgttcctgagtgcagagcatctttgctctgggtgagctttgaccatcctggagaagaaggctgctgccgggggtgggacaaagccaagaccaatgcccagcggccaagccagccagatggctctgtgctggcagccagtgtacacagattttacctgaaggaaaaaatgtcacattttccacagacaactgaagaaaaagagctctttggattaccctaattgtgatttactcattggaaccactgttttggattgtccaaaattaagtctcaaagcttaaatatgaggcttcagggagttatcctgaaatcagtgcttggtatcttcttgttttttgcttgttttttaaaaccttaattctcatatttttctgtcatatttctcagtgcctggtacattatcaccattaatccatgccagttatgtacagttttgcatgtttgttttttattttactcttttctctccttcattccctattcctgttcccccataggtgcccagtctaatgtatttgatatctgtccttagagcctccgtatctgtgaagactagagtcatgcacttcatcacatttcagtaacgatgggccgcatgtaccacagtcccatgagatgatagaggtgcagaaaaattcctgtcatctagtgacatcgtagccatcataacatcacaacacgactctcatttgtggtgaccctggtgtacacaaacctactgtactgccagttgtataaaagtctagcacatcccacgacgcacagtacatacttgaaaattataataaatgaccatgttactggtttatgtaattactatattatactttttaatcattattttagagtgtacaacttctacttgtaaa

SEQ ID NO: 5098 - protein, 26 aa, Homo sapien
MTMLLVYVITILYFLIIILECTTSTC

SEQ ID NO: 5099 - DNA, 460 bp, Homo sapien
aagggaaaagcttcggggtggttttggtccatttctccagcgaagaagtagacatggcgagcgactccccggctcgaagcctggatgaaatagatctctcggctctgagggaccccgcagggatctttgaattggtggaacttgttggaaatggaacatacgggcaagtttataagcaaatgaaccagtgagtgaagggcattatcacaactccaagaaccaactaggagtcacccatgacatcatctcctgaatttcatcaccaagcccagctgatcctatttcctaaatggttcctgatttctctcttctgttttctgtctctgccaccactgtcctagcacaggcattgcacatctctcatatgaacgcctgcaggactgtcccttgatgttatccttgcagcccctacattcctactgtgcagccagtaaagtcatattaaaatgcttatttgatc

SEQ ID NO: 5100 - protein, 62 aa, Homo sapien
GKSFGVVLVHFSSEEVDMASDSPARSLDEIDLSALRDPAGIFELVELVGNGTYGQVYKQMNQ

SEQ ID NO: 5101 - DNA, 696 bp, Homo sapien
catgagaccagcactgtgtgggtctgaatgatggctttggtgttcagtttagcacacgcggtctaccacgtctgcatgagtggtaaatgtagtgcctgggtcaaaatgttccttctgttcaaatcgaaatacctcatctctatggctctatggctgtacattaggacctagaacagtggcccattgctcttagactggaaccatgtccactaaaataaacctaagcagatgttgtagacctagccccacaggactgcatttagctgcttcagtgacactttgatgaaagtatggagaagtggagacattatagataaaatatatcaattcccagagaaaactcttgacttaaaaacttaactgtagtaaatatatctttttcaggtgatgaattatttttttaaaaaaggttacatataggaattctgcagtataatttggaggctattagtgctatattaatggaaattaattattttttaagtaagtccaaaaaataatctagaaagtaagtttccagagcaaatctgacctagcatttggtatgctaggctctgcttttcatgattttgaaataaatcataattagacttaacaatatggagaaaataaacttgtatttttaagtgttctgttggcttattttctgtttcatccaactcaataattctgataaataaatttggttctagtttg

SEQ ID NO: 5102 - protein, 47 aa, Homo sapien
MMALVFSLAHAVYHVCMSGKCSAWVKMFLLFKSKYLISMALWLYIRT

SEQ ID NO: 5103 - DNA, 945 bp, Homo sapien
ctaagggtggcccactcttgtgattgccccatttcctctggcaacaaaagccagagtgttgtgggccaagtccccccacagggcctctgcagggcatggccctgatttccctggtttgagactcacttcctcatctccctgtcctctgagataatatgagtgagcacttaggtatcatatcagatgctcaaggctggcagctacccccttcttgagagtccaagaacctggagcagaaataatttttatgtatttttggattaatgaatgttaaaaacagactcagctgtttctttccttttactactaccagttgctcccatgctgctccaccaggccctgtttcggatgccaactggcccactccccaagcacttgcccccagcttgcgaccattggcactgggagggcctggcttctgggctgatgggtcagttgggccttcataaacactcacctggctggctttgccttccaggaggaagctggctgaagcaagggtgtggaattttaaatgtgtgcacagtctggaaaactgtcagaatcagttttcccataaaagggtgggctagcattgcagctgcatttgggaccattcaaatctgtcactctcttgtgtatattcctgtgctattaaatatatcagggcagtgcatgtaaatcatcctgatatatttaatatatttattatattgtcccccgaggtggggacagtgagtgagttctcttagtccccccagagctggttgttaaagagcctggcacctacccgctctcacttcatctgtgtcatctctgcacactccagcccactttctgccttcagccattgagtggaagctgccccaggcccttaccaggtgcagatgcccaatcttgatgcccagccatcagaactgtgagccaaataaacctttttctgtataaaaaaaaaaaaaaaaaaaa

SEQ ID NO: 5104 - protein, 130 aa, Homo sapien [sequence omitted]

SEQ ID NO: 5105 - DNA, 1253 bp, Homo sapien
  Unsure 285, 290, 296: Unknown base
gctggctttggcttttttatgtagaaaaggaacctattgaaaagatactgattggttccaataactgctagaagtttctgcaaaaccatgctttgaaagtgagcaggaaaagaagagactaggctgtggctgggagcacagccaaaattacaaaaccagcccagggatgatgatcctgttcatgcacagccactgtccccagcactaggcacagactctaccactgcctcactgtctctgctggacttggaaacttgatattactgttactgctgcactgtctgncatgnaaatgngttgtccagggtcccttcttcatcctttcatctctagcttataattcaaagtctgggattgagtggccaatcctaggtcacatgtccatgtcctatctccaaggggggctgggaattgaatatctggcattttccactttcacttcttatgaattaaggaattctacaaataatagaagtgggattcaggtggtaggcagacaaaaaagcctcacaattatccactacgccacccttgtataaccttaccctcattcactgtctactctcaaaactgtggagctactaatgaagatttgtaaaccctgggcttatgagcacccattcctttactacaactcagattgctctagaagctcagttcccagcacttggatttttccagtagctgaattctacctgaaggaagggcagaaacaaagggtgaagaagaggctatcacttccaagtatcctgcacccctgggctcaagacctcactggggagggagtcttttgggccacccaccaaacagcactggcattatgcctctcaccctagaccatggttacacgtggtaaaacaaccccttctggtgatacattcacaactctctagtttcccccaaatggcactatggggagcgggagcttgccttttcctcagacttaaaacaataagttttccccgtgtttcccctctaatgctgttttcttttgaccaagcatgtctgaattctagagaagtcaggaggaacacacccattctcggtttgaagggactgatgttctgaagtacaactgggcacagtcccaggctcttcaggacgcttcctccattcacacagcggggatgtgattgttacagcgggtggtgtgtgctggctgagaagccactgtgaattgattcttcttctgaagtttatgtttctactttttggaaatgaataaattacagccagtccatcaaggaaattgc

SEQ ID NO: 5106 - protein, 83 aa, Homo sapien [sequence omitted]

SEQ ID NO: 5107 - DNA, 1283 bp, Homo sapien
atgaaggcttatctgcattcattccccggccctccctgccgtctgcacagcctcctccaggcctccccttcccagtgaaaagcaccaccatccagacctcaggaagcaatcattttagcttcttctccttctccctcaccatccaggacatcactgagccctgtcagttctgcccccagaatatctaagttcatccaatgccccatttccactgctgcttcctcacccaaatcaggatgtttctggccccgtctccctcctacctggtctccctgcctgtaccctcctctccactgggcccattctccaccggcagccagcatgatctctaagaaatgtacatctgtcatctgtcatatctgctgaaaattgttcagggcttcctgctgccttgagaatgagggtctgaatcccaaacaagggttcaaatctcaacctctcaggcctaccctgaccttacgtatctttcctcagggcctgtgcacatgctgttccttcttcctggaatgcttgtccccatagttttcagctggcgaatgtgagtcaggtctccccttaaatgtcatctaagagagccctttctaattcctccccttcatcttaactctatccccaatacactctctcacagagactgttcttttccttctgagaccctactccagcttgtagttctaaatctgtgattatgcactgtctgtcttcctcttgaggtcaggggccatttcttttgttctctgctatgctcaggacccagatcaaaggagctcagtaactatttacaggcgtacatcatatgtggaggacacttatgctgtgatggccccacacacagcttcctttggggtctgtcccctgctctccgttacccgcgtggtagccactgagcactggctcttcctggcttcactctctggcatcaaaacttatcagtcctacatctcagtcttttgcaaggtgacacttatctgattacctaattcacacgaaggtgttaatggtggtaatggcatagtatttattaccccaggggacccagaacggtggtatcaaaacatatcattccccagtggtttaaaactctggtagctttccagggagtccaagtggagtccagtctccttagctgagttcacagggccccgtctgcacgacttggcttctgtcggcttccctagccctgacttcccaagccttagtcatcaccctctctcccacccagggctcagcacagtacctggaacagtcaagccctcaataaatgtttactgagtgcattaaaa

SEQ ID NO: 5108 - protein, 61 aa, Homo sapien [sequence omitted]

SEQ ID NO: 5109 - DNA, 1582 bp, Homo sapien
ctcgagccgaattcggctcgagagcggttcagcaggcagaggttctcggacgccctccggcgaagccacctgttgatgcttttgaccttctgtccttgttcctcgtcccatctggagcatttccaattctggttttgcggagcagcaggtctgagcttgtccggcgagggtgggagttggtcccggcggagatccagtgggaagagccggcggctgcccgggcaactcccccactggaaaggattctgaaagaaatgaagtcagccctcagaaatgaagttgactgcctgctggctttctgttgactggcccggagctgtactgcaagacccttgtgagcttccctagtctaagagtaggatgtctgctgaagtcatccatcaggttgaagaagcacttgatacagatgagaaggagatgctgctctttttgtgccgggatgttgctatagatgtggttccacctaatgtcagggaccttctggatattttacgggaaagaggtaagctgtctgtcggggacttggctgaactgctctacagagtgaggcgatttgacctgctcaaacgtatcttgaagatggacagaaaagctgtggagacccacctgctcaggaaccctcaccttgtttcggactatagagtgctgatggcagagattggtgaggatttggataaatctgatgtgtcctcattaattttcctcatgaaggattacatgggccgaggcaagataagcaaggagaagagtttcttggaccttgtggttgagttggagaaactaaatctggttgccccagatcaactggatttattagaaaaatgcctaaagaacatccacagaatagacctgaagacaaaaatccagaagtacaagcagtctgttcaaggagcagggacaagttacaggaatgttctccaagcagcaatccaaaagagtctcaaggatccttcaaataacttcaggatgataacaccctatgcccattgtcctgatctgaaaattcttggaaattgttccatgtgattaacatggaactgcctctacttaatcattctgaatgattaaatcgtttcattttctaaatgtgttataatgtgtttagccctttcttgttgctgtatgtttagatgctttccaatcttttgttactactaataatgctataaaataaatatccttgtacttctttgtgcatttgtttttttactgagctaattttaatgatttcagcaaaagttattttgttattgagtgatgaaacaaaagatttttgagggtgttcatgagcataagtatcatatagtcacttatggttgttgtgttcctagtacttagtacaaggtatcggaattgttctttagttaatcttttatcttgagaagttaaatcttggtgtaatcttatcctcatgttcatataaagatatgtggagtttgtagtgaggacttagagccgggtacaatttcatggttaaattagaaatgcttttggcagtgttaacagctcttttagaatttgtctagcaggcttttcagtttttgccagaaagccctaaaaaaatagtaggaaaaaaatgctt

SEQ ID NO: 5110 - protein, 221 aa, Homo sapien; identical to SEQ ID NO: 2261

SEQ ID NO: 5111 - DNA, 446 bp, Homo sapien
atcactgcagggactgcagctatgggattttaaaaggaagtgcacagatgggcctaggagaggactcaggggcctgactgattaaagcttggccaagcacagaatctttcccactctccagaagctcaccctgacctctccttttcactcaggccctgtctctcattaacagccagtagcttattggtgatcctagatgcagcctgcaaccttttgtacaactcacagaagcactgatttgctgtcaaatggtggaaaagttcaagctgccaaactttttcttaaaggaccaaacagtgaatactgtaggccttaactgttgcaacaccatagcctctgttgcaacaactcaactctgtccttgtagtacaaaagcagccactgacaatatgtccataaatgaatgcgcatggttgtgttctaataaaactttatttacaaacggg

SEQ ID NO: 5112 - protein, 39 aa, Homo sapien
MQPATFCTTHRSTDLLSNGGKVQAAKLFLKGPNSEYCRP

SEQ ID NO: 5113 - DNA, 3256 bp, Homo sapien
  Unsure 1734-1894: Unknown base
cagaggcagggaaaaccacgcagaagcaggagctgaagacctcagaccggcaccaggacagcttaatgaagacaaactgaaggggaaactgagatccttagaaaaccagctatacacctgtacccagaaatactccccttggggaatgaaaaaagtactactggagatggaagaccagaaaaacagctatgagcagaaggccaaggagtcactgcagaaagtgctggaggagaaaatgaatgcagagcagcaactacagagcacacaggtatggggatgccacatagacatggggctggggactccaggcagcttggggaacaaggggagccagctgcacaactccctggagccctctcctctctgatctccctcagcgatccctggccctggcagagcagaagtgtgaagagtggaggagccagtatgaggctctgaaggaggactggaggacccttgggacccagcacagggagctggagagccaactccacgtgcttcagtccaaactgcaggtaccaggcactgggggtggggagggaagacagggtatggggaggagggatggtgatgaaagaagctgttctggattagggactccaaaggcagctgacagcatctggctttcagttcctcagtcaccactactttgtaccaaattcactgttttggctctgaaatctaattttgagtttagcaaggatgtctgcattgctcatgcaaatgaactaagcgttcattggaatgacaccatcaccacccaaatgaaaagaactggctggaatattcatcagcctactaatgtcatctcccaacccactctccaaactccatcccaaaaaagcatccagttcagaattgcccactgttggcaaagaaagaatgtcactaatttatttacaggtgagtattaacactttctgccaatgtgtattttaagcaattacatttagcaattacaattagattcttggcatcctcaagggttccatcatcttcaatctgtcctaagcctcagtttcccccatctctagaatgaggataatagtacctacatcataaggtggctctgagtattaagtaagatgatccatgtcaagcacttagcacaatgcctggcacacaaaaacactcagtaaatattagctattattttgcatagatttatttacctggtttggaattttgaggatccacctcaaaagctgatctttgtaattttcctgaagcagggctcagaacagcccacttgataagagacagagtatgtgagtcttatcaaaggagtgaacccagctggtcactctgcgtggtatccacagctcaacctttgttgttttcttcttcccatcacctataaggcaactcctatgaagatttttgtgaggggttttttaactttaaatctttgtggaaaaaaaaagaccctaaccaaaaaaaaactgatactgccagaagtagaaaaaagagaaaatgaaaacatccagaaaactaatgactttgtattccttaatttggtgatttaccaaagtgtcaagacatgactcccacaccaatgacaaccacttacatttcccctagaatggcagattttttaacgtactgggtttcctaaagcaattcttattttatatattctaatttatgtacatgaatgtgtcacttagacctgtcactagggatggtttagaaaataaacttacactgcacatgcctcagtccacttcaaaactnnnnnnnnnnnnnnnnnnnnnnnnnnnnnnnnnnnnnnnnnnnnnnnnnnnnnnnnnnnnnnnnnnnnnnnnnnnnnnnnnnnnnnnnnnnnnnnnnnnnnnnnnnnnnnnnnnnnnnnnnnnnnnnnnnnnnnnnnnnnnnnnnnnnnnnnnnnnnnnnnagacgcgagttccttgtgaatatcaaaagtctaatctgctgttataaatatgaggaacaaagcaaagggaagaaataggaaaaaagaaagacttctctattttctcatctccctaacattccttctatctctaaaattccagacttttctacattttcctcttccatggtacccgccccccaacctccaccccaacactgaccatccttctatattggcccctcctcctccttacagggagcagatagcagggacttacagatgaaccaggccctgcgatttttggaaaatgagcaccaggaactgcaggccaagattgaatgcctgcaaggggacagagacctgtgcagcttggatacccaggacctacaaggtactcttctccttggaggccttgagtgcatggcagccatggccaagtgagctaagaaaaaagaaactgaattaagagaaaggcttcagccttttatttgtttgcttgattggttgattggctttataatctcattttaccttgagggagaggcaggactgttttaatcatccaaaattgaaaattaatttcactgtagtagatagagtatcttgttgtctgagctctcttttttagcccatccctctgggccagatcacagctgctcccacatcagtcacatatgtcaaggccacagtcctaatttgaaagggaaaggtcagttgaaacacaaggcatagagaaagtctctcagtcacatcctctgtgtccgctgatagagaggactagatagtgtgtaaacacaagcctcaatgcaacccaacattgttgatgcacaaaaacctgaggtacttggcttctggtttacctcttcagaactgggacacgaagatagagcaacttccaatagacacacgttaaagaccatgacaagacagcatctattactaatttccatcctaagtactgagttcattaagtcttgggttcctttattttggcttgcattattgcattttcagatcaactaaaaaggtcagaggcagagaaactcaccctggtgaccagagtacagcagttgcagggtttgcttcaaaatcaatccttacagcttcaagaacaggagaaactcttaacaaagaaaggtcagcaaatttattaccacaaattctaagatattgctcttctcttacctgcctagaggcagcgggatggactacatgacctcctggagtcccagccagttctgggagtctgttaagtccgggatgtgtgggagctttttaaggactgatcattggctctgaggacacttcaactagttagccttctatcttgaggtatataaactgtgaaaagggttctattctctctgaaagcacatgtct

SEQ ID NO: 5114 - protein, 121 aa, Homo sapien
  Unsure 1734-1894: Unknown amino acid
RGRENHAEAGAEDLRPAPGQLNEDKLKGKLRSLENQLYTCTQKYSPWGMKKVLLEMEDQKNSYEQKAKESLQKVLEEKMNAEQQLQSTQVWGCHIDMGLGTPGSLGNKGSQLHNSLEPSPL

SEQ ID NO: 5115 - DNA, 903 bp, Homo sapien
ggcttaactggtacatctggactctgatgagtgagaagtccaagcaaatagaaaagccacagccaaacgataaaactctgcaaagacaatgtctagcacttatatctccagtaactcctgtcaaggtttattgttgcttgttcatcattgcagtcctgactacaagtgtgattgcactttctattgttttgtcagaatttcctgaaaagatacaaaggcccttctgaccattggattggccttagaagagaatcatcccatcgcatttggaaatggacagacaacatggaatataataacatttttcacacatttacaaaacaatttgggaggaggctggaaatcatcttgactgaagaccaccaatggcagcagttcatttgggcttgctatcagaggaagtggagaatgtgccttcctgaatgacaatggagtcaacagtggcagaatctacatgaacagaaaatggatttgtagcaagccaaacaattatgtctacagttgccagttatgtccccactgggatactacctagtagagctgtgagaagagggccaccatcctccagactccagaatggtggaatcatcagcagcttccaccatgcccctggaaaaactgcaagtaacagacctgcacatgtatcccctacatctaaaataaaagttggaaaaaatggaactttgatgttaagatgcactgatacaaaacttaaatttgggtctcctacattaaaacaatatgagtctcttaaaatattgatctgtcttagtaagattacaagaggcttgatttttaattctgcaatgttcccttaacagccattctgaattacaaactaaattcctatttctgcacattccttggtgagaactgtctagtcctgggttggggattatctta

SEQ ID NO: 5116 - protein, 108 aa, Homo sapien [sequence omitted]

SEQ ID NO: 5117 - DNA, 3797 bp, Homo sapien; identical to SEQ ID NO: 4989

SEQ ID NO: 5118 - protein, 665 aa, Homo sapien; identical to SEQ ID NO: 4990

SEQ ID NO: 5119 - DNA, 616 bp, Homo sapien
gactggaagaaaaatgtttcccaagcaaccagctttattctagctgactcactttgtactccctccttccatgtcattgctcctttttacctctttaggagtctgttaggaattttgcaacctgacaaaaggcttctgcagagccaaccaccttttttttcctcagggcctgaaaaaaaagtgagtcttcctactgacaggaaaataaaaagagaccttgttagtcaatttttttctgtatgttcaattgttctggtatattcttttccttgagtataaaggaaaagtctgaaaataatggtaaaacgtgtgagattgctctgatatttcctttttgtactttaggaggtggttctttgagttcctagttgtttagttgaacatgaagcaggtggcaaatgtaagtttagtctacacactgattccttcctgttcgcagaagggttcatgtgttcgtttttaaataatcttcgggtaaggaatagagaaacaccaagcccaagaggcagaaggatctgtctatagctaatgagtgagaaactaactgtgggatggtttatggtctctggctctttgaaaccacagaaatttaaagttatttttaaaaagccaactt

SEQ ID NO: 5120 - protein, 90 aa, Homo sapien [sequence omitted]

SEQ ID NO: 5121 - DNA, 1907 bp, Homo sapien
  Unsure 1340-1396: Unknown base
tgtgtttatgcttcatacaaagttgaatgattgattggcgtggtggacatataccatcatgctcattttttttttttaaagctttttaaaatgccacctcatggaggcgagggggaggagaagctcattttacacaattcagtagttaaatatggactcggtctcaacttggaattcttatgctttgagaacaaatcaacaaccagaatatttattggaatctagcttttattataagaaggacccaaagattatatcctgagcaaatgcacactccccatgtgaggacatgaagtatttacttggtgaatgtttatgttcttggtataatctaggaaccctatgagtttatctcagagtgaactaattctagatttgttgtcaatagatgctataattcaagaatgttgctctccatatttgaaaaacgatggataggagggtgagggaagcatacaatgttgaaccagtttctcttatttaaatattaaatactttaagcctttaaagtgaagttgatgctagctgcaaacatttactcttgtatttatcttcactaggaaactgtggactgtaatttattttattaaatatttagaagattatttggcttgtgtgttcaggtgagaaatactgagttgtttttgtttaatttcatggttttttttttttaatgatccctagtgggggaaggggaaaggaatagtctgataaacagatgtgcatattttaaaaacaagtgaccttttgggaatgtaggcatttagacgatgattttagtcgcactaggggtgggattcaaactactggtcaaagaccatttggtaaagaaaagggaacatctccgatgggtgttaaggtaggattttccatgcagccctttatgtctgagaaatagtctcctctgccattggggtccctgcggaatcttctacaggaattgcagctcttcacgtcatgctaggttaccagcatgggcttcccagagcacttccactctgtttctaactccactgacttttctgacttgtttcttgagggacttggaaaaggggaaggtattattcacacagatgtgtgtatgaagcctaaataacatccaactttttttccaaaaacatagtaagagtttaaccataaatggaaaagaaaatgtattcaaaatacttaaatcaaaactagaagatggggaaaaaaagatttattctatacaaagccttgtctggaccactttagagagacttctatttttttaacccttctataaatatttgatggcacttgaaatattcctgcaataaaatgtgatttgtgtaaagaaaaaaagattttgtaatgtnnnnnnnnnnnnnnnnnnnnnnnnnnnnnnnnnnnnnnnnnnnnnnnnnnnnnnnnntttgtattattttcttgatggaatttgtctatctgtctttggaaaactttttatttcattgaatgtgccatagtagaaatgtgtgtttttagttttagactaaggaatagctagttgttgtgttccgacattccaaaatgcaaaacaacctagtagtatctttcatgaaaaggtttaagtagtatgtaagcttctctcattgttgcttttttgcacatgttcttcattcctctctagtgcaatatgtacatagagcacttgcgggtgtaccttgatccctcagggaaaaatacatatttgtacagttttttggggtttttttgttttttggttttttttgttttgccttttgtttttggctaaggaatgtcgatcgaatcacttgttattgttgaggggcagccagataataatcctaaagccactgtttccaacattgattgtttaaatcatatgtccttccaatgctattattttaagataataataaaaagttattttctgacaaaaa

SEQ ID NO: 5122 - protein, 47 aa, Homo sapien
  Unsure 1340-1396: Unknown amino acid
MSIESLVIVEGQPDNNPKATVSNIDCLNHMSFQCYYFKIIIKSYFLT

SEQ ID NO: 5123 - DNA, 2532 bp, Homo sapien
ccggggcggcggttgcatcagattctaggaagtgtctgtagccgcagctgcgggtccgggattcccagccatggcagattcctccgggcagcagggcaaaggccggcgtgtgcagccccagtggtcccctcctgctgggacccagccatgcagactccacctttacaacagcctcaccaggaacaaggaagtgttcatacctcaagatgggaaaaaggtgacgtggtattgctgtgggccaaccgtctatgacgcatctcacatggggcacgccaggtcctacatctcttttgatatcttgagaagagtgttgaaggattacttcaaatttgatgtcttttattgcatgaacattacggatattgatgacaagatcatcaagagggcccggcagaaccacctgttcgagcagtatcgggagaagaggcctgaagcggcacagctcttggaggatgttcaggccgccctgaagccattttcagtaaaattaaatgagaccacggatcccgataaaaagcagatgctcgaacggattcagcacgcagtgcagcttgccacagagccacttgagaaagctgtgcagtccagactcacgggagaggaagtcaacagctgtgtggaggtgttgctggaagaagccaaggatttgctctctgactggctggattctacacttggctgtgatgtcactgacaattccatcttctccaagctgcccaagttctgggagggggacttccacagagacatggaagctctgaatgttctccctccagatgtcttaacccgggttagtgagtatgtgccagaaattgtgaactttgtccagaagattgtggacaacggttacggctatgtctccaatgggtctgtctactttgatacagcgaagtttgcttctagcgagaagcactcctatgggaagctggtgcctgaggccgttggagatcagaaagcccttcaagaaggggaaggtgacctgagcatctctgcagaccgcctgagtgagaagcgctctcccaacgactttgccttatggaaggcctctaagcccggagaaccgtcctggccgtgcccttggggaaagggtcgtccgggctggcatatcgagtgctcggccatggcaggcaccctcctaggggcttcgatggacattcacggaggtgggttcgacctccggttcccccaccatgacaatgagctggcacagtcggaggcctactttgaaaacgactgctgggtcaggtacttcctgcacacaggccacctgaccattgcaggctgcaaaatgtcaaagtcactaaaaaacttcatcaccattaaagatgccttgaaaaagcactcagcacggcagttgcggctggccttcctcatgcactcgtggaaggacaccctggactactccagcaacaccatggagtcagcgcttcaatatgagaagttcttgaatgagtttttcttaaatgtgaaagatatccttcgcgctcctgttgacatcactggtcagtttgagaagtggggagaagaagaagcagaactgaataagaacttttatgacaagaagacagcaattcacaaagccctctgtgacaatgttgacacccgcaccgtcatggaagagatgcgggccttggtcagtcagtgcaacctctatatggcagcccggaaagccgtgaggaagaggcccaaccaggctctgctggagaacatcgccctgtacctcacccatatgctgaagatctttggggccgtagaagaggacagctccctgggattcccggtcggagggcctggaaccagcctcagtctcgaggccacagtcatgccctaccttcaggtgttatcagaattccgagaaggagtgcggaagattgcccgagagcaaaaagtccctgagattctgcagctcagcgatgccctgcgggacaacatcctgcctgagcttggggtgcggtttgaagaccacgaaggactgcccacagtggtgaaactggtagacagaaacaccttattaaaagagagagaagaaaagagacgggttgaagaggagaagaggaagaagaaagaggaggcggcccggaggaaacaggaacaagaagcagcaaagctggccaagatgaagattccccccagtgagatgttcttgtcagaaaccgacaaatactccaagtttgatgaaaatgtaagcatggtctgcccacacatgacatggagggcaaagagctcagcaaagggcaagccaagaagctgaagaagctcttcgaggctcaggagaagctctacaaggaatatctgcagatggcccagaatggaagcttccagtgagggggcacaggactgactttttaaaccattgtggactagtggctgctgtctgcctcagtgacaatgtcccagcgctcctatcatgtttacagtcacccttgggtcctaaattaagagttgtgttcatgtaggttcgtgtcgtcgttggctctgagacattgataataaatttttctcaacagtgaaaaaaaaaaaaaaaaaaaaaaa

SEQ ID NO: 5124 - protein, 726 aa, Homo sapien
MADSSGQQGKGRRVQPQWSPPAGTQPCRLHLYNSLTRNKEVFIPQDGKKVTWYCCGPTVYDASHMGHARSYISFDILRRVLKDYFKFDVFYCMNITDIDDKIIKRARQNHLFEQYREKRPEAAQLLEDVQAALKPFSVKLNETTDPDKKQMLERIQHAVQLATEPLEKAVQSRLTGEEVNSCVEVLLEEAKDLLSDWLDSTLGCDVTDNSIFSKLPKFWEGDFHRDMEALNVLPPDVLTRVSEYVPEIVNFVQKIVDNGYGYVSNGSVYFDTAKFASSEKHSYGKLVPEAVGDQKALQEGEGDLSISADRLSEKRSPNDFALWKASKPGEPSWPCPWGKGRPGWHIECSAMAGTLLGASMDIHGGGFDLRFPHHDNELAQSEAYFENDCWVRYFLHTGHLTIAGCKMSKSLKNFITIKDALKKHSARQLRLAFLMHSWKDTLDYSSNTMESALQYEKFLNEFFLNVKDILRAPVDITGQFEKWGEEEAELNKNFYDKKTAIHKALCDNVDTRTVMEEMRALVSQCNLYMAARKAVRKRPNQALLENIALYLTHMLKIFGAVEEDSSLGFPVGGPGTSLSLEATVMPYLQVLSEFREGVRKIAREQKVPEILQLSDALRDNILPELGVRFEDHEGLPTVVKLVDRNTLLKEREEKRRVEEEKRKKKEEAARRKQEQEAAKLAKMKIPPSEMFLSETDKYSKFDENVSMVCPHMTWRAKSSAKGKPRS

SEQ ID NO: 5125 - DNA, 837 bp, Homo sapien
  Unsure 404-623: Unknown base
aaaattcttccttttttgctagatttgttgtcaccaaaattatctgtttggctttaggaagagggaattttattagattatcaagctttgtaaaatttatttgtacttgggcaaacctaagtaagagcatactgcaaagctactgcttggatgtagagggctaaattgtaggtacttctgaaactttttatagatactgactcataagtgtaatttgaaagtaccccttgacccaaacaaaactgcttctcaaaacttctcattttctccctgagaagcattctaaagaattgttctctgttcatttctaagagaaagatttactgggtgtatgatgcggttacttttaagttatttctactggccagttggagcaatatatattaaaggtcttgcatacagtnnnnnnnnnnnnnnnnnnnnnnnnnnnnnnnnnnnnnnnnnnnnnnnnnnnnnnnnnnnnnnnnnnnnnnnnnnnnnnnnnnnnnnnnnnnnnnnnnnnnnnnnnnnnnnnnnnnnnnnnnnnnnnnnnnnnnnnnnnnnnnnnnnnnnnnnnnnnnnnnnnnnnnnnnnnnnnnnnnnnnnnnnnnnnnnnnnnnnnnnnnnnnnnnnnnnnnnnnnnntttggtttagtctacaactataccttccttataacttaaccatatgcatttattaggaaaagtttatgtaatgcagacaggaagctctatgttcccttctctggggcatcctgaacgtctgaagggtcacagatgtctgtgtagagatctgtaagatgtcaaagaataaagataatttatagactaagctataactcatgtgcctttactattt

SEQ ID NO: 5126 - protein, 115 aa, Homo sapien
  unsure 25-98: unknown amino acid
  Unsure 404-623: Unknown amino acid
MMRLLLSYFYWPVGAIYIKGLAYSXXXXXXXXXXXXXXXXXXXXXXXXXXXXXXXXXXXXXXXXXXXXXXXXXXXXXXXXXXXXXXXXXXXXXXXXXXWFSLQLYLPYNLTICIY

SEQ ID NO: 5127 - DNA, 2343 bp, Homo sapien
agagagatagctcccatgatggaaaggaggatggagtgcggtgccgtcatcatgaatggatgtatttatgtcactggaggatactcctactcaaagggaacgtatcttcagagcattgagaaatatgatccagatcttaataagtgggaaatagtgggtaatcttcccagtgccatgcggtctcatgggtgtgtttgtgtgtataatgtctaattgaatctgcagaaatgaccaagcaatcacttttttggagtatagttttataaaaaaaagaatgcagggtttgaagttccttacctgataattgtgtctggcacatgataggggatcagtaaattgtaattcctaaccctactgtactcccaaacatggtgattcatggtcaagaaaaatcttatgtatatgtatgtatatacacatatatatgtgttcatatgtatgcgttcatacatacgcgcgtatgtatacatatatgtgtatacatacgtgtgtatgtatacatatatgtgtatacatacgtgtgtatgtatacatatatgtgtatacatatatatgtgtgtatatatatacacatatatacgtatatatgtgtatatatatacacagttgaatcagtgggattaatacctataatctctggttttcaaaggtaatatggaatatttgacacttggtaaaaggtgaactacctttgtagtgaatcttttcctcttggtagcatcaacactggggataaatcagaaccattctgtggaatgaaatgtttctcaagagcctataatatagtagatagtgcatattaagatgtctggctgggcatggtggctcatgcctgtaatcccagcactttgggaggctgaggcgggaggatcacttgagcctagaagttggagactaacctggcgagaccctgtctcaaaaaaaaaaaaaaaatcaatttagctagcaggaatttgacatttaaagagggaatcttctctacctctacaaaatcaacacttaacacttttttcaccttcagaattatttagaatgtggatttactttgtctagttttttcctttatagtgtaatttattgttactctctatttactgactaccagagatatacaaaatactgtgcaaaagattgttactgttcaaagagcttacaaactaaatttaaaagaatagcaagtctgaaaaatagaagatagtcaaatatttgtttatgccaagaactgtttttaattttcagctttgatgtaaattgctagcttaggtgtctttagttcaagcatgttaggaaatcctctttattcttaaatatagatacatgtctgcatatatgattgaattttagagccagaaagcatgtagagcagttgtgattagtagaaaatacactgacaagaagatatttgcatttatttcccaaagctgccagtaactagattttgtgacttaagtcatttaacctctccttgattagagcttcctgagccatgcacactggcactgcaaatcacagacaggcctagatacagatcccctcaccccttgctacatccaaaggtggcctgggtggctggagcctctgggccagaaccacctttgtccattttcctcagtgtgcctacagcatcgctttccatgtgtgccataacttgggaatagttgggatgtgttgcttaactcctttgcaccattagttatctgtgagaccatctattccacactcttcattttttaaaaagagacaataattatttttaactcactgaagtttaaaactacctagcatttctgattaaaaaaaatttagaaggaaaattttaatgcatttatttcagatggcgttttaaatagatacaaccctttggaaacacaatatggtactacatagcaagggctgtaaaaatgaccatatcctttgccccataaattctacttctatacttttaaccttaaaaataattcagaaaaaagataaatgcatgaagacatttatgtctgcattctttataataacaaaaattggggaaaaaaactccatgtcaagaaagtgggataagaaaaatagtgaagtattatactgccattaaaataattatttggaagactgtagaaacgtggacatgtttgatatggtaagtaaaatgagcacaatacaaaatagtatgcatactatgattgtgactttgtaaaatctttatgcatgtggaaggtaatctgcaaaacaaattcattgtgttagtgtagcgggatatggaatgactttatttatttaaatcttttctttaatattactttgtattttcaataaaaataaatcactgtaaaaaaaaaaaaaaaaaaaaaa

SEQ ID NO: 5128 - protein, 75 aa, Homo sapien
MYMYVYTHIYVFICMRSYIRAYVYIYVYTYVCMYTYMCIHTCVCIHICVYIYMCVYIYTYIRIYVYIYTQLNQWD

SEQ ID NO: 5129 - DNA, 1007 bp, Homo sapien
  Unsure 905: Unknown base
aaaaccaagttgtcttggaacaaagatggcattctccatggagtcagatatcaggatgggaatctggtgatccaattccctgattactgtggcatgatcctccaccattcacactctaccctggactctgggaagggacactgctgccttgaaactctacaaccctgaaccttgatgctggttgctgcagacaagaactgcttctaccctgggtcactgtcactgctaagtggaaagtcatgaacttgatggtaccagtcactctgggcctaaaccgacatagccaggaaacggttcaccccccacaaacagaatcatctagacctgtccatgatttggaatcgtggcccaatacttcctggccccagagagagaaaaaagtctgaccaccccctactcaaagtgccaactcatttccttcccagaattaatcacttcccaaaatgtatgactgtgtgaacatcaattcccttcaggggaaaaccccactcccacctctcaggctgtcatcttaccctatgaccccaacctgacaatcatgcaacagcccattattggtaccttttccaatgtttaggtgactcattcttatctacaatcactttgttgttctaggaaagtttttgacacagcaggcatttgatatatatttcttgattaaatgaaagattaaatgaataccatcttagatgtctgcatagtgctttaaagtttacaccactattctttcaaatagtacaagagagaactaagctgtgtactcaactgggaagaagcagaactgagagtgggagcacctggtattctgatttcttgtctagaactatactatattctgagatcactaaactacaacctcaggcgactctgcctacttttgtaaagaaagttgtattggaacacanctgcgcccatcggcctgtgcactgcaatggcagtggtgaagcatggccttcagagcctcaaatagttactatctgactctttatagaaagtttgctgactcc

SEQ ID NO: 5130 - protein, 55 aa, Homo sapien
  Unsure 905: Unknown amino acid
KTKLSWNKDGILHGVRYQDGNLVIQFPDYCGMILHHSHSTLDSGKGHCCLETLQP

SEQ ID NO: 5131 - DNA, 903 bp, Homo sapien
gtgtattatgcctccatgacattgttacattctatgaggagcatctgtctcctttctagacttgaactgtggtagaaaaagcccccttctctcttctatctacttagatttggtgatgctaggaatgtagtgttttagatattaattctatttttatttattcatttttacatcaccaataggatctgaggtggagatggcgggtattatcactggcattttacaggtgagaaagcccaaagccactgaggtaattaatggaataattgattttgaacttgggtctgtctgatttcatgtgcaagattatatacttagtgattttgattttaagtttattcttaacattttaaaccagactattaactcttacctttataaccacagatacaaagaactgtatcatttattttctgaatataaaatattaatggtcaatataaaaatacaaaaatagagaactatatacaacagaaaagcaaaattacccactaataacactttgatttatatccctttagacactgtttagagtttatacatatatgtaaatatgcttgtattttaacaaaattgagatattatataaactgtttgtagcagggtgtttaaaattttaacaatatgttatggatatctttctgtgtcaataaatgtgtatttacattagagttccaagcatttgaactgaatctagtccaaaaatgatgtgttttatttggccaggggacattttttaaaaaaatctttaagcaatagacagcttttgaaattcagaaaatgttacgtacaattcaatgtcctgcatgttttaaaatactggataatctaacaacacagaacacctcccactccccacctcacaaccaccacacatatactttcttgcttggcatcagttaa

SEQ ID NO: 5132 - protein, 40 aa, Homo sapien
MLRTIQCPACFKILDNLTTQNTSHSPPHNHHTYTFLLGIS

SEQ ID NO: 5133 - DNA, 2582 bp, Homo sapien
attcaccaaggctaacatggtggccacctctactgctgtcatctctggagtgatgagcctcctgggtttagcccttgccccagcaacaggaggaggaagcctgctgctctccaccgctggtcaaggtttggcaacagcagctggggtcaccagcatcgtgagtggtacgttggaacgctccaaaaataaagaagcccaagcacgggcggaagacatactgcccacctacgaccaagaggacagggaggatgaggaagagaaggcagactatgtcacagctgctggaaagattatctataatcttagaaacaccttgaagtatgccaagaaaaacgtccgtgcattttggaaactcagagccaacccacgcttggccaatgctaccaagcgtcttctgaccactggccaagtctcctcccggagccgcgtgcaggtgcaaaaggcctttgcgggaacaacactggcgatgaccaaaaatgctcgcgtgctgggaggtgtgatgtccgccttctcccttggctatgacttggccactctctcaaaggaatggaagcacctgaaggaaggagcaaggacaaagtttgcggaagagttgagagccaaggccttggagctggagaggaaactcacagaactcacccagctctacaagagcttgcagcagaaagtgaggtcaagggccagaggggtggggaaggatttaactgggacctgcgaaaccgaggcttactggaaggagttaagggagcatgtgtggatgtggctgtggctgtgtgtgtgtctgtgtgtctgtgtgtatgtacagtttacatgaatgttcctcaggacatggcatacaatggccttggaggtccaaataatatcaagtacatcttggagatgagggtgcctgtcctggacagacctcggcatgccttctgtttctccttcaatgctccttaaggcctatgtgctgggaaaagggtcttccctgtttgtttgtttgtttgtttgtttgtttgtttgtttgttttgagacggggtctctgttgcccaggctggagtgcagtggcgtaatctcggctcactgcaacctctgcctcctgggtgcaagaaagtctcctgcctcagcctcccaagtagctgggattacaggcacgcaccaccacgcccagctaattttggtatttttagtagagacagggtttcaccattttggccaggctggtctcgaattcctgacctcaagtgatccacccaccttggcttcccaaaatgctgggattacaagcgtgagctaccctgcccagccgggtcttcccagttttaacaaagaggtcactgagccacaggcggagttaggaactaaattgtctcctcctcccaattcatatgttgaagtcctaaaccaaaatgtggctgtatttagagatggaccctttgggaggtaattagggttgactgaggccatagggtgaggtcctaacccgatggaattgacttctttataagaggaggaggaaatacaagagggcctccccacccctgctgcacacctacactgaaggaaggctatttgcagatgcagcaagaaggcagccatctgcaaggcagaagaagagagccctcaccaggaactgaataagtcagtcagtctgggacttccagcctctagaactgtgaaacaataaatttctgtggtgtaagcaactcaatctatagtagtttgttactattttgttatagcaaccaaagatgactaagccagacaggttatgtcactcgccaagtgtcttagtctgtttgtgctgctataacaaaataccttagactgggtaatttacaaacaacagagatgtatccagagatccacagttctggaggctgagaagtctaaaatcaaggcaccagcagattccacatctcatgaaggctcactctctgcttcacagatggcactgtcttgctgtgttctcacatggcagaaggggcaaacaagcccccctgggcctcttttataaaggcactaactctatgcctaaaggcagggccctcatgactctatcacctaccaaaaggctccacttctttatactattggaggggtagaaggaacttcctttctagaccttgaaggtttaagaatttgaatctataaaacaagctgacaatagacagattaacaggagaagaagcatatacattttttaatgtgggccagatggcagaagcttaaataacaccccaagctacaggaagtgaggcctctgatggggaggtagtgacacaggctgtgggagggggtagggggaggaagtctgtggtgagcaaagtttgccttattacactgataaagtgtaattacactaataaagctggatcacctgaggttaggagtttgagaacagcctggccaacatggcaaaaccctgtctctactataaatacaaaaattagccaggtgtagtggcagggcacttgtagtcctatctactcgggaggctgaagcaggagaatcgcttgagcccaggctgtaaaggttgcagtgagccaagatcgtgccactgcactccagtctgggtgtcagaatgagaccccgtctc

SEQ ID NO: 5134 - protein, 265 aa, Homo sapien
MVATSTAVISGVMSLLGLALAPATGGGSLLLSTAGQGLATAAGVTSIVSGTLERSKNKEAQARAEDILPTYDQEDREDEEEKADYVTAAGKIIYNLRNTLKYAKKNVRAFWKLRANPRLANATKRLLTTGQVSSRSRVQVQKAFAGTTLAMTKNARVLGGVMSAFSLGYDLATLSKEWKHLKEGARTKFAEELRAKALELERKLTELTQLYKSLQQKVRSRARGVGKDLTGTCETEAYWKELREHVWMWLWLCVCLCVCVYVQFT

SEQ ID NO: 5135 - DNA, 1517 bp, Homo sapien
ctgcgcctggcgtcaccgaccggtgcggacaggaagaggctctgggctggcacatgtgtatggcggtgaggcgggcgggtacatggcgggctctgtgggactggcgttgtgcgggcagacgttggtggtgcggggcggcagccgattcctggccacctccatagcaagcagtgatgatgacagcctcttcatctatgactgcagtgctgcagaaaagaagtcacaagaaaataaaggggaggacgcgcccttggaccaggggagcggtgcgattctggcgtccaccttctccaagtctggcagctattttgctttaaccgatgacagtaagcgtctgattcttttccgtacaaaaccatggcaatgtctgagtgtcaggaccgtggcaaggaggtgtacagccctgactttcatagcctcggaggagaaggtcttggtggccgacaagtctggagacgtctactccttttcggtgctggagccacacgggtgtggccgtctagagctggggcacctgtctatgctgttagatgtggctgtgagtcctgatgaccgcttcatcctcactgccgaccgggacgagaagatccgagtcagctgggccgcggcgccccatagcatcgagtccttctgcttggggcacacagagtttgtgagccgtatctccgtggtgccaactcagcccgggctgcttctgtcctcctctggggacggcaccctgaggctctgggagtacaggagcggccgccagctgcactgctgtcacctggccagtctgcaggagctggtggacccccaggccccccagaagtttgccgcgtccaggattgcattctggtgccaggagaactgcgtggcgctcctgtgcgacggcactcctgtggtctacatcttccagctggacgcccgcagacagcagttggtgtacaggcagcagctggcgttccagcaccaagtgtgggacgtggctttcgaggagacccaggggctgtgggtgctccaggactgccaggaagcccccctggtgctctacaggcctgtgggcgaccagtggcagtctgttcctgagagcaccgtgttaaagaaagtctctggtgttcttcgtgggaactgggccatgctggaaggctctgccggcgcagacgccagcttcagcagtctctacaaggccacgttcgacaacgtgacctcctacctgaagaagaaagaggagagactgcagcagcagctagagaagaagcagcggcgccggagtcccccgcctgggcccgacgggcatgccaagaagatgagaccgggggaggcgacgctaagttgctgatcgtggcggtctgtttctgtcgactgtggaccacttatgtgcgatccgtggaccacttgcgtgcgatctgtcggccgacgatgagcttgttcggatgtagctccatcgtaagtcgaggagcatctgtgatttgtcctctgcttatgggatatgtttttccgctactgagtctgtgtagtaaatttttgactaggaa

SEQ ID NO: 5136 - protein, 412 aa, Homo sapien
MAGSVGLALCGQTLVVRGGSRFLATSIASSDDDSLFIYDCSAAEKKSQENKGEDAPLDQGSGAILASTFSKSGSYFALTDDSKRLILFRTKPWQCLSVRTVARRCTALTFIASEEKVLVADKSGDVYSFSVLEPHGCGRLELGHLSMLLDVAVSPDDRFILTADRDEKIRVSWAAAPHSIESFCLGHTEFVSRISVVPTQPGLLLSSSGDGTLRLWEYRSGRQLHCCHLASLQELVDPQAPQKFAASRIAFWCQENCVALLCDGTPVVYIFQLDARRQQLVYRQQLAFQHQVWDVAFEETQGLWVLQDCQEAPLVLYRPVGDQWQSVPESTVLKKVSGVLRGNWAMLEGSAGADASFSSLYKATFDNVTSYLKKKEERLQQQLEKKQRRRSPPPGPDGHAKKMRPGEATLSC

SEQ ID NO: 5137 - DNA, 510 bp, Homo sapien
atttcttaacttgattactctttcttcacttgaccagagagtccagaagggcaggttctatgtctggttttgcacaccaattataaagcttcatttatgcatttcaaacttgaatagtaagacgaaaatctttatattttcttatgagtctccataaaacctagcgtttactcattcttaactcattctttgtagcatcataacattgtagactttgtataaaataagtaagatactctttgtatatgcctaagtcaagatctaaaatattatatggtactacaatgtcacttaacatttctcactttctgcctttccatttggttatttaattttataaccatcccaaatcacagaacaactgtatctatcctacattatatataagaaaaccttgtagaagagttgaaacccaggatatcaccacatatcaaagacccaaccaaaggctgaggaatactgctttgcagtacaatcgatgttatcaatatttgtttgtatttgtcgacc

SEQ ID NO: 5138 - protein, 51 aa, Homo sapien
FLNLITLSSLDQRVQKGRFYVWFCTPIIKLHLCISNLNSKTKIFIFSYESP

SEQ ID NO: 5139 - DNA, 594 bp, Homo sapien
taactcacacagagccagctgtgcaggagaccagagttttatttatatttatagatataaattcataagagtttaattagctctcaggctcacttcaggtacatttcatgactccaactcctgttgtacaaaatatccctgcttttaaacagtagatttaaaacaaacaaccttggttttctgggacttttcttttatgagtatttttttattaatgtaaagtttcaaagaaggctaatcaaacacaaaaatatctgcaaagagccacaataagccttgaacaacatacagtcagtaaaacatcaaggtttaaattgttgctttaacttccttttggctggaagctccatattctggtaattcaccaaaatggccaacacaaggaaaacaggagaggcacccagtgtatgttttctaggccttttagaaaacatggagttggccacatgcatgggagtctataaaaaaggtgatactgtagacatcaagggaatgggtatggttcaaaaaggaatgcctcacaagtgttaccatggcaaaaactggaagagtctataatgttactcagcatgctgttagcattgctgtagggaa

SEQ ID NO: 5140 - protein, 62 aa, Homo sapien [sequence omitted]

SEQ ID NO: 5141 - DNA, 1187 bp, Homo sapien
gggaaataaaaacatgtagctttgtatacatttggcttctaaaacaattatcaaaggggtcatagtaaaaggatatataaaggtaacaattatacttttgactgagcgtctctgcttttttttttttttaactgcaactaatttctagactgttacttattgaaatggagatctttttggaccctgccttcatcagctctgtgtaaactttatggggaaaaaagcactgggtgtatagataatgtctttaaaggtacggggtggtgagtgggatttccttcagatagaaatatttctcataggttaaccattcccctatagtatagttgttgtgtcttgtacctgagctggtaatccagaattatttgtatttctgtgctgcctgcacaaaaaatcatgaagtgagttaagtagtttgtgccacccaggagttgcaccttttctcaggttccactagatggtatgacagtggaattagccccaggcagtgtctaaaatcccacttctgttgctgaccctgtggcctcagaaaagggtcctttttgctttgtttcctctttatcagggtgttggaagaaggatctctaagtgtctctctgtgatcctctgagcaaggaggtagataaaattgttagcttatttaattttcacttttactaagactctatttttattttagccgtataggtgagggacttgatcaggctctgccctgtctgacagaactcattctcaccaataatagtctcgtggaactggtaagttgcacagaaggaaaatgtatttggtgggtggggttaaaggtactatgtgcttcctacagaaaatttacaaaatctagaaaatgatctcagtatcctctttcttgtctttttcttaattcaggatctgggccttttgggttctgcagccgtatgttgcaaatattttcctacttttacttgacttttgacttaggatgtcttgttagagaagttcctaatttaggtgcagtccaatgaatcaatcttcttctttattgtagcccttttgatgtttaaatttcccctattccagggttataaactcctatgttgttttctacaattgcagtgttcaatatagtaccagtaactacaggtggctacttataattgagatgtgctagaactattaaattcacaattgaatttcaaagacttaagtgc

SEQ ID NO: 5142 - protein, 20 aa, Homo sapien
EIKTCSFVYIWLLKQLSKGS

SEQ ID NO: 5143 - DNA, 1119 bp, Homo sapien
tcgctgcctgtttgtgcacgcttaaggagggttggtcgaatgaatgaattcagtctgtatcctcaacacccaatgccgcgcctggcaccataggcgttcacatgcagccgtgccgaaagactgagtgaatgctggactgaatgaatgactgcctgtaaaatatctacaggaaagccctgcaggaaatgccctccataaattctagtccccttctccttcctaaccaaatcctcccctccttctgcttccatcacttcctagctgtgtaacttaggcaaagtggtttacctctctgtgtctaatttcggcaaaggtaaaatggggaagtgaacctcatctggttctggtgagcttccacgggtgctgtatggaaagcctggcaccctgcctggtggagagggctcgatgatggttagaaggagagtttctctaaactgccgcctaccttccttcccctttctcatttcctgccacaagtctcccacccactttctctgtctccctctcaccccttgtctttctccatcttgtcttcccgtaaagacccagcccttccctcctccatgaaacctggattcctccaaggcgaaggcccccctctctggggtctcagcctccagcgctgacatcctaggccgcctcgacaggtgggctcaccatccaacccttcctcctcccccttcagccccctcctcctgctcttcaactgaggttcgccttcccagctcccccacgccctgcacagtgctgatcagtaaaagaggaggacactgacgagtggcgacttggttcacggggttctttgcttcctcggtggcggaggggcctggggcctctctccagcacctctgcccttccgcagccatcgagttgatcaaagacctggtcggttacgatgtgcgccaggcgctgctcaagggcctcgtggcgctgctgataccgtcggtcaaggagatctccaaactgcaggccaagatcctcagtggtaaggacctgctcaaatggggctgcctgggccacgggagggcggctcttgcctcacggctgccccctcctcagacccctcggttctccagctcacccccagcctgccgatgtttttgcagcagccgcggccgc

SEQ ID NO: 5144 - protein, 39 aa, Homo sapien
MGLPGPREGGSCLTAAPSSDPSVLQLTPSLPMFLQQPRP

SEQ ID NO: 5145 - DNA, 5344 bp, Homo sapien; identical to SEQ ID NO: 4328

SEQ ID NO: 5146 - DNA, 934 bp, Homo sapien
gtgagaggggctttcacaagataacattgtagaatcattcagtgagaacaaaagttgactcaagaaagcaagagtctggatttaaatccctggtaaaattgccttagtaagcaataataaaatttcccagcacatgactggggtaagtaatgaattgttgaaacctgcaaagagccctaaattataagaattatgggggatcggaggaggaaaataaatgaaaacagaagaccataaaagaatactttgcattcagtagaaaacctgtcagtactgtaggacaaaaaggaatagattctacattttacatcaccagtgatgcctcctcatggtttaaccatttcttccacattctgcctaaagggaaaactgtgtcagcaattgcttttggtttttaaagttataggttgctactacatggatgtgactaagaaaatacatagattatcttaaaatgggcatgatgtaaaagactcaatcagtagggtaactaaaaactttgtagtactctagctttggaaatctgagaggcctatatagttcatttgagtgtttgatcaaattcttattgagattacagcctgtgcaaaatatttgtgatgcatttttaagtttacttaagtacactttgaaattctttaaaaattttaaaatctttaaaaggacacaagagtgtaccacattgagattaaaatgtgtttattattaatttgtacataatactataacaaataattgttctcaggtatgtttaaggccttattttaaaagttgattcttcaatttctaatttaaaataagcttttagtttttctcaactatgtatatgtaatgattataaatgcctagagtagtgtttcccagacaactagaaccacacacaaattagtaccaccaaaaaaagtcgacgcggccgctaatttagtagtagtag

SEQ ID NO: 5147 - protein, 9 aa, Homo sapien
ERGFHKITL

SEQ ID NO: 5148 - DNA, 4616 bp, Homo sapien
gctgttggctgggctcgggagggaacgctccaggtaaagcgctgggggaggaagcgacgccgaggagctacggtttcctccagaggtctccgcccctctgcccctatattcccagagctcgagtctgatccgggccttgccgggcaccctggaaaggcgggggtgatagtacagatggagacgcaactgcagagcattttcgaagaggtggtgaaaacggaagttatagaagaggcttttcctggcatgtttatggatactcctgaagatgagaaaacaaaactaattagctgtttgggggccttcagacagttttggggtggtctttctcaggagtctcatgaacagtgtatccagtggattgttaagtttattcatggtcagcatagtcctaaaagaatttcttttctttatgactgcttagcaatggcagttgagactggtctccttccacccaggctggtttgtgaatccctgataaactctgacactcttgagtgggaaagaacacagctttgggccttaacatttaaactggttcggaaaataattgggggagtggattacaagggtgttcgagatctcttaaaagtgattttggagaagattttgacaattcctaatacagtgagctctgctgttgtacagcagcttctggcagcaagagaggttatagcatatatcttggaaagaaatgcctgcttattaccagcctattttgcagtcactgagatcaggaaactgtatcctgaaggcaaacttccacactggttacttggaaacctagtatcagactttgtggataccttcaggcccacagcaaggataaactccatttgtggtcgctgtagtcttctgccagttgtaaataattcgggtgccatttgtaattcatggaaactggatcctgctactcttcgttttcctttgaaaggccttttgccatatgataaggatctgtttgaaccacagactgctttgttgagatatgtattggagcagccttattccagggatatggtctgcaatatgctaggtttaaataagcagaccttgaacattgctcagcacaagcagcgctgccctgtgctggaggaccagttggtggatctggttgtttatgccatggagcgatctgagaccgaggagaagtttgacgatgggggaacaagccaactcctgtggcagcatctctcaagtcagctcattttctttgtgcttttccagtttgcaagttttccacatatggtgctttctcttcatcagaagttagcagggcgaggactgattaaaggcagagatcatcttatgtgggttctcctgcaattcatttctggaagtattcagaaaaatgcactagctgattttctccctgtgatgaagctcttcgacttgctatacccagaaaaagaatatatcccagttcctgatattaacaaaccccagtcaacccatgcctttgcaatgacctgtatttggattcatctcaatagaaaagctcaaaatgacaactccaagctacagattccaatacctcattccctaagacttcaccatgagttcctgcagcagagtctaagaaataaaagtttacagatgaatgactataagattgctctattgtgtaatgcatactctacaaattcagaatgttttacattacccatgggagctctggtagaaactatttatggaaatggaattatgaggatacctctccctggaacaaactgtatggcttcaggatctattacccccttacctatgaacctcctggattcactgacagttcatgccaaaatgagccttattcacagcattgcaaccagggtgataaaacttgctcatgcaaagtccagtgtggccttggctccagccctagtggaaacttacagtcgtttattggtctatatggaaatagagtctttgggcatcaaaggatttatcagtcagcttttgccaactgttttcaaatcacatgcatgggggatcttacacacactccttgagatgtttagctaccggatgcatcatattcagcctcattacagagttcagctcctgagtcatcttcatactttggctgcagttgcacaaacaaaccagaaccagctccatctttgtgtcgagagcactgctctcaggcttataacagcattaggtagctcagaggtacaaccgcagtttacacgcttccttagtgatcccaaaacagtgctctcagcagaatctgaagaactgaaccgagccttgatattgaccttggctagagcaactcatgtaacagatttttttacaggctctgattcaattcagggaacttggtgtaaagacatacttcagaccatcatgagtttcactcctcataattgggcttcacacaccctgagctgttttccaggcccactacaggcattcttcaaacaaaataatgtgcctcaggaaagccgttttaatctgaaaaaaaatgtggaggaggagtataggaagtggaagtcaatgagcaacgaaaacgacattattacccacttctctatgcagggctcccctcctctctttctttgtcttctctggaaaatgctcttggaaacagatcatattaatcagattggctatagagtattagagagaattggagccagggccttggtagcccatgtgaggacatttgcagatttcctggtatatgagttttctacatcagcagggggtcagcaactcaataaatgcattgaaattcttaatgacatggtatggaagtataacattgttacactggacagattaattctctgcctggccatgcgtagtcacgaaggaaatgaagcccaggtttgttatttcataattcagttgctgttactcaaaccaaacgattttagaaatcgagtaagtgactttgtgaaggaaaattccccagagcactggttacagaatgactggcacaccaagcacatgaattatcacaagaaatatccagagaagttgtattttgagggcctcgcggaacaggtggatcctcctgtacagatccagtctccctatctgcccatctattttgggaatgtgtgtcttcgattccttccagtatttgatatagtaatccacagatttttagagttgcttccggtatccaaatcactggagactctactggatcatctaggaggcttatataaatttcatgatcgtccagtgacttatctgtataacactctgcactattatgaaatgcacctgagagaccgcgcatttctcaaacgaaaactcgtccatgcgatcattggctctctgaaggataatcgaccgcagggctggtgtctaagtgacacttacctgaaatgcgctatgaatgcacgagaggaaaatccttgggttccagatgacacctactattgcagattgattggcagactagtcgatacgatggctggcaaatctcctggtccctttccaaactgtgactggagattcaatgagtttcccaacccagctgcccatgctctccatgttacttgtgtggagctcatggccttggcagtttcaggcaaagaagttgggaatgcccttctaaatgttgtcctaaaaagtcagcctttagtgccaagagagaacattacagcatggatgaatgcaattggtttgatcatcactgccctaccagagccatattggattgttcttcatgatcgaattgtgagtgtcatcagcagccccagcttgacgtctgaaacagagtgggttggctatccattccgcctctttgatttcactgcctgtcatcagtcctactctgagatgagttgtagctatacgttagctcttgcacatgctgtgtggcaccattctagcatcggacaactttctctcattccaaagtttcttactgaagtacttcttcctatagtgaagaccgaattccagttgctttatgtataccatcttgttggaccatttttacaaagatttcagcaagagagaactcgttgtatgatagagattggtgtggcgttttatgacatgctgctgaatgttgaccagtgtagcacccatttaaattacatggatcccatctgtgacttcctctatcacatgaagtatatgtttactggtgacagcgtgaaagagcaagtagagaagattatctgtaacttaaaaccagctttaaaacttcgtcttcgattcatcacacacattagcaagatggagccagctgcagtgcctccacaagccatgaacagtgggtctccagcacctcagtctaatcagtaaaaagtcagagtacacagcaagggttccaaattaagaggaagcaaaacgctgcccagatcctgagaaacctggagaaaatcaaccttagtagtttcaactcatacattgtcttgtttgattttgttctttgttttttatcctctttaagcacagatgcgtgttgaagtctaaggtgttctgtcatcacactctctttactagaataagtgtgcccaggcagaaaaaaaagtgtattcaatgttgctggcatgtgtggattcacagctcgtggctgtaaggaaatctgggggtttcataaatccattaaaatccttttagagttgccaaaaaaaaaaaaaaaaaaa

SEQ ID NO: 5149 - protein, 1365 aa, Homo sapien
METQLQSIFEEVVKTEVIEEAFPGMFMDTPEDEKTKLISCLGAFRQFWGGLSQESHEQCIQWIVKFIHGQHSPKRISFLYDCLAMAVETGLLPPRLVCESLINSDTLEWERTQLWALTFKLVRKIIGGVDYKGVRDLLKVILEKILTIPNTVSSAVVQQLLAAREVIAYILERNACLLPAYFAVTEIRKLYPEGKLPHWLLGNLVSDFVDTFRPTARINSICGRCSLLPVVNNSGAICNSWKLDPATLRFPLKGLLPYDKDLFEPQTALLRYVLEQPYSRDMVCNMLGLNKQTLNIAQHKQRCPVLEDQLVDLVVYAMERSETEEKFDDGGTSQLLWQHLSSQLIFFVLFQFASFPHMVLSLHQKLAGRGLIKGRDHLMWVLLQFISGSIQKNALADFLPVMKLFDLLYPEKEYIPVPDINKPQSTHAFAMTCIWIHLNRKAQNDNSKLQIPIPHSLRLHHEFLQQSLRNKSLQMNDYKIALLCNAYSTNSECFTLPMGALVETIYGNGIMRIPLPGTNCMASGSITPLPMNLLDSLTVHAKMSLIHSIATRVIKLAHAKSSVALAPALVETYSRLLVYMEIESLGIKGFISQLLPTVFKSHAWGILHTLLEMFSYRMHHIQPHYRVQLLSHLHTLAAVAQTNQNQLHLCVESTALRLITALGSSEVQPQFTRFLSDPKTVLSAESEELNRALILTLARATHVTDFFTGSDSIQGTWCKDILQTIMSFTPHNWASHTLSCFPGPLQAFFKQNNVPQESRFNLKKNVEEEYRKWKSMSNENDIITHFSMQGSPPLFLCLLWKMLLETDHINQIGYRVLERIGARALVAHVRTFADFLVYEFSTSAGGQQLNKCIEILNDMVWKYNIVTLDRLILCLAMRSHEGNEAQVCYFIIQLLLLKPNDFRNRVSDFVKENSPEHWLQNDWHTKHMNYHKKYPEKLYFEGLAEQVDPPVQIQSPYLPIYFGNVCLRFLPVFDIVIHRFLELLPVSKSLETLLDHLGGLYKFHDRPVTYLYNTLHYYEMHLRDRAFLKRKLVHAIIGSLKDNRPQGWCLSDTYLKCAMNAREENPWVPDDTYYCRLIGRLVDTMAGKSPGPFPNCDWRFNEFPNPAAHALHVTCVELMALAVSGKEVGNALLNVVLKSQPLVPRENITAWMNAIGLIITALPEPYWIVLHDRIVSVISSPSLTSETEWVGYPFRLFDFTACHQSYSEMSCSYTLALAHAVWHHSSIGQLSLIPKFLTEVLLPIVKTEFQLLYVYHLVGPFLQRFQQERTRCMIEIGVAFYDMLLNVDQCSTHLNYMDPICDFLYHMKYMFTGDSVKEQVEKIICNLKPALKLRLRFITHISKMEPAAVPPQAMNSGSPAPQSNQ

SEQ ID NO: 5150 - DNA, 455 bp, Homo sapien
gaattcggcacgaggcccggcgccactcggcccagggcagggaccccgccacggccgggaccgcccggcccggccccagcccgcgcctctccgcgccgccccgcgctccgcaccgcgccctctccgcgtccccgcccgcgcggccggaccgggcagccagaaaaatcatttttcttctctgggaaggtgaacatttgtagcattgatttcccggatctggtaacatggcaaaagatacttttaaagcgtctgaagcgggatgaaggtgaaagatggaaggatctgatctctgaagctgcggtcaccacccacaagttgtggccttggataccacactgcagttgggtggtgatggggtggtgccttctgactttttccttatctttaccgactgtgttaattgataattttaaataaacgccttaattaacaaaaaaaaaaaagcggccgccgac

SEQ ID NO: 5151 - protein, 138 aa, Homo sapien [sequence omitted]

SEQ ID NO: 5152 - DNA, 1442 bp, Homo sapien
  Unsure 21, 925-946: Unknown base
tgcctggcctgacatttttanaaaaagttttattttgcacggctctaaacctccatgttattttccagtggtgtagaaggtaccagctaaagtgaaccactatgtaatattaggccattctaaaggaaagatgttccatgtcatcagagatggtaaaataggcagggaaaaaaaaatctttggtaccaaagattacacttgtgtttctacacagcaaaccatttttctttcatgaaaataatatattattaacatgaatatattattttgctattaatgtgaaagttgtctctaaatattttttaattttcaaactcatactttattttcatttgaaatgtttttcacaccttttgcattacataataattttgtggaagcattttgccctttagaataaatattagattgatatagctgaaatgtgacttccagttctttgatattccccttgttattcaaatagaaatatggaaatgctttatatattactgttaaatttcttagtgcagaaataacattattaatagagtattgttttcaaaacagatgattaatttcaagaggtttaacagtgaaattgtgtcaatattttgcatttaaaatgaatttaattgaccgatattttctgtagttaaatttagtcacaatatcacatatgttcttcaagaaacacatgaaattattaataaagtaattaaaaaatttttaatgtataacagaattgaccaataggccagttttctggtaacttatgatagtagattgtttctttagaaactgggcagaagctctgcattctcacttgtactttgatttcttatttcttggtcaggcaatttgaggaaagaagaaatggcatggggaatatatatgttttgtttcttagggaaaacagtctgagaaatgaataaaaagcatgaannnnnnnnnnnnnnnnnnnnnntaccatggaaaaggatattcacagtagtacagttctcaatatttttaattagatgtcatatttttttaatatagtaaaaccttgggatatagaatattacatcttttgagaatgtatgtgtctctaagtaagtaaaatctaatgcgtataggagactgatagctaaaaatgaatggaacattaatgtacttttataattaaacctcttatctatcagaaattgtaagagaatagatacatgttttgaatgtaaagttgaaaagtctggtttactgaataaattgaaagtgatttataaaatctaaatttggactacttgcaaatgataagctattctagtagcctttagtttaaatccaacagaaatctagaagtcacaagcaaatatcttaaaggtaaaatccatctgggcactcatttaaagtatatcttaaaaaagcagcagcaaggtaccttgccatttttagcatattttcttcctttttcttttttcttt

SEQ ID NO: 5153 - protein, 30 aa, Homo sapien
  unsure 7: unknown amino acid
  Unsure 21, 925-946: Unknown amino acid
PGLTFLXKVLFCTALNLHVIFQWCRRYQLK

SEQ ID NO: 5154 - DNA, 1233 bp, Homo sapien
  Unsure 70: Unknown base
catgctctaaacaggttagctcctccatgacatatagttttggcatgaaaggtggatctaaggctaccanagagaaagagttagaaatgagtgtagacttcctctagcatcttttcatacttaattaagaaagagaaggaacttagcctttatcatggtatagatttgattgacttaggcccacatatctgcaagggtcagccaaatttaaattgtaaacatgtttttagaaaatctgaattccccagcacgattggcttgagcgattggaaacaagatgcaggaccccaacacagacactgagtggaatgacatcttagacaagaagggcatcttacccaccaaggaaagtataaaagaatcagaagagaaggcagaagaggagcagcacatccttcagcagtcagtggtgacaacatacgaagatatgactttggaagagctggaggatcatgaagacgagtttaatgaggaggatgaacatgctattgaaatgtacagatggcagagactcgctgaggggaaagcaattaaactgaagaataaatttggagaagttttggagatttcagggaagtattatgttctaagaagttaccaaagccagtgagggcttgtgggtcatcttgcacctttgcaaacgaggaattcccctctgtgccctgataaatcagcacctcagtggacttgccaggaagtttcctgatgtcaaaatttagtctaaagccaattcaaccacctgcatacccaattatcctgataggaatctgcccatggtatttgtttacttggaaggagacatcaaggctcagttgatcggtcctctggtgtttggcggcatgaacctgaccagagatgagttggggtggaaactgtctgaatctagagcagttaagacggacttggaggaaaaccctaagaagccgattgaaggtgtattgctgtcttcagtgcagagctctgtccccatgaggagggacagcgattccaagggtgactgaggctgcagctgctatcacatgctgaactttcttgtgacaaattgtctggatttctttaagaaaaggaaaagcaagaatgaatccttctggtttttagttttgtataaattatgtttcaaatctttacattttagaaataataattgctggaaattctgttaaatattttggaactctttttttaaactatagtatttcctctaaaaaaattaaaaccagctattggtatggc

SEQ ID NO: 5155 - protein, 110 aa, Homo sapien
  Unsure 70: Unknown amino acid
MQDPNTDTEWNDILDKKGILPTKESIKESEEKAEEEQHILQQSVVTTYEDMTLEELEDHEDEFNEEDEHAIEMYRWQRLAEGKAIKLKNKFGEVLEISGKYYVLRSYQSQ

SEQ ID NO: 5156 - DNA, 2661 bp, Homo sapien
aaaagttccagttctttgaggtaagggttcctgtttgcctcctatgtctatcgatatttgcttttagaatggtagttttcctttttattccttttctagaaagtaaagtcaacatggattgatttaattttttaaaaatagggcaccgtggtttctcatgccaatactggtggaaaaatttccatttgttcgaaaatcagagagaacactggaatgttacgttcataacttactaaggattagtgtatattttccaaccttgaggcatgaaattctggagcttattattgaaaaactactcaagttggatgtgaatgcatcccggcagggtattgaagatgctgaagaaacagcaaatcaaacttgtggtgggacagattccacggaaggattgtgtaatatgggattcgcagaggcatttttggaacctctttggaaaaaattgcaggatccaagtaatcctgccatcatcaggcaggctgctggaaattatattggaagctttttggcaagagctaaatttattcctcttattactgtaaaatcatgcctagatcttttggttaactggctgcacatataccttaataaccaggattcgggaacaaaggcattctgcgatgttgctctccatggaccattttactcagcctgccaagctgtgttctacacctttgtttttagacacaagcagcttttgagcggaaacctgaaagaaggtttgcagtatcttcagagtctgaattttgagtggatagtgatgagccagctaaatcccctgaagatttgcctgccctcagtggttaacttttttgctgcaatcacaaataagtaccagctcgtcttctgctacaccatcattgagaggaacaatcgccagatgctgccagtcattaggagtaccactggaggagactcagtgcagacctgcacaaacccactggacaccttcttcccctttgatccctgtgtgctgaagaggtcaaagaaattcattgatcctatttatcaggtatgggaagacatgagtgctgaagagctacaggagttcaagaaacccatgaaaaagttgttctggagaatcatgtagcgacagatgaagacgaacctgctttgaaacgccagcgactagaaatcaattgccaggatccatctataaagtcattcctgtattccatcaaccagacaatctgcttgcggttggatagcattgaagccaaattgcaagccctggaggctacttgtaaatccttagaagaaaagctggatctggtcacgaacaagcagcacagccccatccaggttcccatggttgccggctcccctctcaggacaacccagatgtgcaacaaagtgcgatggtaagaacagaccagggtgccggggccttcaggtcacttggggagaagcgcgtcacctcctcgcccaggcccgcagcttagtggctcagtttgctggagatgcgcagtgtctgcctcagcagtctcagcagtttctaactaaagctgactttagttagaccgaaaccgaacacatggcatcctgccaggatgacctgaagtcatcctcacctttcctttccacataaagccggcccatacaccttttctttggaactaacccaccagatcttagaagatgtacacgtgcttctttcctttttcctactctacctggctagtctttagatatgtttttcttcgtatgtggtgtttatacatttcacatgaatatatcaaacttttcattcaaatctgcagtttttattttgcttatttttaaaaagtagagtctaatgagtctaatcttagaaggctgtgtggtagtttgcgaactgtttgagtggaacctttatgatgtcttaagaagtctcggacctgcttggtgtccactcatccgaggcttcctgtcagatattccagctgacagctcgcgctgaagctcaggctctggtgttgctaaccttccccacacctggccagaaagaagtcctgcttaaggcagtggacacggcacagctttgtgcttgacaaggggccttttgactgagcgctgctcacttcaggttccctggcctggctgtagccttctgcccggtgtgtctgggaggagagagaatggtgggacggcagtgggggggccggggaggacatgtggatgccgaggaatgggagccgcaacaagcctggagggactgttgtgaccttgctgcccgtgtgtgctgcaggtgccaccctgcccatgtgtgctggtggctggtgctgggttaggtgctttgtggacctcgccagggagtgtgggaagtctgggggcagctccacatgatggctgctgtgctggctgaagcagtggtgcctctttgagctctcgggcatgccggaagttttggaaacgctacccggccgtcttccgagtccgctgctggtggtggagttggcatctcatttcgcaggcgggagctggggatcgttcacgtgttactctgagatgaggccttcgccctgcacaaatgctgtcactcacatgtttccccccagcaggagtttgtttaccatgtcctctgtgcagggacgctgttgggctcccaggtcaggtgtgcaaagctgttggacccaatgcctttttttttaggatagttttttggggtaatgtcctcttacc

SEQ ID NO: 5157 - protein, 310 aa, Homo sapien [sequence omitted]

SEQ ID NO: 5158 - DNA, 2703 bp, Homo sapien
ctcctttttggaaatttttggacacatccaataacagaccagcttcgggctatgaacaaagcagcacaccaggagagcactgaacacgtcctgtctggaggagtggtagtgagtgctatattcttcattttgtctgccaatatcttatcatctccctctaagagaggacaaaaaggtacccttattggatattctcctgaaggaacacctctttataacttcatgggtgatgcttttcagcatagctctcaatcgatccctaggtttattaaggaatcactaaaacaaattcttgaggagagtgactctaggcagatcttttacttcttgtgcttgaatctgctttttacctttgtggaattattctatggcgtgctgaccaatagtctgggcctgatctcggatggattccacatgctttttgactgctctgctttagtcatgggactttttgctgccctgatgagtaggtggaaagccactcggattttctcctatgggtacggccgaatagaaattctgtctggatttattaatggactttttctaatagtaatagcgttttttgtgtttatggagtcagtggctagattgattgatcctccagaattagacactcacatgttaacaccagtctcagttggagggctgatagtaaaccttattggtatctgtgcctttagccatgcccatagccatgcccatggagcttctcaaggaagctgtcactcatctgatcacagccattcacatcatatgcatggacacagtgaccatgggcatggtcacagccacggatctgcgggtggaggcatgaatgctaacatgaggggtgtatttctacatgttttggcagatactcttggcagcattggtgtgatcgtatccacagttcttatagagcagtttggatggttcatcgctgacccactctgttctctttttattgctatattaatatttctcagtgttgttccactgattaaagatgcctgccaggttctactcctgagattgccaccagaatatgaaaaagaactacatattgctttagaaaaggttacaggaatacttaaagatgctggagtaaacaatttaacaattcaagtggaaaaggaggcatactttcaacatatgtctggcctaagtactggatttcatgatgttctggctatgacaaaacaaatggaatccatgaaatactgcaaagatggtacttacatcatgtgagataactcaagaattacccctggagaataaacaatgaagattaaatgactcagtatttgtaatattgccagaaggataaaaattacacattaactgtacagaaacagagttccctactactggatcaaggaatctttcttgaaggaaatttaaatacagaatgaaacattaatggtaaaagtggagtaattatttaaattatgtgtataaaaggaatcaaattttgagtaaacatgatgtattacatcatcttcaaaaatagatatgatggattctagtgaagaccaaaattacttctgtttactttctatcaggaagcatctccattgtaaatatgtatttacatgtttattacaaagacccaaatgaaaaatttttagtccattttttgcatagcctaaagataaaataggaataaaagttctatatttatggattttctgtatataaaactggtttctaattataacttaagtccattaagtaaaatctgtattgccactttaaatgtaaactaaattatttgggagaaacttcaaccactgatatgagataagcaatgagaatagggaagtgtataacatcacagtttttgatgtattacaaaaatcaaccactctataaaataaattttttttacttttggtaatatttgcaaatgaataattaatttattagggtaaagaacttatactaagttgtgtccatgttattcatttacttaccatgttcctttaaagtagaatatttcctttcttgttatatatttgacattccaagctgcttatcaagctggtatccaagcagtggtaagctttcatcctttcttagctccataacgttgtgaaacagccagttaagagaatcgtaaataattgtcaactcacagttgaattctctgcctatgtaggtaacttttttctaatttctggaacatatagatatataagaaatatcaaagaataggtagttatttcaaagtttaataagtaaaacttgttcataaacatttgagcaccatgaaatcaaaataccctataactactttctatagtcatatctaatttatatttttttcatttccagttgtaactagatatgtagtaaagtctgaaaagactttaccatagacaataacatgcagttttatcagcaccaaagaatgttgtccaaaagaaactttttaatacctgtctttctatttataacatctgaatattttcattcttatattaagaattttgataagtagattgaatttagtatgagtactattttcttatatataccacaatggcaaacatgtattataaatcatatttttgtcttaccaattttaatatatgaggggttttagaaatttgttgtaagttatttttatattccttgtcttttgcatattttttggccaaaatcttcaatacatattaaaatttttgagtggtgggaaaataaaaaaaaaaaaaaaaaaaa

SEQ ID NO: 5159 - protein, 409 aa, Homo sapien
LLFGNFWTHPITDQLRAMNKAAHQESTEHVLSGGVVVSAIFFILSANILSSPSKRGQKGTLIGYSPEGTPLYNFMGDAFQHSSQSIPRFIKESLKQILEESDSRQIFYFLCLNLLFTFVELFYGVLTNSLGLISDGFHMLFDCSALVMGLFAALMSRWKATRIFSYGYGRIEILSGFINGLFLIVIAFFVFMESVARLIDPPELDTHMLTPVSVGGLIVNLIGICAFSHAHSHAHGASQGSCHSSDHSHSHHMHGHSDHGHGHSHGSAGGGMNANMRGVFLHVLADTLGSIGVIVSTVLIEQFGWFIADPLCSLFIAILIFLSVVPLIKDACQVLLLRLPPEYEKELHIALEKVTGILKDAGVNNLTIQVEKEAYFQHMSGLSTGFHDVLAMTKQMESMKYCKDGTYIM

SEQ ID NO: 5160 - DNA, 3804 bp, Homo sapien
  Unsure 607-674, 2124-2188: Unknown base
acgaatttagaatataggtagtgttcttggaatacttttagaatatgttggaataaagtcatcctttctcattttctgaaaaagcagggaagaagcaacagtttggttttgatgagtttggaattttctgccacttgtagtgataaatgttcttagcagaagcacgtggcagcattaaacttaaaaattaatatcagtacgtatgttaataattttaactagttttattttagaaggataaggatattctgactagattacagtaacatctacaattgcaatttctatgacagtaaatttagcttctataaaacgtaaagaacctttagtaaaacagcagggaattgagtatcatctgttgaataaataaatttatcattttatcctgccagaagtatgatgggcatcttccaatagaaataaaagctgttcctgagggctttgtcattcccagaggaaatgttctcttcacggtggaaaacacagatccagagtgttactggcttacaaattggattgaggtaaattgtttttttaattcttatttaacattaattgaataaagaccattgaactgagattacagtttagaatttgttactaatannnnnnnnnnnnnnnnnnnnnnnnnnnnnnnnnnnnnnnnnnnnnnnnnnnnnnnnnnnnnnnnnnnngactaaataatctttaaggtttcttctagtagaatagaatgttctgagattttgtttaaatcaaattattgagagtgattgtttttaaaacctagttggctttcatctaattcattgccattttaagtgtgtattattttagagcaaacttagaaaaacagcacatttctagtaacttacgacattcgatgaatgataaatgttcaagttagactaaaggaactttattccaacttctagtaactactttcttcatttttctctcatcagtttaggtcttaggatctaccatctgttacttttcagtttctcatctaaataaaacaagatctgctgttcatattgtttaatttctcaggaagggtacattttgggctttgggtttatactgcgagccttttttttgtttttcttgtatgtatacctaagtagtcatatgttttcacatggtcagagttttgataataatactctacctagcttctgaacagtttaataatagatttaatccgtgagaggaaataccctcgaaagttactatagaaataacaccttactatctggtggcatttacttagttcttagaactgactaattagtttatcggttaaagtaatttgctattatattgtaaaatagtacatttgaggctcacttataaaaattggaaaacatcgaaatataagaggtccaagagggtgtttgaaacacattttgctaagttgacaggaaattaatagactttttatgggccattaactaataatacactcaaaaaaaaggtacagttaaataaaggttttaaatagtctataccgtatactaaaactaaattaatatttaggactgaaataacatattgattaagtaccagctatgtacccaaaaaatgctgggcacagaagttagagtaagatgttttacttaaagggcctttgagtgagagttggcaattcattctgaactaaccactaatatcattaagaattagtgctgagttggtagcaggaaataggtaattctgtctaaaggaatcatgaaatggaaaataaataagcttttaataaggagaaggaagagctgaagaaatggcacagtgttcttagaatgacagatagtcctatggggactgcagcataaaagtgaaaaatgtataagataaacctttagatggtaagcaaggcaagattctcaaattctgtatgaatcagctccacctccgccccatggacagtagatgaccgttaatggcttttaaggaaagatgcaacctggaaaaaaaaagaaaaaaacttgttttagaatggtaaccactggcaatatgaagaataattagactaaagaagagaggtaggataatcatgggcattggcagtggaattgaaagagtaatttcagaagcagaatggtcagatgttggaggtgattggttatagagtttaagaattgnnnnnnnnnnnnnnnnnnnnnnnnnnnnnnnnnnnnnnnnnnnnnnnnnnnnnnnnnnnnnnnnncctgattctgtggttgactggatggtcgtctgctgctcttgcttagacttaggcatctgcatttagctgagggttcagccagggctggacatcctttaatggcctcattcccatgtctggggcctcaggtcagatagctgggactaccgggtctcactccagaagaggcttcttcagagcatggtagtcttggggttctaagagaatgagagtagaagctgcaaaacctcttgaaactggggcttgggagtcacacatgactttctccacattctgttcgtcaaaagcgaatcataaggacagcacagactcaagggataagaaaggagattccatctcttgatgagaagagctgcaaaggccatatttaatcagtcacaggagtctaatgctacaaagtagttttttaaaaagatgactagattggcaagttcaaggttaatctttttatttgttttatttatatatcacttagctggtattcagtaaaagcttgctttgtaaaatttagttaatatctttttggttcagcacagacattgcatcatcttagcagctctttttcaaacagatttgaagctgcttcaaataacaatctggtttataaaatgaaaatagaaaattatgatcttagaatgaagaagtgaatttctaagccatgataattattacggttgctgtgattagacagacttttctgtggagcttcctgacaaccaagaaaaaaggggaaatcaaggaactgttcttatcagaaagtaggaacccagcaattctttcattttctcattgggaacttaatagtcactgaattacaaagtagacagtgaccttgattatacaacatatgcggaagtgtttcctgtaacttacgtgagtattttatcaaatacttatatatttgataaaagctaagtacataaagcataactcagtagatagaattctctagtagtaagctaaagtgcttcaagtattagttgtcatattaatccaagagaaaattagatctgagactacctcgaggagtaaacgaacaacttctttaaaccaatactagtcaaaatgcagtccacggaccaatgctggttcatgccctatttgatccaagtccacattaagtacagaaatgaagagtaagcatttagaaacttggggcaatttgacattgcctcaacatccaagtttcagtgtcctttataaactattgatccatgacagatcatgaaactttctaaaaattgatccttttatcacatagtctttcaaaatattatttgcttctttgaagctttggatagaaacttgataatgtgaagttctctgctatgtggacctggtgtgcttatcttctttgttgctgatttgagagctgagctatgtactatatctggaatgcacacagcaggcatcctgctgtgcagttctgtgtctagttaatagtatggaagttcacattatcaagtttctatccaaagcttcaaagaagcaaataatattttgaaagactatgtgataaaaggatcaatttttagaaagtttcatgatctgtcatggatcaatagtttataaaggacactgaaacttggatgttgaggcaatgtcaaattgcccca

SEQ ID NO: 5161 - protein, 8 aa, Homo sapien
  Unsure 607-674, 2124-2188: Unknown amino acid
MLRQCQIA

SEQ ID NO: 5162 - DNA, 1863 bp, Homo sapien
  Unsure 1293-1365, 1835: Unknown base
ggagacgggcagaaggcagtcagcacgggtgacactacagggaccgtggaggaagcctcacgggagtagcagccgcggagctccagctcagccccaccccagggcccggctgctcccccaggcctgggtcgggtctgtttggcgactccctggccccagcctccgccccagggaaaccgaggctgcgtccaaaacccagagtagcccgctgggggccggggcggggtctcggccaccctggtggtgcaaacaggaaggatgcgcctggttttggctttaatgttcaaaatggaaaaaaatacaagaaagttgtacagtatttttcctgtaaaggttattattctacatagaacaaaaaggaagaaagcaggcgtggtgagagtgcagacccgcctgggcccggcctgaggttggaggctcagtcccgtttatcctgtgggatttggtccagggtttttgtagaggccttaactgtttgaggctgtctgtcttcacaatagcactgcatgggagctgcgtgattccaactcttaacttgaattttgtagagacaagaaaaaaggactattactgttgatccaagtttgtagttaatttaacatttgagttctctcttggtgatgcgtgtggctttatagggcttttttttttttccagtttgttttattactttgtttgggatgcttcttcgctggtgcagtctacccagattgggttccctttgcaaaacatcccccttcctggagatgatgatgccatcgaagcccgggccagggcctgacctggcaggcacacacctggccagtggctctgaggtccccggggaccgagtcccctgcgagggcaggctgcccgaggccacacctgcccaccttccctactccaggccaccagctggtgtcagattgggccaccgggagagaacaggcctaggagggaatggaaggctggcggggaggctgtcatccagaagcctcctccccagaggtctccaggaggaacctggctcaactggggggcagtggtttacttttcccttttttcttcctttcttttgtcctctcagctgcccacagccagaaagccaggaccacccgaactggacagggagcagggagggaggagtggtcgcacggagcgtacctgattcaacaggaaatcagttattttctaaaacagcccctaccagagcctcctgaactctgtgggcaccacgtgctgctgtgagcatctgcccagacagtgacccgccacaggccccgggcgtctgtggaaggagttttgtaaaggaannnnnnnnnnnnnnnnnnnnnnnnnnnnnnnnnnnnnnnnnnnnnnnnnnnnnnnnnnnnnnnnnnnnnnnnngaagatgccgacagtgcggagtctagccttttgtaaacttcatattgcacactaggactataagccattgctagctcattttgaattttaacgtgtaatttttgttttattttctttctgtggggaaacaatgcttgatccaccaatgctctttttaatgttttataactatgtatgtgtatatatataaatatcaaataatatgtatgcacatatgtgtgtgtatatatctatatgtatatacatatatagatatatagagatatatagagaggttttgagacaaaaaaaatacagaacgtgaaacccgagctgaacagcgtgtgctctgattacttgaatctggtctcctcggcacctggttattaagaactgaatatttttccacttgaatttagtgctattagaaatttaatatatgtgttttatttatttgatttttttttttttttgcatgactgatgcaaggnttgacattttcactcaataaaaactgga

SEQ ID NO: 5163 - protein, 148 aa, Homo sapien [sequence omitted]

SEQ ID NO: 5164 - DNA, 1064 bp, Homo sapien
gacggtatcgataagctgctatcgagttactgccatttcattaccctctttctccgcacccgacatagattttttttcaaagttacatgttttattttcatgtttgtaaaacgaagagcttttttctggatggttttcttatcagcttttcacacaacagtcaagtaaacctcgtggcactagccagaaatcgttgcaactttggaacttccaagacaatctggcctctatcaatgggcagacagcgaccctcattcaaaatgaagctgctagtcagtcacattcgacattcattatcttcactggctactcgtccacactcagaacgctgttcactgttaaaagtgtcaggttttaaccaagcgattttccattaaatattctcccagatgttctggaagttttttcgtgtatctttgcatcttcagagctgctccactgtgcctagccagtttgtaacatttctgctgtgtttatgctgttgagcagagatactgtgggttctatgtagctcataggattattgcaatgatcaaatgaaataatgttttataattttaaagcaccatagaaagatttaagttctatgtatttttaatttttaattatgatttctttctcgactaacatatgtatgaggctttttttcccatttcctagcgtgtatatttttaaattctgtgtttattgattcctgttttaattgaatttgaattgtggacagaaaataggtacatgttaagactgatctgttaatatttgttgagatttgctttatgacctagattataacctgtttctgtaaatgtttcatgattgcttgaaaagtatgcttgttttttagttgttggatgtccattagaccaaagttgttaattttgtagttcaaattttttccattttactattcttttgtcttctacttgatctctcagactctgagatgtgttgaaattttctattctagtgaacttaccaatttctccctgtaattctgtcaattttagttttatatatttttatatattttgaagtcttgttataaataaataattataaatata

SEQ ID NO: 5165 - protein, 96 aa, Homo sapien
MFYFHVCKTKSFFLDGFLISFSHNSQVNLVALARNRCNFGTSKTIWPLSMGRQRPSFKMKLLVSHIRHSLSSLATRPHSERCSLLKVSGFNQAIFH

SEQ ID NO: 5166 - DNA, 454 bp, Homo sapien
tagaattaaggaattaaccttagagaatgtttacattttaaagagtggagaagaatcaaagagtagtcaaatatgatagaaaatcctgggcgactatttctgagttctgttttgttttgtttttttgccctttaagtagctctctttagtaggaaagggaagaatattgacttgggttagttagttctgatttcaaatttcccctttatcacttacttggcagtatttaaccttttcagagtgtttcactgtcagaaaataggaattcagggttgtgaagattacataaaataaatacataaagcacagtgcttgtgacagagtttctttaacttcattagcaccttccctgtgacttcaagtatagacaggacttttatacattagaatggaatatttgtttaactttgtttatgtctcttgttttctccttccttttgcttccacttaaaaa

SEQ ID NO: 5167 - protein, 24 aa, Homo sapien
RIKELTLENVYILKSGEESKSSQI

SEQ ID NO: 5168 - DNA, 4445 bp, Homo sapien
aggaatgaaaggtcataagccattagaaatagtggcattattatgcaataacaacaccctagctaacctgcttttgtcatctgtagcacttacaataaagaatgatgaccttccaaccctggacactacctcgataaagcaaaccagagatcctctctacactttctatggaagccataaaagttgccatcaatatatccactttcatagttctatacttttatactttctagacttttttatagactttatgatcagatctttttgtctcagaggataggttttgcaagattcaaaggaaaatcaaactccttggttgttccagctttgaagcttttgcttcagtaaatttgtttaaagaaccagatcacataccatttatcaaattctttacttaagtcagaatactttgcagacatacatatttggaaaacaaactgtttcttgttcactagatagaatctgtattgtagtaagaaactacttacaaggtggctttctttctgctttgttactctatgtattactcaataatatatgtatggtcacaggttcctggagttgttttatttctttatgacagacacatgagtatgcacctctctctaatcctctgatgtcactgcagcttcagtctctctcactctgtttttgagtgccttcaaaatgccagcatcctggaacattcttttcctgatctaaatcctacctctgactatttcattatccatgaatattggaattcacccatattccaatgggcttaactctacaaactagctaaaaccttggacaagaatttgaccgtatttctgttttgttcctccatgtcatttttaggttatatttttaacttttatttatatcttatttcttcacatatttcgtctctctgttgaaagattttatccttatttgactcttcactttttttactttcaccagaaatttgacgttcctttaaaattaaaggtcattgaatgtcttttgaacacctttttctcaactgaagtcttcctgaatgcctcccctttctgatgaaaggatcctgagtgctgctgttgctctgccctgttcccatgtgcccactcccttccgtacacattttgcaagactatactctttattttagtcaaattaatttaaaattgctccctgggtttctgctctctcatggccctgtccctcaaaaacttctgtttactttttctagctgttttcatctaatttgtttaaaatgtatgatggatccataatatatgaaggatgtaatgaaaaggaggttgcagtgttttatataatatgatcgagcacctccgtgatgaaacatttagcaattggctagtccttcacagccagagtggaagtttgtgctgtggacaggtctttttactcccttccagttctcctccaaaactggacgaaaaaggaaaaaaaaaaagaactctttcaaatgaggagatttgattgcatttttttaggtgaatgaaagcttggagttgagcatttgggccttagtcagcatttttcctttctgacttaaaatctcatgtccttttccttaaagttaatagtactcaggtttttaagactaataaccacacaaggtgggtatctaagaaggcagctgttaatacattctccatctttcctgtctggcaacaggaaagatattattggtgagatagtgcaaaattgtgagaattggttatgttcgatgatgaataaattcaagatttttgaaggcttcactgctatttgggatgggaaggtgagtttacaaaatgaaaaaggtagatttttatgttacagaaatcagtaacgggtttcttgttgtgttaattacctttcacttgatttgccatgatgtttcttcctcattattgatctagaagtttgcctcttggatagtaactagcaacttagtatctactttaaaatttgtggcttttctcttcagggtcccaggccataaaacaacggagagctgtacttgcttgtcacttggaggaaccacatccttgagacagcctgctgtcttgtatgtcttcagtaggaaacttctgacacacacattcaagggagttcctgcccctgagaagtgttcccatagctttccagtcgcaggttactttcacactacgtcagcttctctggtgagatcagggatgttacatattacttgaaaatgatttcataggaagtgaggatggggcaagaaaggaggtagaagctgaattttgcttaacttcagaaggaaatctgatacttgccttggctagttctgatcaactaaagagcctgtgtctgtactggatgtgccaaagagtcaagttgtttctggaatatccagctcctctgaatgaacacagcttcctccctacctgtcttttatgggtgaaaagggaccgtctgatgagcatgatagacatcctgtacaggactcaagactgtttcattgcatttgaaagttggtgggaagtattttattctgctagagctcctaaccctcctagaaatatcttttcatgctctattaattcaattcattagtttaaaaagaaacagtgtgacataattttggtgtttacttcttaagttgtctccccaagggcatatatgtagcctctgaaaatgggatgatttcttctcaatcttccataaatttgaatatgcattttattcatttcttgacatgggctgtgtgactgttttccatcagcagttctggctttgtccacaagggagcaataaagtacgttagctttattctcaaccttctaaagaaagatcccacttttaaatctcttctggaatagcctcttagctcaaagcttattcatgtattttgattatttaagaaattttcccttattacaaagtccagtcgtcgttcatccctcatgatgccaagcaatgattgatgtgtgggtgtggagtccttgtgggtcaggcatcttaattaattagactttttacatattgatgatccccagattgaaagccaggaccttcccataggggcgcctttgtgtgctaaaggcagagcaggcaggcttctccactcctatctcctccgcaggccaccaccatcacatctataggaggaacaagagcactgggggaactctggagtatgagtaaggaaatgcttctcaccttctctgctccaaagagatatctgttacatcagggaacaagtcctctaggtcaggcacttcctcctgaccagtgcaacgggcactccaggttagaaactgtgtgtgctccctctctgtcagttacttgtctaagggctcctatccgtggtcatcagctctctggccatgagttctgtttgtgcttattgcagcagcatcttcacaacaaacaggtcagtaatcaacctgggaagggaaaagacgacagtaaatattaccccctgtagagccgggaggcatttacacctggaatggccttcttaactgatttctgcctggccacctcacccccagccaagtctgaacctgagcaataccaggcacagagaggtgtctacttgtaactccaacacttgacaaaaaacaaaactgaagctgtgattggtttaggcagcaagtggccaggtgcaacttgtttgtttttatttttgttttccccaacagtactgagatcacttgcacttttcctcatttcttaagaaaatccagtttgcttgccatgacttgtttagcgttaggtttacaaagcttgttgttgaatgttgaatatttgtccaaaggagtttgacaaaatagaagctgcttggtccctgttctgcctgctaggtcataaggatgaaggccatgtggctggggtacttatgtcaagtccagaatggggcagtgtccctctcctacctctctgcggagacgcaattgaaggtcaagtagactcagtgtagggcaggcagctgtcatgctgcaaagaagtttagaggagtctttgggttggggaggtgacaggtaggtaggacaggatctcttaagatgggaaagatactggggagaggagggctgcttggccccagggaactgcagtgaggtggaactgagctccgctcctgaatctccaaaggagcccatgctgcccggcttccctgagtcattttttccagcatcctgtcagatccctcaatgtactgatttcccccttgtgttaactataccgatattatttttttagcaattgaaatgcacttttttatttcaactcaatcatgattttaagtataaaaaatttatagattgttaaaactacttttttgtgtatttttaaccactcaatgtagcattgtatattttattcttgtgagactctggtacaggtgtgccgcctaatgatttttctgagatgctgggcctttggatgtgtacggtaaccaacttaatgctaatgttcaaagtaaaaaaaaaaaagcagccata

SEQ ID NO: 5169 - protein, 92 aa, Homo sapien
GMKGHKPLEIVALLCNNNTLANLLLSSVALTIKNDDLPTLDTTSIKQTRDPLYTFYGSHKSCHQYIHFHSSILLYFLDFFIDFMIRSFCLRG

SEQ ID NO: 5170 - DNA, 474 bp, Homo sapien
agtaaaagggaagagagcatgtgtgatgtatattatatataattttttactcctggaacccataaaagataaaattttaaagcacgtaacgtcattggatgtcagacattctctgaatttacatatattatctgggtgctgacaatacctctttactctacacatgaataaactgaggattatagggcacacatgtcttgcctgagctcagatggttatgaaactagcaatgaagctgggctgggattctccttctcgatgtttgaaagcagagtgtgtactctaagctacacacaatagaagacccttgagaatcacaaaataccaattatttcaattgataaatttgtgcaatgtgctcacatacatcactggcaaatatatccgttgggataatttctaaattgcatctagtaagaaagagttcattaaacttttcattttgttacattaaaatccatttttcttccttgc

SEQ ID NO: 5171 - protein, 46 aa, Homo sapien
VKGKRACVMYIIYNFLLLEPIKDKILKHVTSLDVRHSLNLHILSGC

SEQ ID NO: 5172 - DNA, 749 bp, Homo sapien
aagcgaaagaatggaaaaaggagaagaaatctaagggaagaagagacagagaagagatctggataacagaagaggacttagggatcacttaagcagttaacctcatctaaattgaaaacttttcccattaaatggtaaaataaatctttctttcaagactaaaatttgagaattataaatgaaagctgttttctactacagagaatcaaaggaagtaagaggatgaacattgcaatgggcaaaaaaaatcttaagacgaattcttgtggccaaatagcaaataaccagttcaaaaactttgcctctttactgacacatgggtggagatctcaacagctggctttcttctccctctctctgcctgcttgccttttcttcctacctcttcttcccttagatttctttccttttttccattcttcgccttaaaaaaaaaatctacttcctaccttcatgtatctttcctaatcatgatattgaattaaagcacacttaaagtacattgctcatttatgtctttaattctcatagaatttatttttgaatacagtatggcattaggattctaactttttaaatagataattaaccagagcactatttcttaatatgccattgttttcttcttcatttgtagtgacaataatgattattattgagagcttgctatgggcaaagcagtgttttgagaggtttgcctgtatttaaattcctggttgtgtttcttgaataaaggtcttcctcatttt

SEQ ID NO: 5173 - protein, 68 aa, Homo sapien [sequence omitted]

SEQ ID NO: 5174 - DNA, 2101 bp, Homo sapien
agagaaaatgaggggattaatggactgtagttctggacaaggtggaaaactcttaaagtggaagtattggggcaagtgctctgacaggctaggatggtgcagtcagtcccttcacccagaaatcagtagaatgttaacagttcagactcaaaccttgtgaaaaacaggtggtggaaaggaaatccctcacagcaactggcaccataatcaagacagaatgtttgcagaataaatggagttacctgctttcagccccaggttgtagctattgtctgccctgatgatatgtgataataatttgtgatcctattgtcttaaaatggggtcactcatctccagtagaattaagtccacagtgaagttgtccccccatccccaaagagataaacatatatgaatgaactcacatgataacaactactgctgcctgggatcatgagagacctgaactgaactgataggaagtgaaaggtggctgagataatgagaatagacccatctgcagaggatcataaaaccagcaaagacaagatcttgtctaagatgccttcacaaactttgtccatgagaactctaaggacttctccagacctgttggctgctgctgtgatctctgcccaagaggagcctctgaccaacatccaaagggcttctggacccactggactcctctggaggtaccttggtctcccgatccatggctgtggttttttactccgtttatcactcctgtgtgtagaatgataattgcacaattgatagtgtgaacacctcttgataaatggtaaatctgagcatatgtatttggctgacatgtcattgtgaaacctcacagcttcagtcagtgtcagcacagctagggagcatgtacctaatgcacatatcactgggcatagtctacaggcacctaataactcaggtaccttaacagtcactaatgagtgtctctccaaggtctaaacaatggaagactgtagaagatgttattcattaagatatctcaagaatgtggaagactattattcgcttctaaagggacaggacttcatagggcacctgaagaaactcccatgaaaaatcacttttacaaaatgtcaagttatgatatccaagatgaaaccaatgagtcacaacattcacataatacactgtacaaccctgatctcttgactgtcatcaaatgtttcttacctctaaaccaaagtttcattttataatttaatttttctcattttttctgttctcttagcttaagaaaagatcattacagactttttgtaagtttttcatatatgcttgcaaagggttgtaaaactttattgtgattattcttgctttaagctgaaacttccctaatctttctttagagattgtggcatagcatgttagtttcttttccatatccaattgttttctgtaatgaatacagaaatatgggcactattttgtaactttaaatagacatcatctcaagtctacaagaattatccaaaacggtatttaatgacatttctaggtcttcagacactattaatgtagattgtagcctctaggtcctgaggatttttactggatactggttactgaaactgagctttcttgaattctttttccttccactgtggtttcccgcatttcaacacatcacctatttttgtcctcaaacgttacttaaattttttccacagaattaaattaaatatgaatcatccctcctctgatttttgaaatgaccctttgcttcctatgataatgattcttctggtccgttttgtagttatatgttagagtttgtaaatattcacacattttgcaactgcatataattttctcattttttcctcttcctctaaagctgctgttatttcttttaactttttgtgggaaaaattaaacccatctttcactttgttgatatttataattgaactccttgatttttgcttgaattgcttttcaagttacccacttttagggaagacattatttgggttttgtttagtgtatcaggctttttttagttagttgtatcaagaagtgtagacttttctatacataatatcctttttcccacagtagttttttttttttttaaagtcta

SEQ ID NO: 5175 - protein, 86 aa, Homo sapien [sequence omitted]

SEQ ID NO: 5176 - DNA, 4383 bp, Homo sapien
  Unsure 3058-3098, 3105, 3107, 3109, 3111, 3113: Unknown base
caactacggctaggtacgaggctgggtgtcggaggctccgttgcctgctcccggagggagacgcgctgccgaggagaacccagcgggagaacatttcaggataggaataggccaagtgctgagaagatgagtcttaggattgatgtggatacaaactttcctgagtgtgttgtagatgcaggaaaagtcacccttgggactcagcagaggcaggagatggaccctcgcctgcgggagaaacagaatgaaatcatcctgcgagcagtatgtgctctgctgaattctggtgggggcataatcaaggctgagattgagaacaaaggctacaattatgaacgtcatggagtaggattggatgtgcctccaattttcagaagccatttagataagatgcagaaggaaaaccactttttgatttttgtgaaatcatggaacacagaggctggtgtgccacttgctaccttatgctccaatttgtaccacagagagagaacatccaccgatgtcatggattctcaggaagctctggcattcctcaaatgcaggactcagactccaacgaatattaatgtttccaattcattaggtccacaggcagctcagggtagtgtacaatatgaaggtaacataaatgtgtcagctgctgctttatttgatagaaagcggcttcagtatctggaaaaactcaaccttcctgagtccacacatgttgaatttgtaatgttctcgacagacgtgtcacactgtgttaaagacagacttccgaagtgtgtttctgcatttgcaaatactgaaggaggatatgtattttttggtgtgcatgatgagacttgtcaagtgattggatgtgaaaaagagaaaatagaccttacgagcttgagggcttctattgatggctgtattaagaagctacctgtccatcatttctgcacacagaggcctgagataaaatatgtccttaacttccttgaagtgcatgataagggggccctccgtggatatgtctgtgcaatcaaggtggagaaattctgctgtgcggtgtttgccaaagtgcctagttcctggcaggtgaaggacaaccgtgtgagacaattgcccacaagagaatggactgcttggatgatggaagctgacccagacctttccaggtgtcctgagatggttctccagttgagtttgtcatctgccacgccccgcagcaagcctgtgtgcattcataagaattcggaatgtctgaaagagcagcagaaacgctactttccagtattttcagacagagtggtatatactccagaaagcctctacaaggaactcttctcacaacataaaggactcagagacttaataaatacagaaatgcgccctttctctcaaggaatattgattttttctcaaagctgggctgtggatttaggtctgcaagagaagcagggagtcatctgtgatgctcttctaatttcccagaacaacacccctattctctacaccatcttcagcaagtgggatgcggggtgcaagggctattctatgatagttgcctattctttgaagcagaagctggtgaacaaaggcggctacactgggaggttatgcatcacccccttggtctgtgtgctgaattctgatagaaaagcacagagcgtttacagttcgtatttacaaatttaccctgaatcctataacttcatgaccccccagcacatggaagccctgttacagtccctcgtgatagtcttgcttgggttcaaatccttcttaagtgaagagctgggctctgaggttttgaacctactgacaaataaacagtatgagttgctttcaaagaaccttcgcaagaccagagagttgtttgttcatggcttacctggatcagggaagactatcttggctcttaggatcatggagaagatcaggaatgtgtttcactgtgaaccggctaacattctctacatctgtgaaaaccagcccctgaagaagttggtgagtttcagcaagaaaaacatctgccagccagtgacccggaaaaccttcatgaaaaacaactttgaacacatccagcacattatcattgatgacgctcagaatttccgtactgaagatggggactggtatgggaaagcaaagttcatcactcagacagcaagggatggcccaggagttctctggatctttctggactactttcagacctatcacttgagttgcagtggcctcccccctccctcagaccagtatccaagagaagagatcaacagagtggtccgcaatgcaggtccaatagctaattacctacaacaagtaatgcaggaagcccgacaaaatcctccacctaacctcccccctgggtccctggtgatgctctatgaacctaaatgggctcaagggtgtcccaggcaacttagagattattgaagacttgaacttggaggagatactgatctatgtagcgaataaatgccgttttctcttgcggaatggttattctctgaaggatattgctgtgcttttcaccaaagcaagtgaagtggaaaaatataaagacaggcttctaacagcaatgaggaagagaaaactgtctcagctccatgaggagtctgatctgttactacagatcggtgatgcgtcggatgttctaaccgatcacattgtgttggacagtgtctgtcgattttcaggcctggaaagaaatatcgtgtttggaatcaatccaggagtagccccaccggctggggcctacaatcttctgctctgtttggcttctagggcaaaaagacatctgtatattctgaaggcttctgtgtgacaggaaacccaagcctaagaaacaattaagtggttctcatctctaattaactgtgaaaccatttaatccaaacatgtaagcacacactcacttattaagtcacatacttttctaggtgctggggattgagaacgaatcgatgtaagattcctcctttagggcagagacagaccactgacaaatacacagatagacaaggaatttcccatggtaaaaagggatatcagtaattagaggaccgtgagactcagagannnnnnnnnnnnnnnnnnnnnnnnnnnnnnnnnnnnnnnnntgtccgngngngngnacgtgcacatgtgtgtaggtagatggagggggtgattattttgggtggtcagggaagtgctcagtgagggaagaacttgtcatgagaatctctgagcgtgccaggcagactcggatatttttataaatttttaacatggccacttgcagaagagcttgaatgggacgtgcagggagaatgggaaggatggagcaggtagctcatctggccttgtaggtgccgggaacgggcaagacatgttttgaaatgtaagatcacagactgttttttgcaagaccacattatattactttattattttctgctttttcttttaacgacattagtgtttttgatcactatattttaaaatgctttttgtgagccttttggttatgtggaatctgttccttagctctgattttttattcttatggagcgtcttaggttactacatgaaggtaagactgccacagtcccccagggaggcacactgtgttttactgattgatttgaagatgatagagagcctagggggatgagtctattggactcaaaggttacattttgtttttccatttaatttaataatcaacaaaacgacaaagtcagtttaatatctttcttctgctgagtcttcaggatgttagctagtctttcaaaagccattgctacaaaagtgcaaatttctcatttcctgtgggtctctagaaactctctcaatatttaaagccaaacaaatccatcttttctgagagacagaaactaaaaaattcagagttaattcactattaaaaacagcaaggccctgctatttcccaagaataaagaaatttaaaattctcattgtaagaagtatgaacttgaagctagaattggtttatttctggcagctacttacaatattaagaactttactttttaaatttgagacaatttcacaggaaagcaagaaattagtctattgtgaaatgtttttacaactaacttggaatatactgcaaatcactagtaagtagagacacatttaagataaaatgattaataaaacaattggtaattctgaataaggatctgaataaatccagatcacagactgttcctttaccaatatgtaaaagaatgtgcaaaattcgtaaaaatatacccaaaaatttaccagcaacagagaagcaaagaatggagttcaaccttacactataaacatctaatagatatgtatgaaaatttaaaaactagaaaaggttgggcatggtggctcatgcttgtgatccccaggactttaggaggc

SEQ ID NO: 5177 - protein, 803 aa, Homo sapien
  Unsure 3058-3098, 3105, 3107, 3109, 3111, 3113: Unknown amino acid
QLRLGTRLGVGGSVACSRRETRCRGEPSGRTFQDRNRPSAEKMSLRIDVDTNFPECVVDAGKVTLGTQQRQEMDPRLREKQNEIILRAVCALLNSGGGIIKAEIENKGYNYERHGVGLDVPPIFRSHLDKMQKENHFLIFVKSWNTEAGVPLATLCSNLYHRERTSTDVMDSQEALAFLKCRTQTPTNINVSNSLGPQAAQGSVQYEGNINVSAAALFDRKRLQYLEKLNLPESTHVEFVMFSTDVSHCVKDRLPKCVSAFANTEGGYVFFGVHDETCQVIGCEKEKIDLTSLRASIDGCIKKLPVHHFCTQRPEIKYVLNFLEVHDKGALRGYVCAIKVEKFCCAVFAKVPSSWQVKDNRVRQLPTREWTAWMMEADPDLSRCPEMVLQLSLSSATPRSKPVCIHKNSECLKEQQKRYFPVFSDRVVYTPESLYKELFSQHKGLRDLINTEMRPFSQGILIFSQSWAVDLGLQEKQGVICDALLISQNNTPILYTIFSKWDAGCKGYSMIVAYSLKQKLVNKGGYTGRLCITPLVCVLNSDRKAQSVYSSYLQIYPESYNFMTPQHMEALLQSLVIVLLGFKSFLSEELGSEVLNLLTNKQYELLSKNLRKTRELFVHGLPGSGKTILALRIMEKIRNVFHCEPANILYICENQPLKKLVSFSKKNICQPVTRKTFMKNNFEHIQHIIIDDAQNFRTEDGDWYGKAKFITQTARDGPGVLWIFLDYFQTYHLSCSGLPPPSDQYPREEINRVVRNAGPIANYLQQVMQEARQNPPPNLPPGSLVMLYEPKWAQGCPRQLRDY

SEQ ID NO: 5178 - DNA, 761 bp, Homo sapien
cggaaggcccgctgcacgggcgggtgcttgcagattcctccagggccacctgcaggccccggcgctggccccgtgagctcggcccctcccgcgtcccccgcgcccacccacggggccagcgagatccgcagccgtctcaggcttcccctgtcaccccggccctgcgaagcgggtgtgcgccccttagttctccgagcccgccgggagccacctcctcccctgcccctggagggggccacgcccgcagaacgctgggcagaggcgaaggaaccgggaaacgtcccttttctccacactgaccttcgggtctgctgggtcctctccactccctcccaccctgcccgcgctgttccctggggcccgcagtttcagcaaagttccctgccgcgccgggaagccgtcctgttgcccactctcacccttcctcctttcccggcccattctctctccccactgggtctccgacacgaccctctctcctcccggctgtccccgagcccctctctgcttccccagctcagccccctctctgacggcttctccctcccacccccaggcgaatctccgggctcccacggggtgcccccgatccccggggtctaggtcaaccgacaaaattattttaaatgggaagatttgaattccattgaattcatggaagcaggaatccatctggtcatattttaaataattttgaaatgataatagcaattatcaatttaaagtttaaccagaattcagaataaccaccattttaccag

SEQ ID NO: 5179 - protein, 200 aa, Homo sapien
RKARCTGGCLQIPPGPPAGPGAGPVSSAPPASPAPTHGASEIRSRLRLPLSPRPCEAGVRPLVLRARREPPPPLPLEGATPAERWAEAKEPGNVPFLHTDLRVCWVLSTPSHPARAVPWGPQFQQSSLPRREAVLLPTLTLPPFPAHSLSPLGLRHDPLSSRLSPSPSLLPQLSPLSDGFSLPPPGESPGSHGVPPIPGV

SEQ ID NO: 5180 - DNA, 943 bp, Homo sapien
  Unsure 795, 834: Unknown base
ttatctcataatgcctttcataaccatttgacattataagtctacttaaccttaccctgctattatcatcactgagaattttcctgagcattgacattttcttgcctttttgtatgctatttagcagttctgcatttgaagtgatcgttattagattgctgattgtagcatccttatcttaactatatagatgagaatgaggagtaaggctaagagtgtgcccagggactgtaagtgccagcaccttcctacccccactatgctgtccattaaggcagcagacagatgatatcaggctgtctttcagcctgataatgagtgattgattacacaactctttaagacctttgtcatctttgtggtttttataaaagagcacatatagggctgtaagaccaagctaatgaattagttgtaacatttatttcttattactatttataatggtaatttatgttgattattgaaacatttgcaaaatttaaatgtgcttagagaaaacagaaaccacttttgactttgtgcatgctatttagcagttctacatttcaagtgattgttattagacattatgactcactccatcttaaataaccaattaatccattgattcaacgttttattttatgcttgccatgtatgcaccaggccctgttctaggcatttgagatacagatctgtctcctgctctcatgtactgtagtggagaaaactgaaaataagccagtaaacaaataaatatacactttgtgatagctgataattcctatttttgtatttcataccagcactttnttccttatgcataagtagatgtaaaaagtatctggactntatggcatttttctagcctatttaatatgtatgaatgtaatgccagggggatagaatgacaatggcaatacagtggctaagagatatgtttgacaaagaaaaaggagat

SEQ ID NO: 5181 - protein, 17 aa, Homo sapien
  Unsure 795, 834: Unknown amino acid
MTMAIQWLRDMFDKEKG

SEQ ID NO: 5182 - DNA, 875 bp, Homo sapien
gttcactaaagctttggtgaagactcacatgtagaaagatgtagctgttttattgccggcttttgttcagcagaaacaagcaaatagagaatctttgaagggcctctctggtgtcagtaggaaatcctgatttttagctacggttggtgtgcactaagtcatcttcagaagttggtaggattctgtgagtccagaggacagagcttatagaggcattagtattgtaggactaattgtggatcctgggtgccctgttaaagtaacccttgtcatcatttatgctaaagatgatacccttctggcagtttgccacagtacaattcagatgcatctgcttttaacccttttccgttatcattggaagtctgacagtgcgctgcataaacaccttgagtaccacagcattccgtaatatcaatttctagaagaagcctctttctaatagtagtgtggccggtgcttattaatcatctagctactgagttactgtattggattaaaatatataaagagagagcacaccaaatctatgcagattcctttatcctagtatgtcagtttccttttctatctctcatttttaccttatttactgtaacaaagattgttgattttaaagacttatgggtaccgtgctctctttttagttaggtaggttaaatgagtattcataaaagcaaatgttatttttctacattatgcagatattgaaattgtgtattatgagcaccagtttggttaagtactttttgtggaaccagttagagctaatatctaaaaaaggaagaaaatgatttgtggaaccagttagagttaatatctaaaaaaggaagaaaatgaaaatttcgtggtcgaagataatttgtttggacaca

SEQ ID NO: 5183 - protein, 13 aa, Homo sapien
MKISWSKIICLDT

SEQ ID NO: 5184 - DNA, 1732 bp, Homo sapien
  Unsure 1655-1680, 1726: Unknown base
caatgaaccatgctggatgtttcgctggagctgggatcctttcaggacactgtgcttgctgtgcccatccagtcaaccaaggaggtacccccctaccgtgcagagctgctttgggcctcgatgccattgttgccgaactgacattgccatgatgaaaatggactgtaatttgtacagctatttgccagttgttttttctattttgcactgtggaaatctttgcccaaattactgcaagagtctcgagcatcctgctgtcgtaagtgcagagtcaaaggaagaaaacgatgattttttaaaccatctttctgctttctagtctcacctgagtgcctcacatttggcagaatcaacctggaatcctgctcataagactatcagggaaatataatttccagacttccatttccagaaaaatgtaataaatacttttaaaggggatggagatggtaccgtgtgctaaccccactctgagacaaacctgggtcacaggaaccatagggaagatgtctgcagtagaaggggacctcgaagtactcaagtacttggctcacaacagcactattcacataaagcctggcctgccccttggtgacctccttcccttacgcctctagactctactaggtgatcagaaatccctgcaagctagttggggagggaagagtgaaagtgaaaaatggagaggaaacactgctacccgcccaatgcctgaagccaaatgcaagcctgggccaggcttgggggaggaatcaagaggaagcttaaacttaaaatgaaatcgaaagtttagactcctacatgggattggacattttaaatgctgaacagagcctatttttatagctagaagttacaggacaaatttttggttaactgagaatgatccaaaaatcatgtgaattttgtgatccagaaagtcacagaacatgccctagattttatcccaggggcagggaggagtgacctgcagagcaagtttgaattggtaaatagaaaacaagaataaaatagtttgctgtttacattcccataagcctggctctttcgacttcatgggtatattccttggttgaatttagtatgccactatgacgccggattgtgatatttgcctaggatgttttggtcctaatatttagtatggaattatttgcccaaatcacctgcccctctccacttgtagctttatttcaagaggtatgtttctcaaagtggagtgactgccagagtgggagaaaggagctagcccttacagctgtagtaggtctttgtacatcagcttggtaaatctgcaaagccccccaccttcccccctcccaccacccccaatccccaccccgccaggagccttccccacgtgtggacaagagagaagggaggatctgggaggatgtgctgtttctcagggtcccacagctagaaggtggtggagctagaatttaaatcacattccaaatgtctaaaaatactaacattatcacatattaccagagacacctcaaaaaagacagagacgccctgcagggccgcaacattcccgcagcctggtagggtctgctgggggccccatgcctgtgagagccgctcctgccgctgcagcaccggggaggctgtgcattcaacgagtccttcctcccttctcctttcattcnnnnnnnnnnnnnnnnnnnnnnnnnnccctccgctccttcccctagaccttccttccgccctccctaccccnctgcca

SEQ ID NO: 5185 - protein, 105 aa, Homo sapien [sequence omitted]

SEQ ID NO: 5186 - DNA, 1824 bp, Homo sapien
  Unsure 1168-1248: Unknown base
gtgggaggcaccctgagcccgctcgccctggccaataaggcggagagtgtggtgtccgtcaccatgcccggcatatatgaagttttaaaaaatcagaatacagaacaaaatttattgggagatgagcttctttctttctctcttcaacaccatcgccacatcacctccacatatacacacactgaaaagatactgaaaagacataataaccatgggaaatggagattactggattgttaaatgttctttttgcctgtctttattctctaactttgctataatgaacagaaattattttttgataagcaaaaaatattttaactttaaacatgtaaagtaacttagtagttgtcttttcaaaatatgtaagaatcattagttcactagttggttaaatatgtttttaatcccaacatcttgataattgtcgcaaaattgagggaacattttttgaactctaaaatgctatagaattgacagatcatttttcagttcataagttattacttataatcagtttttttattgttactatggcaatattttatacacaagaatggctgaggttaggaatttgtgccctgaaaattgtatcaacatatcaaatatgaagtaaataacaatttcttgctttaaatataacaaagatgtgggaagaagtggtaggcaagagtctctgtgttaccatgggaacgattaagttttccaaggtgcaaaccagcctcattccagcttcagggtcaatgacttactagctcagagggaaatgtataaatatttaagtacatacctactatctgtacagagtgactctcattacccagagaactgctgtaaaatattatttattcacagattacacaaaaccaatctaaattagtacttttatacattctatttggggagtacttaaggtgtatgagcaaacaaattgttatccaggtcactccagaactgttgtatacagattaagaattgatgttggatactaattaaaatcattaaagcaaaatcaaaaaacactttggctagcatttcaattattttttaaacaggatttcttaaaacaatccccaaagtagtcttgtaatttgttcattttaaggatctatgttactctgaggccaatcaagggggctaacagtctagttggggagccaagatagcnnnnnnnnnnnnnnnnnnnnnnnnnnnnnnnnnnnnnnnnnnnnnnnnnnnnnnnnnnnnnnnnnnnnnnnnnnnnnnnnntgaagaatacctgaaacatggcacctgacctcaaaaagcttaaaattaggagacatagacatgtaagtaaataactgctataggcaaatctcagcaactgccacacctgcttgctcctttagcagaacttctctgattggccatattctgcacatagtgaccaactcacctcttttccctatctgctttccttgctatagctgagaaaaaagctgtggcccaaaagtttctcccctgagagggacaggatcagattgtcttttcaagagttcccatgtgcaatacagagctgaagttgaagctgaaaggattcatagagaaaggccagtataaatcttcagcataccaaagttatgagaaaggagaaagcttgcaatgcatgtatagaggaggtgctgaggagttggtggtagcagcagacaagggaggagaaatggatagaatcatggttattgtcaaggtggaggatccgtgaactgcaactgaagagggctagtgacatgacccagttcttagggctgtctctattcctgaatatttacttaatataaggcaattcttatatagcattagggt

SEQ ID NO: 5187 - protein, 79 aa, Homo sapien
  Unsure 1168-1248: Unknown amino acid
VGGTLSPLALANKAESVVSVTMPGIYEVLKNQNTEQNLLGDELLSFSLQHHRHITSTYTHTEKILKRHNNHGKWRLLDC

SEQ ID NO: 5188 - DNA, 3945 bp, Homo sapien
agcggactttatcggaacgtgcctaagctgctgcagctggcacccggttgcgctcggcgaagagggctgggggcgggagatgacggtggtcttctccctgcttggcaccctgcgagcaccagctcccttctcctcgccactccaaggttgcagacgaagcaggtactgtcctagatgttaaggacacaacattgagcaaaaacatgcatagtccctgcttccgtgacacttgagtgaactgaatgtgcaaagtccctgtggcacaaagtccctggggccagtgtgtgtggcgggtgtagaaggagctaaagagatctggttggagttggagggtgagagaaaatgaattctaatttacctgcagagaacttaaccattgcagtcaatatgaccaagactttgcctacagcagtaacgcatggatttaattccactaatgacccaccttcaatgtcaattacaaggctttttccagccttactggaatgctttggcattgtcctttgtggctacatagcaggaagggccaatgtcataacatcaacccaggccaaaggactaggaaattttgtctccagatttgcacttccagctttattattcaaaaacatggttgtacttaatttttccaatgtggactggtccttcctatatagtatcttaattgccaaagcttctgtatttttcattgtatgtgtattaaccttattggttgccagtcctgatagtcgatttagcaaagctggactattccctatttttgctacacaaagtaatgactttgcattgggataccctatagttgaagctttatatcaaactacatacccagaatatctccagtacatttatttggtggcaccaatatctcttatgatgttaaaccctatagggtttattttctgtgaaatccaaaagtgggaagacactcaaaatgcttctcaaaataaaataaaaattgtgggactcggactcctgcgtgtattacagaacccaatagtatttatggtcttcattggcatcgccttcaattttattcttgatcgaaaggtacctgtatatgtcgaaaattttcttgatggacttggaaattctttttctggatcagccctattttatcttggtctcacgatggtgggaaaaataaagagactgaagaagtcggcatttgtagtactaattcttctcatcacagctaaacttctggtgctgccacttctgtgcagagaaatggtggaactcttggacaagggcgacagtgtggtgaaccatacaagtttatcaaattatgcatttctgtatggtgtatttcctgtagcaccaggagtggctatctttgcaacacaattcaacatggaagtagaaattataacctcagggatggtgataagcacatttgtgtctgctcccatcatgtacgtttctgcctggttactgacctttcccactatggaccctaagccattggcatatgccatccagaatgttagttttgatataagtattgtcagcctgatctccttgatctggtctctggctattcttcttttgagtaagaaatataaacagcttcctcatatgcttacaactaatttactcattgctcagtctattgtctgtgctggaatgatgatatggaattttgttaaagaaaaaaattttgttggacaaattttggtgtttgttctattgtacagctccctctatagcacctacctgtggacaggccttctagcaatttctttgtttcttttgaaaaagcgagagagggtacaaattcctgttggaataatcataatatctggctggggaattcctgctctccttgttggtgttcttttgataactggaaaacacaatggagatagcattgactcagccttcttttatggaaaagaacagatgatcaccacagcagtcaccctgttctgcagcatcctgatagctggcatatccctcatgtgcatgaaccagactgcccaagcaggaggctatgaaggtttcgatcagtctcagagccacaaagtggtggagcctggaaatactgcttttgaggagagtccagcaccagtaaatgaaccagaactttttacaagctctattccagaaacaagttgctgctcctgctccatgggaaatggtgaattacactgcccatcaatagagccaatagcaaacacaagcaccagtgagcctgtgattccttcgtttgagaaaaacaatcattgtgtgagtcgctgtaactcccagagctgcatattagcccaggaagaagaacagtatctacagagtggagaccagcaactgacccgacatgtgttgctgtgtttacttctcatcattggcctgttcgctaatctttacagttgtttatggtggctattcaaccaagagcctggaagactttatgttgagttacagtttttctgtgccgtgtttaactttggtcagggatttatttcatttggaatctttggattagataaacatttaatcatcctgcctttcaaaagaagacttgaattcctatggaacaataaagacacagcagaaaacagggattctcctgtttcagaggaaataaaaatgacctgtcaacaatttatccattatcaccgtgacctctgtatccgaaacattgtcaaagaaagaaggtgtggtgcaaagacttctgctggaactttctgtggctgtgacctggtgagctggctaattgaagtcggccttgcctccgaccgtggtgaagctgtgatatacggagacaggctggtacaagggggagtcatccaacatattaccaatgagtatgaattccgggatgagtacttgttttacagatttcttcaaaagagtcctgaacagagtcctcctgctattaatgcaaacactctccaacaggaaagatataaagaaattgagcattcatccccaccctcacattcccctaagacctaaattatgcaggggagaaccctacatggaatcatattctagccgcgtattcattagtttttagctgggtgaccttgggcaagttaacagaggcaacctctctgagcctcagttgtctcttctgtaaaatgtgaaaagatgtgctcccaccacatgcgcagggtctgtgattttacatgtatgtaaaacacataggaagctgacttaggaaaaagagaaaaccaaattaaagttctgataatgaatataatatagtcatcctttagtacccaaggggattggttccaggactcctgaagatcccaaaatctgaggatactcaagtcccttatataaaatggtgtaggccgggcatggtggctcacgcctgtaatcccagtactttgggaggccgagtcaggtggatcacctgaggtcaggagttcaagaccagcctggccaacatggcgaaaccccgtctctactataaaatacaaaaaattagttgggtgtggtggcgggtgcctgtaatcccagctactcaggaggctgaggcaggagaatcgcttgaatctgggaggcagaggttgctgtgagccgagatcgtgccactgcactccagcctgagcaacagagcaagactctatctcaaaaataaaataaaataaaataaaataaaataattaataaaatggtgtagtatttgcatataacctatgcacattctcccatatagtttaatcatctttagatacttataatgcctaatacaatgtaaatgctatgtaaatagttgttgttatactgtattgtttagggaataacaataagaaaaacagtctgtacatgttcactacagatgcaaccattgttaagcctgactacatctttttatctgcagttgattgaatctatggatgtggaacctgtgcatatggagggtcaactgtactataaataatacgaatatgccaacattatataatcattgctttctgcaaaaaaaaaaaaaaa

SEQ ID NO: 5189 - protein, 870 aa, Homo sapien
MNSNLPAENLTIAVNMTKTLPTAVTHGFNSTNDPPSMSITRLFPALLECFGIVLCGYIAGRANVITSTQAKGLGNFVSRFALPALLFKNMVVLNFSNVDWSFLYSILIAKASVFFIVCVLTLLVASPDSRFSKAGLFPIFATQSNDFALGYPIVEALYQTTYPEYLQYIYLVAPISLMMLNPIGFIFCEIQKWEDTQNASQNKIKIVGLGLLRVLQNPIVFMVFIGIAFNFILDRKVPVYVENFLDGLGNSFSGSALFYLGLTMVGKIKRLKKSAFVVLILLITAKLLVLPLLCREMVELLDKGDSVVNHTSLSNYAFLYGVFPVAPGVAIFATQFNMEVEIITSGMVISTFVSAPIMYVSAWLLTFPTMDPKPLAYAIQNVSFDISIVSLISLIWSLAILLLSKKYKQLPHMLTTNLLIAQSIVCAGMMIWNFVKEKNFVGQILVFVLLYSSLYSTYLWTGLLAISLFLLKKRERVQIPVGIIIISGWGIPALLVGVLLITGKHNGDSIDSAFFYGKEQMITTAVTLFCSILIAGISLMCMNQTAQAGGYEGFDQSQSHKVVEPGNTAFEESPAPVNEPELFTSSIPETSCCSCSMGNGELHCPSIEPIANTSTSEPVIPSFEKNNHCVSRCNSQSCILAQEEEQYLQSGDQQLTRHVLLCLLLIIGLFANLYSCLWWLFNQEPGRLYVELQFFCAVFNFGQGFISFGIFGLDKHLIILPFKRRLEFLWNNKDTAENRDSPVSEEIKMTCQQFIHYHRDLCIRNIVKERRCGAKTSAGTFCGCDLVSWLIEVGLASDRGEAVIYGDRLVQGGVIQHITNEYEFRDEYLFYRFLQKSPEQSPPAINANTLQQERYKEIEHSSPPSHSPKT

SEQ ID NO: 5190 - DNA, 374 bp, Homo sapien
agctgttattgcccttagtttacagatgagaaagttgagacttaaagccattaagaattttgtggtagcaaagaaggatcctgtatttggtaaatttgggtgtaattatgagtttaatgtatgcctttttggcagtatcctttctggcttcatcatgctatatccccattgtccacaacattgactggtgcttagtaaggtgctcaaggacgcatcaaatgaatgaacaaagactagagacagagttgcctggccttattctttaaatacccacactataggactgcaacaaaatacagagccctagtgattagaagacttcaaaagtgtgttttctttttccaggtgcatgcctttgatttcttgagatgatg

SEQ ID NO: 5191 - protein, 60 aa, Homo sapien
AVIALSLQMRKLRLKAIKNFVVAKKDPVFGKFGCNYEFNVCLFGSILSGFIMLYPHCPQH

SEQ ID NO: 5192 - DNA, 1143 bp, Homo sapien
aaggcagtttgcatctgtacatgtgaatgtttgactgtaccattgactgttatggaagttcagcgttgtatgtctctctctacactgtggtgcacttaacttgtggaatttttatactaaaaatgtagaataaagactattttgaagatttgaataaagtgatgaaggtgactgatgcacctggggtcatatagaaggtctgtggctcttctgtgttaaacaagtgagctaggtacaaggtagtaaggatagcatacaccataggttctagtatcgagtaagctccacttgtcttgctttgccgtattctatctttacaattcaaaaatatctaaaatgaaggacctgatagatttcaaagcaactatttggtagcgaatcatgtttataaaacaaaccaaagctcattttaagtctattattggaaagtgccatcaggattaagatgttctgttccatggctatgactgaaatcaatgttgggaagctaatgttttcatgactagcattctctctctgttcaagcaccgacaactccttttggctgggccttgcctcttttggccacagaccttctatatgaccccaggtgcatcagtcacagttgctcagaaccctgctcagtgataaacatcttactaaagctgggtcaatcagggtcactctctggaatgttaaacatgaagcctgagacaagatctctcttttatctggggtccccaaaggcaatgctgtacacttggagctgcctgctgccctgcaactactcccatttaccaattatctggaagaaccagtctactatagaagacaacgaggccaacacacaaaaacacagtaaaagtatggacaaattagtgggatccctgaaatctattccaactatgtgcttccaagtcacatgactcaataaatgcttcagctggttgagttgtgcttggcgttcactaccaggagagttctgattaataaaaactcattccatcaattaataatttagtagctctctttcaacctgagccaaattcaagcataagctaaaggataagcagtgacccatggccaatttcctatgtcatacacttgccattagtgacgtaagttaagccattcttcaaaacattaaacagccttcaagaacaa

SEQ ID NO: 5193 - protein, 32 aa, Homo sapien
KAVCICTCECLTVPLTVMEVQRCMSLSTLWCT

SEQ ID NO: 5194 - DNA, 1700 bp, Homo sapien
gcatcctggatgaacatacgtatgcacaggttattttttaaggacaattctttccataaggtctgtacccggtacttgaaacaggtgttcatgaaaaaaatgcacaaatcctgcctgcccggaataattcatgaagaaggggctggatccgtgggtcagagaacacaggaccagtttgccatcccaaggccgaaggattatagaacacatgtgctccttaaagaaaaacactgtgcatggagataacagtcatcaaacatggaaacctttgagttgaattcgagggacaaacgtcctgaagaatgggaagaaaggaggttctgaaggcacagattccagtaccatgccagaggttgaggacactggtgcttgaagggaaactggcacactctggagccccaagaagagctggagctggaggcatgcggcccacgaagggtagaagtaccagccatgaccaagagcccttcacatcatctggcaatccatccagaacccactgaatggaggacagcacagcgaggtctttctcattttgtaactgcaaagctggaacaagagccagagaagccaaagaagcagtacaagtccaacagcttttagaataaccctgagaaaatggttgaattttgaccagttttgcaattggatactatgagaagagaccttccctcctgcactggatttcatcatcatacctggaggccattcctcatgggactttggccatctcatatccacctttaagcatgttattcccatttcagctgtggtagctctgggtatccttccctaggagaaaatattaatcttttctccctctgagttctggattaaactgtcttatctgaaactgggtcactttaggctagaagcaccactagacattcctgttctcagaagttgccaagttcatgtcatatctgtttcattgttaacgggatccacttctgcaagaggctgcctggccagatcagtgtgtctcctggtcagctccttgatgcccttctcctctcccctgcccaatcccagctgagacttgcactgtggtgactctgtcccctcctggtgctttgactggatgtgtgagagaaagtatggtctgtggcactgacatctttgtgtgtttggaggtgactggaacacggatccacccctggaggaaggtggccgtgaaggaggccagcctcagctcagcgttctactctcatcgctcttactcccgcctttttagtgcctgccctactccaggataattgtgcttttcttttttcagttaaatgttagcattgctatttttcattattgcaaagcagcacatgcttgttacaaaaactttggaagtgtagacaaataaaaagaagaaaaagctacttccaaatcctacttaccccaaagacaagatgatcatttagtcatatagtatcatacatatataatatgtacacatatattttaatgtaagtgtagtgtcacaatatcatgtatagtctttcataaaacacgttggcacttaatatcttatatgaacaactttctagagcaacaagcttagtttacagcaattgtaatgtaagagtactcatttacatagctacagcatcctttgtttacctcatctcttatggtttgatgtttaggttgtttccaacttttctccacctaaacagcattaataaatgtggttttagtttcctctt

SEQ ID NO: 5195 - protein, 81 aa, Homo sapien [sequence omitted]

SEQ ID NO: 5196 - DNA, 652 bp, Homo sapien
aaaaagaaagaccctagctgtctgaatgatctgagctaagtccccagacgtgcaagtgtggccatcctagaccactgagctccagccaagccagcttgcatcagaagaactgtccagaaaactcacagaatcataagaaataatgcagcgcagcttaacttggactcaccacctatcaagtgctcgacagccacgtgtgcagtggttcctacgtggagcagcatacatccagagatgcaaatattaatgaggacagtgctagtaacagagttgctgagcaatctatgtccccttgtaagaaccagtgccccaggggaagaaacagaactccacaaggtagcagtgtgggtgtagtacccgcatgtgcccatgttatgggaatgtagatggggagtgaccaccgccaacagaagtgtggccatcttgcccgagatgcctgaggacctcctatttttagatgctgctgcccaaggcctgtatttcatgctatggcttttgtcatttgaattatcagtagctgtctcggagctattacgcttcactgggccctggaggatattgtcttatacagtccactgggttttggatatgcagtctgtgcctttcattgccttcctggaaaataataactaaactcttcctcaccaaaaaa

SEQ ID NO: 5197 - protein, 89 aa, Homo sapien
AKPACIRRTVQKTHRIIRNNAAQLNLDSPPIKCSTATCAVVPTWSSIHPEMQILMRTVLVTELLSNLCPLVRTSAPGEETELHKVAVWV

SEQ ID NO: 5198 - DNA, 4994 bp, Homo sapien
ccgcagcgctcggctggctgcagcggcaccgcgggttgcgcggccggggatgctccagcgggcgcgatggcccccgccatgcagccggccgagatccaatttgcccagcggctggcgtccagcgagaagggcatccgggaccgagcggtgaagaagctgcgccagtacatcagcgtgaagacgcagagggagacaggaggtttcagtcaggaagaacttctacaggaagagctcgccaacaccattgcacagctagtccatgctgttaacaactcagcggctcaacacctgttcattcagaccttttggcaaaccatgaatcgagaatggaaaggaatagacaggctacgcctggacaaatactatatgctgattcgtctggtcctgaggcagtcctttgaagtcttgaagcgaaatggctgggaagaaagccgaatcaaggttttcttggatgtcctgatgaaggaggtcctgtgtcctgagagtcagtctcctaatggagtgagattccacttcattgatatttacctggatgaactctccaaagtcggggggaaggagcttttagcagatcagaatctcaagtttatcgatccattctgcaaaattgctgcaaagacgaaggaccacaccctggtacagaccatagctcggggtgtcttcgaagctatcgtagatcagtctccttttgtgcctgaagagacgatggaggaacagaagacaaaagtgggtgatggtgacctctctgctgaggagatacctgaaaatgaggtatccttgagaagagctgtcagtaaaaagaagacagcactgggcaaaaaccattccagaaaagatggactcagtgatgaaagaggaagagatgactgtggaacctttgaggacacagggccccttctccagtttgactataaggctgttgctgatcgactcctggaaatgaccagcaggaagaacacgccccacttcaacaggaagcgcctctccaaactcatcaagaaattccaagacctttctgaaggaagcagtatatctcaactcagttttgcggaggacatttctgctgatgaagatgaccaaatcctcagtcaaggaaagcataagaagaaaggaaataaacttttagagaaaactaacttggaaaaggagaaaggaagcagagtcttttgtgtagaggaagaggacagtgaaagcagtcttcaaaagagaagaaggaagaagaagaagaagcaccacctgcagcctgaaaatccaggcccagggggtgcagccccgtccctggaacagaaccggggcagggagcccgaggcctctgggccgaaagccctgaaggcacgtgtggccgagccaggtgcagaggccacgtccagcactggggaggagagtggctccgagcatcctccagccgtccccatgcacaataaaaggaaacggccacggaagaagagcccgagggcccacagggaaatgttggaatcagcagtgttgcccccagaggacatgtctcagagtggcccgagtggcagtcatcctcagggacctagagggtccccgacaggtggagcccaactcctaaaaaggaagcggaaacttggagttgtgcccgtcaatggcagtggcctgtccacgccggcctggcctccattgcagcaggaaggccctcccacaggccccgcagagggggcgaacagccacaccacgctgccccagcgcaggaggctgcagaaaaagaaggcagggcccggcagcctggagctctgtggcctgcccagccagaaaacagcaagtttgaaaaagaggaagaaaatgagagtgatgtcaaacttggtggagcacaacggggtgctggagtccgaagctgggcaaccccaggctctgggaagcagtgggacttgcagttccctgaagaagcagaagctgagggcagagagcgactttgtgaagtttgacacccccttcttaccaaagcccctgttcttcagaagagccaagagcagcactgccacccaccctccaggccctgccgtccagctaaacaagacaccatccagctccaagaaagtcacctttgggctgaacagaaacatgactgccgaattcaagaagacagacaagagtatcttggtcagtcccacgggcccttctcgagtggccttcgaccctgaacagaagcccctccacggggtgctgaagacccccaccagctcacctgccagctcacccctggtggccaagaagcccctgaccaccacaccaaggagaaggcccagggctatggatttcttctgaggagcagcagagtcccttgtaaaagactgcttttgtacagaatgcgctataaattatacctttaagaatgtggggccttttttatgattttgtaagttcccataagttgtgtgcacgaggttctgagagtgcccgcaggctgctgcgtcctggcccctctgtagtggctgcgggcgtcttggttgaatcttttgctacaaaccatgtttgcgtttgagctctccaggattttacatttttgggtaacctcagtgattcccattggtgtaggaaatgagaccctctctgaagctgaggagagcacgttgatctgaactttaaatcaatcagtgctgctggcacaatgaaaggtggaactgcacttgtgttgagctctcagttctgcggaatttggtactcattaccgtattcgccgtactaagttggtttctgttagtcttaacagtctgttttcttttaaaagcatgtagggcttcattgccatgttctgtgggtgtttggcaggttaccgatggggaagattcttgtcacagaatcagcaataccatagtttttctacatgtgctcagctgggggtgtggacaggtaggggtggggaaagaagaggctctgcgttctgggggctttttcttctcctccccctacccggtttccctccctgttttcctacctctacggcaagcccaaagtgtcttcccgggagcccagcgcagcccccggctcttacccaggaccccgccccgtgctgagccttctgctgaggtccttgcgtggagcacactcattcctccaagcccttgcgctcccgtttctctctctctccgtccacgttccagccgagtcactgcctgcctgaccggctccatggcagctccccatcttccctagaggctgcctgcgcatctggagcctgcgctccggctcagcgacctttcctctcaaatgcggaagcgtgcacttacagttcagaccgttctcctgtaagttcattacaaacacgggcggaaggcactcaggctttcgttggagaaacagaaataaggccttcttttgagcagcgattgctggatcattgatctgtttgaggaagtgtctgacctgggcctgagagctggagaaggtgcagattcaaagtgagcggctcctgaggagagccgccaaggctgctcgccttctccgtggcttccgcagctaccgtctgcacggtgagagggcacgggcacacggttcgggctggcgtgcagctctcccagccagccacgctctgctcaggcctggaagtgaaagccgcctccttcccgttatgccccccatacaggagcctcggtttttcagcaaaacgcggccagtccccttctccactgctgcctcccagcagagggccccaggatctccaaggtcccagctatggctttggacaacgtggcttcggcccctggggttgcagagcttgcattgggtttacctcggtctcattcattcatggagccaagggtggggtttcacctgcgaacatcagactgacttgctggcgtcaagagcagttgactcactgatgaaggccctggtgaggagaaagcactctgttcttcgcctactctgtaatcgttttgtcataatgagccatgaaaaaagtaatgaacttgtgctgttaatcgtcactgtaatgagaagtcttacgtacaacatagctgtggtggctgcgtggtttaatggctgcattagataggatcctcacatcccattcagaaccaaaactgatacagtgaaacaattaaggtgagcaaatagttttaacttttcttttttttttaagtttcattcttcctagaatatttttctaacaatttttatttcagctttaaagatgggtcatatagccaaacgggccatataatccaacattgttgagatgtcttaggacatctaaggcaaaactggcacatttgttctgcagactattgcaggaatgttttttcctagcatttctatattatctgtccattctgaggaaccagtgaatgtcctataaatgcacctcctgtcaaaaccatgcctgagaggtcccggctgggagtgacagggtgcttcttagattctattggtccttctctcattctccgaacttactcctttttatgggtaagtcaactaggtttacagtcccttatttttaatgcctaagttttgacagcaggaagaaaacaattttttaaaaattctcattacatagacgcacaagaatatgtcacataaagaaaatgtgtttagaatactggttttctatttacgcatgatattttcctaagtaaaattgccaagtggacttggaagtccagaaaggaaaataatttaaattaatgctggtgatcttaacaatattttgtaaaatgatgcttcccccttctccatggtctagtcaattttgtacaattaggtatctgactttacaagtttgttatcctttctaatttttactgaactgaaagcacaaagaagactacacagaaaatctggaaacagttgcaggtgttgggaggaagatgaaatcgagctgtcttttaacttttgtatgtgttttatcagaatttgctggactatgctggcaaggactttgtttacgatcaaattgtactagtgtctgcagggtttgtcagtactcgtcaaagccaagtccaattaaaaaaaaaaagtctttgccctcc

SEQ ID NO: 5199 - protein, 762 aa, Homo sapien
PQRSAGCSGTAGCAAGDAPAGAMAPAMQPAEIQFAQRLASSEKGIRDRAVKKLRQYISVKTQRETGGFSQEELLQEELANTIAQLVHAVNNSAAQHLFIQTFWQTMNREWKGIDRLRLDKYYMLIRLVLRQSFEVLKRNGWEESRIKVFLDVLMKEVLCPESQSPNGVRFHFIDIYLDELSKVGGKELLADQNLKFIDPFCKIAAKTKDHTLVQTIARGVFEAIVDQSPFVPEETMEEQKTKVGDGDLSAEEIPENEVSLRRAVSKKKTALGKNHSRKDGLSDERGRDDCGTFEDTGPLLQFDYKAVADRLLEMTSRKNTPHFNRKRLSKLIKKFQDLSEGSSISQLSFAEDISADEDDQILSQGKHKKKGNKLLEKTNLEKEKGSRVFCVEEEDSESSLQKRRRKKKKKHHLQPENPGPGGAAPSLEQNRGREPEASGPKALKARVAEPGAEATSSTGEESGSEHPPAVPMHNKRKRPRKKSPRAHREMLESAVLPPEDMSQSGPSGSHPQGPRGSPTGGAQLLKRKRKLGVVPVNGSGLSTPAWPPLQQEGPPTGPAEGANSHTTLPQRRRLQKKKAGPGSLELCGLPSQKTASLKKRKKMRVMSNLVEHNGVLESEAGQPQALGSSGTCSSLKKQKLRAESDFVKFDTPFLPKPLFFRRAKSSTATHPPGPAVQLNKTPSSSKKVTFGLNRNMTAEFKKTDKSILVSPTGPSRVAFDPEQKPLHGVLKTPTSSPASSPLVAKKPLTTTPRRRPRAMDFF

SEQ ID NO: 5200 - DNA, 2427 bp, Homo sapien; identical to SEQ ID NO: 3658

SEQ ID NO: 5201 - protein, 263 aa, Homo sapien; identical to SEQ ID NO: 3659

SEQ ID NO: 5202 - DNA, 1591 bp, Homo sapien; identical to SEQ ID NO: 3821

SEQ ID NO: 5203 - protein, 234 aa, Homo sapien; identical to SEQ ID NO: 3822

SEQ ID NO: 5204 - DNA, 1138 bp, Homo sapien; identical to SEQ ID NO: 3960

SEQ ID NO: 5205 - protein, 223 aa, Homo sapien; identical to SEQ ID NO: 3961

SEQ ID NO: 5206 - DNA, 2431 bp, Homo sapien
ctccaggctgtggaacctttgttctttcactctttgcaataaatcttgctgctgctcactctttgggtccacactgcctttatgagctgtaacactcactgggaatgtctgcagcttcactcctgaagccagcgagaccacgaacccaccaggaggaacaaacaactccagacgcgcagccttaagagctgtaacactcaccgcgaaggtctgcagcttcactcctgagccagccagaccacgaacccaccagaaggaagaaactccaaacacatccgaacatcagaaggagcaaactcctgacacgccacctttaagaaccgtgacactcaacgctagggtccgcggcttcattcttgaagtcagtgagaccaagaacccaccaattccggacacgctaattgttgtagatcatcacttcaaggtgcccatatctttctagtggaaaaattattctggcctccgctgcatacaaatcaggcaaccagaattctacatatataaggcaaagtaacatcctagacatggctttagagatccacatgtcagaccccatgtgcctcatcgagaactttaatgagcagctgaaggttaatcaggaagctttggagatcctgtctgccattacgcaacctgtagttgtggtagcgattgtgggcctctatcgcactggcaaatcctacctgatgaacaagctggctgggaagaacaagggcttctctgttgcatctacggtgcagtctcacaccaagggaatttggatatggtgtgtgcctcatcccaactggccaaatcacacattagttctgcttgacaccgagggcctgggagatgtagagaaggctgacaacaagaatgatatccagatctttgcactggcactcttactgagcagcacctttgtgtacaatactgtgaacaaaattgatcagggtgctatcgacctactgcacaatgtgacagaactgacagatctgctcaaggcaagaaactcacccgaccttgacagggttgaagatcctgctgactctgcgagcttcttcccagacttagtgtggactctgagagatttctgcttaggcctggaaatagatgggcaacttgtcacaccagatgaatacctggagaattccctaaggccaaagcaaggtagtgatcaaagagttcaaaatttcaatttgccccgtctgtgtatacagaagttctttccaaaaaagaaatgctttatctttgacttacctgctcaccaaaaaaagcttgcccaacttgaaacactgcctgatgatgagctagagcctgaatttgtgcaacaagtgacagaattctgttcctacatctttagccattctatgaccaagactcttccaggtggcatcatggtcaatggatctcgtctaaagaacctggtgctgacctatgtcaatgccatcagcagtggggatctgccttgcatagagaatgcagtcctggccttggctcagagagagaactcagctgcagtgcaaaaggccattgcccactatgaccagcaaatgggccagaaagtgcagctgcccatggaaaccctccaggagctgctggacctgcacaggaccagtgagagggaggccattgaagtcttcatgaaaaactctttcaaggatgtagaccaaagtttccagaaagaattggagactctactagatgcaaaacagaatgacatttgtaaacggaacctggaagcatcctcggattattgctcggctttacttaaggatatttttggtcctctagaagaagcagtgaagcagggaatttattctaagccaggaggccataatctcttcattcagaaaacagaagaactgaaggcaaagtactatcgggagcctcggaaaggaatacaggctgaagaagttctgcagaaatatttaaagtccaaggagtctgtgagtcatgcaatattacagactgaccaggctctcacagagacggaaaaaaagaagaaagaggcacaagtgaaagcagaagctgaaaaggctgaagcgcaaaggttggcggcgattcaaaggcagaacgagcaaatgatgcaggagagggagagactccatcaggaacaagtgagacaaatggagatagccaaacaaaattggctggcagagcaacagaaaatgcaggaacaacagatgcaggaacaggctgcacagctcagcacaacattccaagctcaaaatagaagccttctcagtgagctccagcacgcccagaggactgttaataacgatgatccatgtgttttactctaaagtgctaaatatgggagtttcctttttttactctttgtcactgatgacacaacagaaaagaaactgtagaccttgggacaatcaacatttaaataaactttataattattttttcaaactttaaaaaaaaaaaaaaaaaaaaaaaa

SEQ ID NO: 5207 - protein, 586 aa, Homo sapien
MALEIHMSDPMCLIENFNEQLKVNQEALEILSAITQPVVVVAIVGLYRTGKSYLMNKLAGKNKGFSVASTVQSHTKGIWIWCVPHPNWPNHTLVLLDTEGLGDVEKADNKNDIQIFALALLLSSTFVYNTVNKIDQGAIDLLHNVTELTDLLKARNSPDLDRVEDPADSASFFPDLVWTLRDFCLGLEIDGQLVTPDEYLENSLRPKQGSDQRVQNFNLPRLCIQKFFPKKKCFIFDLPAHQKKLAQLETLPDDELEPEFVQQVTEFCSYIFSHSMTKTLPGGIMVNGSRLKNLVLTYVNAISSGDLPCIENAVLALAQRENSAAVQKAIAHYDQQMGQKVQLPMETLQELLDLHRTSEREAIEVFMKNSFKDVDQSFQKELETLLDAKQNDICKRNLEASSDYCSALLKDIFGPLEEAVKQGIYSKPGGHNLFIQKTEELKAKYYREPRKGIQAEEVLQKYLKSKESVSHAILQTDQALTETEKKKKEAQVKAEAEKAEAQRLAAIQRQNEQMMQERERLHQEQVRQMEIAKQNWLAEQQKMQEQQMQEQAAQLSTTFQAQNRSLLSELQHAQRTVNNDDPCVLL

SEQ ID NO: 5208 - DNA, 1726 bp, Homo sapien
gtcaggttcatggttacgaagctgctgaccccaggatcccagcccgtgggagagaagggggtctctgacagcccccacccctccccactgccagatccttattgggtctgagtttcaggggtggggccccagctggaggttataaaacagctcaatcggggagtacaaccttcggtttctcttcggggaaagctgctttcagcgcacacgggaagatatcagaaacatcctaggatcaggacaccccagatcttctcaactggaaccacgaaggctgtttcttccacacagcactttgatctccatttaagcaggcacctctgtcctgcgttccggagctgcgttcccgatggtcctcctttggctcacgctgctcctgatcgccctgccctgtctcctgcaaacgaaggaagatccaaacccaccaatcacgaacctaaggatgaaagcaaaggctcagcagttgacctgggaccttaacagaaatgtgaccgatatcgagtgtgttaaagacgccgactattctatgccggcagtgaacaatagctattgccagtttggagcaatttccttatgtgaagtgaccaactacaccgtccgagtggccaacccaccattctccacgtggatcctcttccctgagaacagtgggaagccttgggcaggtgcggagaatctgacctgctggattcatgacgtggatttcttgagctgcagctgggcggtaggcccgggggcccccgcggacgtccagtacgacctgtacttgaacgttgccaacaggcgtcaacagtacgagtgtcttcactacaaaacggatgctcagggaacacgtatcgggtgtcgtttcgatgacatctctcgactctccagcggttctcaaagttcccacatcctggtgcggggcaggagcgcagccttcggtatcccctgcacagataagtttgtcgtcttttcacagattgagatattaactccacccaacatgactgcaaagtgtaataagacacattcctttatgcactggaaaatgagaagtcatttcaatcgcaaatttcgctatgagcttcagatacaaaagagaatgcagcctgtaatcacagaacaggtcagagacagaacctccttccagctactcaatcctggaacgtacacagtacaaataagagcccgggaaagagtgtatgaattcttgagcgcctggagcaccccccagcgcttcgagtgcgaccaggaggagggcgcaaacacacgtgcctggcggacgtcgctgctgatcgcgctggggacgctgctggccctggtctgtgtcttcgtgatctgcagaaggtatctggtgatgcagagactctttccccgcatccctcacatgaaagaccccatcggtgacagcttccaaaacgacaagctggtggtctgggaggcgggcaaagccggcctggaggagtgtctggtgactgaagtacaggtcgtgcagaaaacttgagactggggttcagggcttgtgggggtctgcctcaatctccctggccgggccaggcgcctgcacagactggctgctggacctgcgcacgcagcccaggaatggacattcctaacgggtggtgggcatgggagatgcctgtgtaatttcgtccgaagctgccaggaagaagaacagaactttgtgtgtttatttcatgataaagtgatttttttttttttaacccaaaaaaaaaaaaaaaaa

SEQ ID NO: 5209 - protein, 378 aa, Homo sapien
MVLLWLTLLLIALPCLLQTKEDPNPPITNLRMKAKAQQLTWDLNRNVTDIECVKDADYSMPAVNNSYCQFGAISLCEVTNYTVRVANPPFSTWILFPENSGKPWAGAENLTCWIHDVDFLSCSWAVGPGAPADVQYDLYLNVANRRQQYECLHYKTDAQGTRIGCRFDDISRLSSGSQSSHILVRGRSAAFGIPCTDKFVVFSQIEILTPPNMTAKCNKTHSFMHWKMRSHFNRKFRYELQIQKRMQPVITEQVRDRTSFQLLNPGTYTVQIRARERVYEFLSAWSTPQRFECDQEEGANTRAWRTSLLIALGTLLALVCVFVICRRYLVMQRLFPRIPHMKDPIGDSFQNDKLVVWEAGKAGLEECLVTEVQVVQKT

SEQ ID NO: 5210 - DNA, 2166 bp, Homo sapien
tgcgggtgaggctggcgcccgtaccatgagcgaggcggacgggctgcgacagcgccggcccctgcggccgcaggtcgtcacagacgatgatggccaggccccggaggctaaggacggcagctcctttagcggcagagttttccgagtgaccttcttgatgctggctgtttctctcaccgttcccctgcttggagccatgatgctgctggaatctcctatagatccacagcctctcagcttcaaagaacccccgctcttgcttggtgttctgcatccaaatacgaagctgcgacaggcagaaaggctgtttgaaaatcaacttgttggaccggagtccatagcacatattggggatgtgatgtttactgggacagcagatggccgggtcgtaaaacttgaaaatggtgaaatagagaccattgcccggtttggttcgggcccttgcaaaacccgagatgatgagcctgtgtgtgggagacccctgggtatccgtgcagggcccaatgggactctctttgtggccgatgcatacaagggactatttgaagtaaatccctggaaacgtgaagtgaaactgctgctgtcctccgagacacccattgaggggaagaacatgtcctttgtgaatgatcttacagtcactcaggatgggaggaagatttatttcaccgattctagcagcaaatggcaaagacgagactacctgcttctggtgatggagggcacagatgacgggcgcctgctggagtatgatactgtgaccagggaagtaaaagttttattggaccagctgcggttcccgaatggagtccagctgtctcctgcagaagactttgtcctggtggcagaaacaaccatggccaggatacgaagagtctacgtttctggcctgatgaagggcggggctgatctgtttgtggagaacatgcctggatttccagacaacatccggcccagcagctctggggggtactgggtgggcatgtcgaccatccgccctaaccctgggttttccatgctggatttcttatctgagagaccctggattaaaaggatgatttttaagctctttagtcaagagacggtgatgaagtttgtgccgcggtacagcctcgtcctagaactcagcgacagcggtgccttccggagaagcctgcatgatcccgatgggctggtggccacctacatcagcgaggtgcacgaacacgatgggcacctgtacctgggctctttcaggtcccccttcctctgcagactcagcctccaggctgtttagccctcccagatagctgcccctgccacgcaggccaggagtcttcacactcaggcaccaggcctggtccaggaggagctgtggacacagtcgtggttcaagtgtccacatgcacctattagtccctgagaggtggtgggaatggctgcttcattcctcgaggatgcccgggccccacctgggcttgtctttctgtttagagggaagtgtaacatatctgccatgaggaacataaattcatgtaaagccattttctcttaaacaaaacaaaactttctaagtacagtcattctctaggatttgggaagctccttgcacttggaacagggctcaggtgggtggagcagtaaggcactacccagagagcttgctgctgcggccctgtcctgcggcctcaaagttcttctttactatatataacgtgcggtcatacctttcttcgttgtggtggggatggaagagcagagggagcatggcccaggggtgttgaggccagcggtgagagccgtgttagccaagacatggaactgtgttctcaagggttatgtggggcgtgggctctccatagtgtgtatgaaaagcttgttgactctagcggctcagagaggactttgctgggtttctttctgtgaatatctccgtgctgaccatgctggaattggatgattctgcaattcgggacctactgcaggggtccgtttagtaacgtcttgtctgtgatctttgttcttgacctctagaccccaagatgtgaacagtgcacgtgttaatgtcatctttgctcatgtgttataagccccaagttgctgtatattttcacaagtatgtctacacactggtcatgattttgataataaataacgataaatcgaaaaaaaaaaaaaaaaaaaaaa

SEQ ID NO: 5211 - protein, 416 aa, Homo sapien
MSEADGLRQRRPLRPQVVTDDDGQAPEAKDGSSFSGRVFRVTFLMLAVSLTVPLLGAMMLLESPIDPQPLSFKEPPLLLGVLHPNTKLRQAERLFENQLVGPESIAHIGDVMFTGTADGRVVKLENGEIETIARFGSGPCKTRDDEPVCGRPLGIRAGPNGTLFVADAYKGLFEVNPWKREVKLLLSSETPIEGKNMSFVNDLTVTQDGRKIYFTDSSSKWQRRDYLLLVMEGTDDGRLLEYDTVTREVKVLLDQLRFPNGVQLSPAEDFVLVAETTMARIRRVYVSGLMKGGADLFVENMPGFPDNIRPSSSGGYWVGMSTIRPNPGFSMLDFLSERPWIKRMIFKLFSQETVMKFVPRYSLVLELSDSGAFRRSLHDPDGLVATYISEVHEHDGHLYLGSFRSPFLCRLSLQAV

SEQ ID NO: 5212 - DNA, 2082 bp, Homo sapien; identical to SEQ ID NO: 3417

SEQ ID NO: 5213 - protein, 502 aa, Homo sapien; identical to SEQ ID NO: 3418

SEQ ID NO: 5214 - DNA, 1705 bp, Homo sapien; identical to SEQ ID NO: 1667

SEQ ID NO: 5215 - protein, 244 aa, Homo sapien; identical to SEQ ID NO: 1668

SEQ ID NO: 5216 - DNA, 3848 bp, Homo sapien; identical to SEQ ID NO: 4772

SEQ ID NO: 5217 - protein, 528 aa, Homo sapien; identical to SEQ ID NO: 4773

SEQ ID NO: 5218 - DNA, 2292 bp, Homo sapien
tctcagggcttcatacaggaaatctattgctgtgtcaagttccagagaaaagcttctgttcgtccaagttactaaccaggctaaaccacatagacgtgaaggaaggggctagaaggaagggagtgccccactgttgatggggtaagaggatcctgtactgagaagttgaccagagagggtctcaccatgcgcacagttccttctgtacctgtgtggaggaaaagtactgagtgaagggcagaaaaagagaaaacagaaatgctctgcccttggagaactgctaacctagggctactgttgattttgactatcttcttagtggccgaagcggagggtgctgctcaaccaaacaactcattaatgctgcaaactagcaaggagaatcatgctttagcttcaagcagtttatgtatggatgaaaaacagattacacagaactactcgaaagtactcgcagaagttaacacttcatggcctgtaaagatggctacaaatgctgtgctttgttgccctcctatcgcattaagaaatttgatcataataacatgggaaataatcctgagaggccagccttcctgcacaaaagcctacaggaaagaaacaaatgagaccaaggaaaccaactgtactgatgagagaataacctgggtctccagacctgatcagaattcggaccttcagattcgtccagtggccatcactcatgacgggtattacagatgcataatggtaacacctgatgggaatttccatcgtggatatcacctccaagtgttagttacacctgaactgaccctgtttcaaaacaggaatagaactgcagtatgcaaggcagttgcagggaagccagctgcgcagatctcctggatcccagagggcgattgtgccactaagcaagaatactggagcaatggcacagtgactgttaagagtacatgccactgggaggtccacaatgtgtctaccgtgacctgccacgtctcccatttgactggcaacaagagtctgtacatagagctacttcctgttccaggtgccaaaaaatcagcaaaattatatattccatatatcatccttactattattattttgaccatcgtgggattcatttggttgttgaaagtcaatggctgcagaaaatataaattgaataaaacagaatctactccagttgttgaggaggatgaaatgcagccctatgccagctacacagagaagaacaatcctctctatgatactacaaacaaggtgaaggcatctcaggcattacaaagtgaagttgacacagacctccatactttataagttgttggactctagtaccaagaaacaacaacaaacgagatacattataattactgtctgattttcttacagttctagaatgaagacttatattgaaattaggttttccaaggttcttagaagacattttaatggattctcattcatacccttgtataattggaatttttgattcttagctgctaccagctagttctctgaagaactgatgttattacaaagaaaatacatgcccatgaccaaatattcaaattgtgcaggacagtaaataatgaaaaccaaatttcctcaagaaataactgaagaaggagcaagtgtgaacagtttcttgtgtatcctttcagaatattttaatgtacatatgacatgtgtatatgcctatggtatatgtgtcaatttatgtgtccccttacatatacatgcacatatctttgtcaaggcaccagtgggaacaatacactgcattactgttctatacatatgaaaacctaataatataagtcttagagatcattttatatcatgacaagtagagctacctcattctttttaatggttatataaaattccattgtatagttatatcattatttaattaaaaacaaccctaatgatggatatttagattcttttaagttttgtttatttcttttaagttttgtttgtggtataaacaataccacatagaatgtttcttgttcatatatctctttgtttttgagtatatctgtaggataactttcttgagtggaattgtcaggtcaaagggtttgtgcattttactattgatatatatgttaaattgtgtcaaatatatatgtcaaattccctccaacattgtttaaatgtgcctttccctaaatttctattttaataactgtactattcctgcttctacagttgccactttctctttttaatcaaccagattaaatatgatgtgagattataataagaattatactatttaataaaaatggatttata

SEQ ID NO: 5219 - protein, 348 aa, Homo sapien [sequence omitted]

SEQ ID NO: 5220 - DNA, 2270 bp, Homo sapien
ggcacgaggttttcctcggcgcttctccatggaggaggcggtgcgaacggcttcagccccgaatgctcgcatctcccactggacggcgacgaaggcggtggccgtgcgagcgcaggactgggcggcctgtgtgggggtgtgagccgcggtgcccaaggctgcgccggcgaggggaagccgcgcggccggccggccgactagggtttgaagactgcttcattctgcctctagtaccagcggtttctctgttctgtgatcaatgtgattcacaggaactccttaagtaacaaacgaaatgagccaggggcgtggaaaatatgacttctatattggtctgggattggctatgagctccagcattttcattggaggaagtttcattttgaaaaaaaagggcctccttcgacttgccaggaaaggctctatgagagcaggtcaaggtggccatgcatatcttaaggaatggttgtggtgggctggactgctgtcaatgggagctggtgaggtggccaacttcgctgcgtatgcgtttgcaccagccactctagtgactccactaggagctctcagcgtgctagtaagtgccattctttcttcatactttctcaatgaaagacttaatcttcatgggaaaattgggtgtttgctaagtattctaggatctacagttatggtcattcatgctccaaaggaagaggagattgagactttaaatgaaatgtctcacaagctaggtgatccaggttttgtggtctttgcaacccttgtggtcattgtggccttgatattaatcttcgtggtgggtcctcgccatggacagacaaacattcttgtgtacataacaatctgctctgtaatcggcgcgttttcagtctcctgtgtgaagggcctgggcattgctatcaaggagctgtttgcagggaagcctgtgctgcggcatcccctggcttggattctgctgctgagcctcatcgtctgtgtgagcacacagattaattacctaaatagggccctggatatattcaacacttccattgtgactccaatatattatgtattctttacaacatcagttttaacttgttcagctattctttttaaggagtggcaagatatgcctgttgacgatgtcattggtactttgagtggcttctttacaatcattgtggggatattcttgttgcatgcctttaaagacgtcggctttagtctagcaagtctgcctgtgtcttttcgaaaagacgagaaagcaatgaatggcaatctctctaatatgtatgaagttcttaataataatgaagaaagcttaacctgtggaatcgaacaacacactggtgaaaatgtctcccgaagaaatggaaatctgacagctttttaagaaaggtgtaattaaaggttaatctgtgattgttatgaagtgaatttgaatatcatcagaatgtgtctgaaaaaacattgtcctcaaataatgttctttaaaggcaatctttttaaagatttcactaatttggaccaagaaattacttttcttgtatttaaacaaacaatggtagctcactaaaatgacctcagcacatgacgatttctattaacattttattgttgtagaagtattttacattttcatcccttctccaaaagccgaatgcactaatgacagttttaagtctatgaaaatgctttattttttcattggtgatgaaagtctgaaatgtgcatttgtcatccccactccatcaatccctgaccatgtaaggcttttttattttaaaaaaacagagttatcccaatacattatcctgtgatttaccttacctacaaaagtggctcctgtttgtttgatgatgattggttttatttttgaaatatttattaagggaaaactaagttactgaatgaaggaacctctttcttacaaaacaaaaaaaagggcagaaatcaccccaaggaacgatttctcaggttgagatgatcaccgtgaatccggcttcctctgagcattcgatggccttagcacctcatcaagccagcacatcctgcctgctgttgcagcctggctgggtttattcttcagttaccctaatcccatgatgcctggaaccttgattaccgttttacatcagctcttgtacttttcagtatattttcataatgagttatattgtcatttagactttgaacagctctgggaaatagaagactagggttgtttcttaaatttagctcatgttataataaaaagttgaaatgaaaaaaaaaaaaaaaaaaaa

SEQ ID NO: 5221 - protein, 360 aa, Homo sapien
MSQGRGKYDFYIGLGLAMSSSIFIGGSFILKKKGLLRLARKGSMRAGQGGHAYLKEWLWWAGLLSMGAGEVANFAAYAFAPATLVTPLGALSVLVSAILSSYFLNERLNLHGKIGCLLSILGSTVMVIHAPKEEEIETLNEMSHKLGDPGFVVFATLVVIVALILIFVVGPRHGQTNILVYITICSVIGAFSVSCVKGLGIAIKELFAGKPVLRHPLAWILLLSLIVCVSTQINYLNRALDIFNTSIVTPIYYVFFTTSVLTCSAILFKEWQDMPVDDVIGTLSGFFTIIVGIFLLHAFKDVGFSLASLPVSFRKDEKAMNGNLSNMYEVLNNNEESLTCGIEQHTGENVSRRNGNLTAF

SEQ ID NO: 5222 - DNA, 2534 bp, Homo sapien
gcagaggtgagtgccgggctcggcgctctgctcctggagctcccgcgggactgcctggggacagggactgctgtggcgctcggccctccactgcggacctctcctgagtgggtgcgccgagtcatggagggcgcagagctggccgggaagatcctttccacctggctgacgctggttctcggcttcatccttttaccttcggtcttcggagtgtctctgggcatctccgagatctacatgaagatcctagtgaaaactttagagtgggccacaatacgaattgaaaaaggaaccccaaaggagtcgattcttaaaaactctgcttctgttggtattatccaaagagatgagtcacccatggaaaaagggctctctggtctacgaggaagggactttgagctgtctgacgtgttttatttctccaagaagggattggaagccattgtagaagatgaagtgacccagaggttttcctcagaggagctagtgtcatggaatctcctcacaagaaccaatgtaaatttccagtacatcagtctgcggctcactatggtgtgggtgctgggcgtcatagtgcgctattgtgtcctactgcctctgagggttaccttggctttcattgggatcagtttgctggttataggaactacactggttgggcagctgccagacagcagcctcaaaaactggctgagtgaactggtccatctgacttgctgccggatctgtgtgcgagccctctctggtaccattcattatcataacaagcagtacagaccccagaagggaggcatttgtgttgccaaccatacttcccccattgatgttttaatcttgacaacggatggatgttatgctatggttggccaggttcatggcggcttgatgggaattattcagagagctatggtcaaggcttgtcctcatgtctggtttgaacgctcagaaatgaaggatcgacacctggttactaagagactaaaagaacatattgctgataagaagaaactacccatactaatttttcctgaaggaacttgcatcaacaatacttcagtcatgatgtttaaaaaggggagctttgaaattggaggaaccatacatccagttgcaattaagtataaccctcagttcggtgatgcattttggaacagtagtaaatacaacatggtgagctacctgcttcgaatgatgaccagctgggccatcgtctgtgacgtgtggtacatgccccccatgaccagagaggaaggagaagatgcagtccagtttgctaacagggttaagtctgctattgctatacaaggaggcctgactgaacttccctgggatggaggactaaagagagcaaaggtgaaggacatctttaaggaagagcagcagaaaaattacagcaagatgattgtgggcaatggatctctcagctaagaggacggatgacagcctttagatctagaactagcccttagaaatggaatggctttttttgttttgttttgttttattgttttgtttttattattgttaatcttttctacagaatgattgtctctacctctttatgccagaggcagaacctacaggtgccctttttggcttttgttgttgttgtaacattagccccatggattgtaaggtggtttactgagttaaaacagattctgcttttgtaaaatgatggcatcactgtggactgaatgaaatatttgtatagaaaaaagtgcttgaaaagtgtgtttggaactcatcgatagggtaattctccaaaaatgcccaaactctttttctgtaattagccttgccactttcttcagtcacttaaatggtgagattacacatcagtgcaagatgaccattatggttatggtctactgcaaggttgaaaggaaaaatggaggattgtatttaggaaaagggacaactttgtggccacctgctctgaaagtcaaaaggaaatgtaaattagtgtcattagtgtgttggaagagaaatactattcagtaagcttcgccaaagaaaagtgagtcaaagttaatgtgtgtgcgcatttatatgtaggcagctcgtagaccacattttaaccagcaactggtaacaaagagcttagttttccttgtttgaatgctgtagatctgtacctagtacccctcccatctactgatttgtttgtttttgtaaccaaacacattttcagatagaaggagccttaaaaaaaaaaaatcacattgagtaacttcagtatgaatgaatgagagtgtgtggagctacccctcaccctccacccctttgtgctttttattcccgaattttcccagtctcttaaacagaaaaatgactgatataattatcttttggaaactgagccttaattttttttagagggggaaataagttttccccaactcacacagcataagcaatgtttgacagcaatataatgccgttgtaaactactgagagtattgtatctgttctggtaaccatgtacagaatgtgaaactgtcttatgaatataaataaattctatatttcta

SEQ ID NO: 5223 - protein, 434 aa, Homo sapien
MEGAELAGKILSTWLTLVLGFILLPSVFGVSLGISEIYMKILVKTLEWATIRIEKGTPKESILKNSASVGIIQRDESPMEKGLSGLRGRDFELSDVFYFSKKGLEAIVEDEVTQRFSSEELVSWNLLTRTNVNFQYISLRLTMVWVLGVIVRYCVLLPLRVTLAFIGISLLVIGTTLVGQLPDSSLKNWLSELVHLTCCRICVRALSGTIHYHNKQYRPQKGGICVANHTSPIDVLILTTDGCYAMVGQVHGGLMGIIQRAMVKACPHVWFERSEMKDRHLVTKRLKEHIADKKKLPILIFPEGTCINNTSVMMFKKGSFEIGGTIHPVAIKYNPQFGDAFWNSSKYNMVSYLLRMMTSWAIVCDVWYMPPMTREEGEDAVQFANRVKSAIAIQGGLTELPWDGGLKRAKVKDIFKEEQQKNYSKMIVGNGSLS

SEQ ID NO: 5224 - DNA, 2610 bp, Homo sapien; identical to SEQ ID NO: 2226

SEQ ID NO: 5225 - protein, 199 aa, Homo sapien; identical to SEQ ID NO: 2227

SEQ ID NO: 5226 - DNA, 3024 bp, Homo sapien
ggggtcctgcagcctcccgagtgcggagaggcggggccgcccgctgccgcccggctgcctgcgccccctcccgcggccccggctctgggagcggggcgccccgcgcgcgggcacacggcggccagagcgccgaggcggtaccttcagcctgcaatgagaggaacccgggagagcccccgggagccagcgaagagcttggctgctgcgtccagggctgctgctgccgccgcggctgcttgaaactcctcaaagttgagagccggctagagggtgccgcccgccgggagccggagggaaaggaagtcgggaggtgcaagagtgacagacacggacagacggacgcgcagaccttcggaaggcactgcgtaggcagcctccccggagcccacgaggctccccagcaccgttcactggtgggaggctgagccggtggaaaagacaccgggaagagactcagaggcgaccataatgtcgttacgtgtacacactctgcccaccctgcttggagccgtcgtcagaccgggctgcagggagctgctgtgtttgctgatgatcacagtgactgtgggccctggtgcctctggggtgtgccccaccgcttgcatctgtgccactgacatcgtcagctgcaccaacaaaaacctgtccaaggtgcctgggaaccttttcagactgattaagagactggacctgagttataacagaattgggcttctggattctgagtggattccagtatcgtttgcaaagctgaacaccctaattcttcgtcataacaacatcaccagcatttccacgggcagtttttccacaactccaaatttgaagtgtcttgacttatcgtccaataagctgaagacggtgaaaaatgctgtattccaagagttgaaggttctggaagtgcttctgctttacaacaatcacatatcctatctcgatccttcagcgtttggagggctctcccagttgcagaaactctacttaagtggaaattttctcacacagtttccgatggatttgtatgttggaaggttcaagctggcagaactgatgtttttagatgtttcttataaccgaattccttccatgccaatgcaccacataaatttagtgccaggaaaacagctgagaggcatctaccttcatggaaacccatttgtctgtgactgttccctgtactccttgctggtcttttggtatcgtaggcactttagctcagtgatggattttaagaacgattacacctgtcgcctgtggtctgactccaggcactcgcgtcaggtacttctgctccaggatagctttatgaattgctctgacagcatcatcaatggttcctttcgtgcgcttggctttattcatgaggctcaggtcggggaaagactgatggtccactgtgacagcaagacaggtaatgcaaatacggatttcatctgggtgggtccagataacagactgctagagccggataaagagatggaaaacttttacgtgtttcacaatggaagtctggttatagaaagccctcgttttgaggatgctggagtgtattcttgtatcgcaatgaataagcaacgcctgttaaatgaaactgtggacgtcacaataaatgtgagcaatttcactgtaagcagatcccatgctcatgaggcatttaacacagcttttaccactcttgctgcttgcgtggccagtatcgttttggtacttttgtacctctatctgactccatgcccctgcaagtgtaaaaccaagagacagaaaaatatgctacaccaaagcaatgcccattcatcgattctcagtcctggccctgctagtgatgcctccgctgatgaacggaaggcaggtgcaggtaaaagagtggtgtttttggaacccctgaaggatactgcagcagggcagaacgggaaagtcaggctctttcccagcgaggcagtgatagctgagggcatcctaaagtccacgagggggaaatctgactcagattcagtcaattcagtgttttctgacacaccttttgtggcgtccacttaatttgtgcctatatttgtatgatgtcataatttaatctgttcatatttaactttgtgtgtggtctgcaaaataaacagcaggacagaaattgtgttgttttgttctttgaaatacaaccaaattctcttaaaatgattggtaggaaatgaggtaaagtacttcagttcctcaatgtgccagagaaagatggggttgttttccaaagtttaagttctagatcacaatatcttagcttttagcactattggtaatttcagagtaggcccaaaggtgatatgactcccattgtccctttatttaggatattgaaagaaaaaataaactttatgtattagtgtcctttaaaaatagactttgctaacttactagtaccagagttattttaaagaaaaacactagtgtccaatttcatttttaaaagatgtagaaagaagaatcaagcatcaattaattataaagcctaaagcaaagttagatttgggggttattcagccaaaattaccgttttagaccagaatgaatagactacactgataaaatgtactggataatgccacatcctatatggtgttatagaaatagtgcaaggaaagtacatttgtttgcctgtcttttcattttgtacattcttcccattctgtattcttgtacaaaagatctcattgaaaatttaaagtcatcataatttgttgccataaatatgtaagtgtcaataccaaaatgtctgagtaacttcttaaatccctgttctagcaaactaatattggttcatgtgcttgtgtatatgtaaatcttaaattatgtgaactattaaatagaccctactgtactgtgctttggacatttgaattaatgtaaatatatgtaatctgtgacttgatattttgttttatttggctatttaaaaacataaatctaaaatgtcttatgttatcagattatgctattttgtataaagcaccactgatagcaaaaaaaaaaaaaaaa

SEQ ID NO: 5227 - protein, 522 aa, Homo sapien
MSLRVHTLPTLLGAVVRPGCRELLCLLMITVTVGPGASGVCPTACICATDIVSCTNKNLSKVPGNLFRLIKRLDLSYNRIGLLDSEWIPVSFAKLNTLILRHNNITSISTGSFSTTPNLKCLDLSSNKLKTVKNAVFQELKVLEVLLLYNNHISYLDPSAFGGLSQLQKLYLSGNFLTQFPMDLYVGRFKLAELMFLDVSYNRIPSMPMHHINLVPGKQLRGIYLHGNPFVCDCSLYSLLVFWYRRHFSSVMDFKNDYTCRLWSDSRHSRQVLLLQDSFMNCSDSIINGSFRALGFIHEAQVGERLMVHCDSKTGNANTDFIWVGPDNRLLEPDKEMENFYVFHNGSLVIESPRFEDAGVYSCIAMNKQRLLNETVDVTINVSNFTVSRSHAHEAFNTAFTTLAACVASIVLVLLYLYLTPCPCKCKTKRQKNMLHQSNAHSSILSPGPASDASADERKAGAGKRVVFLEPLKDTAAGQNGKVRLFPSEAVIAEGILKSTRGKSDSDSVNSVFSDTPFVAST

SEQ ID NO: 5228 - DNA, 6225 bp, Homo sapien
gagggacttctgtaaggcggcacgaccacaccaaataacagcagcagagggaggtgggggagagggaaataaaggggagtcatgcttaaaatgctacagcggtgtgaaacagcagagcaaagaagcgcccccagcttctgagagccctggcccgagtcccctcccccgttagaaacagggctttgggatggtcatggagcactgccagtaactccaaccgcagcacgccggcctgctcgcccatcctccggaagcggtctcgctcgccaaccccgcagaaccaggacggagacaccatggtggagaagggctcagatcactcctcggacaagtccccgtccacaccggagcagggcgtgcagcgcagctgctcctcccagtccggccggagcggcggcaagaattccaagaaaagccagagttggtataatgtgttaagccccacctacaagcagagaaatgaagacttcagaaagctctttaagcagcttccagacacggagcgcctcattgttgattactcatgtgcactccaaagagacattctccttcagggccgactctacctctctgaaaattggatctgcttctacagcaacatcttccgctgggaaactctgctgacagtccgtttgaaagacatctgttccatgactaaagaaaaaacagctcgcctcattcccaatgccatccaagtttgcactgattcagaaaagcacttcttcacttcgtttggggcccgggataggacatatatgatgatgttccggctctggcagaatgctctccttgaaaagcctctgtgtcccaaggagctctggcactttgttcaccagtgctatgggaacgaattgggcctgaccagtgatgacgaggactacgtgccccctgacgacgacttcaacacaatgggatactgtgaagagatccctgtggaagagaatgaagtgaatgacagctcatccaagagcagcatagagaccaagccagatgccagtccacagctgcccaagaaatccatcaccaacagcacactaacatccacagggagcagtgaggcccccgtctcgtttgatgggctgcccctggaggaagaggcgctggaaggagacgggtccctggaaaaggagctcgccattgacaacatcatgggggagaagattgagatgatcgctcctgtgaactccccttcactggacttcaatgacaatgaggacatccccactgagctcagtgactcttccgacacacacgatgaaggagaggtccaggccttctatgaggacctgagtggccggcagtacgtgaatgaagtcttcaacttcagcgtggacaagctctatgacctcctcttcaccaactcgcccttccagcgggatttcatggagcagcggcgcttctctgatatcatcttccatccatggaaaaaggaggagaatggaaaccagagccgagtgattctttacaccatcacccttaccaaccctctggctcccaaaactgccactgtcagggagacacagaccatgtacaaggcgagccaggagagtgaatgttacgtgatagatgccgaagtcctcacccacgacgtgccctaccacgactacttctacacaatcaatcgctacacgctcacccgtgtggctcggaacaagagccgactcagggtctccacagagctgcgctatcgaaaacagccctgggggttagtgaaaacgttcatcgagaagaacttctggagtgggctggaggactacttccgccatttagagagcgagctggccaaaacggagagcacttatttggctgagatgcacagacaatctcccaaagagaaggccagcaagactacaacggtgcggaggaggaagcgtccccatgcccacctgcgagtccctcacctggaagaggtgatgagcccggtcaccacgcccacagatgaggatgtgggccacaggatcaaacatgtggcaggttccacacagacgcggcatatcccggaggacacccccaacggtttccacctgcagagcgtgtccaagctgctgctggttatcagctgtgtgatctgtttcagtctggtgctgctggtcatccttaacatgatgctcttctacaaactctggatgttggaatacaccacgcagaccctcactgcctggcagggtctaaggctccaagaaaggttaccccagtctcagacagaatgggcccagctcttagagtcccaacaaaagtaccacgatactgagctccaaaaatggagggaaatcatcaaatcctcagtgatgctccttgaccagatgaaggactcgctcatcaaccttcagaacggcatcaggtcccgcgactacacgtcggaaagtgaagaaaagaggaatcgctatcattgacaaggcaggaacagggtggctgcaagaggcctgtgcaatacatgtacatagaccatataaatatatatatataaatatatatatatacagaatataaatatatatattatatacagattttaaaaaagagataatgcctatgtaccagggagaaggagcgggccctcccgcgccctgtgctggccggagcagcgttttcttatggtggagcagctgaggagggcaggaaccgcctctcagcaccgacctcccctgatctccctcctcccaccctctgttccccaccccttcccttgctggccattcttggcttttagaagggaaatgttgagccaaagttatgcctgcgaagaccctaaggtctcaaaaagaagtcttaagacggcattgcttaaggtgcttcattccctaatccccttttgatttgtttccaaaataaaagagaatcttttcttccctaccccaggcttccccaggcattctcttgggaacacagaagcatcaagggagcccagtctaaactcctagggttggccacccacttgatccggaccgtactgagtgtcagatggagaggatgcttggaaagctaggaaggctgcattgtgtggtggcaggctcccgagactcgtgttctgaaggatactctcctccatcacccctgcaccttcctccgacctgtgtagggtgtggacccagtaagggctgggaatttcttactttcccacccgctttctctctggtcttctcccaggctggatctgggcgaagtgtcactttttagtgcctaaagtcctattgtttctctgtgccctaagagcacattgtttattagccagggtggagcgttttcgaccttattaaacctcttttagtgcttctaagcaagtcaggtctgtggctctgaggccttcacttagagctgtcagtgtgatttccaggatgagtcagggtgtgctgggccctccaggatttgagagagggagagaaggcccttgccacgtccggggtgcagggtctacccacagaacactgtgagtggtgagcaccaagatgggttgccagcctcatttgctctttgaacgaaccaacattagccagtggagacgactgtctgagacagtttgcacatagaaaaagcatctgagccactggagggaaggatttggcaaaggtgcatgtgtttgggcaggaaaaggccaagtgaaatctatgccctacgggagccattcccaatcctgagtttctcagacttggcaatgggggttctggcgggggttggagtacaaatcctgctctggtctctggccccacagaggtgtaagatcattaagaagtagaaggcactagcttcaaagagtgagacattcagggccttttcagcattggcccactagcaccatgcatttatctgaattcacggggccctctgggcacattcatcatccctcatacactaactactgtttcttcatgtaatgaccaaaagagtcccaccagctccaggcagagctcgtggagattcatgaaagagtcacagccagtttggcatgcagaggtcttcagtcttgcttattcttctcctgggcttcttgacacaggggcagaagaaaccccagatgtcccagatgtcccagaacatcagcccaaaagacagaagattttatcactcatctaccccaaagataaagttgtatttttctcttagaatggcctttaattccctgtggcaattacagtttttgacttttccatgtgagaataaggccttggtatttccctaagggcaggatcagaaaacaggaaggtccatgcccaggtgatcctccaagggaggagggtgaggaggctccagggcatgagctagagtggatattcctcccctagaagaggagatgggaggaaatgcagtttcatgtaatccctgtgaagagtgcctatgcccacagcccagtgggtccttgttcagttcttgtccaggcctttgggtgagggacactggtagggatcaaggctcatgggctctgagccaaagaaggaggcatggtgcagactgctggaaatctcccacttggcacagccagaagccaaaactattcccagaaagttttgaatgcaaaacttgtagattcctgaatttattccatacataattatttccttaagttatttaattattaaaggtgccacggtgggacctttgggatgacttaaaaagggttctttgttgggagtcaagtgacagagcagacctggccgcagggagttgttctgcttctgctttacctctcaggaccattcccaggaggaaaatgtggcagagagggcagtactgagtatgtcagaagagccctcctggttttttagcgatttgaacccactagacaatgtgtgcacatagggaatgtcctttaagaatcatggatctcttgtaggctctctgtgttccaataattttttgactatcataccaggaaaaaaccaacaactctattcattcccaaacaaaatctcttcccccttagtcaatagcttgcgaaagagatcttaactcacccttgcagataagtcttggagtgaaacaaataaatagcattgtattcctggccatttgcctggctagttgctgtctacaagggagcatcaaaacatcactacttcttatgtaacttcttccagccagtgcttttattgttcgttttagtttactggggacacacaggagtctttctgtaatgacttatgtggtaaaatgtttgagagtttgcactcaattttaaagaatttgcagtttctaacaaggtgaagaacagctataggatctaaagttccattacagcttactgtgaaagaattgacaagactggcctcagacaagctaatcatggtgcgactctctcccttcctcatccacctctttggggacaagaggattacatctcaggccagcaagatcagctgcttgaagctctgtgtaagagcactgcactgacggtttggagacctgagcctgggtcctgacttttccattgactaagctctgtggccttgggcaagtcactccccctctctgagcttcagtatcctcctgtcacaggagggagttgggctagatcatctttaaggtaggttctagctttgacatcatcttgggggttaggccagaggctgggaagactgggtggactttctcaattgctctgccaggagggaacaagcccagaggctgaagcttcccagtatttagaggtgtggtagggcagtgtctgcattcccaggagacccagggtgattaaaatttattctttaggtggctaggagggctggggaggcccagtggaagagagagagagagagagagagagagagagagagagagagagatcgagagagatcgagcttgatgtattgctcagtattcacttagaagggtttctttctctttggcctagtttgtgaagggatcttcctttggactttctctaagttgggagaagaacattcttttcaatggagctcatcttctatctctagggtctgttcagcctttcatctatccatccttcctctttattggtagaagaaacagtggagagtagccacttctggttctagcacttctcttttgttaagatagggtttggatttagtatgaagctttggctaaaacccttgggtttgccttagaacactgacactaagaacctggaatgacatggggaggacaaagagagctcaagaggaatgctttgtgagaagtggattctctccgtgtccctgccccccacccaaacttgaactataccttctgcataatgaattaactagaaat

SEQ ID NO: 5229 - protein, 761 aa, Homo sapien
NSRAKKRPQLLRALARVPSPVRNRALGWSWSTASNSNRSTPACSPILRKRSRSPTPQNQDGDTMVEKGSDHSSDKSPSTPEQGVQRSCSSQSGRSGGKNSKKSQSWYNVLSPTYKQRNEDFRKLFKQLPDTERLIVDYSCALQRDILLQGRLYLSENWICFYSNIFRWETLLTVRLKDICSMTKEKTARLIPNAIQVCTDSEKHFFTSFGARDRTYMMMFRLWQNALLEKPLCPKELWHFVHQCYGNELGLTSDDEDYVPPDDDFNTMGYCEEIPVEENEVNDSSSKSSIETKPDASPQLPKKSITNSTLTSTGSSEAPVSFDGLPLEEEALEGDGSLEKELAIDNIMGEKIEMIAPVNSPSLDFNDNEDIPTELSDSSDTHDEGEVQAFYEDLSGRQYVNEVFNFSVDKLYDLLFTNSPFQRDFMEQRRFSDIIFHPWKKEENGNQSRVILYTITLTNPLAPKTATVRETQTMYKASQESECYVIDAEVLTHDVPYHDYFYTINRYTLTRVARNKSRLRVSTELRYRKQPWGLVKTFIEKNFWSGLEDYFRHLESELAKTESTYLAEMHRQSPKEKASKTTTVRRRKRPHAHLRVPHLEEVMSPVTTPTDEDVGHRIKHVAGSTQTRHIPEDTPNGFHLQSVSKLLLVISCVICFSLVLLVILNMMLFYKLWMLEYTTQTLTAWQGLRLQERLPQSQTEWAQLLESQQKYHDTELQKWREIIKSSVMLLDQMKDSLINLQNGIRSRDYTSESEEKRNRYH

SEQ ID NO: 5230 - DNA, 3120 bp, Homo sapien; identical to SEQ ID NO: 4960

SEQ ID NO: 5231 - protein, 491 aa, Homo sapien; identical to SEQ ID NO: 4961

SEQ ID NO: 5232 - DNA, 2065 bp, Homo sapien; identical to SEQ ID NO: 3575

SEQ ID NO: 5233 - protein, 267 aa, Homo sapien; identical to SEQ ID NO: 3576

SEQ ID NO: 5234 - DNA, 4573 bp, Homo sapien; identical to SEQ ID NO: 2516

SEQ ID NO: 5235 - DNA, 2728 bp, Homo sapien
accgcggaaagcatgttgtggctgttccaatcgctcctgtttgtcttctgctttggcccagggaatgtagtttcacaaagcagcttaaccccattgatggtgaacgggattctgggggagtcagtaactcttcccctggagtttcctgcaggagagaaggtcaacttcatcacttggcttttcaatgaaacatctcttgccttcatagtaccccatgaaaccaaaagtccagaaatccacgtgactaatccgaaacagggaaagcgactgaacttcacccagtcctactccctgcaactcagcaacctgaagatggaagacacaggctcttacagagcccagatatccacaaagacctctgcaaagctgtccagttacactctgaggatattaagacaactgaggaacatacaagttaccaatcacagtcagctatttcagaatatgacctgtgagctccatctgacttgctctgtggaggatgcagatgacaatgtctcattcagatgggaggccttgggaaacacactttcaagtcagccaaacctcactgtctcctgggaccccaggatttccagtgaacaggactacacctgcatagcagagaatgctgtcagtaatttatccttctctgtctctgcccagaagctttgcgaagatgttaaaattcaatatacagataccaaaatgattctgtttatggtttctgggatatgcatagtcttcggtttcatcatactgctgttacttgttttgaggaaaagaagagattccctatctttgtctactcagcgaacacagggccccgagtccgcaaggaacctagagtatgtttcagtgtctccaacgaacaacactgtgtatgcttcagtcactcattcaaacagggaaacagaaatctggacacctagagaaaatgatactatcacaatttactccacaattaatcattccaaagagagtaaacccactttttccagggcaactgcccttgacaatgtcgtgtaagttgctgaaaggcctcagaggaattcgggaatgacacgtcttctgatcccatgagacagaacaaagaacaggaagcttggttcctgttgttcctggcaacagaatttgaatatctaggataggatgatcacctccagtccttcggacttaaacctgcctacctgagtcaaacacctaaggataacatcatttccagcatgtggttcaaataatattttccaatccacttcaggccaaaacatgctaaagataacacaccagcacattgactctctctttgataactaagcaaatggaattatggttgacagagagtttatgatccagaagacaaccacttctctccttttagaaagcagcaggattgacttattgagaaataatgcagtgtgttggttacatgtgtagtctctggagttggatgggcccatcctgatacaagttgagcatcccttgtctgaaatgcttgggattagaaatgtttcagatttcaattttttttcagattttggaatatttgcattatatttagcggttgagtatccaaatccaaaaatccaaaattcaaaatgctccaataagcatttcccttgagtttcattgatgtcgatgcagtgctcaaaatctcagattttggagcattttggatattggatttttggatttgggatgctcaacttgtacaatgtttattagacacatctcctgggacatactgcctaaccttttggagccttagtctcccagactgaaaaaggaagaggatggtattacatcagctccattgtttgagccaagaatctaagtcatccctgactccagtgtctttgtcaccaggccctttggactctacctcagaaatatttcttggaccttccacttctcctccaactccttgaccaccatcctgtatccaaccatcaccacctctaacctgaatcctaccttaagatcagaacagttgtcctcacttttgttcttgtccctctccaacccactctccacaagatggccagagtaatgtttttaatataaattggatccttcagtttcctgcttaaaaccctgcaggtttcccaatgcactcagaaagaaatccagtttccatggccctggatggtctggcccacctccagcctcagctagcattacccttctgacactctctatgtagcctccctgatcttctttcagctcctctattaaaggaaaagttctttatgttaattatttacatcttcctgcaggcccttcctctgcctgctggggtcctcctattctttaggtttaattttaaatatgtcacctcctaagagaaaccttcccagaccactctttctaaaatgaatcttctaggctgggcatggtggctcacacctgtaatcccagtactttgggaggccaaggggggagatcacttgaggtcaggagttcaagaccagcctggccaacttggtgaaaccccgtctttactaaaaatacaaaaaaattagccaggcgtggtggtgcacccctaaaatcccagctacttgagagactgaggcaggagaatcgcttgaacccaggaggtggaggttccagtgagccaaaatcatgccaatgtattccagtctgggtgacagagtgagactctgtctcaaaaaataaataaataaaataaaatgaaatagatcttataaaaaaaaaaaaaaaaaaaaaaaaaaaaaaaaaaaaaaaaaaa

SEQ ID NO: 5236 - protein, 331 aa, Homo sapien
MLWLFQSLLFVFCFGPGNVVSQSSLTPLMVNGILGESVTLPLEFPAGEKVNFITWLFNETSLAFIVPHETKSPEIHVTNPKQGKRLNFTQSYSLQLSNLKMEDTGSYRAQISTKTSAKLSSYTLRILRQLRNIQVTNHSQLFQNMTCELHLTCSVEDADDNVSFRWEALGNTLSSQPNLTVSWDPRISSEQDYTCIAENAVSNLSFSVSAQKLCEDVKIQYTDTKMILFMVSGICIVFGFIILLLLVLRKRRDSLSLSTQRTQGPESARNLEYVSVSPTNNTVYASVTHSNRETEIWTPRENDTITIYSTINHSKESKPTFSRATALDNVV

SEQ ID NO: 5237 - DNA, 3108 bp, Homo sapien
ggagcccatgatttcctggaagagccctagagctttgctttttctctcctgcagcacttaaccgaaaccagttttgcaatcaattcctgttcaaaggccaccctactcttcctatccgtctttctccagcccagacactcacagccccctgccagaccaggggacctcggagaggcaaggacagaggttcaggatcttcctctccctcgggacccaaggccacaaaggagagctccgtggagagaagaaaatcatttgactcctggggacacagatttgctgccacagaggctgatggacaaccaggcggagagagaaagtgaggctggtgttggtttgcaaagggatgaggatgacgctcctctgtgtgaagacgtggagctacaagacggagatctgtcccccgaagaaaaaatatttttgagagaatttcccagattgaaagaagatctgaaagggaacattgacaagctccgtgccctcgcagacgatattgacaaaacccacaagaaattcaccaaggctaacatggtggccacctctactgctgtcatctctggagtgatgagcctcctgggtttagcccttgccccagcaacaggaggaggaagcctgctgctctccaccgctggtcaaggtttggcaacagcagctggggtcaccagcatcgtgagtggtacgttggaacgctccaaaaataaagaagcccaagcacgggcggaagacatactgcccacctacgaccaagaggacagggaggatgaggaagagaaggcagactatgtcacagctgctggaaagattatctataatcttagaaacaccttgaagtatgccaagaaaaacgtccgtgcattttggaaactcagagccaacccacgcttggccaatgctaccaagcgtcttctgaccactggccaagtctcctcccggagccgcgtgcaggtgcaaaaggcctttgcgggaacaacactggcgatgaccaaaaatgctcgcgtgctgggaggtgtgatgtccgccttctcccttggctatgacttggccactctctcaaaggaatggaagcacctgaaggaaggagcaaggacaaagtttgcggaagagttgagagccaaggccttggagctggagaggaaactcacagaactcacccagctctacaagagcttgcagcagaaagtgaggtcaagggccagaggggtggggaaggatttaactgggacctgcgaaaccgaggcttactggaaggagttaagggagcatgtgtggatgtggctgtggctgtgtgtgtgtctgtgtgtctgtgtgtatgtacagtttacatgaatgttcctcaggacatggcatacaatggccttggaggtccaaataatatcaagtacatcttggagatgagggtgcctgtcctggacagacctcggcatgccttctgtttctccttcaatgctccttaaggcctatgtgctgggaaaagggtcttccctgtttgtttgtttgtttgtttgtttgtttgttttgagactccagtctgggtgtcagaatgagaccccatctcaaaaaaaaaaaaaaaaaaaaaaaagaagaagaatacagtcatgtatctcttggtgacagggacgcattctgataaatgtgtcattaggcaattgcattgtagtgtgattatcacagattgtacttatacaaaacttagatggcatagcctactgcatacctaggctatatgggagagcctattgctcccaggctacgcacctgtacagcatgtgactactgaatactataggcaattgcagcacaatgggaaatatttgtgtatctaaacatatgtaaacagagaaaaaggaaagtaaaaatatggcataaaagataagaattggctctcctgtacagggcacttactacgaatggagcttgcagggctgagagttgctccagatgagtcagtgagtggtgaatgaatgtgaaggcctagggcattactgtatactactgtaggctttataaacacagcacacttagggtacacaaaatgcatattaaaacattttcttccttcagtatattaggcaataggaatttttcaagtccactataaatcttatcaaaccatggttgtatatgcagttgaccgaaacattgttattggacacataactatagttgaaagaataagcaaaaagtctatctaggtgtgctgtcttgagcaacttttaattattctcctgtcctgcaatatgagttaatcttctctgatcgatgtagattccaggaaggggtgtccaggacaattaccttccttctggagaaacttcccttaatcaaataagagaacttcaaagaaaatccctccctgtgctttggaagggaagggaggtgggcagcagtgggtcagagatagacctttgttctcttatttctgaggcccttcagtctcctttattcaaagcactcagcatgccaaagcaccctattttagggtatctttttctgagccctaaacactgtgttggggatgtcaactgtgacaggaaaatatcttggggccccagaatcactaaggaaaactcaagcttagggaaacttcttagggcaaacccacctcccactctattcaaagttatctctctgctcactgagatagatacatatctgattgcctcctttggaaaggctaatcagaaactcaaaagaatgcaactgtttgtgtctcacctatctgtgacctggaagctccctccccactgaaccaatgttcttcttacatatattgattaatgtcttatgtctccctaaaatgtataaaaccaaggtatgccccaaccatcttggccacatgtcatcaggacttcctgagtctgtgtcacagtgtgtcctcaaccttggcaaaataaactttctaaattaactgagacctgtctcggattttctgggttcacattttggaaaccatgaatggattctgggtggagatgcccctgacccttgacaaatctatcggtgcttggtaccagcatgagctaactttatggctcaaaccaataggacaatttgctgaggtctgagaggactccctccagaaaatccctgatctcttaaaatttggta

SEQ ID NO: 5238 - protein, 343 aa, Homo sapien
MDNQAERESEAGVGLQRDEDDAPLCEDVELQDGDLSPEEKIFLREFPRLKEDLKGNIDKLRALADDIDKTHKKFTKANMVATSTAVISGVMSLLGLALAPATGGGSLLLSTAGQGLATAAGVTSIVSGTLERSKNKEAQARAEDILPTYDQEDREDEEEKADYVTAAGKIIYNLRNTLKYAKKNVRAFWKLRANPRLANATKRLLTTGQVSSRSRVQVQKAFAGTTLAMTKNARVLGGVMSAFSLGYDLATLSKEWKHLKEGARTKFAEELRAKALELERKLTELTQLYKSLQQKVRSRARGVGKDLTGTCETEAYWKELREHVWMWLWLCVCLCVCVYVQFT

SEQ ID NO: 5239 - DNA, 1379 bp, Homo sapien
gcggccgggaggccggagcagcacggccgcaggacctgaagctccggctgcgtcttcccgcagcgctacccgccatgcgcctgccgcgccgggccgcgctggggctcctgccgcttctgctgctgctgccgcccgcgccggaggccgccaagaagccgacgccctgccaccggtgccgggggctggtggacaagtttaaccaggggatggtggacaccgcaaagaagaactttggcggcgggaacacggcttgggaggaaaagacgctgtccaagtacgagtccagcgagattcgcctgctggagatcctggaggggctgtgcgagagcagcgacttcgaatgcaaccagatgctagaggcgcaggaggagcacctggaggcctggtggctgcagctgaagagcgaatatcctgacttattcgagtggttttgtgtgaagacactgaaagtgtgctgctctccaggaacctacggtcccgactgtctcgcatgccagggcggatcccagaggccctgcagcgggaatggccactgcagcggagatgggagcagacagggcgacgggtcctgccggtgccacatggggtaccagggcccgctgtgcactgactgcatggacggctacttcagctcgctccggaacgagacccacagcatctgcacagcctgtgacgagtcctgcaagacgtgctcgggcctgaccaacagagactgcggcgagtgtgaagtgggctgggtgctggacgagggcgcctgtgtggatgtggacgagtgtgcggccgagccgcctccctgcagcgctgcgcagttctgtaagaacgccaacggctcctacacgtgcgaagagtgtgactccagctgtgtgggctgcacaggggaaggcccaggaaactgtaaagagtgtatctctggctacgcgagggagcacggacagtgtgcagatgtggacgagtgcgcactagcagaaaaaacctgtgtgaggaaaaacgaaaactgctacaatactccagggagctacgtctgtgtgtgtcctgacggcttcgaaggaacggaagatgcctgtgtgccgccggcagaggctgaagccacagaaggagaaagcccgacacagctgccctcccgcgaagacctgtaatgtgccggacttaccctttaaattattcagaaggatgtcccgtggaaaatgtggccctgaggatgccgtctcctgcagtggacagcggcggggagaggctgcctgctctctaacggttgattctcatttgtcccttaaacagctgcatttcttggttgttcttaaacagacttgtatattttgatacagttctttgtaataaaattgaccattgtaggtaaaaaaaaaaaaaaaaaaaaaaaa

SEQ ID NO: 5240 - protein, 353 aa, Homo sapien
MRLPRRAALGLLPLLLLLPPAPEAAKKPTPCHRCRGLVDKFNQGMVDTAKKNFGGGNTAWEEKTLSKYESSEIRLLEILEGLCESSDFECNQMLEAQEEHLEAWWLQLKSEYPDLFEWFCVKTLKVCCSPGTYGPDCLACQGGSQRPCSGNGHCSGDGSRQGDGSCRCHMGYQGPLCTDCMDGYFSSLRNETHSICTACDESCKTCSGLTNRDCGECEVGWVLDEGACVDVDECAAEPPPCSAAQFCKNANGSYTCEECDSSCVGCTGEGPGNCKECISGYAREHGQCADVDECALAEKTCVRKNENCYNTPGSYVCVCPDGFEGTEDACVPPAEAEATEGESPTQLPSREDL

SEQ ID NO: 5241 - DNA, 2961 bp, Homo sapien; identical to SEQ ID NO: 2119

SEQ ID NO: 5242 - protein, 708 aa, Homo sapien; identical to SEQ ID NO: 2120

SEQ ID NO: 5243 - DNA, 1772 bp, Homo sapien; identical to SEQ ID NO: 4608

SEQ ID NO: 5244 - protein, 374 aa, Homo sapien [sequence omitted]

SEQ ID NO: 5245 - DNA, 2190 bp, Homo sapien
ggcacgagggacctctctgtgcagtatcctccagagaacctgagagtgatggtttcccaagcaaacaggacagtcctggaaaaccttgggaacggcacgtctctcccagtactggagggccaaagcctgtgcctggtctgtgtcacacacagcagccccccagccaggctgagctggacccagaggggacaggttctgagcccctcccagccctcagaccccggggtcctggagctgcctcgggttcaagtggagcacgaaggagagttcacctgccacgctcggcacccactgggctcccagcacgtctctctcagcctctccgtgcactactccccgaagctgctgggcccctcctgctcctgggaggctgagggtctgcactgcagctgctcctcccaggccagcccggccccctctctgcgctggtggcttggggaggagctgctggaggggaacagcagccaggactccttcgaggtcacccccagctcagccgggccctgggccaacagctccctgagcctccatggagggctcagctccggcctcaggctccgctgtgaggcctggaacgtccatggggcccagagtggatccatcctgcagctgccagataagaagggactcatctcaacggcattctccaacggagcgtttctgggaatcggcatcacggctcttcttttcctctgcctggccctgatcatcatgaagattctaccgaagagacggactcagacagaaaccccgaggcccaggttctcccggcacagcacgatcctggattacatcaatgtggtcccgacggctggccccctggctcagaagcggaatcagaaagccacaccaaacagtcctcggacccctcttccaccaggtgctccctccccagaatcaaagaagaaccagaaaaagcagtatcagttgcccagtttcccagaacccaaatcatccactcaagccccagaatcccaggagagccaagaggagctccattatgccacgctcaacttcccaggcgtcagacccaggcctgaggcccggatgcccaagggcacccaggcggattatgcagaagtcaagttccaatgagggtctcttaggctttaggactgggacttcggctagggaggaaggtagagtaagaggttgaagataacagagtgcaaagtttccttctctccctctctctctctctttctctctctctctctctttctctctcttttaaaaaaacatctggccagggcacagtggctcacgcctgtaatcccagcactttgggaggttgaggtgggcagatcgcctgaggtcgggagttcgagaccagcctggccaacttggtgaaaccccgtctctactaaaaatacaaaaattagctgggcatggtggcaggcgcctgtaatcctacctacttgggaagctgaggcaggagaatcacttgaacctgggagacggaggttgcagtgagccaagatcacaccattgcatgccagcctgggcaacaaagcgagactccatctcaaaaaaaaaatcctccaaatgggttgggtgtctgtaatcccagcactttgggaggctaaggtgggtggattgcttgagcccaggagttcgagaccagcctgggcaacatggtgaaaccccatctctacaaaaaatacaaaacatagctgggcttggtggtgtgtgcctgtagtcccagctgtcagacatttaaaccagagcaactccatctggaataggagctgaatacaatgaggctgagacctactgggctgcattctcagacagtggaggcattctaagtcacaggatgagacaggaggtccgtacaagatacaggtcataaagactttgctgataaaacagattgcagtaaagaagccaaccaaatcccaccaaaaccaagttggccacgagagtgacctctggtcgtcctcactgctacactcctgacagcaccatgacagtttacaaatgccatggcaacatcaggaagttacccgatatgtcccaaaagggggaggaatgaataatccaccccttgtttagcaaataagcaagaaataaccataaaagtgggcaaccagcagctctaggcgctgctcttgtctatggagtagccattcttttgttcctttactttcttaataaacttgctttcaccttaaaaaaaaaaaaaaaaaa

SEQ ID NO: 5246 - DNA, 4689 bp, Homo sapien
ccggccgcgtcccgcccgctccccggcaccagaagttcctctgcgcgtccgacggcgacatgggcgtccccacggccctggaggccggcagctggcgctggggatccctgctcttcgctctcttcctggctgcgtccctaggtccggtggcagccttcaaggtcgccacgccgtattccctgtatgtctgtcccgaggggcagaacgtcaccctcacctgcaggctcttgggccctgtggacaaagggcacgatgtgaccttctacaagacgtggtaccgcagctcgaggggcgaggtgcagacctgctcagagcgccggcccatccgcaacctcacgttccaggaccttcacctgcaccatggaggccaccaggctgccaacaccagccacgacctggctcagcgccacgggctggagtcggcctccgaccaccatggcaacttctccatcaccatgcgcaacctgaccctgctggatagcggcctctactgctgcctggtggtggagatcaggcaccaccactcggagcacagggtccatggtgccatggagctgcaggtgcagacaggcaaagatgcaccatccaactgtgtggtgtacccatcctcctcccaggagagtgaaaacatcacggctgcagccctggctacgggtgcctgcatcgtaggaatcctctgcctccccctcatcctgctcctggtctacaagcaaaggcaggcagcctccaaccgccgtgcccaggagctggtgcggatggacagcaacattcaagggattgaaaaccccggctttgaagcctcaccacctgcccaggggatacccgaggccaaagtcaggcaccccctgtcctatgtggcccagcggcagccttctgagtctgggcggcatctgctttcggagcccagcacccccctgtctcctccaggccccggagacgtcttcttcccatccctggaccctgtccctgactctccaaactttgaggtcatctagcccagctgggggacagtgggctgttgtggctgggtctggggcaggtgcatttgagccagggctggctctgtgagtggcctccttggcctcggccctggttccctccctcctgctctgggctcagatactgtgacatcccagaagcccagcccctcaacccctctggatgctacatggggatgctggacggctcagcccctgttccaaggattttggggtgctgagattctcccctagagacctgaaattcaccagctacagatgccaaatgacttacatcttaagaagtctcagaacgtccagcccttcagcagctctcgttctgagacatgagccttgggatgtggcagcatcagtgggacaagatggacactgggccaccctcccaggcaccagacacagggcacggtggagagacttctcccccgtggccgccttggctcccccgttttgcccgaggctgctcttctgtcagacttcctctttgtaccacagtggctctggggccaggcctgcctgcccactggccatcgccaccttacccagctgcctcctaccagcagtttctctgaagatctgtcaacaggttaagtcaatctggggcttccactgcctgcattccagtccccagagcttggtggtcccgaaacgggaagtacatattggggcatggtggcctccgtgagcaaatggtgtcttgggcaatctgaggccaggacagatgttgccccacccactggagatggtgctgagggaggtgggtggggccttctgggaaggtgagtggagaggggcacctgccccccgccctccccatcccctactcccactgctcagcgcgggccattgcaagggtgccacacaatgtcttgtccaccctgggacacttctgagtatgaagcgggatgctattaaaaactacatggggaaacaggtgcaaaccctggagatggattgtaagagccagtttaaatctgcactctgctgctcctcccccacccccaccttccactccatacaatctgggcctggtggagtcttcgcttcagagccattcggccaggtgcgggtgatgttcccatctcctgcttgtgggcatgccctggctttgtttttatacacataggcaaggtgagtcctctgtggaattgtgattgaaggattttaaagcaggggaggagagtagggggcatctctgtacactctgggggtaaaacagggaaggcagtgcctgagcatggggacaggtgaggtggggctgggcagaccccctgtagcgtttagcaggatgggggccccaggtactgtggagagcatagtccagcctgggcatttgtctcctagcagcctacactggctctgctgagctgggcctgggtgctgaaagccaggatttggggctaggcgggaagatgttcgcccaattgcttggggggttggggggatggaaaaggggagcacctctaggctgcctggcagcagtgagccctgggcctgtggctacagccagggaaccccacctggacacatggccctgcttctaagccccccagttaggcccaaaggaatggtccactgagggcctcctgctctgcctgggctgggccaggggctttgaggagagggtaaacataggcccggagatggggctgacacctcgagtggccagaatatgcccaaaccccggcttctcccttgtccctaggcagaggggggtcccttcttttgttccctctggtcaccacaatgcttgatgccagctgccataggaagagggtgctggctggccatggtggcacacacctgtcctcccagcactttgcagggctgaggtggaaggaccgcttaagcccaggtgttcaaggctgctgtgagctgtgttcgagccactacactccagcctggggacggagcaaaactttgcctcaaaacaaattttaaaaagaaagaaagaaggaaagagggtatgtttttcacaattcatgggggcctgcatggcaggagtggggacaggacacctgctgttcctggagtcgaaggacaagcccacagcccagattccggttctcccaactcaggaagagcatgccctgccctctggggaggctggcctggccccagccctcagctgctgaccttgaggcagagacaacttctaagaatttggctgccagaccccaggcctggctgctgctgtgtggagagggaggcggcccgcggcagaacagccaccgcacttcctcctcagcttcctctggtgcggccctgccctctcttctctggacccttttacaactgaacgcatctgggcttcgtggtttcctgttttcagcgaaatttactctgagctcccagttccatcttcatccatggccacaggccctgcctacaacgcactagggacgtccctccctgctgctgctggggaggggcaggctgctggagccgccctctgagttgcccgggatggtagtgcctctgatgccagccctggtggctgtgggctggggtgcatgggagagctgggtgcgagaacatggcgcctccagggggcgggaggagcactaggggctggggcaggaggctcctggagcgctggattcgtggcacagtctgaggccctgagagggaaatccatgcttttaagaactaattcattgttaggagatcaatcaggaattaggggccatcttacctatctcctgacattcacagtttaatagagacttcctgcctttattccctcccagggagaggctgaaggaatggaattgaaagcaccatttggagggttttgctgacacagcggggaccgctcagcactccctaaaaacacaccatggaggccactggtgactgctggtgggcaggctggccctgcctgggggagtccgtggcgatgggcgctggggtggaggtgcaggagccccaggacctgcttttcaaaagacttctgcctgaccagagctcccactacatgcagtggcccagggcagaggggctgatacatggcctttttcagggggtgctcctcgcggggtggacttgggagtgtgcagtgggacagggggctgcaggggtcctgccaccaccgagcaccaacttggcccctggggtcctgccccatgaatgaggccttccccagggctggcctgactgtgctgggggctgggttaacgttttctcagggaaccacaatgcacgaaagaggaactggggttgctaaccaggatgctgggaacaaaggcctcttgaagcccagccacagcccagctgagcatgaggcccagcccatagacggcacaggccacctggcccattccctgggcattccctgctttgcattgctgcttctcttcaccccatggaggctatgtcaccctaactatcctggaatgtgttgagagggattctgaatgatcaatatagcttggtgagacagtgccgagatagatagccatgtctgccttgggcacgggagagggaagtggcagcatgcatgctgtttcttggccttttctgttagaatacttggtgctttccaacacactttcacatgtgttgtaacttgtttgatccacccccttccctgaaaatcctgggaggttttattgctgccatttaacacagagggcaatagaggttctgaaaggtctgtgtcttgtcaaaacaagtaaacggtggaactacgact

SEQ ID NO: 5247 - protein, 330 aa, Homo sapien
GRVPPAPRHQKFLCASDGDMGVPTALEAGSWRWGSLLFALFLAASLGPVAAFKVATPYSLYVCPEGQNVTLTCRLLGPVDKGHDVTFYKTWYRSSRGEVQTCSERRPIRNLTFQDLHLHHGGHQAANTSHDLAQRHGLESASDHHGNFSITMRNLTLLDSGLYCCLVVEIRHHHSEHRVHGAMELQVQTGKDAPSNCVVYPSSSQESENITAAALATGACIVGILCLPLILLLVYKQRQAASNRRAQELVRMDSNIQGIENPGFEASPPAQGIPEAKVRHPLSYVAQRQPSESGRHLLSEPSTPLSPPGPGDVFFPSLDPVPDSPNFEVI

SEQ ID NO: 5248 - DNA, 3338 bp, Homo sapien
cccagcccggccccgccgccccggctgcgcacgcgacgccccctccaggccccgctcctgcgccctatttggtcattcggggggcaagcggcgggaggggaaacgtgcgcggccgaaggggaagcggagccggcgccggctgcgcagaggagccgctctcgccgccgccacctcggctgggagcccacgaggctgccgcatcctgccctcggaacaatgggactcggcgcgcgaggtgcttgggccgcgctgctcctggggacgctgcaggtgctagcgctgctgggggccgcccatgaaagcgcagccatggcggagactctccaacatgtgccttctgaccatacaaatgaaacttccaacagtactgtgaaaccaccaacttcagttgcctcagactccagtaatacaacggtcaccaccatgaaacctacagcggcatctaatacaacaacaccagggatggtctcaacaaatatgacttctaccaccttaaagtctacacccaaaacaacaagtgtttcacagaacacatctcagatatcaacatccacaatgaccgtaacccacaatagttcagtgacatctgctgcttcatcagtaacaatcacaacaactatgcattctgaagcaaagaaaggatcaaaatttgatactgggagctttgttggtggtattgtattaacgctgggagttttatctattctttacattggatgcaaaatgtattactcaagaagaggcattcggtatcgaaccatagatgaacatgatgccatcatttaaggaaatccatggaccaaggatggaatacagattgatgctgccctatcaattaattttggtttattaatagtttaaaacaatattctctttttgaaaatagtataaacaggccatgcatataatgtacagtgtattacgtaaatatgtaaagattcttcaaggtaacaagggtttgggttttgaaataaacatctggatcttatagaccgttcatacaatggttttagcaagttcatagtaagacaaacaagtcctatctttttttttttggctggggtgggggcattggtcacatatgaccagtaattgaaagacgtcatcactgaaagacagaatgccatctgggcatacaaataagaagtttgtcacagcactcaggattttgggtatcttttgtagctcacataaagaacttcagtgcttttcagagctggatatatcttaattactaatgccacacagaaattatacaatcaaactagatctgaagcataatttaagaaaaacatcaacattttttgtgctttaaactgtagtagttggtctagaaacaaaatactccaagaaaaagaaaattttcaaataaaacccaaaataatagctttgcttagccctgttagggatccattggagcattaaggagcacatatttttattaacttcttttgagctttcaatgttgatgtaatttttgttctctgtgtaatttaggtaaactgcagtgtttaacataataatgttttaaagacttagttgtcagtattaaataatcctggcattatagggaaaaaacctcctagaagttagattatttgctactgtgagaatattgtcaccactggaagttactttagttcatttaattttaattttatattttgtgaatattttaagaactgtagagctgctttcaatatctagaaatttttaattgagtgtaaacacacctaactttaagaaaaagaaccgcttgtatgattttcaaaagaacatttagaattctatagagtcaaaactatagcgtaatgctgtgtttattaagccagggattgtgggacttcccccaggcaactaaacctgcaggatgaaaatgctatattttctttcatgcactgtcgatattactcagatttggggaaatgacatttttatactaaaacaaacaccaaaatattttagaataaattcttagaaagttttgagaggaatttttagagaggacatttcctccttcctgatttggatattccctcaaatccctcctcttactccatgctgaaggagaagtactctcagatgcattatgttaatggagagaaaaagcacagtattgtagagacaccaatattagctaatgtattttggagtgttttccattttacagtttatattccagcactcaaaactcagggtcaagttttaacaaaagaggtatgtagtcacagtaaatactaagatggcatttctatctcagagggccaaagtgaatcacaccagtttctgaaggtcctaaaaatagctcagatgtcctaatgaacatgcacctacatttaataggagtacaataaaactgttgtcagcttttgttttacagagaacgctagatattaagaattttgaaatggatcatttctacttgctgtgcattttaaccaataatctgatgaatatagaaaaaaatgatccaaaatatggatatgattggatgtatgtaacacatacatggagtatggaggaaattttctgaaaaatacatttagattagtttagtttgaaggagaggtgggctgatggctgagttgtatgttactaacttggccctgactggttgtgcaaccattgcttcatttctttgcaaaatgtagttaagatatactttattctaatgaaggccttttaaatttgtccactgcattcttggtatttcactacttcaagtcagtcagaacttcgtagaccgacctgaagtttctttttgaatacttgtttctttagcactttgaagatagaaaaaccactttttaagtactaagtcatcatttgccttgaaagtttcctctgcattgggtttgaagtagtttagttatgtctttttctctgtatgtaagtagtataatttgttactttcaaatacccgtactttgaatgtaggtttttttgttgttgttatctataaaaattgagggaaatggttatgcaaaaaaatattttgctttggaccatatttcttaagcataaaaaaatgctcagttttgcttgcattccttgagaatgtatttatctgaagatcaaaacaaacaatccagatgtataagtactaggcagaagccaattttaaaatttccttgaataatccatgaaaggaataattcaaatacagataaacagagttggcagtatattatagtgataattttgtattttcaamaaaaaaaaagttaaactcttcttttctttttattataatgaccagcttttggtatttcattgttaccaagttctatttttagataaaattgttctccttctaaaaaaaaaaaaaaaaaaaaaaa

SEQ ID NO: 5249 - protein, 189 aa, Homo sapien
MGLGARGAWAALLLGTLQVLALLGAAHESAAMAETLQHVPSDHTNETSNSTVKPPTSVASDSSNTTVTTMKPTAASNTTTPGMVSTNMTSTTLKSTPKTTSVSQNTSQISTSTMTVTHNSSVTSAASSVTITTTMHSEAKKGSKFDTGSFVGGIVLTLGVLSILYIGCKMYYSRRGIRYRTIDEHDAII

SEQ ID NO: 5250 - DNA, 1835 bp, Homo sapien
gtgcagttgcggctccagggccatggcggaggagcagggccgggaacgggactcggttcccaagccgtcggtgctgttcctccacccagacctgggcgtgggcggcgctgagcggctggtgttggacgcggcgctggcgctgcaggcgcgcgggtgtagcgtgaagatctggacagcgcactacgacccgggccactgtttcgccgagagccgcgagctaccggtgcgctgtgccggggactggctgccgcgaggcctgggctggggcggccgcggcgccgccgtctgcgcctacgtgcgcatggttttcctggcgctctacgtgctgttcctcgccgacgaggagttcgacgtggtagtgtgcgaccaggtgtctgcctgtatcccagtgttcaggctggctagacggcggaagaagatcctattttactgtcacttcccagatctgcttctcaccaagagagattcttttcttaaacgactatacagggccccaattgactggatagaggaatacaccacaggcatggcagactgcatcttagtcaacagccagttcacagctgctgtttttaaggaaacattcaagtccctgtctcacatagaccctgatgtcctctatccatctctaaatgtcaccagctttgactcagttgttcctgaaaagctggatgacctagtccccaaggggaaaaaattcctgctgctctccatcaacagatacgaaaggaagaaaaatctgactttggcactggaagccctagtacagctgcgtggaagattgacatcccaagattgggagagggttcatctgatcgtggcaggtggttatgacgagagagtcctggagaatgtggaacattatcaggaattgaagaaaatggtccaacagtccgaccttggccagtatgtgaccttcttgaggtctttctcagacaaacagaaaatctccctcctccacagctgcacgtgtgtgctttacacaccaagcaatgagcactttggcattgtccctctggaagccatgtacatgcagtgcccagtcattgctgttaattcgggtggacccttggagtccattgaccacagtgtcacagggtttctgtgtgagcctgacccggtgcacttctcagaagcaatagaaaagttcatccgtgaaccttccttaaaagccaccatgggcctggctggaagagccagagtgaaggaaaaattttcccctgaagcatttacagaacagctctaccgatatgttaccaaactgctggtataatcagattgtttttaagatctccattaatgtcatttttatggattgtagacccagttttgaaaccaaaaaagaaacctagaatctaatgcagaagagatcttttaaaaaataaacttgagtcttgaatgtgagccactttcctatataccacacctccctgtccacttttcagaaaaaccatgtcttttatgctataatcattccaaattttgccagtgttaagttacaaatgtggtgtcattccatgttcagcagagtattttaattatattttctcgggattattgctcttctgtctataaattttgaatgatactgtgccttaattggttttcatagtttaagtgtgtatcattatcaaagttgattaatttggcttcatagtataatgagagcagggctattgtagttcccagattcaatccaccgaagtgttcactgtcatctgttagggaatttttgtttgtcctgtctttgcctggatccatagcgagagtgctctgtattttttttaagataatttgtatttttgcacactgagatataataaaaggtgtttatc

SEQ ID NO: 5251 - protein, 416 aa, Homo sapien
MAEEQGRERDSVPKPSVLFLHPDLGVGGAERLVLDAALALQARGCSVKIWTAHYDPGHCFAESRELPVRCAGDWLPRGLGWGGRGAAVCAYVRMVFLALYVLFLADEEFDVVVCDQVSACIPVFRLARRRKKILFYCHFPDLLLTKRDSFLKRLYRAPIDWIEEYTTGMADCILVNSQFTAAVFKETFKSLSHIDPDVLYPSLNVTSFDSVVPEKLDDLVPKGKKFLLLSINRYERKKNLTLALEALVQLRGRLTSQDWERVHLIVAGGYDERVLENVEHYQELKKMVQQSDLGQYVTFLRSFSDKQKISLLHSCTCVLYTPSNEHFGIVPLEAMYMQCPVIAVNSGGPLESIDHSVTGFLCEPDPVHFSEAIEKFIREPSLKATMGLAGRARVKEKFSPEAFTEQLYRYVTKLLV

SEQ ID NO: 5252 - DNA, 1959 bp, Homo sapien; identical to SEQ ID NO: 4610

SEQ ID NO: 5253 - protein, 384 aa, Homo sapien; identical to SEQ ID NO: 4611

SEQ ID NO: 5254 - DNA, 1388 bp, Homo sapien
gtgcgtgagtttggtggcggccggctgtgcagagacgccatgtaccggctcatgtcagcagtgactgcccgggctgccgcccccgggggcttggcctcaagctgcggacgacgcggggtccatcagcgcgccgggctgccgcctctcggccacggctgggtcgggggcctcgggctggggctggggctggcgctcggggtgaagctggcaggtgggctgaggggcgcggccccggcgcagtcccccgcggcccccgaccctgaggcgtcgcctctggccgagccgccacaggagcagtccctcgccccgtggtctccgcagaccccggcgccgccctgctccaggtgcttcgccagagccatcgagagcagccgcgacctgctgcacaggatcaaggatgaggtgggcgcaccgggcatagtggttggagtttctgtagatggaaaagaagtctggtcagaaggtttaggttatgctgatgttgagaaccgtgtaccatgtaaaccagagacagttatgcgaattgctagcatcagcaaaagtctcaccatggttgctcttgccaaattgtgggaagcagggaaactggatcttgatattccagtacaacattatgttcccgaattcccagaaaaagaatatgaaggtgaaaaggtttctgtcacaacaagattactgatttcccatttaagtggaattcgtcattatgaaaaggacataaaaaaggtgaaagaagagaaagcttataaagccttgaagatgatgaaagagaatgttgcatttgagcaagaaaaagaaggcaaaagtaatgaaaagaatgattttactaaatttaaaacagagcaggagaatgaagccaaatgccggaattcaaaacctggcaagaaaaagaatgattttgaacaaggcgaattatatttgagagaaaagtttgaaaattcaattgaatccctaagattatttaaaaatgatcctttgttcttcaaacctggtagtcagtttttgtattcaacttttggctataccctactggcagccatagtagagagagcttcaggatgtaaatatttggactatatgcagaaaatattccatgacttggatatgctgacgactgtgcaggaagaaaacgagccagtgatttacaatagagcaaggtaaatgaataccttctgctgtgtctagctatatcgcatcttaacactattttattaattaaaagtcaaattttctttgtttccattccaaaatcaacctgccacattttgggagcttttctacatgtctgttttctcatctgtaaagtgaaggaagtaaaacatgtttataaagtaaaaaaaaaaaaaaaaaaaaaaaaaaaaaaaaaaaaaaaaaaaaaaaaaaaaaaa

SEQ ID NO: 5255 - protein, 373 aa, Homo sapien
MYRLMSAVTARAAAPGGLASSCGRRGVHQRAGLPPLGHGWVGGLGLGLGLALGVKLAGGLRGAAPAQSPAAPDPEASPLAEPPQEQSLAPWSPQTPAPPCSRCFARAIESSRDLLHRIKDEVGAPGIVVGVSVDGKEVWSEGLGYADVENRVPCKPETVMRIASISKSLTMVALAKLWEAGKLDLDIPVQHYVPEFPEKEYEGEKVSVTTRLLISHLSGIRHYEKDIKKVKEEKAYKALKMMKENVAFEQEKEGKSNEKNDFTKFKTEQENEAKCRNSKPGKKKNDFEQGELYLREKFENSIESLRLFKNDPLFFKPGSQFLYSTFGYTLLAAIVERASGCKYLDYMQKIFHDLDMLTTVQEENEPVIYNRAR

SEQ ID NO: 5256 - DNA, 7734 bp, Homo sapien
agaggctgcggtgagtccgccagccccagctgctcctcctcaagcccccaaggcccttcggcgggcccctgctgaaagaccggcatgccctattctgtgggcttccgcgaagccgatgctgctaccagctttctgagagcagcaagatcaggtaacttggacaaagctttggatcacctgcggaatggggtagatattaacacctgtaaccagaatgggttgaatggcttgcatctggcttctaaggaaggccatgtgaaaatggtggttgaacttctgcacaaagaaatcattctagaaacgacaaccaagaaggggaacacggccctgcacatcgctgctctagccgggcaggatgaggtggtccgggagcttgtcaactatggagccaacgtcaatgcccagtcacagaaaggttttacacccctgtacatggcagcacaagagaaccacttggaagtggttaagtttttactggaaaatggagctaaccagaatgtagccacagaagacggcttcacgcctctggcggtagccctgcagcagggccatgagaacgtcgtcgcgcacctcatcaactacggcaccaaggggaaggtgcgcctcccggccctgcacatcgcggcccgcaacgacgacacgcgcacggctgcggtgctgctgcagaacgaccccaacccggacgtgctttccaagacgggattcacgcccctgcacattgcggctcactacgagaacctcaacgtggcccagttgctcctcaacagaggagccagcgtcaatttcacaccacagaacggcatcacgccactgcacatcgcctcccgcaggggcaacgtgatcatggtgcggctgctgctggatcggggagcccagatagaaaccaagaccaaggacgaattgacacctctccactgtgcagctcgaaatgggcacgtgcgaatctcagagatcctgctggaccacggggcaccaatccaagccaaaaccaagaacggcctgtccccaattcacatggcggctcagggagaccacctcgactgtgtccggctcctgttgcaatacgacgcagagatagacgacatcaccctggaccacctgaccccactccacgtggctgcccactgtggacaccacagggtggctaaggtccttctggataaaggggccaaacccaactccagagccctgaatggctttacccccttacacatcgcctgcaaaaagaaccacgtccgtgtcatggagctgctgctgaagacgggagcctcgatcgacgcggtcaccgagtctggcctgacacctctccacgtggcctccttcatggggcaccttcccatcgtgaagaacctcctgcagcggggggcgtcgcccaacgtctccaacgtgaaagtggagaccccgctacacatggcagccagagccgggcacacggaagtggccaaatatttactccagaacaaagccaaagtcaatgccaaggccaaggatgaccagaccccacttcactgtgcagctcgcatcggccacacaaacatggtgaagctcctgctggaaaataacgccaaccccaacctggccaccaccgccgggcacacccccctgcacattgcagcccgtgagggccatgtggaaacagtcctggcccttctggaaaaggaagcatcccaggcctgcatgaccaagaaaggatttacccctctgcacgtggcggccaagtacgggaaggtgcgggtggcagagctgctgctggagcgggacgcacacccgaatgctgccggaaaaaatggcctgacccccctgcacgtggccgtccatcacaacaacctggacatcgtcaagctgctgcttccccggggcggctccccgcacagccctgcctggaatggctacacccctttgcacatcgctgccaagcagaaccaggtggaggtggcccgtagtctgctgcagtatgggggctcagcaaacgccgagtcggtgcaaggtgtgacgccccttcacctggccgcccaggagggccacgcagagatggtggctctgctgctctcgaaacaagccaatggcaacctggggaacaagagcggactcactcccctccatctggtagcacaagaaggccacgttccagtggcagatgtgctgatcaaacacggtgtcatggtggacgccaccacccggatgggctacactcccctccatgtggccagtcactatggaaacatcaagctggtgaagtttctgctgcagcaccaggcagatgtcaatgccaagaccaagctaggatacagccccctgcaccaggcagcccagcagggacacacagacatcgtgactctgcttctgaaaaacggtgcttccccaaacgaggtcagctcggatggaaccacacctctggccatagccaagcgcttgggctacatttctgtcaccgacgtgctcaaggtcgtcacggatgaaaccagtttcgtgttagtcagtgataagcatcgaatgagtttccctgagacagttgatgagatcctggatgtctcggaagatgaaggggaagaactcatcagcttcaaggctgagaggcgggattccagggatgttgatgaagagaaggagctgctggattttgtgccgaagctagaccaagtggtggaatctccagccatccccaggattccctgtgccatgcctgagacagtggtgatcaggtcagaagagcaggagcaggcatctaaagagtatgatgaggactccctcatccccagcagcccggccaccgagacctcagacaacatcagcccggtggccagcccggtgcatacagggtttctggtgagcttcatggttgacgcccggggtggttccatgagaggaagtcgccacaacggcctgcgagtggtgatcccgccacggacgtgcgcagcgcccacccgcatcacctgccgcctggtcaagccccagaagctcagcacgccgcccccactggccgaggaggagggcctggccagcaggatcatagcactggggcccacgggggcacagttcctgagccctgtaatcgtggagatcccgcactttgcctcccatggccgtggagaccgcgagctcgtggttctgaggagcgaaaacggctccgtgtggaaggagcacaggagccgctatggagagagctacctggatcagatcctcaacgggatggacgaagagctggggagcctggaggagctagagaagaagagggtgtgccgaatcatcaccaccgacttcccgctgtacttcgtgatcatgtcacggctctgccaggactacgacatcatcggtcccgaagggggctccctgaagagcaagctggtgcccctggtacaggcaacgttcccggagaatgccgtcaccaagagagtgaagctggctctgcaggcccagcctgtcccggatgagcttgtcactaagctcctgggcaaccaggccacattcagccccattgtcaccgtggagccccggcgccggaagttccaccgccccattgggcttcggatcccactacctccttcctggaccgacaacccgagggacagtggggagggagacaccaccagcctgcgcctgctttgcagcgtcattggaggaacagaccaagcccagtgggaagacataacaggaaccaccaaacttgtatatgccaacgagtgcgccaacttcaccaccaatgtctctgccaggttttggctgtcggactgtcctcggactgctgaggctgtgaactttgccaccctgctgtacaaagagctcactgcagtgccctacatggccaaattcgtcatctttgccaagatgaatgacccccgagaggggcgcctgcgctgctactgcatgacagatgataaagtggacaagaccctggagcagcatgagaacttcgtggaggtggcccggagcagggacatagaggtgttggaaggaatgtccctgtttgcagaactctctgggaacctggtgcctgtgaagaaagctgcccagcagcggagcttccacttccagtcatttcgggagaaccgtctggccatgcctgtaaaggtgagggacagcagtcgagagccgggagggtccctgtcgtttctgcgcaaggcgatgaagtacgaggacacccagcacattctctgccacctgaacatcaccatgcccccctgcgctaagggaagtggagccgaagataggagaaggaccccgacgcccctggccctgcgatacagcattctcagtgagtccacaccaggttctctcagtgggacagagcaggcagagatgaagatggctgttatctcagagcacctcggtctcagctgggcagagttggcccgggagctgcagttcagtgtggaagacatcaacaggatccgagtggaaaatcccaactccctgttggagcagagtgtggccttgctgaacctctgggtcatccgtgaaggccaaaacgcaaacatggagaatctgtacacagccctgcagagcattgaccgtggcgagatcgtgaacatgctggagggttccggccgacagagccgcaacttgaagccagacaggcggcacaccgaccgcgactactcgctgtcaccctcccagatgaatggccatcagagggggcaagcccgaatcacacattcccccaccgtgagtcaggtgacggagaggagtcaggacagactgcaggactgggatgcagacggctcgattgtctcatacctgcaagatgctgcacaaggttcctggcaagaggaggtcacgcaaggtccacactcattccagggaacaagtaccatgactgaagggctagagcccggtggatctcaggagtacgagaaggtcctggtgtctgtaagtgagcacacgtggacagaacagcccgaggctgagagctcccaggccgacagggaccggaggcagcaaggccaagaagagcaggtgcaggaggccaagaacaccttcacccaagtggtgcaggggaatgagtttcagaatattccaggggagcaggtgacagaggagcaattcacggatgagcagggcaacattgtcaccaagaagatcattcgcaaggtggttcgacagatagacttgtccagcgccgatgccgcccaggagcacgaggaggtgactgtagaggggcccctggaggatcccagtgagctggaggtcgatattgattactttatgaaacactccaaggatcacacctcgacacccaacccctgaaccccacacactctgccatgcacacaggaggagagctggacctgagggccaccgcagcggtgcacacattcctctgggctgacggcatgacctctgtaagggactcctgctagtcccctcttggcatgaatgactgactgtagacgcatgacctccaggcttcaatcctgcctcttgcaatgacagctgatctgtcggaaccaggacacaaaagcagcaagaagcggggagagagagggatagaaaacaagcgcaggagagcctgcgaacgcaaaagtgaatgagggctttttgtggctggggatgggttttggttttggggttttttttttaaattgttttgacttcgtacagggtactttttcccaacctcatctgtcagaaatccatgtgggcttcctggaaagaaaaaaaaaaaaaagaaaactaggcatgaaatcagtttaacaccttaatcttaagccatgtcctcatctgcccaccctccccaacccacatacctccattccacttgtgacaccccctcgactccctggtgacgctcctcccagatcgctctacatgacattcaggacacacacacacacacacacacacacaccactcgcctccactgaatctacacacagattttactgtgacttctgaagctgtggataaattggaattttttatgttgtctctctctctgccaatttcaatacgaatcatcttccaatggaaaatcattaccttgaagagtgcattcggggttccttgtgttagggacttaagaatctgaggcgcgaggacccccaggcttacctgtaggactcaaagggagccaggaccccatctgaaagggtctcctctctcagttgggggacaggccggtggctgacccaggattgcaccagcatgtccatagagaagaggttttctatgtcttcaagcactatatcatagtccgtgttcaaagtgtaaactgtacagtaatcagccttgtgtatatgaaaaacaataaatactatgcaaaccaatagaaacatttagcagtacgtacagagcctgacagcgcagctcctgaggacttctgcggctgcaggagaaggagctgtggcctgtctttcagtgaaagaggaaggaaaggagtagggctagtgaatgtatctgccaggtcttagaagtcaggaccacccagggtctcccagagtgaacttggtgctctaagtccaggcagcctgcaggctggggaccctgggtgcaggtgccaggctcgaggctgttccctgtcctgcctcagtgcctcccctctgcccagcccctgtggcctcttggagaggcgagccagggggctccccggaccgcatggccggtgagagtagagtcggaggcggagagcctggacgcccagaggccggggccaggctctgggtcaaggcaggaaggagacagacagctggcagttcctcgcctcggtgccatcagggaggagccttaagttccactagagcctccggcccagggaggccagaatcagcacaatcccggccccgccctcgcggcgggcgcccccagggccaggagagagagacagggctggctcctctcgcccctggagccgcggtgtggacggcccggccccgtccgccccgccgctctgcgggagtgtccttcgggacacacttaaaccttccaagtagcacagaagccccctccacgtcagagccccctggccgcggggcctgtgagcggagaggggccctgcttcccacacaaatccgccccggtgcacccccggccaggcaggccccggggcggcctaggcgccttgtcggccgggggtggggctgcttttgcttcctttagaggggcgggcagggagaggaagctctagctccgggcctgagtttccccgaggctgcgtcggaggagctgcagggcgagcccggacggctgccgtctccgccagaggccaccccggcccggcctccaggcagaggcgcccccctccatcctcccccatcccgggggccacggcaggggggccgcacagcgcggctgggaccgattcggtgacggcccaaggaagctgggcgcagggctcgcctctcccgcctcgatcctgcaccttcctctcccaggtcgctgctgcagccaacccagtagcccccttagcgcccccgcggaccccgcagctccagactccgctttggcacctctgctccggctggcatggctgcacgctccggctgctagtaggagccgttaggggaggagtttggggtctccacacgatgcctagagaatgctgcagtctgcacattagacgctttttagaagttttgaaattaccttgatttttttaattgttatgaaaatggatcttttcttgactctcccacatgctctgttatgggagagaatcccctaccctactctgatgtatagaccattctcccttcaccagccgaaccaatgtcaaaattaataaagaaatggactaaggca

SEQ ID NO: 5257 - protein, 1719 aa, Homo sapien
MPYSVGFREADAATSFLRAARSGNLDKALDHLRNGVDINTCNQNGLNGLHLASKEGHVKMVVELLHKEIILETTTKKGNTALHIAALAGQDEVVRELVNYGANVNAQSQKGFTPLYMAAQENHLEVVKFLLENGANQNVATEDGFTPLAVALQQGHENVVAHLINYGTKGKVRLPALHIAARNDDTRTAAVLLQNDPNPDVLSKTGFTPLHIAAHYENLNVAQLLLNRGASVNFTPQNGITPLHIASRRGNVIMVRLLLDRGAQIETKTKDELTPLHCAARNGHVRISEILLDHGAPIQAKTKNGLSPIHMAAQGDHLDCVRLLLQYDAEIDDITLDHLTPLHVAAHCGHHRVAKVLLDKGAKPNSRALNGFTPLHIACKKNHVRVMELLLKTGASIDAVTESGLTPLHVASFMGHLPIVKNLLQRGASPNVSNVKVETPLHMAARAGHTEVAKYLLQNKAKVNAKAKDDQTPLHCAARIGHTNMVKLLLENNANPNLATTAGHTPLHIAAREGHVETVLALLEKEASQACMTKKGFTPLHVAAKYGKVRVAELLLERDAHPNAAGKNGLTPLHVAVHHNNLDIVKLLLPRGGSPHSPAWNGYTPLHIAAKQNQVEVARSLLQYGGSANAESVQGVTPLHLAAQEGHAEMVALLLSKQANGNLGNKSGLTPLHLVAQEGHVPVADVLIKHGVMVDATTRMGYTPLHVASHYGNIKLVKFLLQHQADVNAKTKLGYSPLHQAAQQGHTDIVTLLLKNGASPNEVSSDGTTPLAIAKRLGYISVTDVLKVVTDETSFVLVSDKHRMSFPETVDEILDVSEDEGEELISFKAERRDSRDVDEEKELLDFVPKLDQVVESPAIPRIPCAMPETVVIRSEEQEQASKEYDEDSLIPSSPATETSDNISPVASPVHTGFLVSFMVDARGGSMRGSRHNGLRVVIPPRTCAAPTRITCRLVKPQKLSTPPPLAEEEGLASRIIALGPTGAQFLSPVIVEIPHFASHGRGDRELVVLRSENGSVWKEHRSRYGESYLDQILNGMDEELGSLEELEKKRVCRIITTDFPLYFVIMSRLCQDYDIIGPEGGSLKSKLVPLVQATFPENAVTKRVKLALQAQPVPDELVTKLLGNQATFSPIVTVEPRRRKFHRPIGLRIPLPPSWTDNPRDSGEGDTTSLRLLCSVIGGTDQAQWEDITGTTKLVYANECANFTTNVSARFWLSDCPRTAEAVNFATLLYKELTAVPYMAKFVIFAKMNDPREGRLRCYCMTDDKVDKTLEQHENFVEVARSRDIEVLEGMSLFAELSGNLVPVKKAAQQRSFHFQSFRENRLAMPVKVRDSSREPGGSLSFLRKAMKYEDTQHILCHLNITMPPCAKGSGAEDRRRTPTPLALRYSILSESTPGSLSGTEQAEMKMAVISEHLGLSWAELARELQFSVEDINRIRVENPNSLLEQSVALLNLWVIREGQNANMENLYTALQSIDRGEIVNMLEGSGRQSRNLKPDRRHTDRDYSLSPSQMNGHQRGQARITHSPTVSQVTERSQDRLQDWDADGSIVSYLQDAAQGSWQEEVTQGPHSFQGTSTMTEGLEPGGSQEYEKVLVSVSEHTWTEQPEAESSQADRDRRQQGQEEQVQEAKNTFTQVVQGNEFQNIPGEQVTEEQFTDEQGNIVTKKIIRKVVRQIDLSSADAAQEHEEVTVEGPLEDPSELEVDIDYFMKHSKDHTSTPNP

SEQ ID NO: 5258 - DNA, 1816 bp, Homo sapien; identical to SEQ ID NO: 1693

SEQ ID NO: 5259 - protein, 261 aa, Homo sapien; identical to SEQ ID NO: 1694

SEQ ID NO: 5260 - DNA, 1474 bp, Homo sapien; identical to SEQ ID NO: 546

SEQ ID NO: 5261 - protein, 303 aa, Homo sapien; identical to SEQ ID NO: 547

SEQ ID NO: 5262 - DNA, 2921 bp, Homo sapien
ccggctcggagtgtgatctaagcaggtcgcgtaccttcctcaggtgactccggccacagcccattgtccgcggccaccggcggagtttagccgcagacctcgaagcgccccggggtccttcccgaacggcagcggctgcggcgggtccatggagaagggccctgtgcgggcaccggcggagaagccgcggggcgccaggtgcagcaatgggttccccgagcgggatccgccgcggcccgggcccagcaggccggcggagaagcccccgcggcccgaggccaagagcgcgcagcccgcggacggctggaagggcgagcggccccgcagcgaggaggataacgagctgaacctccctaacctggcagccgcctactcgtccatcctgagctcgctgggcgagaacccccagcggcaagggctgctcaagacgccctggagggcggcctcggccatgcagttcttcaccaagggctaccaggagaccatctcagatgtcctaaacgatgctatatttgatgaagatcatgatgagatggtgattgtgaaggacatagacatgttttccatgtgtgagcatcacttggttccatttgttggaaaggtccatattggttatcttcctaacaagcaagtccttggcctcagcaaacttgcgaggattgtagaaatctatagtagaagactacaagttcaggagcgccttacaaaacaaattgctgtagcaatcacggaagccttgcggcctgctggagtcggggtagtggttgaagcaacacacatgtgtatggtaatgcgaggtgtacagaaaatgaacagcaaaactgtgaccagcacaatgttgggtgtgttccgggaggatccaaagactcgggaagagttcctgactctcattaggagctgagcttcattcagtgtgtgtgcgttggttgccgatcgtactgccagtagcattgtctgtctgtccggtcttgtttgtacattccattttcaattgttacagatgtgaactttattccttgtcactaattatatttaaaattatttctaggaagtcaaataaatataataaagggttgagcctctactttcttcttgccacctttttgtggcaatattaaagtgaactgctaatagtgtaagtatgtgcacaaaaccactgccagataaccagaggggcctgggaagggagaagaattagtgtatttttttcaaatagtacagtaatttgcctcataagcataggagcattgggaatgagagggaactgtgcccagtatactgttttttttcttcctccaataaaagtggtgtagtgccgaaagtgctaaaatatttagtgcggtattgctctgtgaattcaagttcaacagacttcactttggtcatgtttattaaaccaccagtgacatttaaaaatatatttttagcagtcgtaatgttagtcaccaagggaaggtggtggaatgtctatgtttttgattttactgtgagttaaaaaggcacatttctaccttctattgtttttaaattcaagaatagggaattagttcctggtgttgtttacgagtgtattctcgtgtcaacatacagggatttagacatttaactctctgtgccttgataagaatatcatttagagtgtagatacttttgcctttttaaaaaagccattattttatgagacttagtactcacactgcaaataactagtcagctcagttttaactttataggtttattgagtttcctttgtgtgatccatgtagatgcctcaaaatgtttcttcttcttcttttttttaatcttataagatatttttctaagtatttccagaaacatttgagagtgcccatcattttcaggtctgcagaaccatagcttccacgcacctgaacgagcacagaatgaactgacggtggaagacattatgagctgtgtccaacgttttaaccaaagcgtatcgtaccaacgatctgtgaaaatgcactggaagcttctggtcccggtttcctttgtggtctatgtgggtcttgtcctcattgtaactccgtatagatggtataggtattttaatcctggaagctgttgccttattaatgattatcttaaaatttcctccattggggcagcgtgggccaaattaaaacaaacaaaaccgcaactcctccacagaaacacaaacacagttattccatgaagtttagtatttggttgacatagtgctcttcaaattcatcccattaccctaaaagtaataactttgatgcttgctttaactttagtcccatctctgccactttgatgctatttgggttatgatggggcaagatggcagaggtattgggtttttttgtttttttccattcctctctacttctgtttcctagctttttctttctggagtttaagtacagtgatggttggcttgagtacctttttaaatctagcccagtataaacattagcctgcttaatatttagacatttataggtagaattctgagcactcaactcatgtttggcattttaaagtaaaaacaagtgtgacttcgaggaccaaagaaattgtcagctatacatttatctttatgaactcatttatattcctttttaatgactcgttgttctaacatttcctagaagtgttcttataaaggtctaatgtatccacaggctgttgtcttattagtaaatgcaaagtaatgactttgtctgttttactctagtctttagtacttcaaaattaccttttcatatccatgatcttgagtccatttgggggatttttaagaatttgatgtatttcaatacactgttcaaaattaaattgtttaattttatgtatgagtatgtatgttcctgaagttggtcctatttaaattattaaactattgtaactttaaaaaaaaaaaaaaaaaaaaa

SEQ ID NO: 5263 - protein, 250 aa, Homo sapien
MEKGPVRAPAEKPRGARCSNGFPERDPPRPGPSRPAEKPPRPEAKSAQPADGWKGERPRSEEDNELNLPNLAAAYSSILSSLGENPQRQGLLKTPWRAASAMQFFTKGYQETISDVLNDAIFDEDHDEMVIVKDIDMFSMCEHHLVPFVGKVHIGYLPNKQVLGLSKLARIVEIYSRRLQVQERLTKQIAVAITEALRPAGVGVVVEATHMCMVMRGVQKMNSKTVTSTMLGVFREDPKTREEFLTLIRS

SEQ ID NO: 5264 - DNA, 1350 bp, Homo sapien; identical to SEQ ID NO: 2900

SEQ ID NO: 5265 - protein, 429 aa, Homo sapien; identical to SEQ ID NO: 2901

SEQ ID NO: 5266 - DNA, 2075 bp, Homo sapien
gccataaaggccgccgcgcgcccacgcgcctcgcttgctgcgcgctgccggcgctccttcctcctcggctcgcgtctcactcagtgtaccttctagtcccgccatggccgctctcacccgggacccccagttccagaagctgcagcaatggtaccgcgagcaccgctccgagctgaacctgcgccgcctcttcgatgccaacaaggaccgcttcaaccacttcagcttgaccctcaacaccaaccatgggcatatcctggtggattactccaagaacctggtgacggaggacgtgatgcggatgctggtggacttggccaagtccaggggcgtggaggccgcccgggagcggatgttcaatggtgagaagatcaactacaccgagggtcgagccgtgctgcacgtggctctgcggaaccggtcaaacacacccatcctggtagacggcaaggatgtgatgccagaggtcaacaaggttctggacaagatgaagtctttctgccagcgtgtccggagcggtgactggaaggggtacacaggcaagaccatcacggacgtcatcaacattggcattggcggctccgacctgggacccctcatggtgactgaagcccttaagccatactcttcaggaggtccccgcgtctggtatgtctccaacattgatggaactcacattgccaaaaccctggcccagctgaaccccgagtcctccctgttcatcattgcctccaagacctttactacccaggagaccatcacgaatgcagagacggcgaaggagtggtttctccaggcggccaaggatccttctgcagtggcgaagcactttgttgccctgtctactaacacaaccaaagtgaaggagtttggaattgaccctcaaaacatgttcgagttctgggattgggtgggaggacgctactcgctgtggtcggccatcggactctccattgccctgcacgtgggttttgacaacttcgagcagctgctctcgggggctcactggatggaccagcacttccgcacgacgcccctggagaagaacgcccccgtcttgctggccctgctgggtatctggtacatcaactgctttgggtgtgagacacacgccatgctgccctatgaccagtacctgcaccgctttgctgcgtacttccagcagggcgacatggagtccaatgggaaatacatcaccaaatctggaacccgtgtggaccaccagacaggccccattgtgtggggggagccagggaccaatggccagcatgctttttaccagctcatccaccaaggcaccaagatgataccctgtgacttcctcatcccggtccagacccagcaccccatacggaagggtctgcatcacaagatcctcctggccaacttcttggcccagacagaggccctgatgaggggaaaatcgacggaggaggcccgaaaggagctccaggctgcgggcaagagtccagaggaccttgagaggctgctgccacataaggtctttgaaggaaatcgcccaaccaactctattgtgttcaccaagctcacaccattcatgcttggagccttggtcgccatgtatgagcacaagatcttcgttcagggcatcatctgggacatcaacagctttgaccagtggggagtggagctgggaaagcagctggctaagaaaatagagcctgagcttgatggcagtgctcaagtgacctctcacgacgcttctaccaatgggctcatcaacttcatcaagcagcagcgcgaggccagagtccaataaactcgtgctcatctgcagcctcctctgtgactcccctttctcttctcgtccctcctccccggagccggcactgcatgttcctggacaccacccagagcaccctctggttgtgggcttggaccacgagcccttagcagggaaggctggtctcccccagcctaacccccagcccctccatgtctatgctccctctgtgttagaattggctgaagtgtttttgtgcagctgacttttctgacccatgttcacgttgttcacatcccatgtagaaaaataaagatgccacggaggaggt

SEQ ID NO: 5267 - protein, 558 aa, Homo sapien
MAALTRDPQFQKLQQWYREHRSELNLRRLFDANKDRFNHFSLTLNTNHGHILVDYSKNLVTEDVMRMLVDLAKSRGVEAARERMFNGEKINYTEGRAVLHVALRNRSNTPILVDGKDVMPEVNKVLDKMKSFCQRVRSGDWKGYTGKTITDVINIGIGGSDLGPLMVTEALKPYSSGGPRVWYVSNIDGTHIAKTLAQLNPESSLFIIASKTFTTQETITNAETAKEWFLQAAKDPSAVAKHFVALSTNTTKVKEFGIDPQNMFEFWDWVGGRYSLWSAIGLSIALHVGFDNFEQLLSGAHWMDQHFRTTPLEKNAPVLLALLGIWYINCFGCETHAMLPYDQYLHRFAAYFQQGDMESNGKYITKSGTRVDHQTGPIVWGEPGTNGQHAFYQLIHQGTKMIPCDFLIPVQTQHPIRKGLHHKILLANFLAQTEALMRGKSTEEARKELQAAGKSPEDLERLLPHKVFEGNRPTNSIVFTKLTPFMLGALVAMYEHKIFVQGIIWDINSFDQWGVELGKQLAKKIEPELDGSAQVTSHDASTNGLINFIKQQREARVQ

SEQ ID NO: 5268 - DNA, 1451 bp, Homo sapien
gaagagcaagcgccatgttgaagccatcattaccattcacatccctcttattcctgcagctgcccctgctgggagtggggctgaacacgacaattctgacgcccaatgggaatgaagacaccacagctgatttcttcctgaccactatgcccactgactccctcagtgtttccactctgcccctcccagaggttcagtgttttgtgttcaatgtcgagtacatgaattgcacttggaacagcagctctgagccccagcctaccaacctcactctgcattattggtacaagaactcggataatgataaagtccagaagtgcagccactatctattctctgaagaaatcacttctggctgtcagttgcaaaaaaaggagatccacctctaccaaacatttgttgttcagctccaggacccacgggaacccaggagacaggccacacagatgctaaaactgcagaatctggtgatcccctgggctccagagaacctaacacttcacaaactgagtgaatcccagctagaactgaactggaacaacagattcttgaaccactgtttggagcacttggtgcagtaccggactgactgggaccacagctggactgaacaatcagtggattatagacataagttctccttgcctagtgtggatgggcagaaacgctacacgtttcgtgttcggagccgctttaacccactctgtggaagtgctcagcattggagtgaatggagccacccaatccactgggggagcaatacttcaaaagagaatcctttcctgtttgcattggaagccgtggttatctctgttggctccatgggattgattatcagccttctctgtgtgtatttctggctggaacggacgatgccccgaattcccaccctgaagaacctagaggatcttgttactgaataccacgggaacttttcggcctggagtggtgtgtctaagggactggctgagagtctgcagccagactacagtgaacgactctgcctcgtcagtgagattcccccaaaaggaggggcccttggggaggggcctggggcctccccatgcaaccagcatagcccctactgggcccccccatgttacaccctaaagcctgaaacctgaaccccaatcctctgacagaagaaccccagggtcctgtagccctaagtggtactaactttccttcattcaacccacctgcgtctcatactcacctcaccccactgtggctgatttggaattttgtgcccccatgtaagcaccccttcatttggcattccccacttgagaattacccttttgccccgaacatgtttttcttctccctcagtctggcccttccttttcgcaggattcttcctccctccctctttccctcccttcctctttccatctaccctccgattgttcctgaaccgatgagaaataaagtttctgttgataatcatc

SEQ ID NO: 5269 - protein, 369 aa, Homo sapien
MLKPSLPFTSLLFLQLPLLGVGLNTTILTPNGNEDTTADFFLTTMPTDSLSVSTLPLPEVQCFVFNVEYMNCTWNSSSEPQPTNLTLHYWYKNSDNDKVQKCSHYLFSEEITSGCQLQKKEIHLYQTFVVQLQDPREPRRQATQMLKLQNLVIPWAPENLTLHKLSESQLELNWNNRFLNHCLEHLVQYRTDWDHSWTEQSVDYRHKFSLPSVDGQKRYTFRVRSRFNPLCGSAQHWSEWSHPIHWGSNTSKENPFLFALEAVVISVGSMGLIISLLCVYFWLERTMPRIPTLKNLEDLVTEYHGNFSAWSGVSKGLAESLQPDYSERLCLVSEIPPKGGALGEGPGASPCNQHSPYWAPPCYTLKPET

SEQ ID NO: 5270 - DNA, 5611 bp, Homo sapien; identical to SEQ ID NO: 421

SEQ ID NO: 5271 - protein, 1073 aa, Homo sapien; identical to SEQ ID NO: 422

SEQ ID NO: 5272 - DNA, 2493 bp, Homo sapien; identical to SEQ ID NO: 461

SEQ ID NO: 5273 - protein, 399 aa, Homo sapien; identical to SEQ ID NO: 462

SEQ ID NO: 5274 - DNA, 1487 bp, Homo sapien; identical to SEQ ID NO: 2855

SEQ ID NO: 5275 - protein, 148 aa, Homo sapien; identical to SEQ ID NO: 2856

SEQ ID NO: 5276 - DNA, 732 bp, Homo sapien; identical to SEQ ID NO: 391

SEQ ID NO: 5277 - protein, 152 aa, Homo sapien; identical to SEQ ID NO: 392

SEQ ID NO: 5278 - DNA, 1600 bp, Homo sapien
cggagcgaggcagcgcgcccggctcccgcgccatggggcggctggtggctgtgggcttgctggggatcgcgctggcgctcctgggcgagaggcttctggcactcagaaatcgacttaaagcctccagagaagtagaatctgtagaccttccacactgccacctgattaaaggaattgaagctggctctgaagatattgacatacttcccaatggtctggctttttttagtgtgggtctaaaattcccaggactccacagctttgcaccagataagcctggaggaatactaatgatggatctaaaagaagaaaaaccaagggcacgggaattaagaatcagtcgtgggtttgatttggcctcattcaatccacatggcatcagcactttcatagacaacgatgacacagtttatctctttgttgtaaaccacccagaattcaagaatacagtggaaatttttaaatttgaagaagcagaaaattctctgttgcatctgaaaacagtcaaacatgagcttcttccaagtgtgaatgacatcacagctgttggaccggcacatttctatgccacaaatgaccactacttctctgatcctttcttaaagtatttagaaacatacttgaacttacactgggcaaatgttgtttactacagtccaaatgaagttaaagtggtagcagaaggatttgattcagcaaatgggatcaatatttcacctgatgataagtatatctatgttgctgacatattggctcatgaaattcatgttttggaaaaacacactaatatgaatttaactcagttgaaggtacttgagctggatacactggtggataatttatctattgatccttcctcgggggacatctgggtagtctgtcatcctaatggccagaagctcttcgtgtatgacccgaacaatcctccctcgtcagaggttctccgcatccagaacattctatctgagaagcctacagtgactacagtttatgccaacaatgggtctgttctccaaggaagttctgtagcctcagtgtatgatgggaagctgctcataggcactttataccacagagccttgtattgtgaactctaaattgtacttttggcatgaaagtgcgataacttaacaattaattttctatgaaattgctaattctgagggaatttaaccagcaacattgacccagaaatgtatggcatgtgtagttaattttattccagtaaggaacggcccttttagttcttagagcacttttaacaaaaaaggaaaatgaacaggttctttaaaatgccaagcaagggacagaaaagaaagctgctttcgaataaagtgaatacattttgcacaaagtaagcctcacctttgccttccaactgccagaacatggattccactgaaatagagtgaattatatttccttaaaatgtgagtgacctcacttctggcactgtgactactatggctgtttagaactactgataataacgtattttgatgttttgtacttacatctttgtttaccattaaaaagttggagttatattaaagactaactaaaatcccaaaaaaaaaaaaaaaaaaaaaaaaaaaaaaaa

SEQ ID NO: 5279 - protein, 354 aa, Homo sapien
MGRLVAVGLLGIALALLGERLLALRNRLKASREVESVDLPHCHLIKGIEAGSEDIDILPNGLAFFSVGLKFPGLHSFAPDKPGGILMMDLKEEKPRARELRISRGFDLASFNPHGISTFIDNDDTVYLFVVNHPEFKNTVEIFKFEEAENSLLHLKTVKHELLPSVNDITAVGPAHFYATNDHYFSDPFLKYLETYLNLHWANVVYYSPNEVKVVAEGFDSANGINISPDDKYIYVADILAHEIHVLEKHTNMNLTQLKVLELDTLVDNLSIDPSSGDIWVVCHPNGQKLFVYDPNNPPSSEVLRIQNILSEKPTVTTVYANNGSVLQGSSVASVYDGKLLIGTLYHRALYCEL

SEQ ID NO: 5280 - DNA, 2279 bp, Homo sapien
ggcacgagcgaagatggcgtcgcccggctgcctgtggctcttggctgtggctctcctgccatggacctgcgcttctcgggcgctgcagcatctggacccgccggcgccgctgccgttggtgatctggcatgggatgggagacagctgttgcaatcccttaagcatgggtgctattaaaaaaatggtggagaagaaaatacctggaatttacgtcttatctttagagattgggaagaccctgatggaggacgtggagaacagcttcttcttgaatgtcaattcccaagtaacaacagtgtgtcaggcacttgctaaggatcctaaattgcagcaaggctacaatgctatgggattctcccagggaggccaatttctgagggcagtggctcagagatgcccttcacctcccatgatcaatctgatctcggttgggggacaacatcaaggtgtttttggactccctcgatgcccaggagagagctctcacatctgtgacttcatccgaaaaacactgaatgctggggcgtactccaaagttgttcaggaacgcctcgtgcaagccgaatactggcatgaccccataaaggaggatgtgtatcgcaaccacagcatcttcttggcagatataaatcaggagcggggtatcaatgagtcctacaagaaaaacctgatggccctgaagaagtttgtgatggtgaaattcctcaatgattccattgtggaccctgtagattcggagtggtttggattttacagaagtggccaagccaaggaaaccattcccttacaggagacctccctgtacacacaggaccgcctggggctaaaggaaatggacaatgcaggacagctagtgtttctggctacagaaggggaccatcttcagttgtctgaagaatggttttatgcccacatcataccattccttggatgaaacccgtatagttcacaatagagctcagggagcccctaactcttccaaaccacatgggagacagtttccttcatgcccaagcctgagctcagatccagcttgcaactaatccttctatcatctaacatgcactacttggaaagatctaagatctgaatcttatcctttgccatcttctgttaccatatggtgttgaatgcaagtttaattaccatggagattgttttacaaacttttgatgtggtcaagttcagttttagaaaagggagtctgttccagatcagggccagaactgtgcccaggcccaaaggagacaactaactaaagtagtgagatagattctaagggcaaacatttttccaagtcttgccatatttcaagcaaagaggtgcccaggcctgaggtactcacataaatgctttgttttgctggtgatttaaccagtgcttggaaaaatcttgcttggctatttctgcatcatttcttaaggctgccttcctctctgagtacgttgccctctgtgctatcaatcatcttatcatcaattattagacaaatcccactggcctacagtcttgcttctgcagcacccactttgtctcctcaggtagtgatgaattagttgctgtcacaaaaggagggaagtagcacccaaattaaattgcttaagagaggaaatgtacatcttgtataacttagggagcgaagaaaatgtaggcgcgaaagtgaaaagtgaggcagctagttcttcctattccattctcgaccaacctgccctttcttaatatgactagtggtcttgatgctagagtcaacttactctgttgctggctttagcagagaataggaggaaccatatgaaaaagatcaggctttctgacttccatccccaaaacacatttaccagcatactccaaactgtttctgatgtgttccatgagaaaaggattgtttgctcaaaaagcttggaaaatactacacactccctttctccttctggagatcaacccacattagagtgtctaaggactcctgagaattcctgttacagtaaacaaaactaacgtaatctaccatttcctacactatttgagcatggaaatcatagtccccactctatgaaaacttaacgctttttggaagacatttctgtagcatgtcagtttggagaaatgatgagctacgccttgatgaaagaaccgtgttggtgctgctaagtttagccattatggtttttcctttctctctcttaagccttattcttcaactaaaagatgaggattaagagcaagaagttgggggggatgtgaaaataattttatgaggttgtctaaaatctcgtgcc

SEQ ID NO: 5281 - protein, 306 aa, Homo sapien
MASPGCLWLLAVALLPWTCASRALQHLDPPAPLPLVIWHGMGDSCCNPLSMGAIKKMVEKKIPGIYVLSLEIGKTLMEDVENSFFLNVNSQVTTVCQALAKDPKLQQGYNAMGFSQGGQFLRAVAQRCPSPPMINLISVGGQHQGVFGLPRCPGESSHICDFIRKTLNAGAYSKVVQERLVQAEYWHDPIKEDVYRNHSIFLADINQERGINESYKKNLMALKKFVMVKFLNDSIVDPVDSEWFGFYRSGQAKETIPLQETSLYTQDRLGLKEMDNAGQLVFLATEGDHLQLSEEWFYAHIIPFLG

SEQ ID NO: 5282 - DNA, 4740 bp, Homo sapien; identical to SEQ ID NO: 809

SEQ ID NO: 5283 - protein, 928 aa, Homo sapien; identical to SEQ ID NO: 810

SEQ ID NO: 5284 - DNA, 7947 bp, Homo sapien
ggatccacgcttagtgggaaactggagggatcaatggacagagagaagtcagattaataggagtgaggaaaaacaatggcttgaaaaaacagaaggttatagtctaagaaagcattctataattataatttcaaaggtagagcagttttgagagatagcaagcccaatgcagccatgggactggtttgcttaagtgaagtgaaggtaatgctcactgggtttaatgagatgaagaaatggaaggttagggtgttgaatgggtcttttacctagatattttgatcatctaggtcaaatgatcgcaggagttgggatggacagaaaggtgaagtgccataatcttcagtgtgggaatataatctataggttaatggaagccagtggcctgtaggacaacagcaggagtagagggatctatctaaaaagtattgaggtcagaacaagggatttcacatgagtattggattaatggttttggaagttaaaatgacactgctgacaccatcttccatatggatttttggggggaaaaaaaggaagactggaagggaattgaatcctcagggttttaactctcattgaaaatcctcttgtaatgaccccagttggaagtagtaaactcagacctccttgtgggctttgagttaccattagaagaagcaaaggtccgtttccattttatccacctgagcccactaaacaagatgcaagattcctccatggcccttagaacaaagttgatttccttgaaaaccttgggaacccataataaacaggaccccagctgattgtagatctcctgggaagctacttaaaactggaaactgatttgaataaaaggatcctggtcttgcaaaagctttactctgttcataaatgtagtcgtaaaatgaagacaaaattgataatatggggacataaaggataaaagaggaaaaaaattttttcactgcaatctttcgaggcagatcacttttatataagtctccatattgtaaatgcagaaacctaggctctgagaggttattttgctgatgtcatacagctaggaagaaccccagtctgtgggtctctacagcccactcacttgtggtgattcccaggggaccaggctcaggacgcaggtggggagccctgggcttactcagtgcttgactggccagaggggagaatccgggtggcggccccacccttgcctagcatttgggaccacccatgcaagggaggagccagtaccgtcactagttactaggcagaggggtagtggtggtggaatatagagctcatgtgatccgtcacatgacagcagatccgcggaagggcagaatgggactccaagcctggtgagaaattgagagggctcgggagaaagggatcacgttggagggagcacacattgggagggtgggaacacaaggacaacgtagctcccactgaaacccacctgctgcccctacagcctcctagggctctttgccctcatcctctctggcaaatgcagttacagcccggagcccgaccagcggaggacgtgagttgacttagcacagactgcccccttccccataccctgttctgcctcccactgtcctggtcctagcttctctcacccccgtgccagctcctagtacgcactccatagcttcatctctatgttcctagcctcagtccccttcattcacctcatgtgatctgtatctgctcctaggatcctccccaaggtctcagctcctaatctggaaccttccatgaccaatattttccatctccaccctaaccaaagccatgtccctgacccctgaccctacaggctgcccccaggctgggtgtccctgggccgtgcggaccctgaggaagagctgagtctcacctttgccctgagacagcagaatgtggaaagactctcggagctggtgcaggctgtgtcggatcccagctctcctcaatacggtgccttttgggactgaggacaggatgtgggatgcggtggagggacacagggctgggttgggcatggaatggcgatcatgtcagagcctgccaagacacttgtgttcctcaggctagaaacctaaaaggggatgtggttcagtatacaggctttatgatcaaatacgaactcaaattctgactctgctacttactagctaccaggcatctagtacaacttacgttctttcccctaccctcaaatccattctaatttcctcttttgttcacatactaaggctgccagttctaactcccaaagagcctttggattaatctccttcttgccgtcttttgttacgaccaactccgttatttattcccactcctggactactgcccagctccccagctgatctgcagtctcctccctccaccccacccctcactgtactcccccactctgcttcaaaacagtctctccaacagtcaaaatggattggtctctctgtactcctacagcaggggagtgtgtgcttgtgaactgcagaggctggggacggggcagtgtgacatagtgtgcatggcaggaaacagtgactcaccattcgtgttaagcttaaaatcaaaaagtatgcaaatttgagtaaactgaataactggtgccgaaagatttgaaaacatttaccggacataagcttaaaattaaaatggaaaatttatatgtattaactcattcattttcatgatcatggcaatacatgctgtggtgcgacatttgcaacttactggcctttagggtaaatccatattattggccatggcatttcaagtctctccagccttttcttctctgcttcccaagtacacctacacctgcacacatagccctcctttaccctgttccaggctttgggaagtcctgatgtctcatagttgaggtccaaaagggggagtttgggaaagcaatgaatgagggcaagtgcctcttctgaatccctgcaggaaaatacctgaccctagagaatgtggctgatctggtgaggccatccccactgaccctccacacggtgcaaaaatggctcttggcagccggagcccagaagtgccattctgtgatcacacaggactttctgacttgctggctgagcatccggtgagaggaaatgattgctccatggagggcaccagtcatcccatcagtgagatggatgggagggagttgagagcttgctggggcttgtgggtgggagctaatgcatggggagacagtgactgactgcccagggatgctcagaggtagcttcttctgttccgttttgagctttctgacctctgttctctgacctccagacaagcagagctgctgctccctggggctgagtttcatcactatgtgggaggacctacggaaacccatgttgtaaggtccccacatccctaccagcttccacaggccttggccccccatgtggactttggtaacacctatggggtgaatgggggatggggcacacagatccaggggctgaggaagtttagatgccattggggactgggggtggggtggttgtaaggtgggcattacagtctataagatctcctcaagcctgacttctccctacagtggggggactgcaccgttttcccccaacatcatccctgaggcaacgtcctgagccgcaggtgacagggactgtaggcctgcatctgggggtaaccccctctgtgatccgtaagcgatacaacttgacctcacaagacgtgggctctggcaccagcaataacagccaagcctgtgcccaggtgagccaagcaaagagccccagggtcctcatagcctccccacagtgtcctcaattccttaccaccctgggactcaccctcggacccacgatctctgctctgactccctccatagttcctggagcagtatttccatgactcagacctggctcagttcatgcgcctcttcggtggcaactttgcacatcaggcatcagtagcccgtgtggttggacaacagggccggggccgggccgggattgaggccagtctagatgtgcagtacctgatgagtgctggtgccaacatctccacctgggtctacagtagccctggtactaccaagaggactggacagtggggaagggggtgggagatgggtgttgatccctgctccctcaagggaatgctataagctggagagagatcctgacaacccccagtgactatctttgtgcccatccctcaaaaaaaaaaaaaaaaaaatccaggccggcatgagggacaggagcccttcctgcagtggctcatgctgctcagtaatgagtcagccctgccacatgtgcatactgtgagctatggagatgatgaggactccctcagcagcgcctacatccagcgggtcaacactgagctcatgaaggctgccgctcggggtctcaccctgctcttcgcctcaggtgacctcctaccctaaacttagacaacgcttacacctctgcacgcctgggtgctttgactccacagtgatccctgagcctggtctctgactcataatctgacactcagaccttccagtagggaccactgacctgacctctacactctgacctcctacagtaacaaatttcccctctgacatccgaacccacatactaagccctaaccaattaatatgaatgctacacttggtctctctcaggtgacagtggggccgggtgttggtctgtctctggaagacaccagttccgccctaccttccctgcctccaggtaagtactctagcctaccactcaggtataaccaccacctttcacttgtgatctcatgatgtagaacctttgtcttgaccccaccatgtgctcctgtggttcagccttaagctttgcctgccctggttgctgtactcctgtctcttcttcctgcaggtcccaggccccaaatctcttgtgtgggatacagggtcatagctgttccttttcgtcagttcccaggcatttgagtggaagatttggtgggtgttctgtacagaaaagtgtgcacagtcacctcaggccatgccttgaaggctcaaaatctcttagtcaatcccatatacatgcttccccacagagtctagttcctccagcaagacctgggctatactcacccctccccacatatcttggaggtccccttgggtcccctactatccaaatgctgtcttctcccctcagcccctatgtcaccacagtgggaggcacatccttccaggaacctttcctcatcacaaatgaaattgttgactatatcagtggtggtggcttcagcaatgtgttcccacggccttcataccaggtacgtgtgtttgtgtggatggatgcagggtaagagtgaggatgggggatcctcagttcagctgactgctgggcaggccacatgccaatactcactcaaaaatgcctttcaggaggaagctgtaacgaagttcctgagctctagcccccacctgccaccatccagttacttcaatgccagtggccgtgcctacccagatgtggctgcactttctgatggctactgggtggtcagcaacagagtgcccattccatgggtgtccggaacctcggtgagaatcagcccatctccaaactctcactcaggaactacccttaccccctaacaccttgaacaccttgcacctagaacccctgactccttagagatgtctgatactttaaagcatcactcccaaaaagtccaatcactcagaacccctgaccttacttgcaccttcactcttgtaggcctctactccagtgtttggggggatcctatccttgatcaatgagcacaggatccttagtggccgcccccctcttggctttctcaacccaaggctctaccagcagcatggggcaggactctttgatgtaagtatggaagggaagggtgtggacgttttcaaacaactatggggagtgctaagggggacttgggggcagttagggtggtgtggaatagcctttgaaatgtgagtacagggtgaggagatatactctttaagtactggtactagtaggcccagatctgatgccagcctcctccctaggtaacccgtggctgccatgagtcctgtctggatgaagaggtagagggccagggtttctgctctggtcctggctgggatcctgtaacaggctggggaacacccaacttcccagctttgctgaagactctactcaacccctgaccctttcctatcaggagagatggcttgtcccctgccctgaagctggcagttcagtcccttattctgccctgttggaagccctgctgaaccctcaactattgactgctgcagacagcttatctccctaaccctgaaatgcggtgagcttgacttgactcccaaccctaccatgctccatcatactcaggtctccctactcctgccttagattcctcaataagatgctgtaactagcattttttgaatgcctctccctccgcatctcatctttctcttttcaatcaggcttttccaaagggttgtatacagactctgtgcactatttcacttgatattcattccccaattcactgcaaggagacctctactgtcaccgtttactctttcctaccctgacatccagaaacaatggcctccagtgcatacttctcaatctttgctttatggcctttccatcatagttgcccactccctctccttacttagcttccaggtcttaacttctctgactactcttgtcttcctctctcatcaatttctgcttcttcatggaatgctgaccttcattgctccatttgtagatttttgctcttctcagtttactcattgtcccctggaacaaatcactgacatctacaaccattaccatctcactaaataagactttctatccaataatgattgatacctcaaatgtaagatgcgtgatactcaacatttcatcgtccaccttcccaaccccaaacaattccatctcgtttcttcttggtaaatgatgctatgctttttccaaccaagccagaaacctgtgtcatcttttcaccccaccttcaatcaacaagtcctcaatcaacaagtcctactgactgcacatcttaaatatatctttatcagtccacaagtccttccaattatatttcccaagtatatctagaacttatccacttatatccccactgctactaccttagtttagggctatattctcttgaaaaaaagtgtccttacttcctgccaatccccaagtcatcttccagagtaaaatgcaaatcccatcaggccacttggatgaaaacccttcaaggattactggatagaattcaggctttcccctccagcccccaatcatagctcacaaaccttccttgctatttgttcttaagtaaaaaatcatttttcctcctccctccccaaaccccaaggaactctcactcttgctcaagctgttccgtccccttaccacccctgatacaactgccaggttaatttccagaattcttgcaagactcagttcagaagtcaccttctttcgtgaatgttttgattccctgaggctactttattttggtatggctgaaaaatcctagattttctaaacaaaacctgtttgaatcttggttctgatatggactaggagagagactgggtcaagtaagcttatctccctgaggctgtttcctcgtctgttaagtgtgaatatcaatacctgcctttcataatcaccagggaataaagtggaataatgttgataacagtgcttggcacctggaagtaggtggcagatgttaacgcccttcctcccttgcactgcgccccctgtgcctacctctagcattgtaacgaccacatagtattgaaatggccagtttacttgtctgccttcctttccaagaccgttggtgcctagaggactagaatcgtgtcctatttaactttgtgttcccaggtcctagctcaggagttggcaaataagaattaaatgtctgctacaccgaaacaaa

SEQ ID NO: 5285 - DNA, 2984 bp, Homo sapien
taactgagcgaggagcaattgattaatagctcggcgaggggactcactgactgttataataacactacaccagcaactcctggcttcccagcagccggaacacagacaggagagagtcagtggcaaatagacatttttcttatttcttaaaaaacagcaacttgtttgctacttttatttctgttgatttttttttcttggtgtgtgtggtggttgtttttaagtgtggagggcaaaaggagataccatcccaggctcagtccaacccctctccaaaacggcttttctgacactccaggtagcgagggagttgggtctccaggttgtgcgaggagcaaatgatgaccgccaaggccgtagacaaaatcccagtaactctcagtggttttgtgcaccagctgtctgacaacatctacccggtggaggacctcgccgccacgtcggtgaccatctttcccaatgccgaactgggaggcccctttgaccagatgaacggagtggccggagatggcatgatcaacattgacatgactggagagaagaggtcgttggatctcccatatcccagcagctttgctcccgtctctgcacctagaaaccagaccttcacttacatgggcaagttctccattgaccctcagtaccctggtgccagctgctacccagaaggcataatcaatattgtgagtgcaggcatcttgcaaggggtcacttccccagcttcaaccacagcctcatccagcgtcacctctgcctcccccaacccactggccacaggacccctgggtgtgtgcaccatgtcccagacccagcctgacctggaccacctgtactctccgccaccgcctcctcctccttattctggctgtgcaggagacctctaccaggacccttctgcgttcctgtcagcagccaccacctccacctcttcctctctggcctacccaccacctccttcctatccatcccccaagccagccacggacccaggtctcttcccaatgatcccagactatcctggattctttccatctcagtgccagagagacctacatggtacagctggcccagaccgtaagccctttccctgcccactggacaccctgcgggtgccccctccactcactccactctctacaatccgtaactttaccctggggggccccagtgctggggtgaccggaccaggggccagtggaggcagcgagggaccccggctgcctggtagcagctcagcagcagcagcagccgccgccgccgccgcctataacccacaccacctgccactgcggcccattctgaggcctcgcaagtaccccaacagacccagcaagacgccggtgcacgagaggccctacccgtgcccagcagaaggctgcgaccggcggttctcccgctctgacgagctgacacggcacatccgaatccacactgggcataagcccttccagtgtcggatctgcatgcgcaacttcagccgcagtgaccacctcaccacccatatccgcacccacaccggtgagaagcccttcgcctgtgactactgtggccgaaagtttgcccggagtgatgagaggaagcgccacaccaagatccacctgagacagaaagagcggaaaagcagtgccccctctgcatcggtgccagccccctctacagcctcctgctctgggggcgtgcagcctgggggtaccctgtgcagcagtaacagcagcagtcttggcggagggccgctcgccccttgctcctctcggacccggacaccttgagatgagactcaggctgatacaccagctcccaaaggtcccggaggccctttgtccactggagctgcacaacaaacactaccaccctttcctgtccctctctccctttgttgggcaaagggctttggtggagctagcactgccccctttccacctagaagcaggttcttcctaaaacttagcccattctagtctctcttaggtgagttgactatcaacccaaggcaaaggggaggctcagaaggaggtggtgtggggatcccctggccaagagggctgaggtctgaccctgctttaaagggttgtttgactaggttttgctaccccacttccccttattttgacccatcacaggtttttgaccctggatgtcagagttgatctaagacgttttctacaataggttgggagatgctgatcccttcaagtggggacagcaaaaagacaagcaaaactgatgtgcactttatggcttgggactgatttgggggacattgtacagtgagtgaagtatagcctttatgccacactctgtggccctaaaatggtgaatcagagcatatctagttgtctcaacccttgaagcaatatgtattatatactcagagaacagaagtgcaatgtgatgggaggaacgtagcaatatctgctccttttcgagttgtttgagaaatgtaggctattttttcagtgtatatccactcagattttgtgtatttttgatgtacccacactgttctctaaattctgaatctttgggaaaaaatgtaaagcatttatgatctcagaggttaacttatttaagggggatgtacatattctctgaaactaggatgcatgcaattgtgttggaagtgtccttggtcgccttgtgtgatgtagacaaatgttacaaggctgcatgtaaatgggttgccttattatggagaaaaaaatcactccctgagtttagtatggctgtatatttatgcctattaatatttggaattttttttagaaagtatatttttgtatgctttgttttgtgacttaaaagtgttacctttgtagtcaaatttcagataagaatgtacataatgttaccggagctgatttgtttggtcattagctcttaatagttgtgaaaaaataaatctattctaacgcaaaaccactaactgaagttcagatataatggatggtttgtgactatagtgtaaataaatacttttcaacaat

SEQ ID NO: 5286 - protein, 476 aa, Homo sapien
MMTAKAVDKIPVTLSGFVHQLSDNIYPVEDLAATSVTIFPNAELGGPFDQMNGVAGDGMINIDMTGEKRSLDLPYPSSFAPVSAPRNQTFTYMGKFSIDPQYPGASCYPEGIINIVSAGILQGVTSPASTTASSSVTSASPNPLATGPLGVCTMSQTQPDLDHLYSPPPPPPPYSGCAGDLYQDPSAFLSAATTSTSSSLAYPPPPSYPSPKPATDPGLFPMIPDYPGFFPSQCQRDLHGTAGPDRKPFPCPLDTLRVPPPLTPLSTIRNFTLGGPSAGVTGPGASGGSEGPRLPGSSSAAAAAAAAAAYNPHHLPLRPILRPRKYPNRPSKTPVHERPYPCPAEGCDRRFSRSDELTRHIRIHTGHKPFQCRICMRNFSRSDHLTTHIRTHTGEKPFACDYCGRKFARSDERKRHTKIHLRQKERKSSAPSASVPAPSTASCSGGVQPGGTLCSSNSSSLGGGPLAPCSSRTRTP

SEQ ID NO: 5287 - DNA, 3597 bp, Homo sapien; identical to SEQ ID NO: 837

SEQ ID NO: 5288 - protein, 825 aa, Homo sapien; identical to SEQ ID NO: 838

SEQ ID NO: 5289 - DNA, 2557 bp, Homo sapien
gaattccgggagaagtgaccagagcaatttctgcttttcacagggcgggtttctcaacggtgacttgtgggcagtgccttctgctgagcgagtcatggcccgaaggcagaactaactgtgcctgcagtcttcactctcaggatgcagccgaggtgggcccaaggggccacgatgtggcttggagtcctgctgacccttctgctctgttcaagccttgagggtcaagaaaactctttcacaatcaacagtgttgacatgaagagcctgccggactggacggtgcaaaatgggaagaacctgaccctgcagtgcttcgcggatgtcagcaccacctctcacgtcaagcctcagcaccagatgctgttctataaggatgacgtgctgttttacaacatctcctccatgaagagcacagagagttattttattcctgaagtccggatctatgactcagggacatataaatgtactgtgattgtgaacaacaaagagaaaaccactgcagagtaccagctgttggtggaaggagtgcccagtcccagggtgacactggacaagaaagaggccatccaaggtgggatcgtgagggtcaactgttctgtcccagaggaaaaggccccaatacacttcacaattgaaaaacttgaactaaatgaaaaaatggtcaagctgaaaagagagaagaattctcgagaccagaattttgtgatactggaattccccgttgaggaacaggaccgcgttttatccttccgatgtcaagctaggatcatttctgggatccatatgcagacctcagaatctaccaagagtgaactggtcaccgtgacggaatccttctctacacccaagttccacatcagccccaccggaatgatcatggaaggagctcagctccacattaagtgcaccattcaagtgactcacctggcccaggagtttccagaaatcataattcagaaggacaaggcgattgtggcccacaacagacatggcaacaaggctgtgtactcagtcatggccatggtggagcacagtggcaactacacgtgcaaagtggagtccagccgcatatccaaggtcagcagcatcgtggtcaacataacagaactattttccaagcccgaactggaatcttccttcacacatctggaccaaggtgaaagactgaacctgtcctgctccatcccaggagcacctccagccaacttcaccatccagaaggaagatacgattgtgtcacagactcaagatttcaccaagatagcctcaaagtcggacagtgggacgtatatctgcactgcaggtattgacaaagtggtcaagaaaagcaacacagtccagatagtcgtatgtgaaatgctctcccagcccaggatttcttatgatgcccagtttgaggtcataaaaggacagaccatcgaagtccgttgcgaatcgatcagtggaactttgcctatttcttaccaacttttaaaaacaagtaaagttttggagaatagtaccaagaactcaaatgatcctgcggtattcaaagacaaccccactgaagacgtcgaataccagtgtgttgcagataattgccattcccatgccaaaatgttaagtgaggttctgagggtgaaggtgatagccccggtggatgaggtccagatttctatcctgtcaagtaaggtggtggagtctggagaggacattgtgctgcaatgtgctgtgaatgaaggatctggtcccatcacctataagttttacagagaaaaagagggcaaacccttctatcaaatgacctcaaatgccacccaggcattttggaccaagcagaaggctagcaaggaacaggagggagagtattactgcacagccttcaacagagccaaccacgcctccagtgtccccagaagcaaaatactgacagtcagagtcattcttgccccatggaagaaaggacttattgcagtggttatcatcggagtgatcattgctctcttgatcattgcggccaaatgttattttctgaggaaagccaaggccaagcagatgccagtggaaatgtccaggccagcagtaccacttctgaactccaacaacgagaaaatgtcagatcccaatatggaagctaacagtcattacggtcacaatgacgatgtcagaaaccatgcaatgaaaccaataaatgataataaagagcctctgaactcagacgtgcagtacacggaagttcaagtgtcctcagctgagtctcacaaagatctaggaaagaaggacacagagacagtgtacagtgaagtccggaaagctgtccctgatgccgtggaaagcagatactctagaacggaaggctcccttgatggaacttagacagcaaggccagatgcacatccctggaaggacatccatgttccgagaagaacagataatccctgtatttcaagacctctgtgcacttatttatgaacctgccctgctcccacagaacacagcaattcctcaggctaagctgccggttcttaaatccatcctgctaagttaatgttgggtagaaagagatacagagggg

SEQ ID NO: 5290 - protein, 738 aa, Homo sapien
MQPRWAQGATMWLGVLLTLLLCSSLEGQENSFTINSVDMKSLPDWTVQNGKNLTLQCFADVSTTSHVKPQHQMLFYKDDVLFYNISSMKSTESYFIPEVRIYDSGTYKCTVIVNNKEKTTAEYQLLVEGVPSPRVTLDKKEAIQGGIVRVNCSVPEEKAPIHFTIEKLELNEKMVKLKREKNSRDQNFVILEFPVEEQDRVLSFRCQARIISGIHMQTSESTKSELVTVTESFSTPKFHISPTGMIMEGAQLHIKCTIQVTHLAQEFPEIIIQKDKAIVAHNRHGNKAVYSVMAMVEHSGNYTCKVESSRISKVSSIVVNITELFSKPELESSFTHLDQGERLNLSCSIPGAPPANFTIQKEDTIVSQTQDFTKIASKSDSGTYICTAGIDKVVKKSNTVQIVVCEMLSQPRISYDAQFEVIKGQTIEVRCESISGTLPISYQLLKTSKVLENSTKNSNDPAVFKDNPTEDVEYQCVADNCHSHAKMLSEVLRVKVIAPVDEVQISILSSKVVESGEDIVLQCAVNEGSGPITYKFYREKEGKPFYQMTSNATQAFWTKQKASKEQEGEYYCTAFNRANHASSVPRSKILTVRVILAPWKKGLIAVVIIGVIIALLIIAAKCYFLRKAKAKQMPVEMSRPAVPLLNSNNEKMSDPNMEANSHYGHNDDVRNHAMKPINDNKEPLNSDVQYTEVQVSSAESHKDLGKKDTETVYSEVRKAVPDAVESRYSRTEGSLDGT

SEQ ID NO: 5291 - DNA, 15359 bp, Homo sapien; identical to SEQ ID NO: 1367

SEQ ID NO: 5292 - protein, 5038 aa, Homo sapien
MGDAEGEDEVQFLRTDDEVVLQCSATVLKEQLKLCLAAEGFGNRLCFLEPTSNAQNVPPDLAICCFVLEQSLSVRALQEMLANTVEAGVESSQGGGHRTLLYGHAILLRHAHSRMYLSCLTTSRSMTDKLAFDVGLQEDATGEACWWTMHPASKQRSEGEKVRVGDDIILVSVSSERYLHLSTASGELQVDASFMQTLWNMNPICSRCEEGFVTGGHVLRLFHGHMDECLTISPADSDDQRRLVYYEGGAVCTHARSLWRLEPLRISWSGSHLRWGQPLRVRHVTTGQYLALTEDQGLVVVDASKAHTKATSFCFRISKEKLDVAPKRDVEGMGPPEIKYGESLCFVQHVASGLWLTYAAPDPKALRLGVLKKKAMLHQEGHMDDALSLTRCQQEESQAARMIHSTNGLYNQFIKSLDSFSGKPRGSGPPAGTALPIEGVILSLQDLIIYFEPPSEDLQHEEKQSKLRSLRNRQSLFQEEGMLSMVLNCIDRLNVYTTAAHFAEFAGEEAAESWKEIVNLLYELLASLIRGNRSNCALFSTNLDWLVSKLDRLEASSGILEVLYCVLIESPEVLNIIQENHIKSIISLLDKHGRNHKVLDVLCSLCVCNGVAVRSNQDLITENLLPGRELLLQTNLINYVTSIRPNIFVGRAEGTTQYSKWYFEVMVDEVTPFLTAQATHLRVGWALTEGYTPYPGAGEGWGGNGVGDDLYSYGFDGLHLWTGHVARPVTSPGQHLLAPEDVISCCLDLSVPSISFRINGCPVQGVFESFNLDGLFFPVVSFSAGVKVRFLLGGRHGEFKFLPPPGYAPCHEAVLPRERLHLEPIKEYRREGPRGPHLVGPSRCLSHTDFVPCPVDTVQIVLPPHLERIREKLAENIHELWALTRIEQGWTYGPVRDDNKRLHPCLVDFHSLPEPERNYNLQMSGETLKTLLALGCHVGMADEKAEDNLKKTKLPKTYMMSNGYKPAPLDLSHVRLTPAQTTLVDRLAENGHNVWARDRVGQGWSYSAVQDIPARRNPRLVPYRLLDEATKRSNRDSLCQAVRTLLGYGYNIEPPDQEPSQVENQSRCDRVRIFRAEKSYTVQSGRWYFEFEAVTTGEMRVGWARPELRPDVELGADELAYVFNGHRGQRWHLGSEPFGRPWQPGDVVGCMIDLTENTIIFTLNGEVLMSDSGSETAFREIEIGDGFLPVCSLGPGQVGHLNLGQDVSSLRFFAICGLQEGFEPFAINMQRPVTTWFSKGLPQFEPVPLEHPHYEVSRVDGTVDTPPCLRLTHRTWGSQNSLVEMLFLRLSLPVQFHQHFRCTAGATPLAPPGLQPPAEDEARAAEPDPDYENLRRSAGGWSEAENGKEGTAKEGAPGGTPQAGGEAQPARAENEKDATTEKNKKRGFLFKAKKVAMMTQPPATPTLPRLPHDVVPADNRDDPEIILNTTTYYYSVRVFAGQEPSCVWAGWVTPDYHQHDMSFDLSKVRVVTVTMGDEQGNVHSSLKCSNCYMVWGGDFVSPGQQGRISHTDLVIGCLVDLATGLMTFTANGKESNTFFQVEPNTKLFPAVFVLPTHQNVIQFELGKQKNIMPLSAAMFQSERKNPAPQCPPRLEMQMLMPVSWSRMPNHFLQVETRRAGERLGWAVQCQEPLTMMALHIPEENRCMDILELSERLDLQRFHSHTLRLYRAVCALGNNRVAHALCSHVDQAQLLHALEDAHLPGPLRAGYYDLLISIHLESACRSRRSMLSEYIVPLTPETRAITLFPPGRSTENGHPRHGLPGVGVTTSLRPPHHFSPPCFVAALPAAGAAEAPARLSPAIPLEALRDKALRMLGEAVRDGGQHARDPVGASVEFQFVPVLKLVSTLLVMGIFGDEDVKQILKMIEPEVFTEEEEEEDEEEEGEEEDEEEKEEDEEETAQEKEDEEKEEEEAAEGEKEEGLEEGLLQMKLPESVKLQMCHLLEYFCDQELQHRVESLAAFAERYVDKLQANQRSRYGLLIKAFSMTAAETARRTREFRSPPQEQINMLLQFKDGTDEEDCPLPEEIRQDLLDFHQDLLAHCGIQLDGEEEEPEEETTLGSRLMSLLEKVRLVKKKEEKPEEERSAEESKPRSLQELVSHMVVRWAQEDFVQSPELVRAMFSLLHRQYDGLGELLRALPRAYTISPSSVEDTMSLLECLGQIRSLLIVQMGPQEENLMIQSIGNIMNNKVFYQHPNLMRALGMHETVMEVMVNVLGGGESKEIRFPKMVTSCCRFLCYFCRISRQNQRSMFDHLSYLLENSGIGLGMQGSTPLDVAAASVIDNNELALALQEQDLEKVVSYLAGCGLQSCPMLVAKGYPDIGWNPCGGERYLDFLRFAVFVNGESVEENANVVVRLLIRKPECFGPALRGEGGSGLLAAIEEAIRISEDPARDGPGIRRDRRREHFGEEPPEENRVHLGHAIMSFYAALIDLLGRCAPEMHLIQAGKGEALRIRAILRSLVPLEDLVGIISLPLQIPTLGKDGALVQPKMSASFVPDHKASMVLFLDRVYGIENQDFLLHVLDVGFLPDMRAAASLDTATFSTTEMALAVNRYLCLAVLPLITKCAPLFAGTEHRAIMVDSMLHTVYRLSRGRSLTKAQRDVIEDCLMSLCRYIRPSMLQHLLRRLVFDVPILNEFAKMPLKLLTNHYERCWKYYCLPTGWANFGVTSEEELHLTRKLFWGIFDSLAHKKYDPELYRMAMPCLCAIAGALPPDYVDASYSSKAEKKATVDAEGNFDPRPVETLNVIIPEKLDSFINKFAEYTHEKWAFDKIQNNWSYGENIDEELKTHPMLRPYKTFSEKDKEIYRWPIKESLKAMIAWEWTIEKAREGEEEKTEKKKTRKISQSAQTYDPREGYNPQPPDLSAVTLSRELQAMAEQLAENYHNTWGRKKKQELEAKGGGTHPLLVPYDTLTAKEKARDREKAQELLKFLQMNGYAVTRGLKDMELDSSSIEKRFAFGFLQQLLRWMDISQEFIAHLEAVVSSGRVEKSPHEQEIKFFAKILLPLINQYFTNHCLYFLSTPAKVLGSGGHASNKEKEMITSLFCKLAALVRHRVSLFGTDAPAVVNCLHILARSLDARTVMKSGPEIVKAGLRSFFESASEDIEKMVENLRLGKVSQARTQVKGVGQNLTYTTVALLPVLTTLFQHIAQHQFGDDVILDDVQVSCYRTLCSIYSLGTTKNTYVEKLRPALGECLARLAAAMPVAFLEPQLNEYNACSVYTTKSPRERAILGLPNSVEEMCPDIPVLERLMADIGGLAESGARYTEMPHVIEITLPMLCSYLPRWWERGPEAPPSALPAGAPPPCTAVTSDHLNSLLGNILRIIVNNLGIDEASWMKRLAVFAQPIVSRARPELLQSHFIPTIGRLRKRAGKVVSEEEQLRLEAKAEAQEGELLVRDEFSVLCRDLYALYPLLIRYVDNNRAQWLTEPNPSAEELFRMVGEIFIYWSKSHNFKREEQNFVVQNEINNMSFLTADNKSKMAKAGDIQSGGSDQERTKKKRRGDRYSVQTSLIVATLKKMLPIGLNMCAPTDQDLITLAKTRYALKDTDEEVREFLHNNLHLQGKVEGSPSLRWQMALYRGVPGREEDADDPEKIVRRVQEVSAVLYYLDQTEHPYKSKKAVWHKLLSKQRRRAVVACFRMTPLYNLPTHRACNMFLESYKAAWILTEDHSFEDRMIDDLSKAGEQEEEEEEVEEKKPDPLHQLVLHFSRTALTEKSKLDEDYLYMAYADIMAKSCHLEEGGENGEAEEEVEVSFEEKQMEKQRLLYQQARLHTRGAAEMVLQMISACKGETGAMVSSTLKLGISILNGGNAEVQQKMLDYLKDKKEVGFFQSIQALMQTCSVLDLNAFERQNKAEGLGMVNEDGTVINRQNGEKVMADDEFTQDLFRFLQLLCEGHNNDFQNYLRTQTGNTTTINIIICTVDYLLRLQESISDFYWYYSGKDVIEEQGKRNFSKAMSVAKQVFNSLTEYIQGPCTGNQQSLAHSRLWDAVVGFLHVFAHMMMKLAQDSSQIELLKELLDLQKDMVVMLLSLLEGNVVNGMIARQMVDMLVESSSNVEMILKFFDMFLKLKDIVGSEAFQDYVTDPRGLISKKDFQKAMDSQKQFSGPEIQFLLSCSEADENEMINCEEFANRFQEPARDIGFNVAVLLTNLSEHVPHDPRLHNFLELAESILEYFRPYLGRIEIMGASRRIERIYFEISETNRAQWEMPQVKESKRQFIFDVVNEGGEAEKMELFVSFCEDTIFEMQIAAQISEPEGEPETDEDEGAGAAEAGAEGAEEGAAGLEGTAATAAAGATARVVAAAGRALRGLSYRSLRRRVRRLRRLTAREAATAVAALLWAAVTRAGAAGAGAAAGALGLLWGSLFGGGLVEGAKKVTVTELLAGMPDPTSDEVHGEQPAGPGGDADGEGASEGAGDAAEGAGDEEEAVHEAGPGGADGAVAVTDGGPFRPEGAGGLGDMGDTTPAEPPTPEGSPILKRKLGVDGVEEELPPEPEPEPEPELEPEKADAENGEKEEVPEPTPEPPKKQAPPSPPPKKEEAGGEFWGELEVQRVKFLNYLSRNFYTLRFLALFLAFAINFILLFYKVSDSPPGEDDMEGSAAGDVSGAGSGGSSGWGLGAGEEAEGDEDENMVYYFLEESTGYMEPALRCLSLLHTLVAFLCIIGYNCLKVPLVIFKREKELARKLEFDGLYITEQPEDDDVKGQWDRLVLNTPSFPSNYWDKFVKRKVLDKHGDIYGRERIAELLGMDLATLEITAHNERKPNPPPGLLTWLMSIDVKYQIWKFGVIFTDNSFLYLGWYMVMSLLGHYNNFFFAAHLLDIAMGVKTLRTILSSVTHNGKQLVMTVGLLAVVVYLYTVVAFNFFRKFYNKSEDEDEPDMKCDDMMTCYLFHMYVGVRAGGGIGDEIEDPAGDEYELYRVVFDITFFFFVIVILLAIIQGLIIDAFGELRDQQEQVKEDMETKCFICGIGSDYFDTTPHGFETHTLEEHNLANYMFFLMYLINKDETEHTGQESYVWKMYQERCWDFFPAGDCFRKQYEDQLS

SEQ ID NO: 5293 - DNA, 2102 bp, Homo sapien; identical to SEQ ID NO: 496

SEQ ID NO: 5294 - protein, 381 aa, Homo sapien; identical to SEQ ID NO: 497

SEQ ID NO: 5295 - DNA, 3655 bp, Homo sapien; identical to SEQ ID NO: 1571

SEQ ID NO: 5296 - protein, 352 aa, Homo sapien [sequence omitted]

SEQ ID NO: 5297 - DNA, 1666 bp, Homo sapien; identical to SEQ ID NO: 737

SEQ ID NO: 5298 - protein, 99 aa, Homo sapien; identical to SEQ ID NO: 738

SEQ ID NO: 5299 - DNA, 924 bp, Homo sapien; identical to SEQ ID NO: 1699

SEQ ID NO: 5300 - protein, 152 aa, Homo sapien; identical to SEQ ID NO: 1700

SEQ ID NO: 5301 - DNA, 591 bp, Homo sapien; identical to SEQ ID NO: 1733

SEQ ID NO: 5302 - protein, 144 aa, Homo sapien; identical to SEQ ID NO: 1734

SEQ ID NO: 5303 - DNA, 2960 bp, Homo sapien; identical to SEQ ID NO: 562

SEQ ID NO: 5304 - protein, 808 aa, Homo sapien; identical to SEQ ID NO: 563

SEQ ID NO: 5305 - DNA, 1585 bp, Homo sapien
cacaccctgacaagctgccaggcaggttctcttcctctcacatactgacccacggctccaccctctctcccctggaaaggacaccatgagcactgaaagcatgatccgggacgtggagctggccgaggaggcgctccccaagaagacaggggggccccagggctccaggcggtgcttgttcctcagcctcttctccttcctgatcgtggcaggcgccaccacgctcttctgcctgctgcactttggagtgatcggcccccagagggaagagtcccccagggacctctctctaatcagccctctggcccaggcagtcagatcatcttctcgaaccccgagtgacaagcctgtagcccatgttgtagcaaaccctcaagctgaggggcagctccagtggctgaaccgccgggccaatgccctcctggccaatggcgtggagctgagagataaccagctggtggtgccatcagagggcctgtacctcatctactcccaggtcctcttcaagggccaaggctgcccctccacccatgtgctcctcacccacaccatcagccgcatcgccgtctcctaccagaccaaggtcaacctcctctctgccatcaagagcccctgccagagggagaccccagagggggctgaggccaagccctggtatgagcccatctatctgggaggggtcttccagctggagaagggtgaccgactcagcgctgagatcaatcggcccgactatctcgactttgccgagtctgggcaggtctactttgggatcattgccctgtgaggaggacgaacatccaaccttcccaaacgcctcccctgccccaatccctttattaccccctccttcagacaccctcaacctcttctggctcaaaaagagaattgggggcttagggtcggaacccaagcttagaactttaagcaacaagaccaccacttcgaaacctgggattcaggaatgtgtggcctgcacagtgaagtgctggcaaccactaagaattcaaactggggcctccagaactcactggggcctacagctttgatccctgacatctggaatctggagaccagggagcctttggttctggccagaatgctgcaggacttgagaagacctcacctagaaattgacacaagtggaccttaggccttcctctctccagatgtttccagacttccttgagacacggagcccagccctccccatggagccagctccctctatttatgtttgcacttgtgattatttattatttatttattatttatttatttacagatgaatgtatttatttgggagaccggggtatcctgggggacccaatgtaggagctgccttggctcagacatgttttccgtgaaaacggaggctgaacaataggctgttcccatgtagccccctggcctctgtgccttcttttgattatgttttttaaaatattatctgattaagttgtctaaacaatgctgatttggtgaccaactgtcactcattgctgaggcctctgctccccagggagttgtgtctgtaatcggcctactattcagtggcgagaaataaaggttgcttaggaaagaa

SEQ ID NO: 5306 - protein, 233 aa, Homo sapien [sequence omitted]

SEQ ID NO: 5307 - DNA, 1386 bp, Homo sapien; identical to SEQ ID NO: 1565

SEQ ID NO: 5308 - protein, 205 aa, Homo sapien; identical to SEQ ID NO: 1566

SEQ ID NO: 5309 - DNA, 1794 bp, Homo sapien
cccgcgccctccgttcgctccggacaccatggacaagttttggtggcacgcagcctggggactctgcctcgtgccgctgagcctggcgcagatcgatttgaatataacctgccgctttgcaggtgtattccacgtggagaaaaatggtcgctacagcatctctcggacggaggccgctgacctctgcaaggctttcaatagcaccttgcccacaatggcccagatggagaaagctctgagcatcggatttgagacctgcaggtatgggttcatagaagggcatgtggtgattccccggatccaccccaactccatctgtgcagcaaacaacacaggggtgtacatcctcacatacaacacctcccagtatgacacatattgcttcaatgcttcagctccacctgaagaagattgtacatcagtcacagacctgcccaatgcctttgatggaccaattaccataactattgttaaccgtgatggcacccgctatgtccagaaaggagaatacagaacgaatcctgaagacatctaccccagcaaccctactgatgatgacgtgagcagcggctcctccagtgaaaggagcagcacttcaggaggttacatcttttacaccttttctactgtacaccccatcccagacgaagacagtccctggatcaccgacagcacagacagaatccctgctaccagagaccaagacacattccaccccagtggggggtcccataccactcatggatctgaatcagatggacactcacatgggagtcaagaaggtggagcaaacacaacctctggtcctataaggacaccccaaattccagaatggctgatcatcttggcatccctcttggccttggctttgattcttgcagtttgcattgcagtcaacagtcgaagaaggtgtgggcagaagaaaaagctagtgatcaacagtggcaatggagctgtggaggacagaaagccaagtggactcaacggagaggccagcaagtctcaggaaatggtgcatttggtgaacaaggagtcgtcagaaactccagaccagtttatgacagctgatgagacaaggaacctgcagaatgtggacatgaagattggggtgtaacacctacaccattatcttggaaagaaacaaccgttggaaacataaccattacagggagctgggacacttaacagatgcaatgtgctactgattgtttcattgcgaatcttttttagcataaaattttctactctttttgttttttgtgttttgttctttaaagtcaggtccaatttgtaaaaacagcattgctttgtaaattagggcccaattaataatcagcaagaatttgatcgttcagttccacttggaggccttcatcctcgggtgtgctatggatggcttctaacaaaaactacacatatgtattcctgatcgccaacctttcccccaccagctaaggacatttcccagggttaatagggcctggtccctgggaggaaatttgaatgggtccattttgcccttccatagcctaatccctgggcattgctttccactgaggttggggtgtactagttacacatcttcaacagaccccctctagaaatttttcagatgcttctgggagacaccaaagggtgaagctatttatctgtagtaaactatttatctgtgtttttgaaatattaaaccctggatcagtcctttgatcagtataattttttaaagttactttgtcagaggcacaaaagggtttaaactgattcataataaatatctgtacttcttcgatcttc

SEQ ID NO: 5310 - protein, 361 aa, Homo sapien
MDKFWWHAAWGLCLVPLSLAQIDLNITCRFAGVFHVEKNGRYSISRTEAADLCKAFNSTLPTMAQMEKALSIGFETCRYGFIEGHVVIPRIHPNSICAANNTGVYILTYNTSQYDTYCFNASAPPEEDCTSVTDLPNAFDGPITITIVNRDGTRYVQKGEYRTNPEDIYPSNPTDDDVSSGSSSERSSTSGGYIFYTFSTVHPIPDEDSPWITDSTDRIPATRDQDTFHPSGGSHTTHGSESDGHSHGSQEGGANTTSGPIRTPQIPEWLIILASLLALALILAVCIAVNSRRRCGQKKKLVINSGNGAVEDRKPSGLNGEASKSQEMVHLVNKESSETPDQFMTADETRNLQNVDMKIGV

SEQ ID NO: 5311 - DNA, 3084 bp, Homo sapien
ctgggctcctggttgcagagctccaagtcctcacacagatacgcctgtttgagaagcagcgggcaagaaagacgcaagcccagaggccctgccatttctgtgggctcaggtccctactggctcaggcccctgcctccctcggcaaggccacaatgaaccggggagtcccttttaggcacttgcttctggtgctgcaactggcgctcctcccagcagccactcagggaaagaaagtggtgctgggcaaaaaaggggatacagtggaactgacctgtacagcttcccagaagaagagcatacaattccactggaaaaactccaaccagataaagattctgggaaatcagggctccttcttaactaaaggtccatccaagctgaatgatcgcgctgactcaagaagaagcctttgggaccaaggaaactttcccctgatcatcaagaatcttaagatagaagactcagatacttacatctgtgaagtggaggaccagaaggaggaggtgcaattgctagtgttcggattgactgccaactctgacacccacctgcttcaggggcagagcctgaccctgaccttggagagcccccctggtagtagcccctcagtgcaatgtaggagtccaaggggtaaaaacatacagggggggaagaccctctccgtgtctcagctggagctccaggatagtggcacctggacatgcactgtcttgcagaaccagaagaaggtggagttcaaaatagacatcgtggtgctagctttccagaaggcctccagcatagtctataagaaagagggggaacaggtggagttctccttcccactcgcctttacagttgaaaagctgacgggcagtggcgagctgtggtggcaggcggagagggcttcctcctccaagtcttggatcacctttgacctgaagaacaaggaagtgtctgtaaaacgggttacccaggaccctaagctccagatgggcaagaagctcccgctccacctcaccctgccccaggccttgcctcagtatgctggctctggaaacctcaccctggcccttgaagcgaaaacaggaaagttgcatcaggaagtgaacctggtggtgatgagagccactcagctccagaaaaatttgacctgtgaggtgtggggacccacctcccctaagctgatgctgagcttgaaactggagaacaaggaggcaaaggtctcgaagcgggagaaggcggtgtgggtgctgaaccctgaggcggggatgtggcagtgtctgctgagtgactcgggacaggtcctgctggaatccaacatcaaggttctgcccacatggtccaccccggtgcagccaatggccctgattgtgctggggggcgtcgccggcctcctgcttttcattgggctaggcatcttcttctgtgtcaggtgccggcaccgaaggcgccaagcagagcggatgtctcagatcaagagactcctcagtgagaagaagacctgccagtgccctcaccggtttcagaagacatgtagccccatttgaggcacgaggccaggcagatcccacttgcagcctccccaggtgtctgccccgcgtttcctgcctgcggaccagatgaatgtagcagatcccaggcctctggcctcctgttcgcctcctctacaatttgccattgtttctcctgggttaggccccggcttcactggttgagtgttgctctctagtttccagaggcttaatcacaccgtcctccacgccatttccttttccttcaagcctagcccttctctcattatttctctctgaccctctccccactgctcatttggatcccaggggagtgttcagggccagccctggctggcatggagggtgaggctgggtgtctggaagcatggagcatgggactgttcttttacaagacaggaccctgggaccacagagggcaggagcttgcacgaaatcacacagccaagccagtcaaggatggatgcagatccagaggtttctggcagccagtacctcctgccccatgctgcccgcttctcaccctatgtgggtggggccacagactcacatcctgaccttgcacaaacagcccctctggacacagccccatgtacacggcctcaagggatgtctcacatcctctgtctatttgagacttagaaaaatcctacaaggctggcagtgacagaactaagatgatcatctccagtttatagaccagaaccagagctcagagaggctagatgattgattaccaagtgccggactagcaagtgctggagtcgggactaacccaggtcccttgtcccaagttccactgctgcctcttgaatgcagggacaaatgccacacggctctcaccagtggctagtggtgggtactcaatgtgtacttttgggttcacagaagcacagcacccatgggaagggtccatctcagagaatttacgagcagggatgaaggcctccctgtctaaaatccctccttcatcccccgctggtggcagaatctgttaccagaggacaaagcctttggctcttctaatcagagtgcaagctgggagcacaggcactgcaggagagaatgcccagtgaccagtcactgaccctgtgcagaacctcctggaagcgagctttgctgggagagggggtagctagcctgagagggaaccctccaagggacctcaaaggtgattgtgccaggctctgcgcctgccccacaccctcccttaccctcctccagaccattcaggacacagggaaatcagggttacaaatcttcttgatccacttctctcaggatcccctctcttcctacccttcctcaccacttccctcagtcccaactccttttccctatttccttctcctcctgtctttaaagcctgcctcttccaggaagacccccctattgctgctggggctccccatttgcttactttgcatttgtgcccactctccacccctgctcccctgagctgaaataaaaatacaataaacttactataaagataaaaaaaaaaaaaaaaaaaaaaaaaaaaaaaaaaaaaaaaaaaaaaaaaaaaaaaaaaaaaaaaaaaaaaaaaaaa

SEQ ID NO: 5312 - protein, 458 aa, Homo sapien
MNRGVPFRHLLLVLQLALLPAATQGKKVVLGKKGDTVELTCTASQKKSIQFHWKNSNQIKILGNQGSFLTKGPSKLNDRADSRRSLWDQGNFPLIIKNLKIEDSDTYICEVEDQKEEVQLLVFGLTANSDTHLLQGQSLTLTLESPPGSSPSVQCRSPRGKNIQGGKTLSVSQLELQDSGTWTCTVLQNQKKVEFKIDIVVLAFQKASSIVYKKEGEQVEFSFPLAFTVEKLTGSGELWWQAERASSSKSWITFDLKNKEVSVKRVTQDPKLQMGKKLPLHLTLPQALPQYAGSGNLTLALEAKTGKLHQEVNLVVMRATQLQKNLTCEVWGPTSPKLMLSLKLENKEAKVSKREKAVWVLNPEAGMWQCLLSDSGQVLLESNIKVLPTWSTPVQPMALIVLGGVAGLLLFIGLGIFFCVRCRHRRRQAERMSQIKRLLSEKKTCQCPHRFQKTCSPI

SEQ ID NO: 5313 - DNA, 1193 bp, Homo sapien; identical to SEQ ID NO: 2218

SEQ ID NO: 5314 - protein, 166 aa, Homo sapien; identical to SEQ ID NO: 2219

SEQ ID NO: 5315 - DNA, 1026 bp, Homo sapien; identical to SEQ ID NO: 3003

SEQ ID NO: 5316 - protein, 222 aa, Homo sapien; identical to SEQ ID NO: 3004

SEQ ID NO: 5317 - DNA, 1909 bp, Homo sapien; identical to SEQ ID NO: 2303

SEQ ID NO: 5318 - protein, 281 aa, Homo sapien; identical to SEQ ID NO: 2304

SEQ ID NO: 5319 - DNA, 2273 bp, Homo sapien; identical to SEQ ID NO: 1567

SEQ ID NO: 5320 - protein, 374 aa, Homo sapien; identical to SEQ ID NO: 1568

SEQ ID NO: 5321 - DNA, 2324 bp, Homo sapien; identical to SEQ ID NO: 1159

SEQ ID NO: 5322 - protein, 372 aa, Homo sapien [sequence omitted]

SEQ ID NO: 5323 - DNA, 1399 bp, Homo sapien; identical to SEQ ID NO: 175

SEQ ID NO: 5324 - protein, 346 aa, Homo sapien; identical to SEQ ID NO: 176

SEQ ID NO: 5325 - DNA, 1311 bp, Homo sapien; identical to SEQ ID NO: 1359

SEQ ID NO: 5326 - protein, 207 aa, Homo sapien; identical to SEQ ID NO: 1360

SEQ ID NO: 5327 - DNA, 1279 bp, Homo sapien; identical to SEQ ID NO: 1397

SEQ ID NO: 5328 - protein, 196 aa, Homo sapien; identical to SEQ ID NO: 1398

SEQ ID NO: 5329 - DNA, 781 bp, Homo sapien; identical to SEQ ID NO: 2200

SEQ ID NO: 5330 - protein, 144 aa, Homo sapien; identical to SEQ ID NO: 2201

SEQ ID NO: 5331 - DNA, 3900 bp, Homo sapien; identical to SEQ ID NO: 37

SEQ ID NO: 5332 - protein, 187 aa, Homo sapien; identical to SEQ ID NO: 38

SEQ ID NO: 5333 - DNA, 2518 bp, Homo sapien; identical to SEQ ID NO: 1007

SEQ ID NO: 5334 - protein, 266 aa, Homo sapien; identical to SEQ ID NO: 1008

SEQ ID NO: 5335 - DNA, 4909 bp, Homo sapien
tagacgcaccctctgaagatggtgactccctcctgagaagctggaccccttggtaaaagacaaggccttctccaagaagaatatgaaagtgttactcagacttatttgtttcatagctctactgatttcttctctggaggctgataaatgcaaggaacgtgaagaaaaaataattttagtgtcatctgcaaatgaaattgatgttcgtccctgtcctcttaacccaaatgaacacaaaggcactataacttggtataaagatgacagcaagacacctgtatctacagaacaagcctccaggattcatcaacacaaagagaaactttggtttgttcctgctaaggtggaggattcaggacattactattgcgtggtaagaaattcatcttactgcctcagaattaaaataagtgcaaaatttgtggagaatgagcctaacttatgttataatgcacaagccatatttaagcagaaactacccgttgcaggagacggaggacttgtgtgcccttatatggagttttttaaaaatgaaaataatgagttacctaaattacagtggtataaggattgcaaacctctacttcttgacaatatacactttagtggagtcaaagataggctcatcgtgatgaatgtggctgaaaagcatagagggaactatacttgtcatgcatcctacacatacttgggcaagcaatatcctattacccgggtaatagaatttattactctagaggaaaacaaacccacaaggcctgtgattgtgagcccagctaatgagacaatggaagtagacttgggatcccagatacaattgatctgtaatgtcaccggccagttgagtgacattgcttactggaagtggaatgggtcagtaattgatgaagatgacccagtgctaggggaagactattacagtgtggaaaatcctgcaaacaaaagaaggagtaccctcatcacagtgcttaatatatcggaaattgaaagtagattttataaacatccatttacctgttttgccaagaatacacatggtatagatgcagcatatatccagttaatatatccagtcactaatttccagaagcacatgattggtatatgtgtcacgttgacagtcataattgtgtgttctgttttcatctataaaatcttcaagattgacattgtgctttggtacagggattcctgctatgattttctcccaataaaagcttcagatggaaagacctatgacgcatatatactgtatccaaagactgttggggaagggtctacctctgactgtgatatttttgtgtttaaagtcttgcctgaggtcttggaaaaacagtgtggatataagctgttcatttatggaagggatgactacgttggggaagacattgttgaggtcattaatgaaaacgtaaagaaaagcagaagactgattatcattttagtcagagaaacatcaggcttcagctggctgggtggttcatctgaagagcaaatagccatgtataatgctcttgttcaggatggaattaaagttgtcctgcttgagctggagaaaatccaagactatgagaaaatgccagaatcgattaaattcattaagcagaaacatggggctatccgctggtcaggggactttacacagggaccacagtctgcaaagacaaggttctggaagaatgtcaggtaccacatgccagtccagcgacggtcaccttcatctaaacaccagttactgtcaccagccactaaggagaaactgcaaagagaggctcacgtgcctctcgggtagcatggagaagttgccaagagttctttaggtgcctcctgtcttatggcgttgcaggccaggttatgcctcatgctgacttgcagagttcatggaatgtaactatatcatcctttatccctgaggtcacctggaatcagattattaagggaataagccatgacgtcaatagcagcccagggcacttcagagtagagggcttgggaagatcttttaaaaaggcagtaggcccggtgtggtggctcacgcctataatcccagcactttgggaggctgaagtgggtggatcaccagaggtcaggagttcgagaccagcccagccaacatggcaaaaccccatctctactaaaaatacaaaaatgagctaggcatggtggcacacgcctgtaatcccagctacacctgaggctgaggcaggagaattgcttgaaccggggagacggaggttgcagtgagccgagtttgggccactgcactctagcctggcaacagagcaagactccgtctcaaaaaaagggcaataaatgccctctctgaatgtttgaactgccaagaaaaggcatggagacagcgaactagaagaaagggcaagaaggaaatagccaccgtctacagatggcttagttaagtcatccacagcccaagggcggggctatgccttgtctggggaccctgtagagtcactgaccctggagcggctctcctgagaggtgctgcaggcaaagtgagactgacacctcactgaggaagggagacatattcttggagaactttccatctgcttgtattttccatacacatccccagccagaagttagtgtccgaagaccgaattttattttacagagcttgaaaactcacttcaatgaacaaagggattctccaggattccaaagttttgaagtcatcttagctttccacaggagggagagaacttaaaaaagcaacagtagcagggaattgatccacttcttaatgctttcctccctggcatgaccatcctgtcctttgttattatcctgcattttacgtctttggaggaacagctccctagtggcttcctccgtctgcaatgtcccttgcacagcccacacatgaaccatccttcccatgatgccgctcttctgtcatcccgctcctgctgaaacacctcccaggggctccacctgttcaggagctgaagcccatgctttcccaccagcatgtcactcccagaccacctccctgccctgtcctccagcttcccctcgctgtcctgctgtgtgaattcccaggttggcctggtggccatgtcgcctgcccccagcactcctctgtctctgctcttgcctcgacccttcctcctcctttgcctaggaggccttctcgcattttctctagctgatcagaattttaccaaaattcagaacatcctccaattccacagtctctgggagactttccctaagaggcgacttcctctccagccttctctctctggtcaggcccactgcagagatggtggtgagcacatctgggaggctggtctccctccagctggaattgctgctctctgagggagaggctgtggtggctgtctctgtccctcactgccttccaggagcaatttgcacatgtaacatagatttatgtaatgctttatgtttaaaaacattccccaattatcttatttaatttttgcaattattctaattttatatatagagaaagtgacctattttttaaaaaaatcacactctaagttctattgaacctaggacttgagcctccatttctggcttctagtctggtgttctgagtacttgatttcaggtcaataacggtcccccctcactccacactggcacgtttgtgagaagaaatgacattttgctaggaagtgaccgagtctaggaatgcttttattcaagacaccaaattccaaacttctaaatgttggaattttcaaaaattgtgtttagattttatgaaaaactcttctactttcatctattctttccctagaggcaaacatttcttaaaatgtttcattttcattaaaaatgaaagccaaatttatatgccaccgattgcaggacacaagcacagttttaagagttgtatgaacatggagaggacttttggtttttatatttctcgtatttaatatgggtgaacaccaacttttatttggaataataattttcctcctaaacaaaaacacattgagtttaagtctctgactcttgcctttccacctgctttctcctgggcccgctttgcctgcttgaaggaacagtgctgttctggagctgctgttccaacagacagggcctagctttcatttgacacacagactacagccagaagcccatggagcagggatgtcacgtcttgaaaagcctattagatgttttacaaatttaattttgcagattattttagtctgtcatccagaaaatgtgtcagcatgcatagtgctaagaaagcaagccaatttggaaacttaggttagtgacaaaattggccagagagtgggggtgatgatgaccaagaattacaagtagaatggcagctggaatttaaggagggacaagaatcaatggataagcgtgggtggaggaagatccaaacagaaaagtgcaaagttattccccatcttccaagggttgaattctggaggaagaagacacattcctagttccccgtgaacttcctttgacttattgtccccactaaaacaaaacaaaaaacttttaatgccttccacattaattagattttcttgcagtttttttatggcatttttttaaagatgccctaagtgttgaagaagagtttgcaaatgcaacaaaatatttaattaccggttgttaaaactggtttagcacaatttatattttccctctcttgcctttcttatttgcaataaaaggtattgagccattttttaaatgacatttttgataaattatgtttgtactagttgatgaaggagttttttttaacctgtttatataattttgcagcagaagccaaattttttgtatattaaagcaccaaattcatgtacagcatgcatcacggatcaatagactgtacttattttccaataaaattttcaaactttgtactgttaaa

SEQ ID NO: 5336 - protein, 569 aa, Homo sapien
MKVLLRLICFIALLISSLEADKCKEREEKIILVSSANEIDVRPCPLNPNEHKGTITWYKDDSKTPVSTEQASRIHQHKEKLWFVPAKVEDSGHYYCVVRNSSYCLRIKISAKFVENEPNLCYNAQAIFKQKLPVAGDGGLVCPYMEFFKNENNELPKLQWYKDCKPLLLDNIHFSGVKDRLIVMNVAEKHRGNYTCHASYTYLGKQYPITRVIEFITLEENKPTRPVIVSPANETMEVDLGSQIQLICNVTGQLSDIAYWKWNGSVIDEDDPVLGEDYYSVENPANKRRSTLITVLNISEIESRFYKHPFTCFAKNTHGIDAAYIQLIYPVTNFQKHMIGICVTLTVIIVCSVFIYKIFKIDIVLWYRDSCYDFLPIKASDGKTYDAYILYPKTVGEGSTSDCDIFVFKVLPEVLEKQCGYKLFIYGRDDYVGEDIVEVINENVKKSRRLIIILVRETSGFSWLGGSSEEQIAMYNALVQDGIKVVLLELEKIQDYEKMPESIKFIKQKHGAIRWSGDFTQGPQSAKTRFWKNVRYHMPVQRRSPSSKHQLLSPATKEKLQREAHVPLG

SEQ ID NO: 5337 - DNA, 4045 bp, Homo sapien; identical to SEQ ID NO: 1331

SEQ ID NO: 5338 - protein, 551 aa, Homo sapien; identical to SEQ ID NO: 1332

SEQ ID NO: 5339 - DNA, 816 bp, Homo sapien; identical to SEQ ID NO: 1701

SEQ ID NO: 5340 - protein, 134 aa, Homo sapien; identical to SEQ ID NO: 1702

SEQ ID NO: 5341 - DNA, 4932 bp, Homo sapien; identical to SEQ ID NO: 1445

SEQ ID NO: 5342 - protein, 1038 aa, Homo sapien; identical to SEQ ID NO: 1446

SEQ ID NO: 5343 - DNA, 2798 bp, Homo sapien; identical to SEQ ID NO: 1419

SEQ ID NO: 5344 - protein, 798 aa, Homo sapien; identical to SEQ ID NO: 1420

SEQ ID NO: 5345 - DNA, 3699 bp, Homo sapien
gttctgaatgatgactgacgcgggtttgggtgatacccctcacagcccctgtcattccggagtcataaggcacccgcgcgtctagccccagcgccagggcacgcgagcggcgctggagggaggaaagcttccgcctgcgggccggacaaaagtcccgcctgcccacggctttttgcccgccgctcgtgaccgagacgcctcgccgcggccagctcgctgctctcgctggcggatggtgtgtggccgccgcaggacgcccgccgtgcccgggccatgaagtagcggctgctggcggcgccgctgcccaaccgccagccccagccccgcgctgcgctgcccggtcctctcccggcggggtcgtatcggcgtggacatggctggccgcgtccctagcctgctagttctccttgtttttccaagcagctgtttggctttccgaagcccactttctgtctttaagaggtttaaagaaactaccagaccattttccaatgaatgtcttggtaccaccagacccgtagttcctattgattcatcagattttgcattggatattcgcatgcctggggttacacctaaacagtccgatacatacttctgcatgtctatgcgaataccagtggatgaggaagccttcgtgattgacttcaagcctcgagccagcatggatactgtccatcacatgttactttttggatgcaatatgccttcatccactggaagttactggttttgtgatgaaggaacctgtacagataaagccaatattctgtatgcctgggcgagaaatgctccccctacccggctccccaaaggtgttggattcagagttggaggagagactggaagtaaatactttgtactacaggtacactatggggatattagtgcttttagagataataacaaggactgttctggtgtgtccttacacctcacacgtctgccacagcctttaattgctggcatgtaccttatgatgtctgttgacactgttatcccagcaggagaaaaagtggtgaattctgacatttcatgccattataaaaattatccaatgcatgtctttgcctatagagttcacactcaccatttaggtaaggtagtaagtggatacagagtaagaaatggacagtggacactgattggacggcagagccctcagctgccacaggctttctaccctgtggggcatccagttgatgtaagttttggtgacctactggctgcaagatgtgtattcactggtgaaggaaggacagaagccacacacattggtggcacgtctagtgatgaaatgtgcaacttatacattatgtattacatggaagccaagcatgcagtttctttcatgacctgtacccagaatgtagctccagatatgttcagaaccataccaccagaggccaacattccaattcccgtgaagtctgatatggttatgatgcatgaacatcataaagaaacagaatataaagataagattcctttactacagcagccaaaacgagaagaagaagaagtgttagaccagggtgatttctattcactactttccaagctgctaggagaaagggaagatgttgttcatgtgcacaaatataatcctacagaaaaggcagaatcagagtcagacctggtagctgagattgcaaatgtagtccaaaaaaaggatcttggtcgatctgatgccagagagggtgcagaacatgagaggggtaatgctattcttgtcagagacagaattcacaaattccacagactagtatctaccttgaggccaccagagagcagagttttctcattacagcagcccccacctggtgaaggcacctgggaaccagaacacacaggagatttccacatggaagaggcactggattggcctggagtatacttgttaccaggccaggtttctggggtggctctagaccctaagaataacctggtgattttccacagaggtgaccatgtctgggatggaaactcgtttgacagcaagtttgtttaccagcaaataggactcggaccaattgaagaagacactattcttgtcatagatccaaataatgctgcagtactccagtccagtggaaaaaatctgttttacttgccacatggcttgagtatagataaagatgggaattattgggtcacagacgtggctctccatcaggtgttcaaactggatccaaacaataaagaaggccctgtattaatcctgggaaggagcatgcaaccaggcagtgaccagaatcacttctgtcaacccactgatgtggctgtggatccaggcactggagccatttatgtatcagatggttactgcaacagcaggattgtgcagttttcaccaagtggaaagttcatcacacagtggggagaagagtcttcagggagcagtcctctgccaggccagttcactgttcctcacagcttggctcttgtgcctcttttgggccaattatgtgtggcagaccgggaaaatggtcggatccagtgttttaaaactgacaccaaagaatttgtgagagagattaagcattcatcatttggaagaaatgtatttgcaatttcatatataccaggcttgctctttgcagtgaatgggaagcctcattttggggaccaagaacctgtacaaggatttgtgatgaacttttccaatggggaaattatagacatcttcaagccagtgcgcaagcactttgatatgcctcatgatattgttgcatctgaagatgggactgtgtacattggagatgctcataccaacaccgtgtggaagttcaccttgactgagaaattggaacatcgatcagttaaaaaggctggcattgaggtccaggaaatcaaaggaaagggaagtggaggcttaaaccttggtaatttctttgcaagccgtaagggctacagtcgaaaagggtttgaccggcttagcactgagggcagtgaccaagagaaagaggatgatggaagtgaatcagaagaggagtattcagcacctctgcctgcgctcgcaccttcctcctcctgaaaaccaagctttgatttagattgagtaagatttacccagaatgtcagattcctttccctttagcacgtttaaagttctgtgtatttaattgtaaactgtactagtctgtgtgggactgtacacactttatttacttcgttttggttaagttggcttctgtttctagttgaggagtttcctaaaagttcataacagtgccattgtctttatatgaacatagactagagaaaccgtcctctttttccatcataattctaatctaacaatggaagatttgcccatttacacttttgagactttttggtggatgtaaataaccccattctttgcttgaacacagtattttcccaatagcactttcattgccagtgtctttctttggtgcctttcctgttcagcattcttagcctgtggcagtaaagagaaactttgtgctacatgacgacaaagctgctaaatctcctatttttttaaaatcactaacattatattgcaatgaaggaaataaaaaagtctctatttaaattcttttttaaattttcttcagttggtgtgtttttgggatgtcttatttttagatggttacactgttagaacactattttcagaatctgaatgtaatttgtgtaataaagtgttttcagagcaaaaaaaaaaaaaaa

SEQ ID NO: 5346 - protein, 887 aa, Homo sapien
MAGRVPSLLVLLVFPSSCLAFRSPLSVFKRFKETTRPFSNECLGTTRPVVPIDSSDFALDIRMPGVTPKQSDTYFCMSMRIPVDEEAFVIDFKPRASMDTVHHMLLFGCNMPSSTGSYWFCDEGTCTDKANILYAWARNAPPTRLPKGVGFRVGGETGSKYFVLQVHYGDISAFRDNNKDCSGVSLHLTRLPQPLIAGMYLMMSVDTVIPAGEKVVNSDISCHYKNYPMHVFAYRVHTHHLGKVVSGYRVRNGQWTLIGRQSPQLPQAFYPVGHPVDVSFGDLLAARCVFTGEGRTEATHIGGTSSDEMCNLYIMYYMEAKHAVSFMTCTQNVAPDMFRTIPPEANIPIPVKSDMVMMHEHHKETEYKDKIPLLQQPKREEEEVLDQGDFYSLLSKLLGEREDVVHVHKYNPTEKAESESDLVAEIANVVQKKDLGRSDAREGAEHERGNAILVRDRIHKFHRLVSTLRPPESRVFSLQQPPPGEGTWEPEHTGDFHMEEALDWPGVYLLPGQVSGVALDPKNNLVIFHRGDHVWDGNSFDSKFVYQQIGLGPIEEDTILVIDPNNAAVLQSSGKNLFYLPHGLSIDKDGNYWVTDVALHQVFKLDPNNKEGPVLILGRSMQPGSDQNHFCQPTDVAVDPGTGAIYVSDGYCNSRIVQFSPSGKFITQWGEESSGSSPLPGQFTVPHSLALVPLLGQLCVADRENGRIQCFKTDTKEFVREIKHSSFGRNVFAISYIPGLLFAVNGKPHFGDQEPVQGFVMNFSNGEIIDIFKPVRKHFDMPHDIVASEDGTVYIGDAHTNTVWKFTLTEKLEHRSVKKAGIEVQEIKGKGSGGLNLGNFFASRKGYSRKGFDRLSTEGSDQEKEDDGSESEEEYSAPLPALAPSSS

SEQ ID NO: 5347 - DNA, 1028 bp, Homo sapien
ggcacgaggacggcgcccgccgcccgcccggagcccgcgagcaaccccagtcccccccacccgcgcgtggcggcgccggctccctagccaccgcggccccaccctcttccggcctcagctgtccgggctgctttcgcctccgcctgtggatgctgcgcctctccgaacgcaacatgaaggtgctccttgccgccgccctcatcgcggggtccgtcttcttcctgctgctgccgggaccttctgcggccgatgagaagaagaaggggcccaaagtcaccgtcaaggtgtattttgacctacgaattggagatgaagatgtaggccgggtgatctttggtctcttcggaaagactgttccaaaaacagtggataattttgtggccttagctacaggagagaaaggatttggctacaaaaacagcaaattccatcgtgtaatcaaggacttcatgatccagggcggagacttcaccaggggagatggcacaggaggaaagagcatctacggtgagcgcttccccgatgagaacttcaaactgaagcactacgggcctggctgggtgagcatggccaacgcaggcaaagacaccaacggctcccagttcttcatcacgacagtcaagacagcctggctagatggcaagcatgtggtgtttggcaaagttctagagggcatggaggtggtgcggaaggtggagagcaccaagacagacagccgggataaacccctgaaggatgtgatcatcgcagactgcggcaagatcgaggtggagaagccctttgccatcgccaaggagtagggcacagggacatctttctttgagtgaccgtctgtgcaggccctgtagtccgccacagggctttgagctgcactggccccggtgctggcatctggtggagcggacccactcccctcacattccacaggcccatggactcacttttgtaacaaactcctaccaaccctgaccaataaaaaaaaatgtgggtttttttttttttttaataaaaaaaaaaaaaaaaaaaaa

SEQ ID NO: 5348 - protein, 216 aa, Homo sapien
MLRLSERNMKVLLAAALIAGSVFFLLLPGPSAADEKKKGPKVTVKVYFDLRIGDEDVGRVIFGLFGKTVPKTVDNFVALATGEKGFGYKNSKFHRVIKDFMIQGGDFTRGDGTGGKSIYGERFPDENFKLKHYGPGWVSMANAGKDTNGSQFFITTVKTAWLDGKHVVFGKVLEGMEVVRKVESTKTDSRDKPLKDVIIADCGKIEVEKPFAIAKE

SEQ ID NO: 5349 - DNA, 2372 bp, Homo sapien; identical to SEQ ID NO: 1533

SEQ ID NO: 5350 - protein, 358 aa, Homo sapien; identical to SEQ ID NO: 1534

SEQ ID NO: 5351 - DNA, 1958 bp, Homo sapien; identical to SEQ ID NO: 1243

SEQ ID NO: 5352 - protein, 488 aa, Homo sapien; identical to SEQ ID NO: 1244

SEQ ID NO: 5353 - DNA, 4465 bp, Homo sapien; identical to SEQ ID NO: 1203

SEQ ID NO: 5354 - protein, 604 aa, Homo sapien; identical to SEQ ID NO: 1204

SEQ ID NO: 5355 - DNA, 3682 bp, Homo sapien; identical to SEQ ID NO: 897

SEQ ID NO: 5356 - protein, 461 aa, Homo sapien; identical to SEQ ID NO: 898

SEQ ID NO: 5357 - DNA, 6196 bp, Homo sapien; identical to SEQ ID NO: 977

SEQ ID NO: 5358 - protein, 1080 aa, Homo sapien; identical to SEQ ID NO: 978

SEQ ID NO: 5359 - DNA, 1630 bp, Homo sapien; identical to SEQ ID NO: 79

SEQ ID NO: 5360 - protein, 320 aa, Homo sapien; identical to SEQ ID NO: 80

SEQ ID NO: 5361 - DNA, 3702 bp, Homo sapien; identical to SEQ ID NO: 981

SEQ ID NO: 5362 - protein, 1050 aa, Homo sapien; identical to SEQ ID NO: 982

SEQ ID NO: 5363 - DNA, 1343 bp, Homo sapien
gctctttccaacgctgtaaaaaggacagaggctgttccctatggcagaaggcaaccacagaaaaaagccacttaaggtgttggaatccctgggcaaagatttcctcactggtgttttggataacttggtggaacaaaatgtactgaactggaaggaagaggaaaaaaagaaatattacgatgctaaaactgaagacaaagttcgggtcatggcagactctatgcaagagaagcaacgtatggcaggacaaatgcttcttcaaaccttttttaacatagaccaaatatcccccaataaaaaaggtgataaattgggtcacagaggcagaaatcacaatttatgttctgcaatatcctgcagctcatccgaatatggaggctggaccacctgagtcaggagaatctacagatgccctcaagctttgtcctcatgaagaattcctgagactatgtaaagaaagagctgaagagatctatccaataaaggagagaaacaaccgcacacgcctggctctcatcatatgcaatacagagtttgaccatctgcctccgaggaatggagctgactttgacatcacagggatgaaggagctacttgagggtctggactatagtgtagatgtagaagagaatctgacagccagggatatggagtcagcgctgagggcatttgctaccagaccagagcacaagtcctctgacagcacattcttggtactcatgtctcatggcatcctggagggaatctgcggaactgtgcatgatgagaaaaaaccagatgtgctgctttatgacaccatcttccagatattcaacaaccgcaactgcctcagtctgaaggacaaacccaaggtcatcattgtccaggcctgcagaggtgcaaaccgtggggaactgtgggtcagagactctccagcatccttggaagtggcctcttcacagtcatctgagaacctggaggaagatgctgtttacaagacccacgtggagaaggacttcattgctttctgctcttcaacgccacacaacgtgtcctggagagacagcacaatgggctctatcttcatcacacaactcatcacatgcttccagaaatattcttggtgctgccacctagaggaagtatttcggaaggtacagcaatcatttgaaactccaagggccaaagctcaaatgcccaccatagaacgactgtccatgacaagatatttctacctctttcctggcaattgaaaatggaagccacaagcagcccagccctccttaatcaacttcaaggagcaccttcattagtacagcttgcatatttaacattttgtatttcaataaaagtgaagacaaacg

SEQ ID NO: 5364 - protein, 286 aa, Homo sapien
MEAGPPESGESTDALKLCPHEEFLRLCKERAEEIYPIKERNNRTRLALIICNTEFDHLPPRNGADFDITGMKELLEGLDYSVDVEENLTARDMESALRAFATRPEHKSSDSTFLVLMSHGILEGICGTVHDEKKPDVLLYDTIFQIFNNRNCLSLKDKPKVIIVQACRGANRGELWVRDSPASLEVASSQSSENLEEDAVYKTHVEKDFIAFCSSTPHNVSWRDSTMGSIFITQLITCFQKYSWCCHLEEVFRKVQQSFETPRAKAQMPTIERLSMTRYFYLFPGN

SEQ ID NO: 5365 - DNA, 1682 bp, Homo sapien
cggcagccagcctattctttggccgggtcggtgcgagtggtcggctgggcagagtgcacgctgcttggcgccgcaggctgatcccgccgtccactcccgggagcagtgatgttgggcaactctgcgccggggcctgcgacccgcgaggcgggctcggcgctgctagcattgcagcagacggcgctccaagaggaccaggagaatatcaacccggaaaaggcagcgcccgtccaacaaccgcggacccgggccgcgctggcggtactgaagtccgggaacccgcggggtctagcgcagcagcagaggccgaagacgagacgggttgcaccccttaaggatcttcctgtaaatgatgagcatgtcaccgttcctccttggaaagcaaacagtaaacagcctgcgttcaccattcatgtggatgaagcagaaaaagaagctcagaagaagccagctgaatctcaaaaaatagagcgtgaagatgccctggcttttaattcagccattagtttacctggacccagaaaaccattggtccctcttgattatccaatggatggtagttttgagtcaccacatactatggacatgtcaattgtattagaagatgaaaagccagtgagtgttaatgaagtaccagactaccatgaggatattcacacataccttagggaaatggaggttaaatgtaaacctaaagtgggttacatgaagaaacagccagacatcactaacagtatgagagctatcctcgtggactggttagttgaagtaggagaagaatataaactacagaatgagaccctgcatttggctgtgaactacattgataggttcctgtcttccatgtcagtgctgagaggaaaacttcagcttgtgggcactgctgctatgctgttagcctcaaagtttgaagaaatataccccccagaagtagcagagtttgtgtacattacagatgatacctacaccaagaaacaagttctgagaatggagcatctagttttgaaagtccttacttttgacttagctgctccaacagtaaatcagtttcttacccaatactttctgcatcagcagcctgcaaactgcaaagttgaaagtttagcaatgtttttgggagaattaagtttgatagatgctgacccatacctcaagtatttgccatcagttattgctggagctgcctttcatttagcactctacacagtcacgggacaaagctggcctgaatcattaatacgaaagactggatataccctggaaagtcttaagccttgtctcatggaccttcaccagacctacctcaaagcaccacagcatgcacaacagtcaataagagaaaagtacaaaaattcaaagtatcatggtgtttctctcctcaacccaccagagacactaaatctgtaacaatgaaagactgcctttgttttctaagatgtaaatcactcaaagtatatggtgtacagtttttaacttaggttttaattttacaatcatttctgaatacagaagttgtggccaagtacaaattatggtatctattactttttaaatggttttaatttgtatatcttttgtatatgtatctgtcttagatatttggctaattttaagtggttttgttaaagtattaatgatgccagctgtcaggataataaattgatttggaaaacttaaaaaaa

SEQ ID NO: 5366 - protein, 432 aa, Homo sapien
MLGNSAPGPATREAGSALLALQQTALQEDQENINPEKAAPVQQPRTRAALAVLKSGNPRGLAQQQRPKTRRVAPLKDLPVNDEHVTVPPWKANSKQPAFTIHVDEAEKEAQKKPAESQKIEREDALAFNSAISLPGPRKPLVPLDYPMDGSFESPHTMDMSIVLEDEKPVSVNEVPDYHEDIHTYLREMEVKCKPKVGYMKKQPDITNSMRAILVDWLVEVGEEYKLQNETLHLAVNYIDRFLSSMSVLRGKLQLVGTAAMLLASKFEEIYPPEVAEFVYITDDTYTKKQVLRMEHLVLKVLTFDLAAPTVNQFLTQYFLHQQPANCKVESLAMFLGELSLIDADPYLKYLPSVIAGAAFHLALYTVTGQSWPESLIRKTGYTLESLKPCLMDLHQTYLKAPQHAQQSIREKYKNSKYHGVSLLNPPETLNL

SEQ ID NO: 5367 - DNA, 2156 bp, Homo sapien; identical to SEQ ID NO: 1293

SEQ ID NO: 5368 - protein, 355 aa, Homo sapien; identical to SEQ ID NO: 1292

SEQ ID NO: 5369 - DNA, 1292 bp, Homo sapien; identical to SEQ ID NO: 2906

SEQ ID NO: 5370 - protein, 376 aa, Homo sapien; identical to SEQ ID NO: 2907

SEQ ID NO: 5371 - DNA, 2753 bp, Homo sapien
gtcgggggcagcagcaagatgcgaagcgagccgtacagatcccgggctctccgaacgcaacttcgccctgcttgagcgaggctgcggtttccgaggccctctccagccaaggaaaagctacacaaaaagcctggatcactcatcgaaccacccctgaagccagtgaaggctctctcgcctcgccctctagcgttcgtctggagtagcgccaccccggcttcctggggacacagggttggcaccatggggcccaccagcgtcccgctggtcaaggcccaccgcagctcggtctctgactacgtcaactatgatatcatcgtccggcattacaactacacgggaaagctgaatatcagcgcggacaaggagaacagcattaaactgacctcggtggtgttcattctcatctgctgctttatcatcctggagaacatctttgtcttgctgaccatttggaaaaccaagaaattccaccgacccatgtactattttattggcaatctggccctctcagacctgttggcaggagtagcctacacagctaacctgctcttgtctggggccaccacctacaagctcactcccgcccagtggtttctgcgggaagggagtatgtttgtggccctgtcagcctccgtgttcagtctcctcgccatcgccattgagcgctatatcacaatgctgaaaatgaaactccacaacgggagcaataacttccgcctcttcctgctaatcagcgcctgctgggtcatctccctcatcctgggtggcctgcctatcatgggctggaactgcatcagtgcgctgtccagctgctccaccgtgctgccgctctaccacaagcactatatcctcttctgcaccacggtcttcactctgcttctgctctccatcgtcattctgtactgcagaatctactccttggtcaggactcggagccgccgcctgacgttccgcaagaacatttccaaggccagccgcagctctgagaagtcgctggcgctgctcaagaccgtaattatcgtcctgagcgtcttcatcgcctgctgggcaccgctcttcatcctgctcctgctggatgtgggctgcaaggtgaagacctgtgacatcctcttcagagcggagtacttcctggtgttagctgtgctcaactccggcaccaaccccatcatttacactctgaccaacaaggagatgcgtcgggccttcatccggatcatgtcctgctgcaagtgcccgagcggagactctgctggcaaattcaagcgacccatcatcgccggcatggaattcagccgcagcaaatcggacaattcctcccacccccagaaagacgaaggggacaacccagagaccattatgtcttctggaaacgtcaactcttcttcctagaactggaagctgtccacccaccggaagcgctctttacttggtcgctggccaccccagtgtttggaaaaaaatctctgggcttcgactgctgccagggaggagctgctgcaagccagagggaggaagggggagaatacgaacagcctggtggtgtcgggtgttggtgggtagagttagttcctgtgaacaatgcactgggaagggtggagatcaggtcccggcctggaatatatattctacccccctggagctttgattttgcactgagccaaaggtctagcattgtcaagctcctaaagggttcatttggcccctcctcaaagactaatgtccccatgtgaaagcgtctctttgtctggagctttgaggagatgttttccttcactttagtttcaaacccaagtgagtgtgtgcacttctgcttctttagggatgccctgtacatcccacaccccaccctcccttcccttcatacccctcctcaacgttcttttactttatactttaactacctgagagttatcagagctggggttgtggaatgatcgatcatctatagcaaataggctatgttgagtacgtaggctgtgggaagatgaagatggtttggaggtgtaaaacaatgtccttcgctgaggccaaagtttccatgtaagcgggatccgttttttggaatttggttgaagtcactttgatttctttaaaaaacatcttttcaatgaaatgtgttaccatttcatatccattgaagccgaaatctgcataaggaagcccactttatctaaatgatattagccaggatccttggtgtcctaggagaaacagacaagcaaaacaaagtgaaaaccgaatggattaacttttgcaaaccaagggagatttcttagcaaatgagtctaacaaatatgacatccgtctttcccacttttgttgatgtttatttcagaatcttgtgtgattcatttcaagcaacaacatgttgtattttgttgtgttaaaagtacttttcttgatttttgaatgtatttgtttcaggaagaagtcattttatggatttttctaacccgtgttaacttttctagaatccaccctcttgtgcccttaagcattactttaactggtagggaacgccagaacttttaagtccagctattcattagatagtaattgaagatatgtataaatattacaaagaataaaaatatattactgtctctttagtatggttttcagtgcaattaaaccgagagatgtcttgtttttttaaaaagaatagtatttaataggtttctgacttttgtggatcattttgcacatagctttatcaacttttaaacattaataaactgatttttttaaag

SEQ ID NO: 5372 - protein, 382 aa, Homo sapien
MGPTSVPLVKAHRSSVSDYVNYDIIVRHYNYTGKLNISADKENSIKLTSVVFILICCFIILENIFVLLTIWKTKKFHRPMYYFIGNLALSDLLAGVAYTANLLLSGATTYKLTPAQWFLREGSMFVALSASVFSLLAIAIERYITMLKMKLHNGSNNFRLFLLISACWVISLILGGLPIMGWNCISALSSCSTVLPLYHKHYILFCTTVFTLLLLSIVILYCRIYSLVRTRSRRLTFRKNISKASRSSEKSLALLKTVIIVLSVFIACWAPLFILLLLDVGCKVKTCDILFRAEYFLVLAVLNSGTNPIIYTLTNKEMRRAFIRIMSCCKCPSGDSAGKFKRPIIAGMEFSRSKSDNSSHPQKDEGDNPETIMSSGNVNSSS

SEQ ID NO: 5373 - DNA, 1202 bp, Homo sapien
ggcacgaggcgccatttgctgccgccgagcgtggacgcaggcggatctctgaagagctgggtcgccagcctctcccgcgcacgttgcctggcctccagcacctacttggtcccgcgcgctccctcgtgtcgcccctcggagcagcagccgccgcggtcgccgctacccggaaagaagtcagagacgccgcgagtcgccgccaccgccatgcccaagaataaaggtaaaggaggtaaaaacagacgcaggggtaagaatgagaatgaatctgaaaaaagagaactggtattcaaagaggatgggcaggagtatgctcaggtaatcaaaatgttgggaaatggacggctagaagcaatgtgtttcgatggtgtaaagaggttatgtcacatcagaggaaaattgagaaaaaaggtttggataaatacctcggacattattttggttggtctccgagactaccaggataacaaagctgatgtaattttaaaatacaatgcagacgaagctagaagtctgaaggcatacggcgagcttccagagcatgctaaaatcaatgaaactgatacatttggtcctggagatgatgatgaaattcagtttgatgacattggagatgatgatgaagatattgatgacatctaaattgaactcaacattttacattccatcttttctgaagattgtcctacaatttggattttgatcatgacaaagaagattaaaatttcattagcatgaatgcaatttgttaaagcagactgatttgtttctaagatatttttggtttttttaaaactgataataatgctgaattatcttaagtgagatgttaagcccactttgttcttttaatgtaatggagcttatgggtagaagaccatgtctactaattacaaaaaaaaaaaaaaaccatgattgctgcttttcctaccacttccagtaagaaaatgggtgttttgaagaaatcatttgccttgtctcacggaatctgattaagccctggcctcttgatgtatagagtcatggatattccagttacctagatattcccttgagattttgatacaatttgagggaggcagaagtctgcagttgaagaaaaaaaataagtctgtttgtcatatttaagtagcctgtgcgtatttttatactgattttgatatcatgttcttttcatagtcgtattttgccaccgtaaacat

SEQ ID NO: 5374 - protein, 144 aa, Homo sapien
MPKNKGKGGKNRRRGKNENESEKRELVFKEDGQEYAQVIKMLGNGRLEAMCFDGVKRLCHIRGKLRKKVWINTSDIILVGLRDYQDNKADVILKYNADEARSLKAYGELPEHAKINETDTFGPGDDDEIQFDDIGDDDEDIDDI

SEQ ID NO: 5375 - DNA, 1383 bp, Homo sapien
ctagtttctaaggatcatgtctgcgagccaggattcccgatccagagacaatggccccgatgggatggagcccgaaggcgtcatcgagagtaactggaatgagattgttgacagctttgatgacatgaacctctcggagtcccttctccgtggcatctacgcctatggttttgagaagccctctgccatccagcagcgagccattctaccttgtatcaagggttatgatgtgattgctcaagcccaatctgggactgggaaaacggccacatttgccatatcgattctgcagcagattgaattagatctaaaagccacccaggccttggtcctagcacccactcgagaattggctcagcagatacagaaggtggtcatggcactaggagactacatgggcgcctcctgtcacgcctgtatcgggggcaccaacgtgcgtgctgaggtgcagaaactgcagatggaagctccccacatcatcgtgggtacccctggccgtgtgtttgatatgcttaaccggagatacctgtcccccaaatacatcaagatgtttgtactggatgaagctgacgaaatgttaagccgtggattcaaggaccagatctatgacatattccaaaagctcaacagcaacacccaggtagttttgctgtcagccacaatgccttctgatgtgcttgaggtgaccaagaagttcatgagggaccccattcggattcttgtcaagaaggaagagttgaccctggagggtatccgccagttctacatcaacgtggaacgagaggagtggaagctggacacactatgtgacttgtatgaaaccctgaccatcacccaggcagtcatcttcatcaacacccggaggaaggtggactggctcaccgagaagatgcatgctcgagatttcactgtatccgccatgcatggagatatggaccaaaaggaacgagacgtgattatgagggagtttcgttctggctctagcagagttttgattaccactgacctgctggccagaggcattgatgtgcagcaggtttctttagtcatcaactatgaccttcccaccaacagggaaaactatatccacagaatcggtcgaggtggacggtttggccgtaaaggtgtggctattaacatggtgacagaagaagacaagaggactcttcgagacattgagaccttctacaacacctccattgaggaaatgcccctcaatgttgctgacctcatctgaggggctgtcctgccacccagccccagccagggctcaatctctgggggctgaggagcagcaggaggggggagggaagggagccaagggatggacatcttgtcattttttttctttgaataaatgtcactttttgaggcaaaagaagg

SEQ ID NO: 5376 - protein, 406 aa, Homo sapien
MSASQDSRSRDNGPDGMEPEGVIESNWNEIVDSFDDMNLSESLLRGIYAYGFEKPSAIQQRAILPCIKGYDVIAQAQSGTGKTATFAISILQQIELDLKATQALVLAPTRELAQQIQKVVMALGDYMGASCHACIGGTNVRAEVQKLQMEAPHIIVGTPGRVFDMLNRRYLSPKYIKMFVLDEADEMLSRGFKDQIYDIFQKLNSNTQVVLLSATMPSDVLEVTKKFMRDPIRILVKKEELTLEGIRQFYINVEREEWKLDTLCDLYETLTITQAVIFINTRRKVDWLTEKMHARDFTVSAMHGDMDQKERDVIMREFRSGSSRVLITTDLLARGIDVQQVSLVINYDLPTNRENYIHRIGRGGRFGRKGVAINMVTEEDKRTLRDIETFYNTSIEEMPLNVADLI

SEQ ID NO: 5377 - DNA, 859 bp, Homo sapien; identical to SEQ ID NO: 1569

SEQ ID NO: 5378 - protein, 235 aa, Homo sapien; identical to SEQ ID NO: 1570

SEQ ID NO: 5379 - DNA, 1670 bp, Homo sapien; identical to SEQ ID NO: 1655

SEQ ID NO: 5380 - protein, 368 aa, Homo sapien; identical to SEQ ID NO: 1656

SEQ ID NO: 5381 - DNA, 2160 bp, Homo sapien; identical to SEQ ID NO: 359

SEQ ID NO: 5382 - protein, 258 aa, Homo sapien; identical to SEQ ID NO: 360

SEQ ID NO: 5383 - DNA, 3649 bp, Homo sapien; identical to SEQ ID NO: 1249

SEQ ID NO: 5384 - protein, 578 aa, Homo sapien; identical to SEQ ID NO: 1250

SEQ ID NO: 5385 - DNA, 4040 bp, Homo sapien; identical to SEQ ID NO: 1573

SEQ ID NO: 5386 - protein, 862 aa, Homo sapien; identical to SEQ ID NO: 1574

SEQ ID NO: 5387 - DNA, 1419 bp, Homo sapien
ccacgcgtccgagaccaaggagtggaaagttctccggcagccctgagatctcaagagtgacatttgtgagaccagctaatttgattaaaattctcttggaatcagctttgctagtatcatacctgtcgcagatttcatcatgggaaacagctgttacaacatagtagccactctgttgctggtcctcaactttgagaggacaagatcattgcaggatccttgtagtaactgcccagctggtacattctgtgataataacaggaatcagatttgcagtccctgtcctccaaatagtttctccagcgcaggtggacaaaggacctgtgacatatgcaggcagtgtaaaggtgttttcaggaccaggaaggagtgttcctccaccagcaatgcagagtgtgactgcactccagggtttcactgcctgggggcaggatgcagcatgtgtgaacaggattgtaaacaaggtcaagaactgacaaaaaaaggttgtaaagactgttgctttgggacatttaacgatcagaaacgtggcatctgtcgaccctggacaaactgttctttggatggaaagtctgtgcttgtgaatgggacgaaggagagggacgtggtctgtggaccatctccagccgacctctctccgggagcatcctctgtgaccccgcctgcccctgcgagagagccaggacactctccgcagatcatctccttctttcttgcgctgacgtcgactgcgttgctcttcctgctgttcttcctcacgctccgtttctctgttgttaaacggggcagaaagaaactcctgtatatattcaaacaaccatttatgagaccagtacaaactactcaagaggaagatggctgtagctgccgatttccagaagaagaagaaggaggatgtgaactgtgaaatggaagtcaatagggctgttgggactttcttgaaaagaagcaaggaaatatgagtcatccgctatcacagctttcaaaagcaagaacaccatcctacataatacccaggattcccccaacacacgttcttttctaaatgccaatgagttggcctttaaaaatgcaccactttttttttttttttggacagggtctcactctgtcacccaggctggagtgcagtggcaccaccatggctctctgcagccttgacctctgggagctcaagtgatcctcctgcctcagtctcctgagtagctggaactacaaggaagggccaccacacctgactaacttttttgttttttgttggtaaagatggcatttcgccatgttgtacaggctggtctcaaactcctaggttcactttggcctcccaaagtgctgggattacagacatgaactgccaggcccggccaaaataatgcaccacttttaacagaacagacagatgaggacagagctggtgat

SEQ ID NO: 5388 - protein, 255 aa, Homo sapien; identical to SEQ ID NO: 1632

SEQ ID NO: 5389 - DNA, 1172 bp, Homo sapien; identical to SEQ ID NO: 1157

SEQ ID NO: 5390 - protein, 98 aa, Homo sapien; identical to SEQ ID NO: 1158

SEQ ID NO: 5391 - DNA, 5496 bp, Homo sapien
attcagccggtgcgcgcggcggcgggaggcagtggctggggagtcccgtcgacgctctgttccgagagcgtgccccggaccgccagctcagaacaggggcagccgtgtagccgaacggaagctgggagcagccgggactggtggcccgcgcccgagctccgcaggcgggaagcaccctggatttgggaagtcccgggagcagcgcggcggcacctccctcacccaaggggccgcggcgacggtcacggggcgcggcgccaccgtgagcgacccaggccaggattctaaatagacggcccaggctcctcctccgcccgggccgcctcacctgcgggcattgccgcgccgcctccgccggtgtagacggcacctgcgccgccttgctcgcgggtctccgcccctcgcccaccctcactgcgccaggcccaggcagctcacctgtactggcgcgggctgcggaagcctgcgtgagccgaggcgttgaggcgcggcgcccacgccactgtcccgagaggacgcaggtggagcgggcgcggcttcgcggaacccggcgccggccgccgcagtggtcccagcctacaccgggttccggggacccggccgccagtgcccggggagtagccgccgccgtcggctgggcaccatgaacagcagcagcgccaacatcacctacgccagtcgcaagcggcggaagccggtgcagaaaacagtaaagccaatcccagctgaaggaatcaagtcaaatccttccaagcggcatagagaccgacttaatacagagttggaccgtttggctagcctgctgcctttcccacaagatgttattaataagttggacaaactttcagttcttaggctcagcgtcagttacctgagagccaagagcttctttgatgttgcattaaaatcctcccctactgaaagaaacggaggccaggataactgtagagcagcaaatttcagagaaggcctgaacttacaagaaggagaattcttattacaggctctgaatggctttgtattagttgtcactacagatgctttggtcttttatgcttcttctactatacaagattatctagggtttcagcagtctgatgtcatacatcagagtgtatatgaacttatccataccgaagaccgagctgaatttcagcgtcagctacactgggcattaaatccttctcagtgtacagagtctggacaaggaattgaagaagccactggtctcccccagacagtagtctgttataacccagaccagattcctccagaaaactctcctttaatggagaggtgcttcatatgtcgtctaaggtgtctgctggataattcatctggttttctggcaatgaatttccaagggaagttaaagtatcttcatggacagaaaaagaaagggaaagatggatcaatacttccacctcagttggctttgtttgcgatagctactccacttcagccaccatccatacttgaaatccggaccaaaaattttatctttagaaccaaacacaaactagacttcacacctattggttgtgatgccaaaggaagaattgttttaggatatactgaagcagagctgtgcacgagaggctcaggttatcagtttattcatgcagctgatatgctttattgtgccgagtcccatatccgaatgattaagactggagaaagtggcatgatagttttccggcttcttacaaaaaacaaccgatggacttgggtccagtctaatgcacgcctgctttataaaaatggaagaccagattatatcattgtaactcagagaccactaacagatgaggaaggaacagagcatttacgaaaacgaaatacgaagttgccttttatgtttaccactggagaagctgtgttgtatgaggcaaccaacccttttcctgccataatggatcccttaccactaaggactaaaaatggcactagtggaaaagactctgctaccacatccactctaagcaaggactctctcaatcctagttccctcctggctgccatgatgcaacaagatgagtctatttatctctatcctgcttcaagtacttcaagtactgcaccttttgaaaacaactttttcaacgaatctatgaatgaatgcagaaattggcaagataatactgcaccgatgggaaatgatactatcctgaaacatgagcaaattgaccagcctcaggatgtgaactcatttgctggaggtcacccagggctctttcaagatagtaaaaacagtgacttgtacagcataatgaaaaacctaggcattgattttgaagacatcagacacatgcagaatgaaaaatttttcagaaatgatttttctggtgaggttgacttcagagacattgacttaacggatgaaatcctgacgtatgtccaagattctttaagtaagtctcccttcataccttcagattatcaacagcaacagtccttggctctgaactcaagctgtatggtacaggaacacctacatctagaacagcaacagcaacatcaccaaaagcaagtagtagtggagccacagcaacagctgtgtcagaagatgaagcacatgcaagttaatggcatgtttgaaaattggaactctaaccaattcgtgcctttcaattgtccacagcaagacccacaacaatataatgtctttacagacttacatgggatcagtcaagagttcccctacaaatctgaaatggattctatgccttatacacagaactttatttcctgtaatcagcctgtattaccacaacattccaaatgtacagagctggactaccctatggggagttttgaaccatccccataccccactacttctagtttagaagattttgtcacttgtttacaacttcctgaaaaccaaaagcatggattaaatccacagtcagccataataactcctcagacatgttatgctggggccgtgtcgatgtatcagtgccagccagaacctcagcacacccacgtgggtcagatgcagtacaatccagtactgccaggccaacaggcatttttaaacaagtttcagaatggagttttaaatgaaacatatccagctgaattaaataacataaataacactcagactaccacacatcttcagccacttcatcatccgtcagaagccagaccttttcctgatttgacatccagtggattcctgtaattccaagcccaattttgaccctggtttttggattaaattagtttgtgaaggattatggaaaaataaaactgtcactgttggacgtcagcaagttcacatggaggcattgatgcatgctattcacaattattccaaaccaaattttaatttttgcttttagaaaagggagtttaaaaatggtatcaaaattacatatactacagtcaagatagaaagggtgctgccacggagtggtgaggtaccgtctacatttcacattattctgggcaccacaaaatatacaaaactttatcagggaaactaagattcttttaaattagaaaatattctctatttgaattatttctgtcacagtaaaaataaaatactttgagttttgagctactggattcttattagttccccaaatacaaagttagagaactaaactagtttttcctatcatgttaacctctgcttttatctcagatgttaaaataaatggtttggtgctttttataaaaagataatctcagtgctttcctccttcactgtttcatctaagtgcctcacatttttttctacctataacactctaggatgtatattttatataaagtattctttttcttttttaaattaatatctttctgcacacaaatattatttgtgtttcctaaatccaaccaattttcattaattcaggcatattttaactccactgcttacctactttcttcaggtaaaagggcaaataatgatcgaaaaaataattatttattacataatttagttgtttctagactataaatgttgctatgtgccttatgttgaaaaaatttaaaagtaaaatgtctttccaaattatttcttaattattataaaaatattaagacaatagcacttaaattcctcaacagtgttttcagaagaaataaatataccactctttacctttattgatatctccatgatgatagttgaatgttgcaatgtgaaaaatctgctgttaactgcaaccttgtttattaaattgcaagaagctttatttctagctttttaattaagcaaagcacccatttcaatgtgtataaattgtctttaaaaactgttttagacctataatccttgataatatattgtgttgactttataaatttcgcttcttagaacagtggaaactatgtgtttttctcatatttgaggagtgttaagattgcagatagcaaggtttggtgcaaagtattgtaatgagtgaattgaatggtgcattgtatagatataatgaacaaaattatttgtaagatatttgcagtttttcattttaaaaagtccataccttatatatgcacttaatttgttggggctttacatactttatcaatgtgtctttctaagaaatcaagtaatgaatccaactgcttaaagttggtattaataaaaagacaaccacatagttcgtttaccttcaaactttaggtttttttaatgatatactgatcttcattaccaataggcaaattaatcaccctaccaactttactgtcctaacatggactttcaaaaagaaaaaatgacaccatcttttattctttttttttttttttttttgagagagagtcttactctgccgcccaaactggagtgcagtggcacaatcttggctcactgcaacctctacctcctgggttcaagtgattctcttgcctcagcctcccgagttgctgggattgcgggcatggtggcgtgagcctgtagtcctagctactcgggaggctgaggcaggagaatagcctgaacctgggaatcggaggttgcagggccaagatcgccccactgcactccagcctggcaatagaccgagctccgtctccaaaaaaaaaaatacaatttttatttcttttactttttttagtaagttaatgtatataaaaatggcttcggacaaaatatctctgagttctgtgtattttcagtcaaaactttaaacctgtagaatcaatttaagtgttgaaaaaaatttgtctgaaacatttcataatttgtttccagcatgaggtatctaaggatttagaccagaggtctagattaatactctatttttacatttaaaccttttattataagtcttacataaaccatttttgttactctcttccacatgttactggataaattgtttagtggaaaataggctttttaatcatgaatatgatgacaatcagttatacagttataaaattaaaagtttgaaaagcaatattgtatatttttatctatataaaataactaaaatgtatctaagaataataaaatcacgttaaacc

SEQ ID NO: 5392 - protein, 848 aa, Homo sapien
MNSSSANITYASRKRRKPVQKTVKPIPAEGIKSNPSKRHRDRLNTELDRLASLLPFPQDVINKLDKLSVLRLSVSYLRAKSFFDVALKSSPTERNGGQDNCRAANFREGLNLQEGEFLLQALNGFVLVVTTDALVFYASSTIQDYLGFQQSDVIHQSVYELIHTEDRAEFQRQLHWALNPSQCTESGQGIEEATGLPQTVVCYNPDQIPPENSPLMERCFICRLRCLLDNSSGFLAMNFQGKLKYLHGQKKKGKDGSILPPQLALFAIATPLQPPSILEIRTKNFIFRTKHKLDFTPIGCDAKGRIVLGYTEAELCTRGSGYQFIHAADMLYCAESHIRMIKTGESGMIVFRLLTKNNRWTWVQSNARLLYKNGRPDYIIVTQRPLTDEEGTEHLRKRNTKLPFMFTTGEAVLYEATNPFPAIMDPLPLRTKNGTSGKDSATTSTLSKDSLNPSSLLAAMMQQDESIYLYPASSTSSTAPFENNFFNESMNECRNWQDNTAPMGNDTILKHEQIDQPQDVNSFAGGHPGLFQDSKNSDLYSIMKNLGIDFEDIRHMQNEKFFRNDFSGEVDFRDIDLTDEILTYVQDSLSKSPFIPSDYQQQQSLALNSSCMVQEHLHLEQQQQHHQKQVVVEPQQQLCQKMKHMQVNGMFENWNSNQFVPFNCPQQDPQQYNVFTDLHGISQEFPYKSEMDSMPYTQNFISCNQPVLPQHSKCTELDYPMGSFEPSPYPTTSSLEDFVTCLQLPENQKHGLNPQSAIITPQTCYAGAVSMYQCQPEPQHTHVGQMQYNPVLPGQQAFLNKFQNGVLNETYPAELNNINNTQTTTHLQPLHHPSEARPFPDLTSSGFL

SEQ ID NO: 5393 - DNA, 2254 bp, Homo sapien; identical to SEQ ID NO: 1399

SEQ ID NO: 5394 - protein, 575 aa, Homo sapien; identical to SEQ ID NO: 1400

SEQ ID NO: 5395 - DNA, 3536 bp, Mus musculus
ggcccctcgagcctcgaaccggaacctccaaatccgagacgctctgcttatgaggacctcgaaatatgccggccagtgaaaaaatcttatggctttgagggcttttggttggccaggggcagtaaaaatctcggagagctgacaccaagtcctcccctgccacgtagcagtggtaaagtccgaagctcaaattccgagaattgagctctgttgattcttagaactggggttcttagaagtggtgatgcaagaagtttctaggaaaggccggacaccaggttttgagcaaaattttggactgtgaagcaaggcattggtgaagacaaaatggcctcgccggctgacagctgtatccagttcacccgccatgccagtgatgttcttctcaaccttaatcgtctccggagtcgagacatcttgactgatgttgtcattgttgtgagccgtgagcagtttagagcccataaaacggtcctcatggcctgcagtggcctgttctatagcatctttacagaccagttgaaatgcaaccttagtgtgatcaatctagatcctgagatcaaccctgagggattctgcatcctcctggacttcatgtacacatctcggctcaatttgcgggagggcaacatcatggctgtgatggccacggctatgtacctgcagatggagcatgttgtggacacttgccggaagtttattaaggccagtgaagcagagatggtttctgccatcaagcctcctcgtgaagagttcctcaacagccggatgctgatgccccaagacatcatggcctatcggggtcgtgaggtggtggagaacaacctgccactgaggagcgcccctgggtgtgagagcagagcctttgcccccagcctgtacagtggcctgtccacaccgccagcctcttattccatgtacagccacctccctgtcagcagcctcctcttctccgatgaggagtttcgggatgtccggatgcctgtggccaaccccttccccaaggagcgggcactcccatgtgatagtgccaggccagtccctggtgagtacagccggccgactttggaggtgtcccccaatgtgtgccacagcaatatctattcacccaaggaaacaatcccagaagaggcacgaagtgatatgcactacagtgtggctgagggcctcaaacctgctgccccctcagcccgaaatgccccctacttcccttgtgacaaggccagcaaagaagaagagagaccctcctcggaagatgagattgccctgcatttcgagccccccaatgcacccctgaaccggaagggtctggttagtccacagagcccccagaaatctgactgccagcccaactcgcccacagaggcctgcagcagtaagaatgcctgcatcctccaggcttctggctcccctccagccaagagccccactgaccccaaagcctgcaactggaagaaatacaagttcatcgtgctcaacagcctcaaccagaatgccaaaccaggggggcctgagcaggctgagctgggccgcctttccccacgagcctacacggccccacctgcctgccagccacccatggagcctgagaaccttgacctccagtccccaaccaagctgagtgccagcggggaggactccaccatcccacaagccagccggctcaataacatcgttaacaggtccatgacgggctctccccgcagcagcagcgagagccactcaccactctacatgcaccccccgaagtgcacgtcctgcggctctcagtccccacagcatgcagagatgtgcctccacaccgctggccccacgttcgctgaggagatgggagagacccagtctgagtactcagattctagctgtgagaacggggccttcttctgcaatgagtgtgactgccgcttctctgaggaggcctcactcaagaggcacacgctgcagacccacagtgacaaaccctacaagtgtgaccgctgccaggcctccttccgctacaagggcaacctcgccagccacaagaccgtccataccggtgagaaaccctatcgttgcaacatctgtggggcccagttcaaccggccagccaacctgaaaacccacactcgaattcactctggagagaagccctacaaatgcgaaacctgcggagccagatttgtacaggtggcccacctccgtgcccatgtgcttatccacactggtgagaagccctatccctgtgaaatctgtggcacccgtttccggcaccttcagactctgaagagccacctgcgaatccacacaggagagaaaccttaccattgtgagaagtgtaacctgcatttccgtcacaaaagccagctgcgacttcacttgcgccagaagcatggcgccatcaccaacaccaaggtgcaataccgcgtgtcagccactgacctgcctccggagctccccaaagcctgctgaagcatggagtgttgatgctttcgtctccagccccttctcagaatctacccaaaggatactgtaacactttacaatgttcatcccatgatgtagtgcctctttcatccactagtgcaaatcatagctgggggttgggggtggtgggggtcggggcctgggggactgggagccgcagcagctccccctcccccactgccataaaacattaagaaaatcatattgcttcttctcctatgtgtaaggtgaaccatgtcagcaaaaagcaaaatcattttatatgtcaaagcaggggagtatgcaaaagttctgacttgactttagtctgcaaaatgaggaatgtatatgttttgtgggaacagatgtttcttttgtatgtaaatgtgcattcttttaaaagacaagacttcagtatgttgtcaaagagagggctttaatttttttaaccaaaggtgaaggaatatatggcagagttgtaaatatataaatatatatatatataaaataaatatatataaacctaacaaagatatattaaaaatataaaactgcgttaaaggctcgattttgtatctgcaggcagacacggatctgagaatctttattgagaaagagcacttaagagaatattttaagtattgcatctgtataagtaagaaaatattttgtctaaaatgcctcagtgtatttgtatttttttgcaagtgaaggtttacaatttacaaagtgtgtattaaaaaaaacccaaagaacccaaaaatctgcagaaggaaaaatgtgtaattttgttctagttttcagtttgtatatacccgtacaacgtgtcctcacggtgccttttttcacggaagttttcaatgatgggcgagcgtgcaccatccctttttgaagtgtaggcagacacagggacttgaagttgttactaactaaactctctttgggaatgtttgtctcatcccattctgcgtcatgcttgtgtgataactactccggagacagggtttggctgtgtctaaactgcattaccgcgttgtaaaaaatagctgtaccaatataagaataaaatgttggaaagtcgcaaaaaaaaaaaa

SEQ ID NO: 5396 - protein, 706 aa, Mus musculus [sequence omitted]

SEQ ID NO: 5397 - DNA, 4117 bp, Homo sapien; identical to SEQ ID NO: 1841

SEQ ID NO: 5398 - protein, 592 aa, Homo sapien; identical to SEQ ID NO: 1842

SEQ ID NO: 5399 - DNA, 1221 bp, Homo sapien; identical to SEQ ID NO: 465

SEQ ID NO: 5400 - protein, 348 aa, Homo sapien; identical to SEQ ID NO: 466

SEQ ID NO: 5401 - DNA, 3419 bp, Homo sapien
ttccctccggtgaatcatcgctcgcagcggcggcgcccgcagtggccgcagcagcgcgccgggccctggccgcgccccagccgagcgcagcgcggagtcgccccgacctttctctgcgcagtacggccgccgggaccgcagcatggcgggcatcgcggccaagctggcgaaggaccgggaggcggccgaggggctgggctcccacgagagggccatcaagtacctcaaccaggactacgaggcgctgcggaacgagtgcctggaggccgggacgctcttccaggacccgtccttcccggccatcccctcggccctgggcttcaaggagttggggccctactccagcaaaacccggggcatgagatggaagcgccccacggagatctgcgctgacccccagtttatcattggaggagccacccgcacagacatctgccaaggagccctaggtgactgctggctgctggcagccattgcctccctcaccttgaatgaagaaatcctggctcgagtcgtccccctaaaccagagcttccaggaaaactatgcagggatctttcacttccagttctggcaatacggcgagtgggtggaggtggtggtggatgacaggctgcccaccaaggacggggagctgctctttgtgcattcagccgaagggagcgagttctggagcgccctgctggagaaggcatacgccaagatcaacggatgctatgaagctctatcagggggtgccaccactgagggcttcgaagacttcaccggaggcattgctgagtggtatgagttgaagaagccccctcccaacctgttcaagatcatccagaaagctctgcaaaaaggctctctccttggctgctccatcgacatcaccagcgccgcggactcggaggccatcacgtttcagaagctggtgaaggggcacgcgtactcggtcaccggagccgaggaggttgaaagtaacggaagcctacagaaactgatccgcatccgaaatccctggggagaagtggagtggacagggcggtggaatgacaactgcccaagctggaacactatagacccagaggagagggaaaggctgaccagacggcatgaagatggagaattctggatgtctttcagtgacttcctgaggcactattcccgcctggagatctgtaacctgaccccagacactctcaccagcgatacctacaagaagtggaaactcaccaaaatggatgggaactggaggcggggctccaccgcgggaggttgcaggaactacccgaacacattctggatgaaccctcagtacctgatcaagctggaggaggaggatgaggacgaggaggatggggagagcggctgcaccttcctggtggggctcattcagaagcaccgacggcggcagaggaagatgggcgaggacatgcacaccatcggctttggcatctatgaggttccagaggagttaagtgggcagaccaacatccacctcagcaaaaacttcttcctgacgaatcgcgccagggagcgctcagacaccttcatcaacctccgggaggtgctcaaccgcttcaagctgccgccaggagagtacattctcgtgccttccaccttcgaacccaacaaggatggggatttctgcatccgggtcttttctgaaaagaaagctgactaccaagctgtcgatgatgaaatcgaggccaatcttgaagagttcgacatcagcgaggatgacattgatgatggagtcaggagactgtttgcccagttggcaggagaggatgcggagatctctgcctttgagctgcagaccatcctgagaagggttctagcaaagcgccaagatatcaagtcagatggcttcagcatcgagacatgcaaaattatggttgacatgctagattcggacgggagtggcaagctggggctgaaggagttctacattctctggacgaagattcaaaaataccaaaaaatttaccgagaaatcgacgttgacaggtctggtaccatgaattcctatgaaatgcggaaggcattagaagaagcaggtttcaagatgccctgtcaactccaccaagtcatcgttgctcggtttgcagatgaccagctcatcatcgattttgataattttgttcggtgtttggttcggctggaaacgctattcaagatatttaagcagctggatcccgagaatactggaacaatagagctcgaccttatctcttggctctgtttctcagtactttgaagttataactaatctgcctgaagacttctcatgatggaaaatcagccaaggactaagcttccatagaaatacactttgtatctggacctcaaaattatgggaacatttacttaaacggatgatcatagctgaaaataatgatactgtcaatttgagatagcagaagtttcacacatcaaagtaaaagatttgcatatcattatactaaatgcaaatgagtcgcttaacccttgacaaggtcaaagaaagctttaaatctgtaaatagtatacactttttacttttacacactttcctgttcatagcaatattaaatcaggaaaaaaaaatgcagggaggtatttaacagctgagcaaaaacattgagtcgctctcaaaggacacgaggcccttggcagggaatatttaaagcaacttcaagtttaaaatgcagctgttgattctaccaaacaacagtccaagattaccatttcccatgagccaactgggaaacatggtatatcatgaagtaatcttgtcaaggcatctggagagtccaggagaggagactcacctctgtcgcttgggttaaacaagagacaggttttgtagaatattgattggtaatagtaaatcgttctccttacaatcaagttcttgaccctattcggccttatacatctggtcttacaaagaccaaagggatcctgcgcttgatcaactgaaccagtatgccaaaaccaggcatccaatttgtaaaccaattatgataaaggacaaaataagctgtttgccacctcaaaactttatgaacttcaccaccactagtgtctgtccatggagttagaggggacatcacttagaagttcttatagaaaggacacaagtttgtttcctggctttaccttgggaaaatgctagcaacattatagaaattttgccttgttgccttatcttcttccaaatgtactgttaaataaaaataaagggttaccccatgcaatcacaccatgccatgttttccttcctggagggcagccccacaggacggtttatgagcacacaattatagcttgtttctactttaacagggtatgctgcctctgtaaattcatgtattcaaaggaaaagacaccttgcctataattaaaatgtggaactataaaattttttaaaatccaaaaaaaaaaaaaaa

SEQ ID NO: 5402 - protein, 700 aa, Homo sapien
MAGIAAKLAKDREAAEGLGSHERAIKYLNQDYEALRNECLEAGTLFQDPSFPAIPSALGFKELGPYSSKTRGMRWKRPTEICADPQFIIGGATRTDICQGALGDCWLLAAIASLTLNEEILARVVPLNQSFQENYAGIFHFQFWQYGEWVEVVVDDRLPTKDGELLFVHSAEGSEFWSALLEKAYAKINGCYEALSGGATTEGFEDFTGGIAEWYELKKPPPNLFKIIQKALQKGSLLGCSIDITSAADSEAITFQKLVKGHAYSVTGAEEVESNGSLQKLIRIRNPWGEVEWTGRWNDNCPSWNTIDPEERERLTRRHEDGEFWMSFSDFLRHYSRLEICNLTPDTLTSDTYKKWKLTKMDGNWRRGSTAGGCRNYPNTFWMNPQYLIKLEEEDEDEEDGESGCTFLVGLIQKHRRRQRKMGEDMHTIGFGIYEVPEELSGQTNIHLSKNFFLTNRARERSDTFINLREVLNRFKLPPGEYILVPSTFEPNKDGDFCIRVFSEKKADYQAVDDEIEANLEEFDISEDDIDDGVRRLFAQLAGEDAEISAFELQTILRRVLAKRQDIKSDGFSIETCKIMVDMLDSDGSGKLGLKEFYILWTKIQKYQKIYREIDVDRSGTMNSYEMRKALEEAGFKMPCQLHQVIVARFADDQLIIDFDNFVRCLVRLETLFKIFKQLDPENTGTIELDLISWLCFSVL

SEQ ID NO: 5403 - DNA, 1229 bp, Homo sapien
gtttattcatttatttagcagggagttactgagcacttaactatatcctgcaggaggtactgctctaggtactaaagatataagtaaatttagtcatggcccttgctctcatgtgggttattggcctcgtgaaggagacagaagtaggataataattacaattttcagtgatgagaatagctttaaaagggaaattaatgctgagatgataaagtccccttaagccaacaaaccctctgtagctatagaatgagtgcaggtttctattggtgtggactcagagcaatttacaagagctgttcatgcagccatccatttgtgcaaaatagggtaagaagattcaagaggatatttattacttcctcataccacatggcttttgatgattctggattctaaacaacccagaatggtcatttcaggcacaacgatactacattcgtgtgtgtctgcttttaaacttggctgggctatcagaccctattctcggctcaggttttgagaagccatcagccaatgtgtacgtgcatgctgtagctgcagcctgcatcccttcgcctgcagcctactttggggaaataaagtgccttactgactgtagccattacagtatcccaagtcttttgacaggtgcctgtccttgaaaaacaaagtttctatttttatttttaattggtttagttcttaactgctggccaactcttacatccccagcaaatcatcgggccattggattttttccattatgttcatcacccttatatcatgtacctcagatctctctctctctcctctctctcagttatatagtttcttgtcttggactttttttttttcttttctttttcttttttttttgctttaaaacaagtgtgatgccatatcaagtccatgttattctctcacagtgtactctataagaggtgtgggtgtctgtttggtcaggatgttagaaagtgctgataagtagcatgatcagtgtatgcgaaaaggtttttaggaagtatggcaaaaatgttgtattggctatgatggtgacatgatatagtcagctgccttttaagaggtcttatctgttcagtgttaagtgatttaaaaaaataataacctgttttctgactagtttaaagatggatttgaaaatggttttgaatgcaattaggttatgctatttggacaataaactcaccttgaccttaaaaaaaaaaaaaagcggacgctcgcatcta

SEQ ID NO: 5404 - protein, 32 aa, Homo sapien
MDLKMVLNAIRLCYLDNKLTLTLKKKKSGRSH

SEQ ID NO: 5405 - DNA, 2010 bp, Homo sapien
cgagaagacccggatagttcctcccggccacgccgcgccggctctgggcactcagcatcgtttccttttcctccgctggagcagctatggcggcggtgaagaccctgaaccccaaggccgaggtggcccgagcgcaggcggcgctggcggtcaacatcagcgcagcgcggggtctgcaggacgtgctaaggaccaacctggggcccaagggcaccatgaagatgctcgtttctggcgctggagacatcaaacttactaaagacggcaatgtgctgcttcacgaaatgcaaattcaacacccaacagcttccttaatagcaaaggtagcaacagcccaggatgatataactggtgatggtacgacttctaatgtcctaatcattggagagctgctgaaacaggcggatctctacatttctgaaggccttcatcctagaataatcactgaaggatttgaagctgcaaaggaaaaggcccttcagtttttggaagaagtcaaagtaagcagagagatggacagggaaacacttatagatgtggccagaacatctcttcgtactaaagttcatgctgaacttgcagatgtcttaacagaggctgtagtggactccattttggccattaaaaagcaagatgaacctattgatctcttcatgattgagatcatggagatgaaacataaatctgaaactgatacaagcttaatcagagggcttgttttggaccacggagcacggcatcctgatatgaagaaaagggtggaggatgcatacatcctcacttgtaacgtgtcattagagtatgagaaaacagaagtgaattctggctttttttacaagagtgcagaagagagagaaaaactcgtgaaagctgaaagaaaattcattgaagatagggttaaaaaaataatagaactgaaaaggaaagtctgtggcgattcagataaaggatttgttgttattaatcaaaagggaattgaccccttttccttagatgctctttcaaaagaaggcatagtcgctctgcgcagagctaaaaggagaaatatggagaggctgactcttgcttgtggtggggtagccctgaattcttttgacgacctaagtcctgactgcttgggacatgcaggacttgtatatgagtatacattgggagaagagaagtttacctttattgagaaatgtaacaaccctcgttctgtcacattattgatcaaaggaccaaataagcacacactcactcagatcaaagatgcagtgagggacggcttgagggctgtcaaaaatgctattgatgatggctgtgtggttccaggtgctggtgccgtggaagtggcaatggcagaagccctgattaaacataagcccagtgtaaagggcagggcacagcttggagtccaagcatttgctgatgcattgctcattattcccaaggttcttgctcagaactctggttttgaccttcaggaaacattagttaaaattcaagcagaacattcagaatcaggtcagcttgtgggtgtggacctgaacacaggtgagccaatggtggcagcagaagtaggcgtatgggataactattgtgtaaagaaacagcttcttcactcctgcactgtgattgccaccaacattctcttggttgatgagatcatgcgagctggaatgtcttctctgaaaggttgaattgaagcttcctctgtatctgaatcttgaagactgcaaagtgatcctgaggattacagctgtggaatttttgtccaagcttcaaataattttgaaagaaattttcccatatgaaaaaaggagagaacactggcatctgttgaaatttggaagttctgaaattatagtatttttaaaaattgcactgaagtgtatacacataaagcaggtcttttatccagtgaacaggatgttttgctttagcagcagtgacataaaattccatgttagataagcatatgttacttaccttgttattaaatatttcttgaaaagcaggccacgaagg

SEQ ID NO: 5406 - protein, 531 aa, Homo sapien; identical to SEQ ID NO: 298

SEQ ID NO: 5407 - DNA, 1504 bp, Homo sapien; identical to SEQ ID NO: 1439

SEQ ID NO: 5408 - protein, 351 aa, Homo sapien; identical to SEQ ID NO: 1440

SEQ ID NO: 5409 - DNA, 1246 bp, Homo sapien; identical to SEQ ID NO: 167

SEQ ID NO: 5410 - protein, 228 aa, Homo sapien; identical to SEQ ID NO: 168

SEQ ID NO: 5411 - DNA, 1125 bp, Homo sapien; identical to SEQ ID NO: 1087

SEQ ID NO: 5412 - protein, 281 aa, Homo sapien; identical to SEQ ID NO: 1088

SEQ ID NO: 5413 - DNA, 1233 bp, Homo sapien; identical to SEQ ID NO: 1413

SEQ ID NO: 5414 - protein, 300 aa, Homo sapien; identical to SEQ ID NO: 1414

SEQ ID NO: 5415 - DNA, 1099 bp, Homo sapien; identical to SEQ ID NO: 1063

SEQ ID NO: 5416 - protein, 243 aa, Homo sapien; identical to SEQ ID NO: 1064

SEQ ID NO: 5417 - DNA, 1702 bp, Homo sapien; identical to SEQ ID NO: 2098

SEQ ID NO: 5418 - protein, 199 aa, Homo sapien; identical to SEQ ID NO: 2099

SEQ ID NO: 5419 - DNA, 2419 bp, Homo sapien
cgaaaggccggccttggctgcgacagcctgggtaagaggtgtaggtcggcttggttttctgctacccggagctgggcaagcgggttgggagaacagcgaagacagcgtgagcctgggccgttgcctcgaggctctcgcccggcttctcttgccgacccgccacgtttgtttggatttaatcttacagctggttgccggcgcccgcccgcccgctggcctcgcggtgtgagagggaagcacccgtgcctgtggctggtggctggcgcctggagggtccgcacacccgcccggccgcgccgctttgcccgcggcagccgcgtccctgaaccgcggagtcgtgtttgtgtttgacccgcgggcgccggtggcgcgcggccgaggccggtgtcggcggggcggggcggtcgcggcggaggcagaggaagagggagcgggagctctgcgaggccgggcgccgccatggaactgggcccgagccccgcaccgcgccgcctgctcttcgcctgcagcccccctcccgcgtcgcagcccgtcgtgaaggcgctatttggcgcttcagccgccgggggactgtcgcctgtcaccaacctgaccgtcactatggaccagctgcagggtctgggcagtgattatgagcaaccactggaggtgaagaacaacagtaatctgcagagaatgggctcctccgagtcaacagattcaggtttctgtctagattctcctgggccattggacagtaaagaaaaccttgaaaatcctatgagaagaatacattccctacctcaaaagctgttgggatgtagtccagctctgaagaggagccattctgattctcttgaccatgacatctttcagctcatcgacccagatgagaacaaggaaaatgaagcctttgagtttaagaagccagtaagacctgtatctcgtggctgcctgcactctcatggactccaggagggtaaagatctcttcacacagaggcagaactctgcccagctcggaatgctttcctcaaatgaaagagatagcagtgaaccagggaatttcattcctctttttacaccccagtcacctgtgacagccactttgtctgatgaggatgatggcttcgtggaccttctcgatggagagaatctgaagaatgaggaggagaccccctcgtgcatggcaagcctctggacagctcctctcgtcatgagaactacaaaccttgacaaccgatgcaagctgtttgactccccttccctgtgtagctccagcactcggtcagtgttgaagagaccagaacgttctcaagaggagtctccacctggaagtacaaagaggaggaagagcatgtctggggccagccccaaagagtcaactaatccagagaaggcccatgagactcttcatcagtctttatccctggcatcttcccccaaaggaaccattgagaacattttggacaatgacccaagggaccttataggagacttctccaagggttatctctttcatacagttgctgggaaacatcaggatttaaaatacatctctccagaaattatggcatctgttttgaatggcaagtttgccaacctcattaaagagtttgttatcatcgactgtcgatacccatatgaatacgagggaggccacatcaagggtgcagtgaacttgcacatggaagaagaggttgaagacttcttattgaagaagcccattgtacctactgatggcaagcgtgtcattgttgtgtttcactgcgagttttcttctgagagaggtccccgcatgtgccggtatgtgagagagagagatcgcctgggtaatgaataccccaaactccactaccctgagctgtatgtcctgaaggggggatacaaggagttctttatgaaatgccagtcttactgtgagccccctagctaccggcccatgcaccacgaggactttaaagaagacctgaagaagttccgcaccaagagccggacctgggcaggggagaagagcaagagggagatgtacagtcgtctgaagaagctctgagggcggcaggaccagccagcagcagcccaagcttccctccatccccctttaccctctttcctgcagagaaacttaagcaaaggggacagctgtgtgacatttggagagggggcctgggacttccatgccttaaacctacctcccacactcccaaggttggagcccagggcatcttgctggctacgcctcttctgtccctgttagacgtcctccgtccatatcagaactgtgccacaatgcagttctgagcaccgtgtcaagctgctctgagccacagtgggatgaaccagccggggccttatcgggctccagcatctcatgaggggagaggagacggaggggagtagagaagtttacacagaaatgctgctggccaaatagcaaagag

SEQ ID NO: 5420 - protein, 523 aa, Homo sapien
MELGPSPAPRRLLFACSPPPASQPVVKALFGASAAGGLSPVTNLTVTMDQLQGLGSDYEQPLEVKNNSNLQRMGSSESTDSGFCLDSPGPLDSKENLENPMRRIHSLPQKLLGCSPALKRSHSDSLDHDIFQLIDPDENKENEAFEFKKPVRPVSRGCLHSHGLQEGKDLFTQRQNSAQLGMLSSNERDSSEPGNFIPLFTPQSPVTATLSDEDDGFVDLLDGENLKNEEETPSCMASLWTAPLVMRTTNLDNRCKLFDSPSLCSSSTRSVLKRPERSQEESPPGSTKRRKSMSGASPKESTNPEKAHETLHQSLSLASSPKGTIENILDNDPRDLIGDFSKGYLFHTVAGKHQDLKYISPEIMASVLNGKFANLIKEFVIIDCRYPYEYEGGHIKGAVNLHMEEEVEDFLLKKPIVPTDGKRVIVVFHCEFSSERGPRMCRYVRERDRLGNEYPKLHYPELYVLKGGYKEFFMKCQSYCEPPSYRPMHHEDFKEDLKKFRTKSRTWAGEKSKREMYSRLKKL

SEQ ID NO: 5421 - DNA, 1904 bp, Homo sapien; identical to SEQ ID NO: 349

SEQ ID NO: 5422 - protein, 463 aa, Homo sapien; identical to SEQ ID NO: 350

SEQ ID NO: 5423 - DNA, 1676 bp, Homo sapien; identical to SEQ ID NO: 1827

SEQ ID NO: 5424 - protein, 449 aa, Homo sapien; identical to SEQ ID NO: 1828

SEQ ID NO: 5425 - DNA, 1201 bp, Homo sapien; identical to SEQ ID NO: 1739

SEQ ID NO: 5426 - protein, 355 aa, Homo sapien; identical to SEQ ID NO: 1740

SEQ ID NO: 5427 - DNA, 2139 bp, Homo sapien; identical to SEQ ID NO: 1493

SEQ ID NO: 5428 - protein, 378 aa, Homo sapien; identical to SEQ ID NO: 1494

SEQ ID NO: 5429 - DNA, 1431 bp, Homo sapien; identical to SEQ ID NO: 1649

SEQ ID NO: 5430 - protein, 332 aa, Homo sapien; identical to SEQ ID NO: 1650

SEQ ID NO: 5431 - DNA, 1996 bp, Homo sapien; identical to SEQ ID NO: 103

SEQ ID NO: 5432 - protein, 339 aa, Homo sapien; identical to SEQ ID NO: 104

SEQ ID NO: 5433 - DNA, 1600 bp, Homo sapien
gccccgccgccggcagtggaccgctgtgcgcgaaccctgaaccctacggtcccgacccgcgggcgaggccgggtacctgggctgggatccggagcaagcgggcgagggcagcgccctaagcaggcccggagcgatggcagccttgatgaccccgggaaccggggccccacccgcgcctggtgacttctccggggaagggagccagggacttcccgacccttcgccagagcccaagcagctcccggagctgatccgcatgaagcgagacggaggccgcctgagcgaagcggacatcaggggcttcgtggccgctgtggtgaatgggagcgcgcagggcgcacagatcggggccatgctgatggccatccgacttcggggcatggatctggaggagacctcggtgctgacccaggccctggctcagtcgggacagcagctggagtggccagaggcctggcgccagcagcttgtggacaagcattccacagggggtgtgggtgacaaggtcagcctggtcctcgcacctgccctggcggcatgtggctgcaaggtgccaatgatcagcggacgtggtctggggcacacaggaggcaccttggataagctggagtctattcctggattcaatgtcatccagagcccagagcagatgcaagtgctgctggaccaggcgggctgctgtatcgtgggtcagagtgagcagctggttcctgcggacggaatcctatatgcagccagagatgtgacagccaccgtggacagcctgccactcatcacagcctccattctcagtaagaaactcgtggaggggctgtccgctctggtggtggacgttaagttcggaggggccgccgtcttccccaaccaggagcaggcccgggagctggcaaagacgctggttggcgtgggagccagcctagggcttcgggtcgcggcagcgctgaccgccatggacaagcccctgggtcgctgcgtgggccacgccctggaggtggaggaggcgctgctctgcatggacggcgcaggcccgccagacttaagggacctggtcaccacgctcgggggcgccctgctctggctcagcggacacgcggggactcaggctcagggcgctgcccgggtggccgcggcgctggacgacggctcggcccttggccgcttcgagcggatgctggcggcgcagggcgtggatcccggtctggcccgagccctgtgctcgggaagtcccgcagaacgccggcagctgctgcctcgcgcccgggagcaggaggagctgctggcgcccgcagatggcaccgtggagctggtccgggcgctgccgctggcgctggtgctgcacgagctcggggccgggcgcagccgcgctggggagccgctccgcctgggggtgggcgcagagctgctggtcgacgtgggtcagaggctgcgccgtgggaccccctggctccgcgtgcaccgggacggccccgcgctcagcggcccgcagagccgcgccctgcaggaggcgctcgtactctccgaccgcgcgccattcgccgccccctcgcccttcgcagagctcgttctgccgccgcagcaataaagctcctttgccgcgaaa

SEQ ID NO: 5434 - protein, 482 aa, Homo sapien
MAALMTPGTGAPPAPGDFSGEGSQGLPDPSPEPKQLPELIRMKRDGGRLSEADIRGFVAAVVNGSAQGAQIGAMLMAIRLRGMDLEETSVLTQALAQSGQQLEWPEAWRQQLVDKHSTGGVGDKVSLVLAPALAACGCKVPMISGRGLGHTGGTLDKLESIPGFNVIQSPEQMQVLLDQAGCCIVGQSEQLVPADGILYAARDVTATVDSLPLITASILSKKLVEGLSALVVDVKFGGAAVFPNQEQARELAKTLVGVGASLGLRVAAALTAMDKPLGRCVGHALEVEEALLCMDGAGPPDLRDLVTTLGGALLWLSGHAGTQAQGAARVAAALDDGSALGRFERMLAAQGVDPGLARALCSGSPAERRQLLPRAREQEELLAPADGTVELVRALPLALVLHELGAGRSRAGEPLRLGVGAELLVDVGQRLRRGTPWLRVHRDGPALSGPQSRALQEALVLSDRAPFAAPSPFAELVLPPQQ

SEQ ID NO: 5435 - DNA, 3132 bp, Homo sapien; identical to SEQ ID NO: 4517

SEQ ID NO: 5436 - protein, 543 aa, Homo sapien; identical to SEQ ID NO: 4518

SEQ ID NO: 5437 - DNA, 2423 bp, Homo sapien
acccgcgctcgtacgtgcgcctccgccggcagctcctgactcatcgggggctccgggtcacatgcgcccgcgcggccctataggcgcctcctccgcccgccgcccgggagccgcagccgccgccgccactgccactcccgctctctcagcgccgccgtcgccaccgccaccgccaccgccactaccaccgtctgagtctgcagtcccgagatcccagccatcatgtccatagagaagatctgggcccgggagatcctggactcccgcgggaaccccacagtggaggtggatctctatactgccaaaggtcttttccgggctgcagtgcccagtggagcctctacgggcatctatgaggccctggagctgagggatggagacaaacagcgttacttaggcaaaggtgtcctgaaggcagtggaccacatcaactccaccatcgcgccagccctcatcagctcaggtctctctgtggtggagcaagagaaactggacaacctgatgctggagttggatgggactgagaacaaatccaagtttggggccaatgccatcctgggtgtgtctctggccgtgtgtaaggcaggggcagctgagcgggaactgcccctgtatcgccacattgctcagctggccgggaactcagacctcatcctgcctgtgccggccttcaacgtgatcaatggtggctctcatgctggcaacaagctggccatgcaggagttcatgatcctcccagtgggagctgagagctttcgggatgccatgcgactaggtgcagaggtctaccatacactcaagggagtcatcaaggacaaatacggcaaggatgccaccaatgtgggggatgaaggtggctttgcccccaatatcctggagaacagtgaagccttggagctggtgaaggaagccatcgacaaggctggctacacggaaaagatcgttattggcatggatgttgctgcctcagagttttatcgtgatggcaaatatgacttggacttcaagtctcccactgatccttcccgatacatcactggggaccagctgggggcactctaccaggactttgtcagggactatcctgtggtctccattgaggacccatttgaccaggatgattgggctgcctggtccaagttcacagccaatgtagggatccagattgtgggtgatgacctgacagtgaccaacccaaaacgtattgagcgggcagtggaagaaaaggcctgcaactgtctgctgctcaaggtcaaccagatcggctcggtcactgaagccatccaagcgtgcaagctggcccaggagaatggctggggggtcatggtgagtcatcgctcaggagagactgaggacacattcattgctgacctggtggtggggctgtgcacaggccagatcaagactggtgccccgtgccgttctgaacgtctggctaaatacaaccagctcatgagaattgaggaagagctgggggatgaagctcgctttgccggacataacttccgtaatcccagtgtgctgtgattcctctgcttgcctggagacgtggaacctctgtctcatcctcctggaaccttgctgtcctgatctgtgatagttcaccccctgagatcccctgagccccagggtgcccagaacttccctgattgacctgctccgctgctccttggcttacctgacctcttgctgtctctgctcgccctcctttctgtgccctactcattggggttccgcactttccacttcttcctttctctttctctcttccctcagaaactagaaatgtgaatgaggattattataaaagggggtccgtggaagaatgatcagcatctgtgatgggagcgtcagggttggtgtgctgaggtgttagagagggaccatgtgtcacttgtgctttgctcttgtcccacgtgtcttccactttgcatatgagccgtgaactgtgcatagtgctgggatggaggggagtgttgggcatgtgatcacgcctggctaataaggctttagtgtatttatttatttatttattttatttgtttttcattcatcccattaatcatttccccataactcaatggcctaaaactggcctgacttgggggaacgatgtgtctgtatttcatgtggctgtagatcccaagatgactggggtgggaggtcttgctagaatgggaagggtcatagaaagggccttgacatcagttcctttgtgtgtactcactgaagcctgcgttggtccagagcggaggctgtgtgcctgggggagttttcctctatacatctctccccaaccctaggttccctgttcttcctccagctgcaccagagcaacctctcactccccatgccacgttccacagttgccaccacctctgtggcattgaaatgagcacctccattaaagtctgaatcagtgc

SEQ ID NO: 5438 - protein, 434 aa, Homo sapien
MSIEKIWAREILDSRGNPTVEVDLYTAKGLFRAAVPSGASTGIYEALELRDGDKQRYLGKGVLKAVDHINSTIAPALISSGLSVVEQEKLDNLMLELDGTENKSKFGANAILGVSLAVCKAGAAERELPLYRHIAQLAGNSDLILPVPAFNVINGGSHAGNKLAMQEFMILPVGAESFRDAMRLGAEVYHTLKGVIKDKYGKDATNVGDEGGFAPNILENSEALELVKEAIDKAGYTEKIVIGMDVAASEFYRDGKYDLDFKSPTDPSRYITGDQLGALYQDFVRDYPVVSIEDPFDQDDWAAWSKFTANVGIQIVGDDLTVTNPKRIERAVEEKACNCLLLKVNQIGSVTEAIQACKLAQENGWGVMVSHRSGETEDTFIADLVVGLCTGQIKTGAPCRSERLAKYNQLMRIEEELGDEARFAGHNFRNPSVL

SEQ ID NO: 5439 - DNA, 3592 bp, Homo sapien; identical to SEQ ID NO: 1029

SEQ ID NO: 5440 - protein, 425 aa, Homo sapien; identical to SEQ ID NO: 1030

SEQ ID NO: 5441 - DNA, 2881 bp, Homo sapien; identical to SEQ ID NO: 552

SEQ ID NO: 5442 - protein, 592 aa, Homo sapien; identical to SEQ ID NO: 553

SEQ ID NO: 5443 - DNA, 2379 bp, Homo sapien; identical to SEQ ID NO: 952

SEQ ID NO: 5444 - protein, 552 aa, Homo sapien; identical to SEQ ID NO: 953

SEQ ID NO: 5445 - DNA, 1040 bp, Homo sapien; identical to SEQ ID NO: 1539

SEQ ID NO: 5446 - protein, 264 aa, Homo sapien; identical to SEQ ID NO: 1540

SEQ ID NO: 5447 - DNA, 1550 bp, Homo sapien; identical to SEQ ID NO: 950

SEQ ID NO: 5448 - protein, 288 aa, Homo sapien; identical to SEQ ID NO: 951

SEQ ID NO: 5449 - DNA, 1824 bp, Homo sapien; identical to SEQ ID NO: 1251

SEQ ID NO: 5450 - protein, 547 aa, Homo sapien; identical to SEQ ID NO: 1252

SEQ ID NO: 5451 - DNA, 4726 bp, Homo sapien
tgccgggatccaggtctccggggtccgctttggccagaggcgcggaaggaagcagtgcccggcgacactgcacccatcccggctgcttttgctgcgccctctcagcttcccaagaaaggcatcgtcatgtgatcatcacctaagaactagaacatcagcaggccctagaagcctcactcttgcccctccctttaatatctcaaaggatgacacttctgtggtgtgtagtgagtctctacttttatggaatcctgcaaagtgatgcctcagaacgctgcgatgactggggactagacaccatgaggcaaatccaagtgtttgaagatgagccagctcgcatcaagtgcccactctttgaacacttcttgaaattcaactacagcacagcccattcagctggccttactctgatctggtattggactaggcaggaccgggaccttgaggagccaattaacttccgcctccccgagaaccgcattagtaaggagaaagatgtgctgtggttccggcccactctcctcaatgacactggcaactatacctgcatgttaaggaacactacatattgcagcaaagttgcatttcccttggaagttgttcaaaaagacagctgtttcaattcccccatgaaactcccagtgcataaactgtatatagaatatggcattcagaggatcacttgtccaaatgtagatggatattttccttccagtgtcaaaccgactatcacttggtatatgggctgttataaaatacagaattttaataatgtaatacccgaaggtatgaacttgagtttcctcattgccttaatttcaaataatggaaattacacatgtgttgttacatatccagaaaatggacgtacgtttcatctcaccaggactctgactgtaaaggtagtaggctctccaaaaaatgcagtgccccctgtgatccattcacctaatgatcatgtggtctatgagaaagaaccaggagaggagctactcattccctgtacggtctattttagttttctgatggattctcgcaatgaggtttggtggaccattgatggaaaaaaacctgatgacatcactattgatgtcaccattaacgaaagtataagtcatagtagaacagaagatgaaacaagaactcagattttgagcatcaagaaagttacctctgaggatctcaagcgcagctatgtctgtcatgctagaagtgccaaaggcgaagttgccaaagcagccaaggtgaagcagaaagtgccagctccaagatacacagtggaactggcttgtggttttggagccacagtcctgctagtggtgattctcattgttgtttaccatgtttactggctagagatggtcctattttaccgggctcattttggaacagatgaaaccattttagatggaaaagagtatgatatttatgtatcctatgcaaggaatgcggaagaagaagaatttgtattactgaccctccgtggagttttggagaatgaatttggatacaagctgtgcatctttgaccgagacagtctgcctgggggaattgtcacagatgagactttgagcttcattcagaaaagcagacgcctcctggttgttctaagccccaactacgtgctccagggaacccaagccctcctggagctcaaggctggcctagaaaatatggcctctcggggcaacatcaacgtcattttagtacagtacaaagctgtgaaggaaacgaaggtgaaagagctgaagagggctaagacggtgctcacggtcattaaatggaaaggggaaaaatccaagtatccacagggcaggttctggaagcagctgcaggtggccatgccagtgaagaaaagtcccaggcggtctagcagtgatgagcagggcctctcgtattcatctttgaaaaatgtatgaaaggaataatgaaaagggtaaaaagaacaaggggtgctccaggaagaaagagtccccccagtcttcattcgcagtttatggtttcataggcaaaaataatggtctaagcctcccaatagggataaatttagggtgactgtgtggctgactattctgcttcctcaggcaacactaaagtttagaaagatatcatcaacgttctgtcaccagtctctgatgccactatgttctttgcaggcaaagacttgttcaatgcgaatttccccttctacattgtctatccctgtttttatatgtctccattctttttaaaatcttaacatatggagcagcctttcctatgaatttaaatatgcctttaaaataagtcactgttgacagggtcatgagtttccgagtatagttttctttttatcttatttttactcgtccgttgaaaagataatcaaggcctacattttagctgaggataatgaacttttttcctcattcggctgtataatacataaccacagcaagactgacatccacttaggatgatacaaagcagtgtaactgaaaatgtttcttttaattgatttaaaggacttgtcttctataccacccttgtcctcatctcaggtaatttatgaaatctatgtaaacttgaaaaatatttcttaatttttgtttttgctccagtcaattcctgattatccacaggtcaacccacattttttcattccttctccctatctgcttatatcgcattgctcatttagagtttgcaggaggctccatactaggttcagtctgaaagaaatctcctaatggtgctatagagagggaggtaacagaaagactcttttagggcatttttctgactcatgaaaagagcacagaaaaggatgtttggcaatttgtcttttaagtcttaaccttgctaatgtgaatactgggaaagtgattttttctcactcgtttttgttgctccattgtaaagggcggaggtcagtcttagtggccttgagagttgcttttggcattaatattctaagagaattaactgtatttcctgtcacctattcactagtgcaggaaatatacttgctccaaataagtcagtatgagaagtcactgtcaatgaaagttgttttgtttgttttcagtaatattttgctgtttttaagacttggaaaactaagtgcagagtttacagagtggtaaatatctatgttacatgtagattatacatatatatacacacgtgtatatgagatatatatcttatatctccacaaacacaaattatatatatacatatccacacacatacattacatatatctgtgtatataaatccacatgcacatgaaatatatatatatatataatttgtgtgtgtgtatgtgtatgtatatgactttaaatagctatgggtacaatattaaaaaccactggaactcttgtccagtttttaaattatgtttttactggaatgtttttgtgtcagtgttttctgtacatattatttgttaattcacagctcacagagtgatagttgtcatagttcttgccttccctaagtttatataaataacttaagtattgctacagtttatctaggttgcagtggcatctgctgtgcacagagcttccatggtcactgctaagcagtagccagccatcgggcattaattgatttcctactatattcccagcagacacatttagaaactaagctatgttaacctcagtgctcaactatttgaactgttgagtgataaaggaaacaaatataactgtaaatgaatcttggtatcctgtgaaacagaataattcgtaatttaagaaagcccttatcccggtaacatgaatgttgatgaacaaatgtaaaattatatcctatatttaagtacccataataaatcatttccctctataagtgttattgattattttaaattgaaaaaagtttcacttggatgaaaaaagtagaaaagtaggtcattcttggatctacttttttttagccttattaatatttttccctattagaaaccacaattactccctctattaacccttcacttactagaccagaaaagaacttattccagataagctttgaatatcaattcttacataaactttaggcaaacagggaatagtctagtcaccaaaggaccattctcttgccaatgctgcattccttttgcacttttggattccatatttatcccaaatgctgttgggcacccctagaaataccttgatgttttttctatttatatgcctgcctttggtacttaattttacaaatgctgtaatataaagcatatcaagtttatgtgatacgtatcattgcaagagaatttgtttcaagatttttttttaatgttccagaagatggccaatagagaacattcaagggaaatggggaaacataatttagagaacaagaacaaaccatgtctcaaatttttttaaaaaaaattaatggttttaaatatatgctatagggacgttccatgcccaggttaacaaagaactgtgatatatagagtgtctaattacaaaatcatatacgatttatttaattctcttctgtattgtaacttagatgattcccaaggactctaataaaaaatcacttcattgtatttggaaacaaaaacatcattcattaattacttattttctttccataggttttaatattttgagagtgtcttttttatttcattcatgaacttttgtatttttcatttttcatttgatttgtaaatttacttatgttaaaaataaaccatttattttcagctttg

SEQ ID NO: 5452 - protein, 570 aa, Homo sapien
MTLLWCVVSLYFYGILQSDASERCDDWGLDTMRQIQVFEDEPARIKCPLFEHFLKFNYSTAHSAGLTLIWYWTRQDRDLEEPINFRLPENRISKEKDVLWFRPTLLNDTGNYTCMLRNTTYCSKVAFPLEVVQKDSCFNSPMKLPVHKLYIEYGIQRITCPNVDGYFPSSVKPTITWYMGCYKIQNFNNVIPEGMNLSFLIALISNNGNYTCVVTYPENGRTFHLTRTLTVKVVGSPKNAVPPVIHSPNDHVVYEKEPGEELLIPCTVYFSFLMDSRNEVWWTIDGKKPDDITIDVTINESISHSRTEDETRTQILSIKKVTSEDLKRSYVCHARSAKGEVAKAAKVKQKVPAPRYTVELACGFGATVLLVVILIVVYHVYWLEMVLFYRAHFGTDETILDGKEYDIYVSYARNAEEEEFVLLTLRGVLENEFGYKLCIFDRDSLPGGIVTDETLSFIQKSRRLLVVLSPNYVLQGTQALLELKAGLENMASRGNINVILVQYKAVKETKVKELKRAKTVLTVIKWKGEKSKYPQGRFWKQLQVAMPVKKSPRRSSSDEQGLSYSSLKNV

SEQ ID NO: 5453 - DNA, 1809 bp, Homo sapien; identical to SEQ ID NO: 1429

SEQ ID NO: 5454 - protein, 459 aa, Homo sapien; identical to SEQ ID NO: 1430

SEQ ID NO: 5455 - DNA, 2171 bp, Homo sapien; identical to SEQ ID NO: 1729

SEQ ID NO: 5456 - protein, 521 aa, Homo sapien; identical to SEQ ID NO: 1730

SEQ ID NO: 5457 - DNA, 1282 bp, Homo sapien; identical to SEQ ID NO: 1687

SEQ ID NO: 5458 - protein, 146 aa, Homo sapien; identical to SEQ ID NO: 1688

SEQ ID NO: 5459 - DNA, 5361 bp, Homo sapien
ctgcaaacccagcgcaactacggtcccccggtcagacccaggatggggccagaacggacaggggccgcgccgctgccgctgctgctggtgttagcgctcagtcaaggcattttaaattgttgtttggcctacaatgttggtctcccagaagcaaaaatattttccggtccttcaagtgaacagtttgggtatgcagtgcagcagtttataaatccaaaaggcaactggttactggttggttcaccctggagtggctttcctgagaaccgaatgggagatgtgtataaatgtcctgttgacctatccactgccacatgtgaaaaactaaatttgcaaacttcaacaagcattccaaatgttactgagatgaaaaccaacatgagcctcggcttgatcctcaccaggaacatgggaactggaggttttctcacatgtggtcctctgtgggcacagcaatgtgggaatcagtattacacaacgggtgtgtgttctgacatcagtcctgattttcagctctcagccagcttctcacctgcaactcagccctgcccttccctcatagatgttgtggttgtgtgtgatgaatcaaatagtatttatccttgggatgcagtaaagaattttttggaaaaatttgtacaaggccttgatataggccccacaaagacacaggtggggttaattcagtatgccaataatccaagagttgtgtttaacttgaacacatataaaaccaaagaagaaatgattgtagcaacatcccagacatcccaatatggtggggacctcacaaacacattcggagcaattcaatatgcaagaaaatatgcctattcagcagcttctggtgggcgacgaagtgctacgaaagtaatggtagttgtaactgacggtgaatcacatgatggttcaatgttgaaagctgtgattgatcaatgcaaccatgacaatatactgaggtttggcatagcagttcttgggtacttaaacagaaacgcccttgatactaaaaatttaataaaagaaataaaagcgatcgctagtattccaacagaaagatactttttcaatgtgtctgatgaagcagctctactagaaaaggctgggacattaggagaacaaattttcagcattgaaggtactgttcaaggaggagacaactttcagatggaaatgtcacaagtgggattcagtgcagattactcttctcaaaatgatattctgatgctgggtgcagtgggagcttttggctggagtgggaccattgtccagaagacatctcatggccatttgatctttcctaaacaagcctttgaccaaattctgcaggacagaaatcacagttcatatttaggttactctgtggctgcaatttctactggagaaagcactcactttgttgctggtgctcctcgggcaaattataccggccagatagtgctatatagtgtgaatgagaatggcaatatcacggttattcaggctcaccgaggtgaccagattggctcctattttggtagtgtgctgtgttcagttgatgtggataaagacaccattacagacgtgctcttggtaggtgcaccaatgtacatgagtgacctaaagaaagaggaaggaagagtctacctgtttactatcaaaaagggcattttgggtcagcaccaatttcttgaaggccccgagggcattgaaaacactcgatttggttcagcaattgcagctctttcagacatcaacatggatggctttaatgatgtgattgttggttcaccactagaaaatcagaattctggagctgtatacatttacaatggtcatcagggcactatccgcacaaagtattcccagaaaatcttgggatccgatggagcctttaggagccatctccagtactttgggaggtccttggatggctatggagatttaaatggggattccatcaccgatgtgtctattggtgcctttggacaagtggttcaactctggtcacaaagtattgctgatgtagctatagaagcttcattcacaccagaaaaaatcactttggtcaacaagaatgctcagataattctcaaactctgcttcagtgcaaagttcagacctactaagcaaaacaatcaagtggccattgtatataacatcacacttgatgcagatggattttcatccagagtaacctccagggggttatttaaagaaaacaatgaaaggtgcctgcagaagaatatggtagtaaatcaagcacagagttgccccgagcacatcatttatatacaggagccctctgatgttgtcaactctttggatttgcgtgtggacatcagtctggaaaaccctggcactagccctgcccttgaagcctattctgagactgccaaggtcttcagtattcctttccacaaagactgtggtgaggatggactttgcatttctgatctagtcctagatgtccgacaaataccagctgctcaagaacaaccctttattgtcagcaaccaaaacaaaaggttaacattttcagtaacactgaaaaataaaagggaaagtgcatacaacactggaattgttgttgatttttcagaaaacttgttttttgcatcattctccctaccggttgatgggacagaagtaacatgccaggtggctgcatctcagaagtctgttgcctgcgatgtaggctaccctgctttaaagagagaacaacaggtgacttttactattaactttgacttcaatcttcaaaaccttcagaatcaggcgtctctcagtttccaagccttaagtgaaagccaagaagaaaacaaggctgataatttggtcaacctcaaaattcctctcctgtatgatgctgaaattcacttaacaagatctaccaacataaatttttatgaaatctcttcggatgggaatgttccttcaatcgtgcacagttttgaagatgttggtccaaaattcatcttctccctgaaggtaacaacaggaagtgttccagtaagcatggcaactgtaatcatccacatccctcagtataccaaagaaaagaacccactgatgtacctaactggggtgcaaacagacaaggctggtgacatcagttgtaatgcagatatcaatccactgaaaataggacaaacatcttcttctgtatctttcaaaagtgaaaatttcaggcacaccaaagaattgaactgcagaactgcttcctgtagtaatgttacctgctggttgaaagacgttcacatgaaaggagaatactttgttaatgtgactaccagaatttggaacgggactttcgcatcatcaacgttccagacagtacagctaacggcagctgcagaaatcaacacctataaccctgagatatatgtgattgaagataacactgttacgattcccctgatgataatgaaacctgatgagaaagccgaagtaccaacaggagttataataggaagtataattgctggaatccttttgctgttagctctggttgcaattttatggaagctcggcttcttcaaaagaaaatatgaaaagatgaccaaaaatccagatgagattgatgagaccacagagctcagtagctgaaccagcagacctacctgcagtgggaaccggcagcatcccagccagggtttgctgtttgcgtgcatggatttctttttaaatcccatattttttttatcatgtcgtaggtaaactaacctggtattttaagagaaaactgcaggtcagtttggatgaagaaattgtggggggtgggggaggtgcggggggcaggtagggaaataatagggaaaatacctattttatatgatgggggaaaaaaagtaatctttaaactggctggcccagagtttacattctaatttgcattgtgtcagaaacatgaaatgcttccaagcatgacaacttttaaagaaaaatatgatactctcagattttaagggggaaaactgttctctttaaaatatttgtctttaaacagcaactacagaagtggaagtgcttgatatgtaagtacttccacttgtgtatattttaatgaatattgatgttaacaagaggggaaaacaaaacacaggttttttcaatttatgctgctcatccaaagttgccacagatgatacttccaagtgataattttatttataaactaggtaaaatttgttgttggttccttttataccacggctgccccttccacaccccatcttgctctaatgatcaaaacatgcttgaataactgagcttagagtatacctcctatatgtccatttaagttaggagagggggcgatatagagactaaggcacaaaattttgtttaaaactcagaatataacatttatgtaaaatcccatctgctagaagcccatcctgtgccagaggaaggaaaaggaggaaatttcctttctcttttaggaggcacaacagttctcttctaggatttgtttggctgactggcagtaacctagtgaatttttgaaagatgagtaatttctttggcaaccttcctcctcccttactgaaccactctcccacctcctggtggtaccattattatagaagccctctacagcctgactttctctccagcggtccaaagttatcccctcctttacccctcatccaaagttcccactccttcaggacagctgctgtgcattagatattaggggggaaagtcatctgtttaatttacacacttgcatgaattactgtatataaactccttaacttcagggagctattttcatttagtgctaaacaagtaagaaaaataagctagagtgaatttctaaatgttggaatgttatgggatgtaaacaatgtaaagtaaaacactctcaggatttcaccagaagttacagatgaggcactggaaaccaccaccaaattagcaggtgcaccttctgtggctgtcttgtttctgaagtactttttcttccacaagagtgaatttgacctaggcaagtttgttcaaaaggtagatcctgagatgatttggtcagattgggataaggcccagcaatctgcattttaacaagcaccccagtcactaggatgcagatggaccacactttgagaaacaccacccatttctactttttgcaccttattttctctgttcctgagcccccacattctctaggagaaacttagattaaaattcacagacactacatatctaaagctttgacaagtccttgacctctataaacttcagagtcctcattataaaatgggaagactgagctggagttcagcagtgatgctttttagttttaaaagtctatgatctgatctggacttcctataatacaaatacacaatcctccaagaatttgacttggaaaag

SEQ ID NO: 5460 - protein, 1181 aa, Homo sapien
MGPERTGAAPLPLLLVLALSQGILNCCLAYNVGLPEAKIFSGPSSEQFGYAVQQFINPKGNWLLVGSPWSGFPENRMGDVYKCPVDLSTATCEKLNLQTSTSIPNVTEMKTNMSLGLILTRNMGTGGFLTCGPLWAQQCGNQYYTTGVCSDISPDFQLSASFSPATQPCPSLIDVVVVCDESNSIYPWDAVKNFLEKFVQGLDIGPTKTQVGLIQYANNPRVVFNLNTYKTKEEMIVATSQTSQYGGDLTNTFGAIQYARKYAYSAASGGRRSATKVMVVVTDGESHDGSMLKAVIDQCNHDNILRFGIAVLGYLNRNALDTKNLIKEIKAIASIPTERYFFNVSDEAALLEKAGTLGEQIFSIEGTVQGGDNFQMEMSQVGFSADYSSQNDILMLGAVGAFGWSGTIVQKTSHGHLIFPKQAFDQILQDRNHSSYLGYSVAAISTGESTHFVAGAPRANYTGQIVLYSVNENGNITVIQAHRGDQIGSYFGSVLCSVDVDKDTITDVLLVGAPMYMSDLKKEEGRVYLFTIKKGILGQHQFLEGPEGIENTRFGSAIAALSDINMDGFNDVIVGSPLENQNSGAVYIYNGHQGTIRTKYSQKILGSDGAFRSHLQYFGRSLDGYGDLNGDSITDVSIGAFGQVVQLWSQSIADVAIEASFTPEKITLVNKNAQIILKLCFSAKFRPTKQNNQVAIVYNITLDADGFSSRVTSRGLFKENNERCLQKNMVVNQAQSCPEHIIYIQEPSDVVNSLDLRVDISLENPGTSPALEAYSETAKVFSIPFHKDCGEDGLCISDLVLDVRQIPAAQEQPFIVSNQNKRLTFSVTLKNKRESAYNTGIVVDFSENLFFASFSLPVDGTEVTCQVAASQKSVACDVGYPALKREQQVTFTINFDFNLQNLQNQASLSFQALSESQEENKADNLVNLKIPLLYDAEIHLTRSTNINFYEISSDGNVPSIVHSFEDVGPKFIFSLKVTTGSVPVSMATVIIHIPQYTKEKNPLMYLTGVQTDKAGDISCNADINPLKIGQTSSSVSFKSENFRHTKELNCRTASCSNVTCWLKDVHMKGEYFVNVTTRIWNGTFASSTFQTVQLTAAAEINTYNPEIYVIEDNTVTIPLMIMKPDEKAEVPTGVIIGSIIAGILLLLALVAILWKLGFFKRKYEKMTKNPDEIDETTELSS

SEQ ID NO: 5461 - DNA, 5133 bp, Homo sapien
cctctttcaccctgtctaggttgccagcaaatcccacgggcctcctgacgctgcccctggggccacaggtccctcgagtgctggaaggatgaaggattcctgcatcactgtgatggccatggcgctgctgtctgggttctttttcttcgcgccggcctcgagctacaacctggacgtgcggggcgcgcggagcttctccccaccgcgcgccgggaggcactttggataccgcgtcctgcaggtcggaaacggggtcatcgtgggagctccaggggaggggaacagcacaggaagcctctatcagtgccagtcgggcacaggacactgcctgccagtcaccctgagaggttccaactatacctccaagtacttgggaatgaccttggcaacagaccccacagatggaagcattttggcctgtgaccctgggctgtctcgaacgtgtgaccagaacacctatctgagtggcctgtgttacctcttccgccagaatctgcagggtcccatgctgcaggggcgccctggttttcaggaatgtatcaagggcaacgtagacctggtatttctgtttgatggttcgatgagcttgcagccagatgaatttcagaaaattctggacttcatgaaggatgtgatgaagaaactcagcaacacttcgtaccagtttgctgctgttcagttttccacaagctacaaaacagaatttgatttctcagattatgttaaatggaaggaccctgatgctctgctgaagcatgtaaagcacatgttgctgttgaccaatacctttggtgccatcaattatgtcgcgacagaggtgttccgggaggagctgggggcccggccagatgccaccaaagtgcttatcatcatcacggatggggaggccactgacagtggcaacatcgatgcggccaaagacatcatccgctacatcatcgggattggaaagcattttcagaccaaggagagtcaggagaccctccacaaatttgcatcaaaacccgcgagcgagtttgtgaaaattctggacacatttgagaagctgaaagatctattcactgagctgcagaagaagatctatgtcattgagggcacaagcaaacaggacctgacttccttcaacatggagctgtcctccagcggcatcagtgctgacctcagcaggggccatgcagtcgtgggggcagtaggagccaaggactgggctgggggctttcttgacctgaaggcagacctgcaggatgacacatttattgggaatgaaccattgacaccagaagtgagagcaggctatttgggttacaccgtgacctggctgccctcccggcaaaagacttcgttgctggcctcgggagcccctcgataccagcacatgggccgagtgctgctgttccaagagccacagggcggaggacactggagccaggtccagacaatccatgggacccagattggctcttatttcggtggggagctgtgtggcgtcgacgtggaccaagatggggagacagagctgctgctgattggtgccccactgttctatggggagcagagaggaggccgggtgtttatctaccagagaagacagttggggtttgaagaagtctcagagctgcagggggaccccggctacccactcgggcggtttggagaagccatcactgctctgacagacatcaacggcgatgggctggtagacgtggctgtgggggcccctctggaggagcagggggctgtgtacatcttcaatgggaggcacggggggcttagtccccagccaagtcagcggatagaagggacccaagtgctctcaggaattcagtggtttggacgctccatccatggggtgaaggaccttgaaggggatggcttggcagatgtggctgtgggggctgagagccagatgatcgtgctgagctcccggcccgtggtggatatggtcaccctgatgtccttctctccagctgagatcccagtgcatgaagtggagtgctcctattcaaccagtaacaagatgaaagaaggagttaatatcacaatctgtttccagatcaagtctctctacccccagttccaaggccgcctggttgccaatctcacttacactctgcagctggatggccaccggaccagaagacgggggttgttcccaggagggagacatgaactcagaaggaatatagctgtcaccaccagcatgtcatgcactgacttctcatttcatttcccggtatgtgttcaagacctcatctcccccatcaatgtttccctgaatttctctctttgggaggaggaagggacaccgagggaccaaagggcgcagggcaaggacataccgcccatcctgagaccctccctgcactcggaaacctgggagatcccttttgagaagaactgtggggaggacaagaagtgtgaggcaaacttgagagtgtccttctctcctgcaagatccagagccctgcgtctaactgcttttgccagcctctctgtggagctgagcctgagtaacttggaagaagatgcttactgggtccagctggacctgcacttccccccgggactctccttccgcaaggtggagatgctgaagccccatagccagatacctgtgagctgcgaggagcttcctgaagagtccaggcttctgtccagggcattatcttgcaatgtgagctctcccatcttcaaagcaggccactcggttgctctgcagatgatgtttaatacactggtaaacagctcctggggggactcggttgaattgcacgccaatgtgacctgtaacaatgaggactcagacctcctggaggacaactcagccactaccatcatccccatcctgtaccccatcaacatcctcatccaggaccaagaagactccacactctatgtcagtttcacccccaaaggccccaagatccaccaagtcaagcacatgtaccaggtgaggatccagccttccatccacgaccacaacatacccaccctggaggctgtggttggggtgccacagcctcccagcgaggggcccatcacacaccagtggagcgtgcagatggagcctcccgtgccctgccactatgaggatctggagaggctcccggatgcagctgagccttgtctccccggagccctgttccgctgccctgttgtcttcaggcaggagatcctcgtccaagtgatcgggactctggagctggtgggagagatcgaggcctcttccatgttcagcctctgcagctccctctccatctccttcaacagcagcaagcatttccacctctatggcagcaacgcctccctggcccaggttgtcatgaaggttgacgtggtgtatgagaagcagatgctctacctctacgtgctgagcggcatcggggggctgctgctgctgctgctcattttcatagtgctgtacaaggttggtttcttcaaacggaacctgaaggagaagatggaggctggcagaggtgtcccgaatggaatccctgcagaagactctgagcagctggcatctgggcaagaggctggggatcccggctgcctgaagcccctccatgagaaggactctgagagtggtggtggcaaggactgagtccaggcctgtgaggtgcagagtgcccagaactggactcaggatgcccagggccactctgcctctgcctgcattctgccgtgtgccctcgggcgagtcactgcctctccctggccctcagtttccctatctcgaacatggaactcattcctgaatgtctcctttgcaggctcatagggaagacctgctgagggaccagccaagagggctgcaaaagtgagggcttgtcattaccagacggttcaccagcctctcttggttccttccttggaagagaatgtctgatctaaatgtggagaaactgtagtctcaggacctagggatgttctggccctcacccctgccctgggatgtccacagatgcctccaccccccagaacctgtccttgcacactcccctgcactggagtccagtctcttctgctggcagaaagcaaatgtgacctgtgtcactacgtgactgtggcacacgccttgttcttggccaaagaccaaattccttggcatgccttccagcaccctgcaaaatgagaccctcgtggccttccccagcctcttctagagccgtgatgcctccctgttgaagctctggtgacaccagcctttctcccaggccaggctccttcctgtcttcctgcattcacccagacagctccctctgcctgaaccttccatctcgcccacccctccttccttgaccagcagatcccagctcacgtcacacacttggttgggtcctcacatctttcacacttccaccaccctgcactactccctcaaagcacacgtcatgtttcttcatccggcagcctggatgttttttccctgtttaatgattgacgtacttagcagctatctctcagtgaactgtgagggtaaaggctatacttgtcttgttcaccttgggatgacgccgcatgatatgtcagggcgtgggacatctagtaggtgcttgacataatttcactgaattaatgacagagccagtgggaagatacagaaaaagagggccggggctgggcgcggtggttcacgcctgtaatcccagcactttgggaggccaaggagggtggatcacctgaggtcaggagttagaggccagcctggcgaaaccccatctctactaaaaatacaaaatccaggcgtggtggcacacacctgtagtcccagctactcaggaggttgaggtaggagaattgcttgaacctgggaggtggaggttgcagtgagccaagattgcgccattgcactccagcctgggcaacacagcgagactccgtctcaaggaaaaaataaaaataaaaagcgggcacgggcccggacatccccacccttggaggctgtcttctcaggctctgccctgccctagctccacaccctctcccaggacccatcacgcctgtgcagtggcccccacagaaagactgagctcaaggtgggaaccacgtctgctaacttggagccccagtgccaagcacagtgcctgcatgtatttatccaataaatgtgaaattctgtccaaaaaaaaaaaa

SEQ ID NO: 5462 - protein, 1170 aa, Homo sapien
MKDSCITVMAMALLSGFFFFAPASSYNLDVRGARSFSPPRAGRHFGYRVLQVGNGVIVGAPGEGNSTGSLYQCQSGTGHCLPVTLRGSNYTSKYLGMTLATDPTDGSILACDPGLSRTCDQNTYLSGLCYLFRQNLQGPMLQGRPGFQECIKGNVDLVFLFDGSMSLQPDEFQKILDFMKDVMKKLSNTSYQFAAVQFSTSYKTEFDFSDYVKWKDPDALLKHVKHMLLLTNTFGAINYVATEVFREELGARPDATKVLIIITDGEATDSGNIDAAKDIIRYIIGIGKHFQTKESQETLHKFASKPASEFVKILDTFEKLKDLFTELQKKIYVIEGTSKQDLTSFNMELSSSGISADLSRGHAVVGAVGAKDWAGGFLDLKADLQDDTFIGNEPLTPEVRAGYLGYTVTWLPSRQKTSLLASGAPRYQHMGRVLLFQEPQGGGHWSQVQTIHGTQIGSYFGGELCGVDVDQDGETELLLIGAPLFYGEQRGGRVFIYQRRQLGFEEVSELQGDPGYPLGRFGEAITALTDINGDGLVDVAVGAPLEEQGAVYIFNGRHGGLSPQPSQRIEGTQVLSGIQWFGRSIHGVKDLEGDGLADVAVGAESQMIVLSSRPVVDMVTLMSFSPAEIPVHEVECSYSTSNKMKEGVNITICFQIKSLYPQFQGRLVANLTYTLQLDGHRTRRRGLFPGGRHELRRNIAVTTSMSCTDFSFHFPVCVQDLISPINVSLNFSLWEEEGTPRDQRAQGKDIPPILRPSLHSETWEIPFEKNCGEDKKCEANLRVSFSPARSRALRLTAFASLSVELSLSNLEEDAYWVQLDLHFPPGLSFRKVEMLKPHSQIPVSCEELPEESRLLSRALSCNVSSPIFKAGHSVALQMMFNTLVNSSWGDSVELHANVTCNNEDSDLLEDNSATTIIPILYPINILIQDQEDSTLYVSFTPKGPKIHQVKHMYQVRIQPSIHDHNIPTLEAVVGVPQPPSEGPITHQWSVQMEPPVPCHYEDLERLPDAAEPCLPGALFRCPVVFRQEILVQVIGTLELVGEIEASSMFSLCSSLSISFNSSKHFHLYGSNASLAQVVMKVDVVYEKQMLYLYVLSGIGGLLLLLLIFIVLYKVGFFKRNLKEKMEAGRGVPNGIPAEDSEQLASGQEAGDPGCLKPLHEKDSESGGGKD

SEQ ID NO: 5463 - DNA, 3700 bp, Homo sapien
agccgccgccacccgccgcgcccgacacccgggaggccccgccagcccgcgggagaggcccagcgggagtcgcggaacagcaggcccgagcccaccgcgccgggccccggacgccgcgcggaaaagatgaatttacaaccaattttctggattggactgatcagttcagtttgctgtgtgtttgctcaaacagatgaaaatagatgtttaaaagcaaatgccaaatcatgtggagaatgtatacaagcagggccaaattgtgggtggtgcacaaattcaacatttttacaggaaggaatgcctacttctgcacgatgtgatgatttagaagccttaaaaaagaagggttgccctccagatgacatagaaaatcccagaggctccaaagatataaagaaaaataaaaatgtaaccaaccgtagcaaaggaacagcagagaagctcaagccagaggatattactcagatccaaccacagcagttggttttgcgattaagatcaggggagccacagacatttacattaaaattcaagagagctgaagactatcccattgacctctactaccttatggacctgtcttactcaatgaaagacgatttggagaatgtaaaaagtcttggaacagatctgatgaatgaaatgaggaggattacttcggacttcagaattggatttggctcatttgtggaaaagactgtgatgccttacattagcacaacaccagctaagctcaggaacccttgcacaagtgaacagaactgcaccagcccatttagctacaaaaatgtgctcagtcttactaataaaggagaagtatttaatgaacttgttggaaaacagcgcatatctggaaatttggattctccagaaggtggtttcgatgccatcatgcaagttgcagtttgtggatcactgattggctggaggaatgttacacggctgctggtgttttccacagatgccgggtttcactttgctggagatgggaaacttggtggcattgttttaccaaatgatggacaatgtcacctggaaaataatatgtacacaatgagccattattatgattatccttctattgctcaccttgtccagaaactgagtgaaaataatattcagacaatttttgcagttactgaagaatttcagcctgtttacaaggagctgaaaaacttgatccctaagtcagcagtaggaacattatctgcaaattctagcaatgtaattcagttgatcattgatgcatacaattccctttcctcagaagtcattttggaaaacggcaaattgtcagaaggagtaacaataagttacaaatcttactgcaagaacggggtgaatggaacaggggaaaatggaagaaaatgttccaatatttccattggagatgaggttcaatttgaaattagcataacttcaaataagtgtccaaaaaaggattctgacagctttaaaattaggcctctgggctttacggaggaagtagaggttattcttcagtacatctgtgaatgtgaatgccaaagcgaaggcatccctgaaagtcccaagtgtcatgaaggaaatgggacatttgagtgtggcgcgtgcaggtgcaatgaagggcgtgttggtagacattgtgaatgcagcacagatgaagttaacagtgaagacatggatgcttactgcaggaaagaaaacagttcagaaatctgcagtaacaatggagagtgcgtctgcggacagtgtgtttgtaggaagagggataatacaaatgaaatttattctggcaaattctgcgagtgtgataatttcaactgtgatagatccaatggcttaatttgtggaggaaatggtgtttgcaagtgtcgtgtgtgtgagtgcaaccccaactacactggcagtgcatgtgactgttctttggatactagtacttgtgaagccagcaacggacagatctgcaatggccggggcatctgcgagtgtggtgtctgtaagtgtacagatccgaagtttcaagggcaaacgtgtgagatgtgtcagacctgccttggtgtctgtgctgagcataaagaatgtgttcagtgcagagccttcaataaaggagaaaagaaagacacatgcacacaggaatgttcctattttaacattaccaaggtagaaagtcgggacaaattaccccagccggtccaacctgatcctgtgtcccattgtaaggagaaggatgttgacgactgttggttctattttacgtattcagtgaatgggaacaacgaggtcatggttcatgttgtggagaatccagagtgtcccactggtccagacatcattccaattgtagctggtgtggttgctggaattgttcttattggccttgcattactgctgatatggaagcttttaatgataattcatgacagaagggagtttgctaaatttgaaaaggagaaaatgaatgccaaatgggacacgggtgaaaatcctatttataagagtgccgtaacaactgtggtcaatccgaagtatgagggaaaatgagtactgcccgtgcaaatcccacaacactgaatgcaaagtagcaatttccatagtcacagttaggtagctttagggcaatattgccatggttttactcatgtgcaggttttgaaaatgtacaatatgtataatttttaaaatgttttattattttgaaaataatgttgtaattcatgccagggactgacaaaagacttgagacaggatggttattcttgtcagctaaggtcacattgtgcctttttgaccttttcttcctggactattgaaatcaagcttattggattaagtgatatttctatagcgattgaaagggcaatagttaaagtaatgagcatgatgagagtttctgttaatcatgtattaaaactgatttttagctttacaaatatgtcagtttgcagttatgcagaatccaaagtaaatgtcctgctagctagttaaggattgttttaaatctgttattttgctatttgcctgttagacatgactgatgacatatctgaaagacaagtatgttgagagttgctggtgtaaaatacgtttgaaatagttgatctacaaaggccatgggaaaaattcagagagttaggaaggaaaaaccaatagctttaaaacctgtgtgccattttaagagttacttaatgtttggtaacttttatgccttcactttacaaattcaagccttagataaaagaaccgagcaattttctgctaaaaagtccttgatttagcactatttacatacaggccatactttacaaagtatttgctgaatggggaccttttgagttgaatttattttattatttttattttgtttaatgtctggtgctttctatcacctcttctaatcttttaatgtatttgtttgcaattttggggtaagacttttttatgagtactttttctttgaagttttagcggtcaatttgcctttttaatgaacatgtgaagttatactgtggctatgcaacagctctcacctacgcgagtcttactttgagttagtgccataacagaccactgtatgtttacttctcaccatttgagttgcccatcttgtttcacactagtcacattcttgttttaagtgcctttagttttaacagttcactttttacagtgctatttactgaagttatttattaaatatgcctaaaatacttaaatcgga

SEQ ID NO: 5464 - protein, 798 aa, Homo sapien
MNLQPIFWIGLISSVCCVFAQTDENRCLKANAKSCGECIQAGPNCGWCTNSTFLQEGMPTSARCDDLEALKKKGCPPDDIENPRGSKDIKKNKNVTNRSKGTAEKLKPEDITQIQPQQLVLRLRSGEPQTFTLKFKRAEDYPIDLYYLMDLSYSMKDDLENVKSLGTDLMNEMRRITSDFRIGFGSFVEKTVMPYISTTPAKLRNPCTSEQNCTSPFSYKNVLSLTNKGEVFNELVGKQRISGNLDSPEGGFDAIMQVAVCGSLIGWRNVTRLLVFSTDAGFHFAGDGKLGGIVLPNDGQCHLENNMYTMSHYYDYPSIAHLVQKLSENNIQTIFAVTEEFQPVYKELKNLIPKSAVGTLSANSSNVIQLIIDAYNSLSSEVILENGKLSEGVTISYKSYCKNGVNGTGENGRKCSNISIGDEVQFEISITSNKCPKKDSDSFKIRPLGFTEEVEVILQYICECECQSEGIPESPKCHEGNGTFECGACRCNEGRVGRHCECSTDEVNSEDMDAYCRKENSSEICSNNGECVCGQCVCRKRDNTNEIYSGKFCECDNFNCDRSNGLICGGNGVCKCRVCECNPNYTGSACDCSLDTSTCEASNGQICNGRGICECGVCKCTDPKFQGQTCEMCQTCLGVCAEHKECVQCRAFNKGEKKDTCTQECSYFNITKVESRDKLPQPVQPDPVSHCKEKDVDDCWFYFTYSVNGNNEVMVHVVENPECPTGPDIIPIVAGVVAGIVLIGLALLLIWKLLMIIHDRREFAKFEKEKMNAKWDTGENPIYKSAVTTVVNPKYEGK

SEQ ID NO: 5465 - DNA, 2553 bp, Homo sapien
cccacgcgtccgcggacgcgtgggcggacgcgtgggtgcgccgctgaacggatggctgagggagccccgcggatcgtttaggaaagccggccagctgatcgtcgtgtgttgccacccattcatgtcaagatgactaagtttggatttttgcgattgtcctatgagaagcaggacacacttttgaagcttctcattctgtcaatggctgctgtattatccttctccactcgtctgtttgctgtcctgagatttgaaagtgttatccatgagtttgatccgtactttaattatcggactaccaggttcctggctgaggaggggttttataaattccataactggtttgatgaccgagcctggtaccctttgggacgaatcattggaggaacaatttacccaggtttaatgatcacctctgctgcaatctaccatgtactccattttttccacatcaccatcgacattcggaatgtctgtgtgttcctggcccctctcttctcctccttcaccaccatcgtcacgtaccaccttaccaaagagctcaaggatgcaggggctgggcttcttgctgctgccatgattgctgtagttcctggatatatctcccgatctgtggctggctcctatgataatgaagggattgccatcttttgcatgctactcacctactacatgtggatcaaggcagtaaagactggttccatctgttgggcagctaagtgtgcccttgcttatttctacatggtctcgtcatggggaggttatgtgttcctgatcaacttaattcctctccacgtcctcgtgctgatgctcacaggccgtttctctcaccggatctatgtggcctactgtactgtttactgcctgggcactatactttctatgcagatctcctttgtgggtttccagcctgtcctttcatcagagcacatggcagcctttggggtctttggtctctgccagatccatgcctttgtggattacctgcgcagcaagttgaatccacaacaatttgaagttcttttccggagcgtcatctctctggtaggctttgtccttctcaccgtgggagctctcctcatgctgacaggaaaaatatctccctggacggggcgtttctactcgctgctggatccctcttatgctaagaacaacatccccatcattgcttctgtgtctgagcatcagcccacaacctggtcctcatactattttgacctgcagctcctcgtcttcatgtttccagttggcctctattactgctttagcaacctgtctgatgcccggatttttatcatcatgtatggtgtgaccagcatgtacttttcagctgtaatggtgcgtctaatgctagtgttggcacctgttatgtgcattctctctggcattggagtctcccaggtgctgtccacatacatgaagaatctggacataagtcgtccagacaagaagagcaagaagcaacaggattccacctaccctattaagaatgaagtggcaagtgggatgatactggtcatggctttctttctcatcacctacacctttcattcaacctgggtgaccagtgaggcctactcttctccgtccattgtactatctgcccgtggtggggatggcagtaggatcatatttgatgacttccgagaagcatattattggcttcgtcataatactccagaggatgcgaaggtcatgtcctggtgggattatggctatcagattacagctatggcaaaccgaacaattttagtggacaataacacatggaataatacccatatttctcgagtagggcaggcaatggcgtccacagaggaaaaagcctatgagatcatgagggagctcgatgtcagctatgtgctggtcatttttggaggcctcactgggtattcctctgatgatatcaacaagtttctttggatggtccggattggagggagcacagatacaggcaaacatatcaaggagaatgactattatactccaactggggagttccgtgtggaccgtgaaggttctccagtgctgctcaactgcctcatgtacaagatgtgttactatcgctttggacaggtttacacagaagccaagcgtcctccaggctttgaccgtgtccgaaatgctgagattgggaataaagactttgagcttgatgtcctggaggaagcatataccacagaacattggctggtcaggatatacaaggtaaaggacctggataatcgaggcttgtcaaggacataaatgtcacgtccagctctgatatgcttcgcactgagcacatcacatttaggacgttgaagattttttttttttttttttttttaatatgcagtttgtaagaacaaaactggatggcatcagaattgtctggaagttttgtcttgggcagtatgggctgggccaaatgaaatgatttttataattctaaacaggttaccaaatgaaatgtcatggctttactttggtcaattaaaggggggaatttttttaaaaaaaaaaaaaaaaaaaaaaaaaaaaaaaaaaaaaaaaaaaaaaaaaaaaaaaaaa

SEQ ID NO: 5466 - protein, 705 aa, Homo sapien
MTKFGFLRLSYEKQDTLLKLLILSMAAVLSFSTRLFAVLRFESVIHEFDPYFNYRTTRFLAEEGFYKFHNWFDDRAWYPLGRIIGGTIYPGLMITSAAIYHVLHFFHITIDIRNVCVFLAPLFSSFTTIVTYHLTKELKDAGAGLLAAAMIAVVPGYISRSVAGSYDNEGIAIFCMLLTYYMWIKAVKTGSICWAAKCALAYFYMVSSWGGYVFLINLIPLHVLVLMLTGRFSHRIYVAYCTVYCLGTILSMQISFVGFQPVLSSEHMAAFGVFGLCQIHAFVDYLRSKLNPQQFEVLFRSVISLVGFVLLTVGALLMLTGKISPWTGRFYSLLDPSYAKNNIPIIASVSEHQPTTWSSYYFDLQLLVFMFPVGLYYCFSNLSDARIFIIMYGVTSMYFSAVMVRLMLVLAPVMCILSGIGVSQVLSTYMKNLDISRPDKKSKKQQDSTYPIKNEVASGMILVMAFFLITYTFHSTWVTSEAYSSPSIVLSARGGDGSRIIFDDFREAYYWLRHNTPEDAKVMSWWDYGYQITAMANRTILVDNNTWNNTHISRVGQAMASTEEKAYEIMRELDVSYVLVIFGGLTGYSSDDINKFLWMVRIGGSTDTGKHIKENDYYTPTGEFRVDREGSPVLLNCLMYKMCYYRFGQVYTEAKRPPGFDRVRNAEIGNKDFELDVLEEAYTTEHWLVRIYKVKDLDNRGLSRT

SEQ ID NO: 5467 - DNA, 9517 bp, Homo sapien; identical to SEQ ID NO: 962

SEQ ID NO: 5468 - protein, 2695 aa, Homo sapien; identical to SEQ ID NO: 2372

SEQ ID NO: 5469 - DNA, 3254 bp, Homo sapien; identical to SEQ ID NO: 331

SEQ ID NO: 5470 - protein, 331 aa, Homo sapien; identical to SEQ ID NO: 332

SEQ ID NO: 5471 - DNA, 1797 bp, Homo sapien; identical to SEQ ID NO: 337

SEQ ID NO: 5472 - protein, 347 aa, Homo sapien; identical to SEQ ID NO: 338

SEQ ID NO: 5473 - DNA, 2240 bp, Homo sapien; identical to SEQ ID NO: 1127

SEQ ID NO: 5474 - protein, 427 aa, Homo sapien; identical to SEQ ID NO: 1128

SEQ ID NO: 5475 - DNA, 738 bp, Homo sapien; identical to SEQ ID NO: 2910

SEQ ID NO: 5476 - protein, 225 aa, Homo sapien; identical to SEQ ID NO: 2911

SEQ ID NO: 5477 - DNA, 1261 bp, Homo sapien; identical to SEQ ID NO: 1549

SEQ ID NO: 5478 - protein, 231 aa, Homo sapien; identical to SEQ ID NO: 1550

SEQ ID NO: 5479 - DNA, 4360 bp, Homo sapien
aaattctccaaatgtaccatattcttttctgactcagaaagtatgctaaaatgttttcctcctttaaatctttttcatctagttaactcctatttatgctacagtacttagttttgagtcacttcctcaaaaaaaggttcttgtaactgcccctcatcttacactctgctacatgctgttttaacatacttaatttttttgtacttatctaaatcatcactaaatatcgttaataaattattgaaaattatataattgtaattctatctctagaatataatctccatgaggaaaaagcatcatgttcatgtctaattagttcacattagtagcccctgaagtgtggtgtatacagtagattctgaatgttaaaagaatacacagcaaataatttttgaataattaaatagcattgaaaaaaatgtctagtctccagtgtcattagtcatgctttatgttttctgtcagactctgactgctgttcttgccaagaaaaatgggttgggtaccggtgcaactgttacttcatttccagtgaacagaaaacttggaacgaaagtcggcatctctgtgcttctcagaaatccagcctgcttcagcttcaaaacacagatgaactggcatgtgctgagtctgattttctacattttctttgatctagaaaaatatactatctaaacaagttaaatactttggtttaagtcattaatcacatagtaagtggatggttatattggaattgagttatctgttctgtgtaccttaaagtagtcattgtaaaatctttattaaattccttaatgattatatcatgggaatacaaatcaagataggtgccaaataaagtgaaagaaacttttcaggaagaattcaaagaagataataggtcattatatttacccattttatttgaagaaccaactaaatgactgtgattcttaactcttttaattgaatttataatatcttttataattttatagtttttgtcatctttctgggatataagctagtatggaaatatggtaagaaaacgtacccaattcttttcttttctttttttttttttttttttgaaacagagttttactctgttgcccaggctggagtgcactggtgcaatttcagctcactgcagcctccacctcctgggttcaagtgattctcctgcctcagcctcctgagtagctgggattacagacacctgccaccaggcctggcactttttgtatttttagtagagacagggtttcaccgtattggcgaggctggtcttgaactcctgacctcgggtgatctaccctccttggcctcccaaagtgctaggattacaggcatgagccaccgtgcctggccctaattacccaattcttttttgtttgtttgtttgtttgtttgtttgagatggagtctcgctctgtcgcccaggctggagtgcagtggcgtgatcttggctcactgcaagctccgcctcccgggttcacgccattctcctgcctcagcctcccgagtagctgggactacaggcgcccacaaccacgcccagttaattttgtgtatttttagtagagacgcggtttcaccgtgttagccaggatggtctcgatcttctgacctcatgatctgcccacctctgcctcccaaagtgctgggattacaggcgtgagccaccgtgcccggcccctaattacccagttcttaagaaaaagtgcggccgggcgcagtggctgaaacctgtaatcccagcactttgggaggccgaggagggtggatcacagtcaggagatcgagaccatcctggctaacacggtgaaaccacgtctctactaaaaatacaaaaaattagccgggcgtggtggcgggcgcctgtagtcccagctactcgggaggcggaggcaggagaatggcgtgaacctgggaggcagagcttgcagtgagctgagatcgtcccactgcactccagcctgggcgacagagcaagactccctctcaacaaaaagaaaaaagaaaaagcgaaaaacttctcctgctgcacgtggcacctttgcggattataggttgagtagattatacccatgggattcctccttcacaataccatgattttggaatcaaatttaatctttgatcccccgtgaagaaagtgttccatgaaaactctatctccttttagaaggtttttaattcttcaggaagtgagattttgtggtattttttctccatatatgaatgggcctgataaatgagaactttcagtcttgtgattataccttttaaataggaagttaaaaataatttccgtttgtgtgatggacaggctgaatcttattctaaacactgactttccctcaaaatatgttattcccagaatagattaaaattagattaatgtgattgtcttttacttgaagcaggattttatgagctccagtcaacaattttactggattggactctcttacagtgaggagcacaccgcctggttgtgggagaatggctctgcactctcccagtatctgtaagtttctggcaatcatggcgttttttgctctttatgaatttgtccttaaatgtgactagtaaaggtaacatccaggagcactgtggctgaaataaccttgtctagggcatgagaatacagtaaaaggaaaaagtacaacaaaataacaattttagatctaggcagatctaaaccactctaagtgttaaaatcaaaacagaagataatgcctaatgaaaggaggtcggggtataggatagttggtgcaaaaaaatactgataaccattacatgcttgcctgtattattttaaattttttaattaaaaatatattattttgtagtcacatggacaacaaaaccaaaacattacaaatctccagaaagtgcaatgcataagctctcttagttcaaattaaacatttgaaaggtattatatttcatcctatatcttttgtcagttaactgaagtgcatttttcctaaatcaatcttcatacaagaatgtgaagagggccagggatggtggcttgagcatccaagttaatgctcaagtgacatgaaatttagtgtattcgtggccataaaagaacttttaacatatgctttatttttgccttagtaccagcacttggaagtatatgtgcatgtacagatactcatatacacagaggcagtccaaaaaaatagtatatttttattttatttattctggtagaccccaatattctcagcatgctcttatgttttatatactatagactcattgtctgtatgtgtgtactttttgaatctcattttcatttataaacatgagatttgcagcatcacacagggacaaagtttatgctctggtttgttttcctagactagatcagataatacatcttaaataaaatagaagaaaagcatatcacatatttaaaccattaatgacaacagaaaaacagcaaggaaaaaatccctggcctcagtgctattgattagtgagaaaataactgggtattttgtagcattacactagaaaatcatgaaaattgtggtaactgaaaaaaaaaggactcaatatgttagtatctcactcaaatgcttttaaaattatatcatttaattgaaaaatgccctgaacattcttacttcctttttgtgtatgtgaacattttcttcttcattacagatttccatcatttgaaacttttaatacaaagaactgcatagcgtataatccaaatggaaatgctttagatgaatcctgtgaagataaaaatcgttatatctgtaagcaacagctcatttaaatgtttcttggggcagagaaggtggagagtaaagacccaacattactaacaatgatacagttgcatgttatattattactaattgtctacttctggagtctataaaatgtttttaaacagtgtcatatacaattgtcatgtatgtgaaacaatgtgttttaaaattgatgaaattcgttcacctacatttgagaattataaaattaacataaagaattttgtattttcatttaatgtatataatgttaaattcaatgtagttttattacacatttatgtaattttatttacattcttgctaattctcagcagaaatttaaataagatttaattcacatcaaataaaatttagaaaataaaatttaactcacactgcccaggctggagcatagtggcaagatcatagctcattgcaagctcaagtgatcctcctgactcagcctcccaagtagctaggactgcaggcaccatgtcactatgcccgactaatttttaatttttaattttttgtcaagacaaggtcttgctatgttgcccaggctggtcttgaactcctggcctcaa

SEQ ID NO: 5480 - DNA, 3242 bp, Homo sapien
ggcacgaggctcactcacagcctcccttccttctttctccctccgcctcccgagcaccagcgcgctctgagctgcccccagggtccctcccccgccgccagcagcccatttggagggaggaagtaagggaagaggagaggaaggggagccggaccgactacccagacagagccggtgaatgggtttgtggtgacccccgccccccaccccaccctcccttcccacccgacccccaacccccatccccagttcgagccgccgcccgaaaggccgggccgtcgtcttaggaggagtcgccgccgccgccacctccgccatggagctgatcaccattctcgagaagaccgtgtctcccgatcggctggagctggaagcggcgcagaagttcctggagcgtgcggccgtggagaacctgcccactttccttgtggaactgtccagagtgctggcaaatccaggaaacagtcaggttgccagagttgcagctggtctacaaatcaagaactctttgacatctaaagatccagatatcaaggcacaatatcagcagaggtggcttgctattgatgctaatgctcgacgagaagtcaagaactatgttttgcagacattgggtacagaaacttaccggcctagttctgcctcacagtgtgtggctggtattgcttgtgcagagatcccagtaaaccagtggccagaactcattcctcagctggtggccaatgtcacaaaccccaacagcacagagcacatgaaggagtcgacattggaagccatcggttatatttgccaagatatagacccagagcagctacaagataaatccaatgagattctgactgccataatccaggggatgaggaaagaagagcctagtaataatgtgaagctagctgctacgaatgcactcctgaactcattggagttcaccaaagcaaactttgataaagagtctgaaaggcactttattatgcaggtggtctgtgaagccacacagtgtccagatacgagggtacgagtggctgctttacagaatctggtgaagataatgtccttatattatcagtacatggagacatatatgggtcctgctctttttgcaatcacaatcgaagcaatgaaaagtgacattgatgaggtggctttacaagggatagaattctggtccaatgtctgtgatgaggaaatggatttggccattgaagcttcagaggcagcagaacaaggacggccccctgagcacaccagcaagttttatgcgaagggagcactacagtatctggttccaatcctcacacagacactaactaaacaggacgaaaatgatgatgacgatgactggaacccctgcaaagcagcaggggtgtgcctcatgcttctggccacctgctgtgaagatgacattgtcccacatgtcctccccttcattaaagaacacatcaagaacccagattggcggtaccgggatgcagcagtgatggcttttggttgtatcttggaaggaccagagcccagtcagctcaaaccactagttatacaggctatgcccaccctaatagaattaatgaaagaccccagtgtagttgttcgagatacagctgcatggactgtaggcagaatttgtgagctgcttcctgaagctgccatcaatgatgtctacttggctcccctgctacagtgtctgattgagggtctcagtgctgaacccagagtggcttcaaatgtgtgctgggctttctccagtctggctgaagctgcttatgaagctgcagacgttgctgatgatcaggaagaaccagctacttactgcttatcttcttcatttgaactcatagttcagaagctcctagagactacagacagacctgatggacaccagaacaacctgaggagttctgcatatgaatctctgatggaaattgtgaaaaacagtgccaaggattgttatcctgctgtccagaaaacgactttggtcatcatggaacgactgcaacaggttcttcagatggagtcacatatccagagcacatccgatagaatccagttcaatgaccttcagtctttactctgtgcaactcttcagaatgttcttcggaaagtgcaacatcaagatgctttgcagatctctgatgtggttatggcctccctgttaaggatgttccaaagcacagctgggtctgggggagtacaagaggatgccctgatggcagttagcacactggtggaagtgttgggtggtgaattcctcaagtacatggaggcctttaaacccttcctgggcattggattaaaaaattatgctgaataccaggtttgtttggcagctgtgggcttagtgggagacttgtgccgtgccctgcaatccaacatcatacctttctgtgacgaggtgatgcagctgcttctggaaaatttggggaatgagaacgtccacaggtctgtgaagccgcagattctgtcagtgtttggtgatattgcccttgctattggaggagagtttaaaaaatacttagaggttgtattgaatactcttcagcaggcctcccaagcccaggtggacaagtcagactatgacatggtggattatctgaatgagctaagggaaagctgcttggaagcctatactggaatcgtccagggattaaagggggatcaggagaacgtacacccggatgtgatgctggtacaacccagagtagaatttattctgtctttcattgaccacattgctggagatgaggatcacacagatggagtagtagcttgtgctgctggactaataggggacttatgtacagcatttgggaaggatgtactgaaattagtagaagctaggccaatgatccatgaattgttaactgaagggcggagatcgaagactaacaaagcaaaaacccttgctacatgggcaacaaaagaactgaggaaactgaagaaccaagcttgatctgttaccattgggatgataacctgaggacccccactggaaatctcccatcttttgaaaaacctggaagtgaggagtgtgcacggatgctgaatgtttgggaatgagaggatgagtgagtgaggcttgaaaacacaccacattgaaaatcctgccacagcagcagccgcagccgccaacagcagcgctgttagtgagctaagtaagcactgacttcgtagaaaaccataacatcggccatcttggaaaagagaaaaacaatggagttacttatttaaaaaaaaaaaaaaaaaaa

SEQ ID NO: 5481 - protein, 876 aa, Homo sapien; identical to SEQ ID NO: 1880

SEQ ID NO: 5482 - DNA, 1991 bp, Homo sapien; identical to SEQ ID NO: 1515

SEQ ID NO: 5483 - protein, 525 aa, Homo sapien; identical to SEQ ID NO: 1516

SEQ ID NO: 5484 - DNA, 3868 bp, Homo sapien; identical to SEQ ID NO: 1319

SEQ ID NO: 5485 - protein, 202 aa, Homo sapien; identical to SEQ ID NO: 1320

SEQ ID NO: 5486 - DNA, 848 bp, Homo sapien
cagtctcaatgggggcactggggctggagggcaggggtgggaggctccaggggaggggttccctcctgctagctgtggcaggagccacttctctggtgaccttgttgctggcggtgcctatcactgtcctggctgtgctggccttagtgccccaggatcagggaggactgggtttcagaagctgccagaggaggagccagaaacagatctcagccccgggctcccagctgcccacctcataggcgctccgctgaaggggcaggggctaggctgggagacgacgaaggaacaggcgtttctgacgagcgggacgcagttctcggacgccgaggggctggcgctcccgcaggacggcctctattacctctactgtctcgtcggctaccggggccgggcgccccctggcggcggggacccccagggccgctcggtcacgctgcgcagctctctgtaccgggcggggggcgcctacgggccgggcactcccgagctgctgctcgagggcgccgagacggtgactccagtgctggacccggccaggagacaagggtacgggcctctctggtacacgagcgtggggttcggcggcctggtgcagctccggaggggcgagagggtgtacgtcaacatcagtcaccccgatatggtggacttcgcgagagggaagaccttctttggggccgtgatggtggggtgagggaatatgagtgcgtggtgcgagtgcgtgaatattgggggcccggacgcccaggaccccatggcagtgggaaaaatgtaggagactgtttggaaattgattttgaacctgatgaaaataaagaatggaaagcttcagtgctgccgataaa

SEQ ID NO: 5487 - protein, 77 aa, Homo sapien
MGALGLEGRGGRLQGRGSLLLAVAGATSLVTLLLAVPITVLAVLALVPQDQGGLGFRSCQRRSQKQISAPGSQLPTS

SEQ ID NO: 5488 - DNA, 6928 bp, Homo sapien; identical to SEQ ID NO: 1403

SEQ ID NO: 5489 - protein, 1722 aa, Homo sapien; identical to SEQ ID NO: 1404

SEQ ID NO: 5490 - DNA, 2298 bp, Homo sapien; identical to SEQ ID NO: 653

SEQ ID NO: 5491 - protein, 512 aa, Homo sapien; identical to SEQ ID NO: 654

SEQ ID NO: 5492 - DNA, 1056 bp, Homo sapien; identical to SEQ ID NO: 1215

SEQ ID NO: 5493 - protein, 153 aa, Homo sapien; identical to SEQ ID NO: 1216

SEQ ID NO: 5494 - DNA, 3371 bp, Homo sapien
gctcgggccacgcccacctgtcctgcagcactggatgctttgtgagttggggattgttgcgtcccatatctggacccagaagggacttccctgctcggctggctctcggtttctctgctttcctccggagaaataacagcgtcttccgcgccgcgcatggagcctcccggccgccgcgagtgtccctttccttcctggcgctttcctgggttgcttctggcggccatggtgttgctgctgtactccttctccgatgcctgtgaggagccaccaacatttgaagctatggagctcattggtaaaccaaaaccctactatgagattggtgaacgagtagattataagtgtaaaaaaggatacttctatatacctcctcttgccacccatactatttgtgatcggaatcatacatggctacctgtctcagatgacgcctgttatagagaaacatgtccatatatacgggatcctttaaatggccaagcagtccctgcaaatgggacttacgagtttggttatcagatgcactttatttgtaatgagggttattacttaattggtgaagaaattctatattgtgaacttaaaggatcagtagcaatttggagcggtaagcccccaatatgtgaaaaggttttgtgtacaccacctccaaaaataaaaaatggaaaacacacctttagtgaagtagaagtatttgagtatcttgatgcagtaacttatagttgtgatcctgcacctggaccagatccattttcacttattggagagagcacgatttattgtggtgacaattcagtgtggagtcgtgctgctccagagtgtaaagtggtcaaatgtcgatttccagtagtcgaaaatggaaaacagatatcaggatttggaaaaaaattttactacaaagcaacagttatgtttgaatgcgataagggtttttacctcgatggcagcgacacaattgtctgtgacagtaacagtacttgggatcccccagttccaaagtgtcttaaagtgctgcctccatctagtacaaaacctccagctttgagtcattcagtgtcgacttcttccactacaaaatctccagcgtccagtgcctcaggtcctaggcctacttacaagcctccagtctcaaattatccaggatatcctaaacctgaggaaggaatacttgacagtttggatgtttgggtcattgctgtgattgttattgccatagttgttggagttgcagtaatttgtgttgtcccgtacagatatcttcaaaggaggaagaagaaaggcacatacctaactgatgagacccacagagaagtaaaatttacttctctctgagaaggagagatgagagaaaggtttgcttttatcattaaaaggaaagcagatggtggagctgaatatgccacttaccagactaaatcaaccactccagcagagcagagaggctgaatagattccacaacctggtttgccagttcatcttttgactctattaaaatcttcaatagttgttattctgtagtttcactctcatgagtgcaactgtggcttagctaatattgcaatgtggcttgaatgtaggtagcatcctttgatgcttctttgaaacttgtatgaatttgggtatgaacagattgcctgctttcccttaaataacacttagatttattggaccagtcagcacagcatgcctggttgtattaaagcagggatatgctgtattttataaaattggcaaaattagagaaatatagttcacaatgaaattatattttctttgtaaagaaagtggcttgaaatcttttttgttcaaagattaatgccaactcttaagattattctttcaccaactatagaatgtattttatatatcgttcattgtaaaaagcccttaaaaatatgtgtatactactttggctcttgtgcataaaaacaagaacactgaaaattgggaatatgcacaaacttggcttctttaaccaagaatattattggaaaattctctaaaagttaatagggtaaattctctattttttgtaatgtgttcggtgatttcagaaagctagaaagtgtatgtgtggcatttgttttcactttttaaaacatccctaactgatcgaatatatcagtaatttcagaatcagatgcatcctttcataagaagtgagaggactctgacagccataacaggagtgccacttcatggtgcgaagtgaacactgtagtcttgttgttttcccaaagagaactccgtatgttctcttaggttgagtaacccactctgaattctggttacatgtgtttttctctccctccttaaataaagagaggggttaaacatgccctctaaaagtaggtggttttgaagagaataaattcatcagataacctcaagtcacatgagaatcttagtccatttacattgccttggctagtaaaagccatctatgtatatgtcttacctcatctcctaaaaggcagagtacaaagtaagccatgtatctcaggaaggtaacttcattttgtctatttgctgttgattgtaccaagggatggaagaagtaaatatagctcaggtagcactttatactcaggcagatctcagccctctactgagtcccttagccaagcagtttctttcaaagaagccagcaggcgaaaagcagggactgccactgcatttcatatcacactgttaaaagttgtgttttgaaattttatgtttagttgcacaaattgggccaaagaaacattgccttgaggaagatatgattggaaaatcaagagtgtagaagaataaatactgttttactgtccaaagacatgtttatagtgctctgtaaatgttcctttcctttgtagtctctggcaagatgctttaggaagataaaagtttgaggagaacaaacaggaattctgaattaagcacagagttgaagtttatacccgtttcacatgcttttcaagaatgtcgcaattactaagaagcagataatggtgttttttagaaacctaattgaagtatattcaaccaaatactttaatgtataaaataaatattatacaatatacttgtatagcagtttctgcttcacatttgattttttcaaatttaatatttatattagagatctatatatgtataaatatgtattttgtcaaatttgttacttaaatatatagagaccagttttctctggaagtttgtttaaatgacagaagcgtatatgaattcaagaaaatttaagctgcaaaaatgtatttgctataaaatgagaagtctcactgatagaggttctttattgctcattttttaaaaaatggactcttgaaatctgttaaaataaaattgtacatttggagatgtttca

SEQ ID NO: 5495 - protein, 392 aa, Homo sapien [sequence omitted]

SEQ ID NO: 5496 - DNA, 1861 bp, Homo sapien
ggggggggagatgcagtagccgaaaactgcgcggaggcacgagaggccggggagagcgttctgggtccgagggtccaggtaggggttgagccaccatctgaccgcaagctgcgtcgtgtcgccttctctgcaggcaccatgagccaggacaccgaggtggatatgaaggaggtggagctgaatgagttagagcccgagaagcagccgatgaacgcggcgtctggggcggccatgtccctggcggaagccgagaagaatggtctggtgaagatcaaggtggcggaagacgaggcggaggcggcagccgcggctaagttcacgggcctgtccaaggaggagctgctgaaggtggcaggcagccccggctgggtacgcacccgctgggcactgctgctgctcttctggctcggctggctcggcatgcttgctggtgccgtggtgataatcgtgcgagcgccgcgttgtcgcgagctaccggcgcagaagtggtggcacacgggccccctctaccgcatcggcgaccttcaggccttccagggccacggcgcgggcaacctggcgggtctgaaggggcgtctcgattacctgagctctctgaaggtgaagggccttgtgctgggtccaattcacaagaaccagaaggatgatgtcgctcagactgacttgctgcagatcgaccccaattttggctccaaggaagattttgacagtctcttgcaatcggctaaaaaaaagagcatccgtgtcattctggaccttactcccaactaccggggtgacaactcgtggttctccactcaggttgacactgtggccaccaaggtgaaggatgctctggagttttggctgcaagctggcgtggatgggttccaggttcgggacatagagaatctgaaggatgcatcctcattcttggctgagtggcaaaatatcaccaagggcttcagtggagacaggctcttgattgcggggactaactcctccgaccttcagcagatcctgagcctactcgaatccaacaaagacttgctgttgactagctcatacctgtctgattctggttctactccccagcatacaaaatccctagtcacacagtatttgaatgccactggcaatcgctggtgcagctggagtttgtctcaggcaaggctcctgacttccttcttgccggctcaacttctccgactctaccagctgatgctcttcaccctgccagggacccctcttttcagctacggggatgagattggcctggatgcagctgcccttcctccacagcctatggaggctccagtcatgctgtgggatgagtccagcttccctgacatcccaggggctgtaagtgccaacatgactgtgaagggccagagtgaagaccctggctccctcctttccttgttccggcggctgagtgaccagcggagtaaggagcgctccctactgcatggggacttccacgcgttctccgctgggcctggactcttctcctatatccgccactgggaccagaatgagcgttttctggtagtgcttaactttggggatgtgggcctctcggctggactgcaggcctccgacctgcctgccagcgccagcctgccagccaaggctgacctcctgctcagcacccagccaggccgtgaggagggctcccctcctgagctgggacgcctgaaactggagcctcacgaagggctgctgctccgcttcccctacgcggcctgacctcagcctgacatggacccactacccttctcctttccttcccaggccctttggcttctgattttttttctcttttttaaaacaaacaaacaaactgttgcagattatgagtgaaccccaaatagggtgtttt

SEQ ID NO: 5497 - protein, 529 aa, Homo sapien
MSQDTEVDMKEVELNELEPEKQPMNAASGAAMSLAEAEKNGLVKIKVAEDEAEAAAAAKFTGLSKEELLKVAGSPGWVRTRWALLLLFWLGWLGMLAGAVVIIVRAPRCRELPAQKWWHTGPLYRIGDLQAFQGHGAGNLAGLKGRLDYLSSLKVKGLVLGPIHKNQKDDVAQTDLLQIDPNFGSKEDFDSLLQSAKKKSIRVILDLTPNYRGDNSWFSTQVDTVATKVKDALEFWLQAGVDGFQVRDIENLKDASSFLAEWQNITKGFSGDRLLIAGTNSSDLQQILSLLESNKDLLLTSSYLSDSGSTPQHTKSLVTQYLNATGNRWCSWSLSQARLLTSFLPAQLLRLYQLMLFTLPGTPLFSYGDEIGLDAAALPPQPMEAPVMLWDESSFPDIPGAVSANMTVKGQSEDPGSLLSLFRRLSDQRSKERSLLHGDFHAFSAGPGLFSYIRHWDQNERFLVVLNFGDVGLSAGLQASDLPASASLPAKADLLLSTQPGREEGSPPELGRLKLEPHEGLLLRFPYAA

SEQ ID NO: 5498 - DNA, 670 bp, Homo sapien; identical to SEQ ID NO: 263

SEQ ID NO: 5499 - protein, 152 aa, Homo sapien; identical to SEQ ID NO: 264

SEQ ID NO: 5500 - DNA, 3547 bp, Homo sapien; identical to SEQ ID NO: 1017

SEQ ID NO: 5501 - protein, 574 aa, Homo sapien; identical to SEQ ID NO: 1018

SEQ ID NO: 5502 - DNA, 2150 bp, Homo sapien
ggaggaggaggaggaggaggaagaagaggtagcggcaaggtcgcggtctgaggttccggtgctcgccgccgcccagctcccagccgaggctttctcaaccgcgtcaataaaaggccgccccgacccgcccccgcgccccgcagccctgccggacaccccgggctgcagctgagcgggcgcagacgggccgaggcgggcgccgggcgcgcagggaccgagggaccgagtgctccccatgagcgcacgtgggccgggcggtccgcaagcccggctgagagcgcgccatggggcaggcgggctgcaaggggctctgcctgtcgctgttcgactacaagaccgagaagtatgtcatcgccaagaacaagaaggtgggcctgctgtaccggctgctgcaggcctccatcctggcgtacctggtcgtatgggtgttcctgataaagaagggttaccaagacgtcgacacctccctgcagagtgctgtcatcaccaaagtcaagggcgtggccttcaccaacacctcggatcttgggcagcggatctgggatgtcgccgactacgtcattccagcccagaatgaaggcattcctgatggcgcgtgctccaaggacagcgactgccacgctggggaagcggttacagctggaaacggagtgaagaccggccgctgcctgcggagagagaacttggccaggggcacctgtgagatctttgcctggtgcccgttggagacaagctccaggccggaggagccattcctgaaggaggccgaagacttcaccattttcataaagaaccacatccgtttccccaaattcaacttctccaacaatgtgatggacgtcaaggacagatctttcctgaaatcatgccactttggccccaagaaccactactgccccatcttccgactgggctccgtgatccgctgggccgggagcgacttccaggatatagccctggagggtggcgtgataggaattaatattgaatggaactgtgatcttgataaagctgcctctgagtgccaccctcactattcttttagccgtctggacaataaactttcaaagtctgtctcctccgggtacaacttcagatttgccagatattaccgagacgcagccggggtggagttccgcaccctgatgaaagcctacgggatccgctttgacgtgatggtgaacggcaagggtgctttcttctgcgacctggtactcatctacctcatcaaaaagagagagttttaccgtgacaagaagtacgaggaagtgaggggcctagaagacagttcccaggaggccgaggacgaggcatcggggctggggctatctgagcagctcacatctgggccagggctgctggggatgccggagcagcaggagctgcaggagccacccgaggcgaagcgtggaagcagcagtcagaaggggaacggatctgtgtgcccacagctcctggagccccacaggagcacgtgaattgcctctgcttacgttcaggccctgtcctaaacccagccgtctagcacccagtgatcccatgcctttgggaatcccaggatgctgcccaacgggaaatttgtacattgggtgctatcaatgccacatcacagggaccagccatcacagagcaaagtgacctccacgtctgatgctggggtcatcaggacggacccatcatggctgtctttttgccccaccccctgccgtcagttcttcctttctccgtggctggcttcccgcactagggaacgggttgtaaatggggaacatgacttccttccggagtccttgagcacctcagctaaggaccgcagtgccctgtagagttcctagattacctcactgggaatagcattgtgcgtgtccggaaaagggctccatttggttccagcccactcccctctgcaagtgccgcagcttccctcagagcatactctccagtggatccaagtactctctctcctaaagacaccaccttcctgccagctgtttgcccttaggccagtacacagaattaaagtgggggagatggcagacgctttctgggacctgcccaagatatgtattctctgacactcttatttggtcataaaacaataaatggtgtcaatttcaaaaaaaaaaaaaaaaaaaaaaaaaaaaaaaaaa

SEQ ID NO: 5503 - protein, 397 aa, Homo sapien
MGQAGCKGLCLSLFDYKTEKYVIAKNKKVGLLYRLLQASILAYLVVWVFLIKKGYQDVDTSLQSAVITKVKGVAFTNTSDLGQRIWDVADYVIPAQNEGIPDGACSKDSDCHAGEAVTAGNGVKTGRCLRRENLARGTCEIFAWCPLETSSRPEEPFLKEAEDFTIFIKNHIRFPKFNFSNNVMDVKDRSFLKSCHFGPKNHYCPIFRLGSVIRWAGSDFQDIALEGGVIGINIEWNCDLDKAASECHPHYSFSRLDNKLSKSVSSGYNFRFARYYRDAAGVEFRTLMKAYGIRFDVMVNGKGAFFCDLVLIYLIKKREFYRDKKYEEVRGLEDSSQEAEDEASGLGLSEQLTSGPGLLGMPEQQELQEPPEAKRGSSSQKGNGSVCPQLLEPHRST

SEQ ID NO: 5504 - DNA, 4180 bp, Homo sapien; identical to SEQ ID NO: 504

SEQ ID NO: 5505 - protein, 794 aa, Homo sapien; identical to SEQ ID NO: 505

SEQ ID NO: 5506 - DNA, 741 bp, Homo sapien; identical to SEQ ID NO: 1561

SEQ ID NO: 5507 - protein, 165 aa, Homo sapien; identical to SEQ ID NO: 1562

SEQ ID NO: 5508 - DNA, 2165 bp, Homo sapien
gtcccgttaccgcctcctgctcctgccgcgcgcacccccggggcttcggctccggcacgggtcgcgcccagctttcctgcacctgaggccgccggccagccgccgccatgggtgcctacctctcccagcccaacacggtgaagtgctccggggacggggtcggcgccccgcgcctgccgctgccctacggcttctccgccatgcaaggctggcgcgtctccatggaggatgctcacaactgtattcctgagctggacagtgagacagccatgttttctgtctacgatggacatggaggggaggaagttgccttgtactgtgccaaatatcttcctgatatcatcaaagatcagaaggcctacaaggaaggcaagctacagaaggctttagaagatgccttcttggctattgacgccaaattgaccactgaagaagtcattaaagagctggcacagattgcagggcgacccactgaggatgaagatgaaaaagaaaaagtagctgatgaagatgatgtggacaatgaggaggctgcactgctgcatgaagaggctaccatgactattgaagagctgctgacacgctacgggcagaactgtcacaagggccctccccacagcaaatctggaggtgggacaggcgaggaaccagggtcccagggcctcaatggggaggcaggacctgaggactcaactagggaaactccttcacaagaaaatggccccacagccaaggcctacacaggcttttcctccaactcggaacgtgggactgaggcaggccaagttggtgagcctggcattcccactggtgaggctgggccttcctgctcttcagcctctgacaagctgcctcgagttgctaagtccaagttctttgaggacagtgaggatgagtcagatgaggcggaggaagaagaggaagacagtgaggaatgcagcgaggaagaggatggctacagcagtgaggaggcagagaatgaggaagatgaggatgacaccgaggaggctgaagaggacgatgaagaagaagaagaagagatgatggtgccagggatggaaggcaaagaggagcctggctctgacagtggtacaacagcggtggtggccctgatacgagggaagcagttgattgtagccaacgcaggagactctcgctgtgtggtatctgaggctggcaaagctttagacatgtcctatgatcacaaaccagaggatgaagtagaactagcacgcatcaagaatgctggtggcaaggtcaccatggatgggcgagtcaacgggggcctcaacctctccagagccattggggaccacttctataagagaaacaagaacctgccacctgaggaacagatgatttcagcccttcctgacatcaaggtgctgactctcactgacgaccatgaattcatggtcattgcctgtgatggcatctggaatgtgatgagcagccaggaagttgtagatttcattcaatcaaagatcagccagcgtgatgaaaatggggagcttcggttattgtcatccattgtggaagagctgctggatcagtgcctggcaccagacacttctggggatggtacagggtgtgacaacatgacctgcatcatcatttgcttcaagccccgaaacacagcagagctccagccagagagtggcaagcgaaaactagaggaggtgctctctactgagggggctgaagaaaatggcaacagcgacaagaagaagaaggccaagcgagactagcagtcatccagacccctgcccacctagactgttttctgagccctccggacctgagactgagttttgtctttttcctttagccttagcagtgggtatgaggtgtgcagggggagctgggtggcttcactccgcccattccaaagagggctctccctccacactgcagccgggagcctctgctgtccttcccagccgcctctgctcctcgggctcatcaccggttctgtgcctgtgctctgttgtgttggagggaaggactggcggttctggtttttactctgtgaactttatttaaggacattcttttttattggcggctccatggccctcggccgcttgcacccgctctctgttgtacactttcaatcaacactttttcagactaaaggccaaaacctaatcgtaaaaaaaaaaaaa

SEQ ID NO: 5509 - DNA, 2808 bp, Homo sapien
gcggcggcggcggcgcagtttgctcatactttgtgacttgcggtcacagtggcattcagctccacacttggtagaaccacaggcacgacaagcatagaaacatcctaaacaatcttcatcgaggcatcgaggtccatcccaataaaaatcaggagaccctggctatcatagaccttagtcttcgctggtatactcgctgtctgtcaaccagcggttgactttttttaagccttcttttttctcttttaccagtttctggagcaaattcagtttgccttcctggatttgtaaattgtaatgacctcaaaactttagcagttcttccatctgactcaggtttgcttctctggcggtcttcagaatcaacatccacacttccgtgattatctgcgtgcattttggacaaagcttccaaccaggatacgggaagaagaaatggctggtgatctttcagcaggtttcttcatggaggaacttaatacataccgtcagaagcagggagtagtacttaaatatcaagaactgcctaattcaggacctccacatgataggaggtttacatttcaagttataatagatggaagagaatttccagaaggtgaaggtagatcaaagaaggaagcaaaaaatgccgcagccaaattagctgttgagatacttaataaggaaaagaaggcagttagtcctttattattgacaacaacgaattcttcagaaggattatccatggggaattacataggccttatcaatagaattgcccagaagaaaagactaactgtaaattatgaacagtgtgcatcgggggtgcatgggccagaaggatttcattataaatgcaaaatgggacagaaagaatatagtattggtacaggttctactaaacaggaagcaaaacaattggccgctaaacttgcatatcttcagatattatcagaagaaacctcagtgaaatctgactacctgtcctctggttcttttgctactacgtgtgagtcccaaagcaactctttagtgaccagcacactcgcttctgaatcatcatctgaaggtgacttctcagcagatacatcagagataaattctaacagtgacagtttaaacagttcttcgttgcttatgaatggtctcagaaataatcaaaggaaggcaaaaagatctttggcacccagatttgaccttcctgacatgaaagaaacaaagtatactgtggacaagaggtttggcatggattttaaagaaatagaattaattggctcaggtggatttggccaagttttcaaagcaaaacacagaattgacggaaagacttacgttattaaacgtgttaaatataataacgagaaggcggagcgtgaagtaaaagcattggcaaaacttgatcatgtaaatattgttcactacaatggctgttgggatggatttgattatgatcctgagaccagtgatgattctcttgagagcagtgattatgatcctgagaacagcaaaaatagttcaaggtcaaagactaagtgccttttcatccaaatggaattctgtgataaagggaccttggaacaatggattgaaaaaagaagaggcgagaaactagacaaagttttggctttggaactctttgaacaaataacaaaaggggtggattatatacattcaaaaaaattaattcatagagatcttaagccaagtaatatattcttagtagatacaaaacaagtaaagattggagactttggacttgtaacatctctgaaaaatgatggaaagcgaacaaggagtaagggaactttgcgatacatgagcccagaacagatttcttcgcaagactatggaaaggaagtggacctctacgctttggggctaattcttgctgaacttcttcatgtatgtgacactgcttttgaaacatcaaagtttttcacagacctacgggatggcatcatctcagatatatttgataaaaaagaaaaaactcttctacagaaattactctcaaagaaacctgaggatcgacctaacacatctgaaatactaaggaccttgactgtgtggaagaaaagcccagagaaaaatgaacgacacacatgttagagcccttctgaaaaagtatcctgcttctgatatgcagttttccttaaattatctaaaatctgctagggaatatcaatagatatttaccttttattttaatgtttcctttaattttttactatttttactaatctttctgcagaaacagaaaggttttcttctttttgcttcaaaaacattcttacattttactttttcctggctcatctctttattcttttttttttttttaaagacagagtctcgctctgttgcccaggctggagtgcaatgacacagtcttggctcactgcaacttctgcctcttgggttcaagtgattctcctgcctcagcctcctgagtagctggattacaggcatgtgccacccacccaactaatttttgtgtttttaataaagacagggtttcaccatgttggccaggctggtctcaaactcctgacctcaagtaatccacctgcctcggcctcccaaagtgctgggattacagggatgagccaccgcgcccagcctcatctctttgttctaaagatggaaaaaccacccccaaattttctttttatactattaatgaatcaatcaattcatatctatttattaaatttctaccgcttttaggccaaaaaaatgtaagatcgttctctgcctcacatagcttacaagccagctggagaaatatggtactcattaaaaaaaaaaaaaaagtgatgtacaacc

SEQ ID NO: 5510 - protein, 551 aa, Homo sapien
MAGDLSAGFFMEELNTYRQKQGVVLKYQELPNSGPPHDRRFTFQVIIDGREFPEGEGRSKKEAKNAAAKLAVEILNKEKKAVSPLLLTTTNSSEGLSMGNYIGLINRIAQKKRLTVNYEQCASGVHGPEGFHYKCKMGQKEYSIGTGSTKQEAKQLAAKLAYLQILSEETSVKSDYLSSGSFATTCESQSNSLVTSTLASESSSEGDFSADTSEINSNSDSLNSSSLLMNGLRNNQRKAKRSLAPRFDLPDMKETKYTVDKRFGMDFKEIELIGSGGFGQVFKAKHRIDGKTYVIKRVKYNNEKAEREVKALAKLDHVNIVHYNGCWDGFDYDPETSDDSLESSDYDPENSKNSSRSKTKCLFIQMEFCDKGTLEQWIEKRRGEKLDKVLALELFEQITKGVDYIHSKKLIHRDLKPSNIFLVDTKQVKIGDFGLVTSLKNDGKRTRSKGTLRYMSPEQISSQDYGKEVDLYALGLILAELLHVCDTAFETSKFFTDLRDGIISDIFDKKEKTLLQKLLSKKPEDRPNTSEILRTLTVWKKSPEKNERHTC

SEQ ID NO: 5511 - DNA, 1583 bp, Homo sapien
gattcgctgctccgcagcacggccggagctggtcgggtcaagagtcgggatttgtggggagaggttttccactggtcaagagaaggctttaagaaagacggtattaatctcccgttgcggctcccgcctggtcccatcttctgcccgctcctccaggaaatgaatctgctgccgaatattgagagtccagtgactcggcaggagaagatggcgaccgtgtgggatgaggccgagcaagatggaattggggaggaggtgctcaagatgtccacggaggagatcatccagcgcacacggctgctggacagtgagatcaagatcatgaagagtgaagtgttgagagtcacccatgagctccaagccatgaaggacaagataaaagagaacagtgagaaaatcaaagtgaacaagaccctgccgtaccttgtctccaacgtcatcgagctcctggatgttgatcctaatgaccaagaggaggatggtgccaatattgacctggactcccagaggaagggcaagtgtgctgtgatcaaaacctctacacgacagacgtacttccttcctgtgattgggttggtggatgctgaaaagctaaagccaggagacctggtgggtgtgaacaaagactcctatctgatcctggagacgctgcccacagagtatgactcgcgggtgaaggccatggaggtagacgagaggcccacggagcaatacagtgacattgggggtttggacaagcagatccaggagctggtggaggccattgtcttgccaatgaaccacaaggagaagtttgagaacttggggatccaacctccaaaaggggtgctgatgtatgggcccccagggacggggaagaccctcctggcccgggcctgtgccgcacagactaaggccaccttcctaaagctggctggcccccagctggtgcagatgttcattggagatggtgccaagctagtccgggatgcctttgccctggccaaggagaaagcgccctctatcatcttcattgatgagttggatgccatcggcaccaagcgctttgacagtgagaaggctggggaccgggaggtgcagaggacaatgctggagcttctgaaccagctggatggcttccagcccaacacccaagttaaggtaattgcagccacaaacagggtggacatcctggaccccgccctcctccgctcgggccgccttgaccgcaagatagagttcccgatgcccaatgaggaggcccgggccagaatcatgcagatccactcccgaaagatgaatgtcagtcctgacgtgaactacgaggagctggcccgctgcacagatgacttcaatggggcccagtgcaaggctgtgtgtgtggaggcgggcatgatcgcactgcgcaggggtgccacggagctcacccacgaggactacatggaaggcatcctggaggtgcaggccaagaagaaagccaacctacaatactacgcctagggcacacaggccagccccagtctcacggctgaagtgcgcaataaaagatggtttagggtccctgccaaaaaaaaaaaaaaaaaaaaaaaaaaaaaaaaaaaaaa

SEQ ID NO: 5512 - protein, 439 aa, Homo sapien
MNLLPNIESPVTRQEKMATVWDEAEQDGIGEEVLKMSTEEIIQRTRLLDSEIKIMKSEVLRVTHELQAMKDKIKENSEKIKVNKTLPYLVSNVIELLDVDPNDQEEDGANIDLDSQRKGKCAVIKTSTRQTYFLPVIGLVDAEKLKPGDLVGVNKDSYLILETLPTEYDSRVKAMEVDERPTEQYSDIGGLDKQIQELVEAIVLPMNHKEKFENLGIQPPKGVLMYGPPGTGKTLLARACAAQTKATFLKLAGPQLVQMFIGDGAKLVRDAFALAKEKAPSIIFIDELDAIGTKRFDSEKAGDREVQRTMLELLNQLDGFQPNTQVKVIAATNRVDILDPALLRSGRLDRKIEFPMPNEEARARIMQIHSRKMNVSPDVNYEELARCTDDFNGAQCKAVCVEAGMIALRRGATELTHEDYMEGILEVQAKKKANLQYYA

SEQ ID NO: 5513 - DNA, 5982 bp, Homo sapien; identical to SEQ ID NO: 779

SEQ ID NO: 5514 - protein, 1440 aa, Homo sapien; identical to SEQ ID NO: 780

SEQ ID NO: 5515 - DNA, 3423 bp, Homo sapien; identical to SEQ ID NO: 731

SEQ ID NO: 5516 - protein, 659 aa, Homo sapien; identical to SEQ ID NO: 732

SEQ ID NO: 5517 - DNA, 1764 bp, Homo sapien
atggcctcggaagacattgccaagctggcagagacacttgccaagactcaggtggccgggggacagctgagtttcaaaggcaagagcctcaaactcaacactgcagaagatgctaaagatgtgattaaagagattgaagactttgacagcttggaggctctgcgtctggaaggcaacacagtgggcgtggaagcagccagggtcatcgccaaggccttagagaagaagtcggagttgaagcgctgccactggagtgacatgttcacgggaaggctgcggaccgagatcccaccagccctgatctcactaggggaaggactcatcacagctggggctcagctggtggagctggacttaagcgacaacgcattcgggcccgacggtgtgcaaggcttcgaggccctgctcaagagctcagcctgcttcaccctgcaggaactcaagctcaacaactgtggcatgggcattggcggcggcaagatcctggctgcagctctgaccgaatgtcaccggaaatccagtgcccaaggcaagcctctggccctgaaggtctttgtggctggcagaaaccgtctggagaatgatggcgccactgccttggcagaagcttttagggtcatcgggaccctggaggaggtccacatgccacagaatgggatcaaccaccctggcatcactgccctggcccaggctttcgctgtcaaccccctgctgcgggtcatcaacctgaatgacaacaccttcactgagaagggcgccgtggccatggccgagaccttgaagaccttgcggcaggtggaggtgattaattttggggactgcctggtgcgctccaagggtgcagttgccattgcagatgccatccgcggcggcctgcccaagctaaaggagctgaacttgtcattctgtgaaatcaagagggatgctgccctggctgttgctgaggccatggcagacaaagctgagctggagaagctggacctgaatggcaacaccctgggagaagaaggctgtgaacagcttcaggaggtgctggagggcttcaacatggccaaggtgctggcgtccctcagtgatgacgaggacgaggaggaggaggaggaaggagaagaggaagaagaggaagcagaagaagaggaggaggaagatgaggaagaggaggaagaagaggaggaggaggaggaagaagagcctcagcagcgagggcagggagagaagtcagccacgccctcacggaagattctggaccctaacactggggagccagctcccgtgctgtcctccccacctcctgcagacgtctccaccttcctggcttttccctctccagagaagctcctgcgcctagggcccaagagctccgtgctgatagcccagcagactgacacgtctgaccccgagaaggtggtctctgccttcctaaaggtgtcatctgtgttcaaggacgaagctactgtgaggatggcagtgcaggatgcagtagatgccctgatgcagaaggctttcaactcctcgtccttcaactccaacaccttcctcaccaggctcctcgtgcacatgggtctgctcaagagtgaagacaaggtcaaggccattgccaacctgtacggccccctgatggcgctgaaccacatggtgcagcaggactatttccccaaggcccttgcacccctgctgctggcgttcgtgaccaagcccaacagcgccctggaatcctgctccttcgcccgccacagtctgctgcagacgctgtacaaggtctag

SEQ ID NO: 5518 - protein, 587 aa, Homo sapien; identical to SEQ ID NO: 2521

SEQ ID NO: 5519 - DNA, 2104 bp, Homo sapien
gctgttgtcgctcgctcagcgtctccctctcggccgccctctcctcgggacgatggcgcgcggtggccgcggccgccgcctggggttagccctggggctgctgctggcgctggtgctggcgccgcgggttctgcgggccaagcccacggtgcgcaaagagcgcgtggtgcggcccgactcggagctgggcgagcggccccctgaggacaaccagagcttccagtacgaccacgaggccttcctgggcaaggaggactccaagaccttcgaccagctcaccccggacgagagcaaggagaggctagggaagattgttgatcgaatcgacaatgatggggatggctttgtcactactgaggagctgaaaacctggatcaaacgggtgcagaaaagatacatctttgataatgtcgccaaagtctggaaggattatgatagggacaaggatgataaaatttcctgggaagaatacaaacaagccacctatggttactacctaggaaaccccgcagagtttcatgattcttcagatcatcacacctttaaaaagatgctgccacgtgatgagagaagattcaaagctgcagacctcaatggtgacctgacagctactcgggaggagttcactgcctttctgcatcctgaagagtttgaacatatgaaggaaattgtggttttggaaaccctggaggacatcgacaagaacggggatgggtttgtggatcaggatgagtatattgcggatatgttttcccatgaggagaatggccctgagccagactgggttttatcagaacgggagcagtttaacgaattccgggatctgaacaaggacgggaagttagacaaagatgagattcgccactggatcctccctcaagattatgatcacgcacaggctgaggccaggcatctggtatatgaatcagacaaaaacaaggatgagaagctaactaaagaggaaatattggagaactggaacatgtttgttggaagccaagctaccaattacggggaagatctcacaaaaaatcatgatgagctttgatagacactcaccagaatatggcagactgtcataggcattctgttattgtcttggattgttgctacaattgtctaattacagcagttgtgatcccacaaaaagcaagtttatacctcagattggggtataaaaattgtttttcgctcagtatttactggaaaatggacatcactagtctttcagtaagatttctctcaaaacacgtgaaaaccttggtaaattgcaattctttctggggatatattggtacaacatgacttaaaacttttttttttctattaaaacttaaaggggaacaaaacttgaaaaagccctgttcttcagaaggtgagtgggttgagggaggcagtaatatgaagtgactgctgtgtattttaactaccagatttttatatttgccactgttagatagttggaaaggggaaattctgtttaagcgaaagtggtatcatcctaggtaagcttatttcagaacaagtctaatatatcagattctttcttttcgactttatactctgagttattacttactgtaagtggtgtatatgaaacctccatgcattttccagtatggatctgctaatatgcacagtaaatccatgtctttgtttgtttttctattaagaagcaatcaagaaagataatgtgaaaaagaaaggaatttagaggtagggaaaagatgaatgtcagacatgtgaagaactatagtaaaaatgataaaccacctaaatatccttgaacctaccttaaaatgccaatgaggtaggcctgatctttgaatagtggctaggatacaatgcatttcctcagtgatcactgattagaatgagttggtgggatccttgggaagccaaacggagcggggttctggatcatgtcccatccagtccagtgaatccccgacccgcagacctgccccccccgcaacagcttataccatggaatgaggacaaggtgatactctgagctgtggactgaactggcagacacaacctgtacagattgaaatttcaccttgtaaggaggaagtgaatgaaataaaggatccccctaagg

SEQ ID NO: 5520 - protein, 331 aa, Homo sapien
MARGGRGRRLGLALGLLLALVLAPRVLRAKPTVRKERVVRPDSELGERPPEDNQSFQYDHEAFLGKEDSKTFDQLTPDESKERLGKIVDRIDNDGDGFVTTEELKTWIKRVQKRYIFDNVAKVWKDYDRDKDDKISWEEYKQATYGYYLGNPAEFHDSSDHHTFKKMLPRDERRFKAADLNGDLTATREEFTAFLHPEEFEHMKEIVVLETLEDIDKNGDGFVDQDEYIADMFSHEENGPEPDWVLSEREQFNEFRDLNKDGKLDKDEIRHWILPQDYDHAQAEARHLVYESDKNKDEKLTKEEILENWNMFVGSQATNYGEDLTKNHDEL

SEQ ID NO: 5521 - DNA, 2337 bp, Homo sapien; identical to SEQ ID NO: 1465
  Unsure 61, 2277: Unknown base

SEQ ID NO: 5522 - protein, 619 aa, Homo sapien; identical to SEQ ID NO: 1466
  Unsure 61, 2277: Unknown amino acid

SEQ ID NO: 5523 - DNA, 542 bp, Homo sapien; identical to SEQ ID NO: 1629

SEQ ID NO: 5524 - protein, 96 aa, Homo sapien; identical to SEQ ID NO: 1630

SEQ ID NO: 5525 - DNA, 776 bp, Homo sapien; identical to SEQ ID NO: 1295

SEQ ID NO: 5526 - protein, 92 aa, Homo sapien; identical to SEQ ID NO: 1296

SEQ ID NO: 5527 - DNA, 696 bp, Homo sapien; identical to SEQ ID NO: 1061

SEQ ID NO: 5528 - protein, 92 aa, Homo sapien; identical to SEQ ID NO: 1062

SEQ ID NO: 5529 - DNA, 2577 bp, Homo sapien
cacatgtcggcgcaggcggccaaagtcagtaaaaaggagctcaactccaaccacgacggggccgacgagacctcagaaaaagaacagcaagaagcgattgaacacattgatgaagtacaaaatgaaatagacagacttaatgaacaagccagtgaggagattttgaaagtagaacagaaatataacaaactccgccaaccattttttcagaagaggtcagaattgatcgccaaaatcccaaatttttgggtaacaacatttgtcaaccatccacaagtgtctgcactgcttggggaggaagatgaagaggcactgcattatttgaccagagttgaagtgacagaatttgaagatattaaatcaggttacagaatagatttttattttgatgaaaatccttactttgaaaataaagttctctccaaagaatttcatctgaatgagagtggtgatccatcttcgaagtccaccgaaatcaaatggaaatctggaaaggatttgacgaaacgttcgagtcaaacgcagaataaagccagcaggaagaggcagcatgaggaaccagagagcttctttacctggtttactgaccattctgatgcaggtgctgatgagttaggagaggtcatcaaagatgatatttggccaaacccattacagtactacttggttcccgatatggatgatgaagaaggagaaggagaagaagatgatgatgatgatgaagaggaggaaggattagaagatattgacgaagaaggggatgaggatgaaggtgaagaagatgaagatgatgatgaaggggaggaaggagaggaggatgaaggagaagatgactaaatagaacactgatggattccaaccttcctttttttaaattttctccagtccctgggagcaagttgcagtctttttttttttttttttttttttccctcttgtgctcagtcgccctgttcttgaggtctcttttctctactccatggttctcaatttatttggggggaaataccttgagcagaatacaatgggaaaagagtctctacccctttctgttcgaagttcatttttatcccttcctgtctgaacaaaaactgtatggaatcaacaccaccgagctctgtgggaaaaaagaaaaacctgctccctttgctctgctggaagctggagggtgctaggcccctgtgtagtagtgtatagaattctagcttttttcctcctttctctgtatattgggctcagagagtacactgtgtctctatgtgaatatggacagttagcatttaccaacatgtatctgtctactttctcttgtttaaaaaaagaaaaaaaaacttaaaaaaatggggttatagaaggtcagcaaaggggtggggtttgagatgtttgggtgggttagtgggcattttgacaacatggcttctcctttggcatgtttaattgtgatatttgacagacatccttgcagtttaagatgacacttttaaaataaattctctcctaatgatgacttgagccctgccactcaatgggagaatcagcagaacctgtaggatcttatttggaattgacattctctattgtaattttgttcctgtttatttttgggtttctttttgtttcactggaaaggaaagatgatgctcagttttaaacgttaaaagtgtacaagttgctttgttacaataaaactaaatgtgtacacaaaggatttgatgcttttctctcagcataggtatgcttactatgaccttccaagtttgacttgtataacatcactgtcaaactttgtcaccctaacttcgtattttttgatacgcacttttgcaggatgacctcagggctatgtggattgagtaatgggatttgaatcaatgtattaatatctccatagctgggaaacgtgggttcaatttgccattggtttctgaaaagtattcacatcatttgggataccagatagctcaatactctctgagtacattgtgcccttgatttttatctccaagtggcagtttttaaaattggccttttacctggatataaattaattgtgcctgccaccaccatccaacagacctggtgctctaatgccaagttatacacgggacagttgctggcatgtcttcattggctctctaaaatgtggccaagaagataggctctcagtaagaagtctgatggtgagcagtaactgtccctgctttctggtataaagctctcaaatgtgaccatgtgaatctgggtgggataatggactcagctctgtctgctcaatgccattgtgcagagaagcaccctaatgcataagctttttaatgctgtaaaatatagtcgctgaaattaaatgccactttttcagaggtgaattaatggacagtctggtgaacttcaaaagctttttgatgtataaaacttgataaatggaactattccatcaataggcaaaagtgtaacaacctatctagatggatagtatgtaatttctgcacaggtctctgtttagtaaatacatcactgtataccgatcaggaatcttgctccaataaaggaacataaagatttaaaaaaaaaaaaaaa

SEQ ID NO: 5530 - protein, 277 aa, Homo sapien
MSAQAAKVSKKELNSNHDGADETSEKEQQEAIEHIDEVQNEIDRLNEQASEEILKVEQKYNKLRQPFFQKRSELIAKIPNFWVTTFVNHPQVSALLGEEDEEALHYLTRVEVTEFEDIKSGYRIDFYFDENPYFENKVLSKEFHLNESGDPSSKSTEIKWKSGKDLTKRSSQTQNKASRKRQHEEPESFFTWFTDHSDAGADELGEVIKDDIWPNPLQYYLVPDMDDEEGEGEEDDDDDEEEEGLEDIDEEGDEDEGEEDEDDDEGEEGEEDEGEDD

SEQ ID NO: 5531 - DNA, 1789 bp, Homo sapien; identical to SEQ ID NO: 1485

SEQ ID NO: 5532 - protein, 335 aa, Homo sapien; identical to SEQ ID NO: 1486

SEQ ID NO: 5533 - DNA, 5681 bp, Homo sapien
cgccgcggtgctgagggggaggggagccggcgagcgcgcgcgcagcgggggcgcgggtggcgcgcgtgtgtgtgaagggggggcggtggccgaggcgggcgggcgcgcgcgcgaggcttcccctcgtttggcggcggcggcggcttctttgtttcgtgaagagaagcgagacgcccattctgcccccggccccgcgcggaggggcgggggaggcgccgggaagtcgacggcgccggcggctcctgcaggaggccactgtctgcagctcccgtgaagatgtccactccagacccacccctgggcggaactcctcggccaggtccttccccgggccctggcccttcccctggagccatgctgggccctagcccgggtccctcgccgggctccgcccacagcatgatggggcccagcccagggccgccctcagcaggacaccccatccccacccaggggcctggagggtaccctcaggacaacatgcaccagatgcacaagcccatggagtccatgcatgagaagggcatgtcggacgacccgcgctacaaccagatgaaaggaatggggatgcggtcagggggccatgctgggatggggcccccgcccagccccatggaccagcactcccaaggttacccctcgcccctgggtggctctgagcatgcctctagtccagttccagccagtggcccgtcttcggggccccagatgtcttccgggccaggaggtgccccgctggatggtgctgacccccaggccttggggcagcagaaccggggcccaaccccatttaaccagaaccagctgcaccagctcagagctcagatcatggcctacaagatgctggccagggggcagcccctccccgaccacctgcagatggcggtgcagggcaagcggccgatgcccgggatgcagcagcagatgccaacgctacctccaccctcggtgtccgcaacaggacccggccctggccctggccctggccccggcccgggtcccggcccggcacctccaaattacagcaggcctcatggtatgggagggcccaacatgcctcccccaggaccctcgggcgtgccccccgggatgccaggccagcctcctggagggcctcccaagccctggcctgaaggacccatggcgaatgctgctgcccccacgagcacccctcagaagctgattcccccgcagccaacgggccgcccttcccccgcgccccctgccgtcccacccgccgcctcgcccgtgatgccaccgcagacccagtcccccgggcagccggcccagcccgcgcccatggtgccactgcaccagaagcagagccgcatcacccccatccagaagccgcggggcctcgaccctgtggagatcctgcaggagcgcgagtacaggctgcaggctcgcatcgcacaccgaattcaggaacttgaaaaccttcccgggtccctggccggggatttgcgaaccaaagcgaccattgagctcaaggccctcaggctgctgaacttccagaggcagctgcgccaggaggtggtggtgtgcatgcggagggacacagcgctggagacagccctcaatgctaaggcctacaagcgcagcaagcgccagtccctgcgcgaggcccgcatcactgagaagctggagaagcagcagaagatcgagcaggagcgcaagcgccggcagaagcaccaggaatacctcaatagcattctccagcatgccaaggatttcaaggaatatcacagatccgtcacaggcaaaatccagaagctgaccaaggcagtggccacgtaccatgccaacacggagcgggagcagaagaaagagaacgagcggatcgagaaggagcgcatgcggaggctcatggctgaagatgaggaggggtaccgcaagctcatcgaccagaagaaggacaagcgcctggcctacctcttgcagcagacagacgagtacgtggctaacctcacggagctggtgcggcagcacaaggctgcccaggtcgccaaggagaaaaagaagaaaaagaaaaagaagaaggcagaaaatgcagaaggacagacgcctgccattgggccggatggcgagcctctggacgagaccagccagatgagcgacctcccggtgaaggtgatccacgtggagagtgggaagatcctcacaggcacagatgcccccaaagccgggcagctggaggcctggctcgagatgaacccggggtatgaagtagctccgaggtctgatagtgaagaaagtggctcagaagaagaggaagaggaggaggaggaagagcagccgcaggcagcacagcctcccaccctgcccgtggaggagaagaagaagattccagatccagacagcgatgacgtctctgaggtggacgcgcggcacatcattgagaatgccaagcaagatgtcgatgatgaatatggcgtgtcccaggcccttgcacgtggcctgcagtcctactatgccgtggcccatgctgtcactgagagagtggacaagcagtcagcgcttatggtcaatggtgtcctcaaacagtaccagatcaaaggtttggagtggctggtgtccctgtacaacaacaacctgaacggcatcctggccgacgagatgggcctggggaagaccatccagaccatcgcgctcatcacgtacctcatggagcacaaacgcatcaatgggcccttcctcatcatcgtgcctctctcaacgctgtccaactgggcgtacgagtttgacaagtgggccccctccgtggtgaaggtgtcttacaagggatccccagcagcaagacgggcctttgtcccccagctccggagtgggaagttcaacgtcttgctgacgacgtacgagtacatcatcaaagacaagcacatcctcgccaagatccgttggaagtacatgattgtggacgaaggtcaccgcatgaagaaccaccactgcaagctgacgcaggtgctcaacacgcactatgtggcaccccgccgcctgctgctgacgggcacaccgctgcagaacaagcttcccgagctctgggcgctgctcaacttcctgctgcccaccatcttcaagagctgcagcaccttcgagcagtggtttaacgcaccctttgccatgaccggggaaaaggtggacctgaatgaggaggaaaccattctcatcatccggcgtctccacaaagtgctgcggcccttcttgctccgacgactcaagaaggaagtcgaggcccagttgcccgaaaaggtggagtacgtcatcaagtgcgacatgtctgcgctgcagcgagtgctctaccgccacatgcaggccaagggcgtgctgctgactgatggctccgagaaggacaagaagggcaaaggcggcaccaagaccctgatgaacaccatcatgcagctgcggaagatctgcaaccacccctacatgttccagcacatcgaggagtccttttccgagcacttggggttcactggcggcattgtccaagggctggacctgtaccgagcctcgggtaaatttgagcttcttgatagaattcttcccaaactccgagcaaccaaccacaaagtgctgctgttctgccaaatgacctccctcatgaccatcatggaagattactttgcgtatcgcggctttaaatacctcaggcttgatggaaccacgaaggcggaggaccggggcatgctgctgaaaaccttcaacgagcccggctctgagtacttcatcttcctgctcagcacccgggctggggggctcggcctgaacctccagtcggcagacactgtgatcatttttgacagcgactggaatcctcaccaggacctgcaagcgcaggaccgagcccaccgcatcgggcagcagaacgaggtgcgtgtgctccgcctctgcaccgtcaacagcgtggaggagaagatcctagctgcagccaagtacaagctcaacgtggaccagaaggtgatccaggccggcatgttcgaccagaagtcctccagccatgagcggcgcgccttcctgcaggccatcctggagcacgaggagcaggatgagagcagacactgcagcacgggcagcggcagtgccagcttcgcccacactgcccctccgccagcgggcgtcaaccccgacttggaggagccacctctaaaggaggaagacgaggtgcccgacgacgagaccgtcaaccagatgatcgcccggcacgaggaggagtttgatctgttcatgcgcatggacctggaccgcaggcgcgaggaggcccgcaaccccaagcggaagccgcgcctcatggaggaggacgagctcccctcgtggatcatcaaggacgacgcggaggtggagcggctgacctgtgaggaggaggaggagaagatgttcggccgtggctcccgccaccgcaaggaggtggactacagcgactcactgacggagaagcagtggctcaaggccatcgaggagggcacgctggaggagatcgaagaggaggtccggcagaagaaatcatcacggaagcgcaagcgagacagcgacgccggctcctccaccccgaccaccagcacccgcagccgcgacaaggacgacgagagcaagaagcagaagaagcgcgggcggccgcctgccgagaaactctcccctaacccacccaacctcaccaagaagatgaagaagattgtggatgccgtgatcaagtacaaggacagcagcagtggacgtcagctcagcgaggtcttcatccagctgccctcgcgaaaggagctgcccgagtactacgagctcatccgcaagcccgtggacttcaagaagataaaggagcgcattcgcaaccacaagtaccgcagcctcaacgacctagagaaggacgtcatgctcctgtgccagaacgcacagaccttcaacctggagggctccctgatctatgaagactccatcgtcttgcagtcggtcttcaccagcgtgcggcagaaaatcgagaaggaggatgacagtgaaggcgaggagagtgaggaggaggaagagggcgaggaggaaggctccgaatccgaatctcggtccgtcaaagtgaagatcaagcttggccggaaggagaaggcacaggaccggctgaagggcggccggcggcggccgagccgagggtcccgagccaagccggtcgtgagtgacgatgacagtgaggaggaacaagaggaggaccgctcaggaagtggcagcgaagaagactgagccccgacattccagtctcgaccccgagcccctcgttccagagctgagatggcataggccttagcagtaacgggtagcagcagatgtagtttcagacttggagtaaaactgtataaacaaaagaatcttccatatttatacagcagagaagctgtaggactgtttgtgactggccctgtcctggcatcagtagcatctgtaacagcattaactgtcttaaagagagagagagagaattccgaattggggaacacacgatacctgtttttcttttccgttgctggcagtactgttgcgccgcagtttggagtcactgtagttaagtgtggatgcatgtgcgtcaccgtccactcctcctactgtattttattggacaggtcagactcgccgggggcccggcgagggtatgtcagtgtcactggatgtcaaacagtaataaattaaaccaacaacaaaacgca

SEQ ID NO: 5534 - protein, 1647 aa, Homo sapien
MSTPDPPLGGTPRPGPSPGPGPSPGAMLGPSPGPSPGSAHSMMGPSPGPPSAGHPIPTQGPGGYPQDNMHQMHKPMESMHEKGMSDDPRYNQMKGMGMRSGGHAGMGPPPSPMDQHSQGYPSPLGGSEHASSPVPASGPSSGPQMSSGPGGAPLDGADPQALGQQNRGPTPFNQNQLHQLRAQIMAYKMLARGQPLPDHLQMAVQGKRPMPGMQQQMPTLPPPSVSATGPGPGPGPGPGPGPGPAPPNYSRPHGMGGPNMPPPGPSGVPPGMPGQPPGGPPKPWPEGPMANAAAPTSTPQKLIPPQPTGRPSPAPPAVPPAASPVMPPQTQSPGQPAQPAPMVPLHQKQSRITPIQKPRGLDPVEILQEREYRLQARIAHRIQELENLPGSLAGDLRTKATIELKALRLLNFQRQLRQEVVVCMRRDTALETALNAKAYKRSKRQSLREARITEKLEKQQKIEQERKRRQKHQEYLNSILQHAKDFKEYHRSVTGKIQKLTKAVATYHANTEREQKKENERIEKERMRRLMAEDEEGYRKLIDQKKDKRLAYLLQQTDEYVANLTELVRQHKAAQVAKEKKKKKKKKKAENAEGQTPAIGPDGEPLDETSQMSDLPVKVIHVESGKILTGTDAPKAGQLEAWLEMNPGYEVAPRSDSEESGSEEEEEEEEEEQPQAAQPPTLPVEEKKKIPDPDSDDVSEVDARHIIENAKQDVDDEYGVSQALARGLQSYYAVAHAVTERVDKQSALMVNGVLKQYQIKGLEWLVSLYNNNLNGILADEMGLGKTIQTIALITYLMEHKRINGPFLIIVPLSTLSNWAYEFDKWAPSVVKVSYKGSPAARRAFVPQLRSGKFNVLLTTYEYIIKDKHILAKIRWKYMIVDEGHRMKNHHCKLTQVLNTHYVAPRRLLLTGTPLQNKLPELWALLNFLLPTIFKSCSTFEQWFNAPFAMTGEKVDLNEEETILIIRRLHKVLRPFLLRRLKKEVEAQLPEKVEYVIKCDMSALQRVLYRHMQAKGVLLTDGSEKDKKGKGGTKTLMNTIMQLRKICNHPYMFQHIEESFSEHLGFTGGIVQGLDLYRASGKFELLDRILPKLRATNHKVLLFCQMTSLMTIMEDYFAYRGFKYLRLDGTTKAEDRGMLLKTFNEPGSEYFIFLLSTRAGGLGLNLQSADTVIIFDSDWNPHQDLQAQDRAHRIGQQNEVRVLRLCTVNSVEEKILAAAKYKLNVDQKVIQAGMFDQKSSSHERRAFLQAILEHEEQDESRHCSTGSGSASFAHTAPPPAGVNPDLEEPPLKEEDEVPDDETVNQMIARHEEEFDLFMRMDLDRRREEARNPKRKPRLMEEDELPSWIIKDDAEVERLTCEEEEEKMFGRGSRHRKEVDYSDSLTEKQWLKAIEEGTLEEIEEEVRQKKSSRKRKRDSDAGSSTPTTSTRSRDKDDESKKQKKRGRPPAEKLSPNPPNLTKKMKKIVDAVIKYKDSSSGRQLSEVFIQLPSRKELPEYYELIRKPVDFKKIKERIRNHKYRSLNDLEKDVMLLCQNAQTFNLEGSLIYEDSIVLQSVFTSVRQKIEKEDDSEGEESEEEEEGEEEGSESESRSVKVKIKLGRKEKAQDRLKGGRRRPSRGSRAKPVVSDDDSEEEQEEDRSGSGSEED

SEQ ID NO: 5535 - DNA, 3455 bp, Homo sapien; identical to SEQ ID NO: 1893

SEQ ID NO: 5536 - protein, 770 aa, Homo sapien; identical to SEQ ID NO: 1894

SEQ ID NO: 5537 - DNA, 2910 bp, Homo sapien; identical to SEQ ID NO: 1315

SEQ ID NO: 5538 - protein, 268 aa, Homo sapien; identical to SEQ ID NO: 1316

SEQ ID NO: 5539 - DNA, 5010 bp, Homo sapien; identical to SEQ ID NO: 1609

SEQ ID NO: 5540 - protein, 760 aa, Homo sapien; identical to SEQ ID NO: 1610

SEQ ID NO: 5541 - DNA, 4208 bp, Homo sapien; identical to SEQ ID NO: 1193

SEQ ID NO: 5542 - protein, 849 aa, Homo sapien; identical to SEQ ID NO: 1194

SEQ ID NO: 5543 - DNA, 501 bp, Homo sapien; identical to SEQ ID NO: 1843

SEQ ID NO: 5544 - protein, 105 aa, Homo sapien; identical to SEQ ID NO: 1844

SEQ ID NO: 5545 - DNA, 1404 bp, Homo sapien
gctgcagctgcagcagctggagggcgaagtgaaggagacaccgttccgcccgcggcctcgccatggcgacccacggacagacttgcgcgcgtccaatgtgtattcctccatcatatgctgaccttggcaaagttgccagagatattttcaacaaaggatttggttttgggttggtgaaactggatgtgaaaacaaagtcttgcagtggcgtggaattttcaacgtccggttcatctaatacagacactggtaaagttactgggaccttggagaccaaatacaagtggtgtgagtatggtctgactttcacagaaaagtggaacactgataacactctgggaacagaaatcgcaattgaagaccagatttgtcaaggtttgaaactgacatttgatactaccttctcaccaaacacaggaaagaaaagtggtaaaatcaagtcttcttacaagagggagtgtataaaccttggttgtgatgttgactttgattttgctggacctgcaatccatggttcagctgtctttggttatgagggctggcttgctggctaccagatgacctttgacagtgccaaatcaaagctgacaaggaataactttgcagtgggctacaggactggggacttccagctacacactaatgtcaatgatgggacagaatttggaggatcaatttatcagaaagtttgtgaagatcttgacacttcagtaaaccttgcttggacatcaggtaccaactgcactcgttttggcattgcagctaaatatcagttggatcccactgcttccatttctgcaaaagtcaacaactctagcttaattggagtaggctatactcagactctgaggcctggtgtgaagcttacactctctgctctggtagatgggaagagcattaatgctggaggccacaaggttgggctcgccctggagttggaggcttaatccagctgaaagaaacctttgggaatggatatcagaagatttggccttaatatatttccattgtgaccagcagcaggcttttttcccccaagaagatgatcaaaacaaaggatgatctcaacaagagctgtattttaagtatttagacagttctttgttagctggtttctagttggttatctagttaccaatgctgcagtcctgcagtcacctatacattatttaaatgtatttaactgttaaatgcgctacccaccaataatgaaatagacctttatgaaaactgtgcaattgtgtgcatgtttgtttttatgttcctttagaaaacattgactgttaccattgaatgagatggatcagtggatattaagatgaggttacaaattttgttaagttcagccattattacttttggtatcccagaacatgacaaattatgaataaaacaagtatacat

SEQ ID NO: 5546 - protein, 294 aa, Homo sapien
MATHGQTCARPMCIPPSYADLGKVARDIFNKGFGFGLVKLDVKTKSCSGVEFSTSGSSNTDTGKVTGTLETKYKWCEYGLTFTEKWNTDNTLGTEIAIEDQICQGLKLTFDTTFSPNTGKKSGKIKSSYKRECINLGCDVDFDFAGPAIHGSAVFGYEGWLAGYQMTFDSAKSKLTRNNFAVGYRTGDFQLHTNVNDGTEFGGSIYQKVCEDLDTSVNLAWTSGTNCTRFGIAAKYQLDPTASISAKVNNSSLIGVGYTQTLRPGVKLTLSALVDGKSINAGGHKVGLALELEA

SEQ ID NO: 5547 - DNA, 1645 bp, Homo sapien
gtagcaaagtgacgccgagggcctgagtgctccagtagccaccgcatctggagaaccagcggttaccatggaggggatcagtatatacacttcagataactacaccgaggaaatgggctcaggggactatgactccatgaaggaaccctgtttccgtgaagaaaatgctaatttcaataaaatcttcctgcccaccatctactccatcatcttcttaactggcattgtgggcaatggattggtcatcctggtcatgggttaccagaagaaactgagaagcatgacggacaagtacaggctgcacctgtcagtggccgacctcctctttgtcatcacgcttcccttctgggcagttgatgccgtggcaaactggtactttgggaacttcctatgcaaggcagtccatgtcatctacacagtcaacctctacagcagtgtcctcatcctggccttcatcagtctggaccgctacctggccatcgtccacgccaccaacagtcagaggccaaggaagctgttggctgaaaaggtggtctatgttggcgtctggatccctgccctcctgctgactattcccgacttcatctttgccaacgtcagtgaggcagatgacagatatatctgtgaccgcttctaccccaatgacttgtgggtggttgtgttccagtttcagcacatcatggttggccttatcctgcctggtattgtcatcctgtcctgctattgcattatcatctccaagctgtcacactccaagggccaccagaagcgcaaggccctcaagaccacagtcatcctcatcctggctttcttcgcctgttggctgccttactacattgggatcagcatcgactccttcatcctcctggaaatcatcaagcaagggtgtgagtttgagaacactgtgcacaagtggatttccatcaccgaggccctagctttcttccactgttgtctgaaccccatcctctatgctttccttggagccaaatttaaaacctctgcccagcacgcactcacctctgtgagcagagggtccagcctcaagatcctctccaaaggaaagcgaggtggacattcatctgtttccactgagtctgagtcttcaagttttcactccagctaacacagatgtaaaagacttttttttatacgataaataacttttttttaagttacacatttttcagatataaaagactgaccaatattgtacagtttttattgcttgttggatttttgtcttgtgtttctttagtttttgtgaagtttaattgacttatttatataaattttttttgtttcatattgatgtgtgtctaggcaggacctgtggccaagttcttagttgctgtatgtctcgtggtaggactgtagaaaagggaactgaacattccagagcgtgtagtgaatcacgtaaagctagaaatgatccccagctgtttatgcatagataatctctccattcccgtggaacgtttttcctgttcttaagacgtgattttgctgtagaagatggcacttataaccaaagcccaaagtggtatagaaatgctggtttttcagttttcaggagtgggttgatttcagcacctacagtgtacagtcttgtattaagttgttaataaaagtacatgttaaactt

SEQ ID NO: 5548 - protein, 352 aa, Homo sapien; identical to SEQ ID NO: 1961

SEQ ID NO: 5549 - DNA, 1932 bp, Homo sapien; identical to SEQ ID NO: 1065

SEQ ID NO: 5550 - protein, 566 aa, Homo sapien; identical to SEQ ID NO: 1066

SEQ ID NO: 5551 - DNA, 3342 bp, Homo sapien; identical to SEQ ID NO: 1025

SEQ ID NO: 5552 - protein, 706 aa, Homo sapien; identical to SEQ ID NO: 1026

SEQ ID NO: 5553 - DNA, 647 bp, Homo sapien; identical to SEQ ID NO: 396

SEQ ID NO: 5554 - protein, 125 aa, Homo sapien; identical to SEQ ID NO: 397

SEQ ID NO: 5555 - DNA, 928 bp, Homo sapien; identical to SEQ ID NO: 2180

SEQ ID NO: 5556 - protein, 167 aa, Homo sapien; identical to SEQ ID NO: 2181

SEQ ID NO: 5557 - DNA, 2922 bp, Homo sapien; identical to SEQ ID NO: 225

SEQ ID NO: 5558 - protein, 412 aa, Homo sapien; identical to SEQ ID NO: 226

SEQ ID NO: 5559 - DNA, 1683 bp, Homo sapien
atgggggacgctcccagccctgaagagaaactgcaccttatcacccggaacctgcaggaggttctgggggaagagaagctgaaggagatactgaaggagcgggaacttaaaatttactggggaacggcaaccacgggcaaaccacatgtggcttactttgtgcccatgtcaaagattgcagacttcttaaaggcagggtgtgaggtaacaattctgtttgcggacctccacgcatacctggataacatgaaagccccatgggaacttctagaactccgagtcagttactatgagaatgtgatcaaagcaatgctggagagcattggtgtgcccttggagaagctcaagttcatcaaaggcactgattaccagctcagcaaagagtacacactagatgtgtacagactctcctccgtggtcacacagcacgattccaagaaggctggagctgaggtggtaaagcaggtggagcaccctttgctgagtggcctcttataccccggactgcaggctttggatgaagagtatttaaaagtagatgcccaatttggaggcattgatcagagaaagattttcacctttgcagagaagtacctccctgcacttggctattcaaaacgggtccatctgatgaatcctatggttccaggattaacaggcagcaaaatgagctcttcagaagaggagtccaagattgatctccttgatcggaaggaggatgtgaagaaaaaactgaagaaggccttctgtgagccaggaaatgtggagaacaatggggttctgtccttcatcaagcatgtcctttttccccttaagtccgagtttgtgatcctacgagatgagaaatggggtggaaacaaaacctacacagcttacgtggacctggaaaaggactttgctgctgaggttgtacatcctggagacctgaagaattctgttgaagtcgcactgaacaagttgctggatccaatccgggaaaagtttaatacccctgccctgaaaaaactggccagcgctgcctacccagatccctcaaagcagaagccaatggccaaaggccctgccaagaattcagaaccagaggaggtcatcccatcccggctggatatccgtgtggggaaaatcatcactgtggagaagcacccagatgcagacagcctgtatgtagagaagattgacgtgggggaagctgaaccacggactgtggtgagcggcctggtacagttcgtgcccaaggaggaactgcaggacaggctggtagtggtgctgtgcaacctgaaaccccagaagatgagaggagtcgagtcccaaggcatgcttctgtgtgcttctatagaagggataaaccgccaggttgaacctctggaccctccggcaggctctgctcctggtgagcacgtgtttgtgaagggctatgaaaagggccaaccagatgaggagctcaagcccaagaagaaagtcttcgagaagttgcaggctgacttcaaaatttctgaggagtgcatcgcacagtggaagcaaaccaacttcatgaccaagctgggctccatttcctgtaaatcgctgaaaggggggaacattagctagccagcccagcatcttccccccttcttccaccactgagtcatctgctgtctcttcagtctgctccatccatcacccatttacccatctctcaggaca

SEQ ID NO: 5560 - protein, 528 aa, Homo sapien; identical to SEQ ID NO: 2503

SEQ ID NO: 5561 - DNA, 3122 bp, Homo sapien; identical to SEQ ID NO: 1645

SEQ ID NO: 5562 - protein, 921 aa, Homo sapien; identical to SEQ ID NO: 1646

SEQ ID NO: 5563 - DNA, 1094 bp, Homo sapien
ctccggctggccccttctgtaggatggtagcacacaaccaggtggcagccgacaatgcagtctccacagcagcagagccccgacggcggccagaaccttcctcctcttcctcctcctcgcccgcggcccccgcgcgcccgcggccgtgccccgcggtcccggccccggcccccggcgacacgcacttccgcacattccgttcgcacgccgattaccggcgcatcacgcgcgccagcgcgctcctggacgcctgcggattctactgggggcccctgagcgtgcacggggcgcacgagcggctgcgcgccgagcccgtgggcaccttcctggtgcgcgacagccgccagcggaactgctttttcgcccttagcgtgaagatggcctcgggacccacgagcatccgcgtgcactttcaggccggccgctttcacctggatggcagccgcgagagcttcgactgcctcttcgagctgctggagcactacgtggcggcgccgcgccgcatgctgggggccccgctgcgccagcgccgcgtgcggccgctgcaggagctgtgccgccagcgcatcgtggccaccgtgggccgcgagaacctggctcgcatccccctcaaccccgtcctccgcgactacctgagctccttccccttccagatttgaccggcagcgcccgccgtgcacgcagcattaactgggatgccgtgttattttgttattacttgcctggaaccatgtgggtaccctccccggcctgggttggagggagcggatgggtgtaggggcgaggcgcctcccgccctcggctggagacgaggccgcagaccccttctcacctcttgagggggtcctccccctcctggtgctccctctgggtccccctggttgttgtagcagcttaactgtatctggagccaggacctgaactcgcacctcctacctcttcatgtttacatatacccagtatctttgcacaaaccaggggttgggggagggtctctggctttatttttctgctgtgcagaatcctattttatattttttaaagtcagtttaggtaataaactttattatgaaagtttttttttttaaaaaaaa

SEQ ID NO: 5564 - protein, 211 aa, Homo sapien; identical to SEQ ID NO: 2153

SEQ ID NO: 5565 - DNA, 1222 bp, Homo sapien
cgggccctgcgggcgcggggctgaaggcggaaccacgacgggcagagagcacggagccgggaagcccctgggcgcccgtcggagggctatggagcagcggccgcggggctgcgcggcggtggcggcggcgctcctcctggtgctgctgggggcccgggcccagggcggcactcgtagccccaggtgtgactgtgccggtgacttccacaagaagattggtctgttttgttgcagaggctgcccagcggcctcccaggtggcgctggagaactgttcagcagtggccgacacccgctgtggctgtaagccaggctggtttgtggagtgccaggtcagccaatgtgtcagcagttcacccttctactgccaaccatgcctagactgcggggccctgcaccgccacacacggctactctgccacccatctgtcacccttggacagcgcccacacccttctagcacctcctgacagcagtgagaagatctgcaccgtccagttggtgggtaacagctggacccctggctaccccgagacccaggaggcgctctgcccgcaggtgacatggtcctgggaccagttgcccagcagagctcttggccccgctgctgcgcccacactctcgccagagtccccagccggctcgccagccatgatgctgcagccgggcccgcagctctacgacgtgatggacgcggtcccagcgcggcgctggaaggagttcgtgcgcacgctggggctgcgcgaggcagagatcgaagccgtggaggtggagatcggccgcttccgagaccagcagtacgagatgctcaagcgctggcgccagcagcagcccgcgggcctcggagccgtttacgcggccctggagcgcatggggctggacggctgcgtggaagacttgcgcagccgcctgcagcgcggcccgtgacacggcgcccacttgccacctaggcgctctggtggcccttgcagaagccctaagtacggttacttatgcgtgtagacattttatgtcacttattaagccgctggcacggccctgcgtagcagcaccagccggccccacccctgctcgcccctatcgctccagccaaggcgaagaagcacgaacgaatgtcgagagggggtgaagacatttctcaacttctcggccggagtttggctgagatcgcggtattaaatctgtgaaagaaaacaaaacaaaacaaaaaaaaaaaaaaaaaa

SEQ ID NO: 5566 - protein, 126 aa, Homo sapien
MEQRPRGCAAVAAALLLVLLGARAQGGTRSPRCDCAGDFHKKIGLFCCRGCPAASQVALENCSAVADTRCGCKPGWFVECQVSQCVSSSPFYCQPCLDCGALHRHTRLLCHPSVTLGQRPHPSSTS

SEQ ID NO: 5567 - DNA, 2446 bp, Homo sapien; identical to SEQ ID NO: 605

SEQ ID NO: 5568 - protein, 734 aa, Homo sapien; identical to SEQ ID NO: 606

SEQ ID NO: 5569 - DNA, 1491 bp, Homo sapien
cgagactccatctcaaaaacaaaacaaataaacgaacaaaaaaacccacaacgtattattttcttgtttacgaggtttcttgtctctctggctccaccagaagaggagcagggacccttcttgctgttgttcattgctgcatcccccacaccgagagcagagcctggcatgggcagaaagtcctcagtcgatatttggtggccccaagcgaatgaagcatccaagaagggaaagctgggggctccccactgcacttgccacctgagtcacattttcagaagcctctggaaagtcgtgcacagcccaggagtgttgagcaatttcggtttcctctgaggttgaaggacccaggcgtgtcagccctgctccagacaccttgggcatggaggagagtgtcgtacggccctcagtgtttgtggtggatggacagaccgacatcccattcacgaggctgggacgaagccaccggagacagtcgtgcagtgtggcccgggtgggtctgggtctcttgctgttgctgatgggggccgggctggccgtccaaggctggttcctcctgcagctgcactggcgtctaggagagatggtcacccgcctgcctgacggacctgcaggctcctgggagcagctgatacaagagcgaaggtctcacgaggtcaacccagcagcgcatctcacaggggccaactccagcttgaccggcagcggggggccgctgttatgggagactcagctgggcctggccttcctgaggggcctcagctaccacgatggggcccttgtggtcaccaaagctggctactactacatctactccaaggtgcagctgggcggtgtgggctgcccgctgggcctggccagcaccatcacccacggcctctacaagcgcacaccccgctaccccgaggagctggagctgttggtcagccagcagtcaccctgcggacgggccaccagcagctcccgggtctggtgggacagcagcttcctgggtggtgtggtacacctggaggctggggagaaggtggtcgtccgtgtgctggatgaacgcctggttcgactgcgtgatggtacccggtcttacttcggggctttcatggtgtgaaggaaggagcgtggtgcattggacatgggtctgacacgtggagaactcagagggtgcctcaggggaaagaaaactcacgaagcagaggctgggcgtggtggctctcgcctgtaatcccagcactttgggaggccaaggcaggcggatcacctgaggtcaggagttcgagaccagcctggctaacatggcaaaaccccatctctactaaaaatacaaaaattagccggacgtggtggtgcctgcctgtaatccagctactcaggaggctgaggcaggataattttgcttaaacccgggaggcggaggttgcagtgagccgagatcacaccactgcactccaacctgggaaacgcagtgagactgtgcctcaaaaaaaaaaaaaaaaa

SEQ ID NO: 5570 - protein, 240 aa, Homo sapien
MEESVVRPSVFVVDGQTDIPFTRLGRSHRRQSCSVARVGLGLLLLLMGAGLAVQGWFLLQLHWRLGEMVTRLPDGPAGSWEQLIQERRSHEVNPAAHLTGANSSLTGSGGPLLWETQLGLAFLRGLSYHDGALVVTKAGYYYIYSKVQLGGVGCPLGLASTITHGLYKRTPRYPEELELLVSQQSPCGRATSSSRVWWDSSFLGGVVHLEAGEKVVVRVLDERLVRLRDGTRSYFGAFMV

SEQ ID NO: 5571 - DNA, 1769 bp, Homo sapien
cctcactgactataaaagaatagagaaggaagggcttcagtgaccggctgcctggctgacttacagcagtcagactctgacaggatcatggctatgatggaggtccaggggggacccagcctgggacagacctgcgtgctgatcgtgatcttcacagtgctcctgcagtctctctgtgtggctgtaacttacgtgtactttaccaacgagctgaagcagatgcaggacaagtactccaaaagtggcattgcttgtttcttaaaagaagatgacagttattgggaccccaatgacgaagagagtatgaacagcccctgctggcaagtcaagtggcaactccgtcagctcgttagaaagatgattttgagaacctctgaggaaaccatttctacagttcaagaaaagcaacaaaatatttctcccctagtgagagaaagaggtcctcagagagtagcagctcacataactgggaccagaggaagaagcaacacattgtcttctccaaactccaagaatgaaaaggctctgggccgcaaaataaactcctgggaatcatcaaggagtgggcattcattcctgagcaacttgcacttgaggaatggtgaactggtcatccatgaaaaagggttttactacatctattcccaaacatactttcgatttcaggaggaaataaaagaaaacacaaagaacgacaaacaaatggtccaatatatttacaaatacacaagttatcctgaccctatattgttgatgaaaagtgctagaaatagttgttggtctaaagatgcagaatatggactctattccatctatcaagggggaatatttgagcttaaggaaaatgacagaatttttgtttctgtaacaaatgagcacttgatagacatggaccatgaagccagttttttcggggcctttttagttggctaactgacctggaaagaaaaagcaataacctcaaagtgactattcagttttcaggatgatacactatgaagatgtttcaaaaaatctgaccaaaacaaacaaacagaaaacagaaaacaaaaaaacctctatgcaatctgagtagagcagccacaaccaaaaaattctacaacacacactgttctgaaagtgactcacttatcccaagaaaatgaaattgctgaaagatctttcaggactctacctcatatcagtttgctagcagaaatctagaagactgtcagcttccaaacattaatgcaatggttaacatcttctgtctttataatctactccttgtaaagactgtagaagaaagcgcaacaatccatctctcaagtagtgtatcacagtagtagcctccaggtttccttaagggacaacatccttaagtcaaaagagagaagaggcaccactaaaagatcgcagtttgcctggtgcagtggctcacacctgtaatcccaacattttgggaacccaaggtgggtagatcacgagatcaagagatcaagaccatagtgaccaacatagtgaaaccccatctctactgaaagtgcaaaaattagctgggtgtgttggcacatgcctgtagtcccagctacttgagaggctgaggcaggagaatcgtttgaacccgggaggcagaggttgcagtgtggtgagatcatgccactacactccagcctggcgacagagcgagacttggtttcaaaaaaaaaaaaaaaaaaaaacttcagtaagtacgtgttatttttttcaataaaattctattacagtatgtcaaaaaaaaaaaaaaaaaa

SEQ ID NO: 5572 - protein, 281 aa, Homo sapien [sequence omitted]

SEQ ID NO: 5573 - DNA, 3865 bp, Homo sapien
cggcagggttggaaaatgatggaagaggcggaggtggaggcgaccgagtgctgagaggaacctgcggaatcggccgagatggggtctggcgcgcgctttccctcggggacccttcgtgtccggtggttgctgttgcttggcctggtgggcccagtcctcggtgcggcgcggccaggctttcaacagacctcacatctttcttcttatgaaattataactccttggagattaactagagaaagaagagaagcccctaggccctattcaaaacaagtatcttatgttattcaggctgaaggaaaagagcatattattcacttggaaaggaacaaagaccttttgcctgaagattttgtggtttatacttacaacaaggaagggactttaatcactgaccatcccaatatacagaatcattgtcattatcggggctatgtggagggagttcataattcatccattgctcttagcgactgttttggactcagaggattgctgcatttagagaatgcgagttatgggattgaacccctgcagaacagctctcattttgagcacatcatttatcgaatggatgatgtctacaaagagcctctgaaatgtggagtttccaacaaggatatagagaaagaaactgcaaaggatgaagaggaagagcctcccagcatgactcagctacttcgaagaagaagagctgtcttgccacagacccggtatgtggagctgttcattgtcgtagacaaggaaaggtatgacatgatgggaagaaatcagactgctgtgagagaagagatgattctcctggcaaactacttggatagtatgtatattatgttaaatattcgaattgtgctagttggactggagatttggaccaatggaaacctgatcaacatagttgggggtgctggtgatgtgctggggaacttcgtgcagtggcgggaaaagtttcttatcacacgtcggagacatgacagtgcacagctagttctaaagaaaggttttggtggaactgcaggaatggcatttgtgggaacagtgtgttcaaggagccacgcaggcgggattaatgtgtttggacaaatcactgtggagacatttgcttccattgttgctcatgaattgggtcataatcttggaatgaatcacgatgatgggagagattgttcctgtggagcaaagagctgcatcatgaattcaggagcatcgggttccagaaactttagcagttgcagtgcagaggactttgagaagttaactttaaataaaggaggaaactgccttcttaatattccaaagcctgatgaagcctatagtgctccctcctgtggtaataagttggtggacgctggggaagagtgtgactgtggtactccaaaggaatgtgaattggacccttgctgcgaaggaagtacctgtaagcttaaatcatttgctgagtgtgcatatggtgactgttgtaaagactgtcggttccttccaggaggtactttatgccgaggaaaaaccagtgagtgtgatgttccagagtactgcaatggttcttctcagttctgtcagccagatgtttttattcagaatggatatccttgccagaataacaaagcctattgctacaacggcatgtgccagtattatgatgctcaatgtcaagtcatctttggctcaaaagccaaggctgcccccaaagattgtttcattgaagtgaattctaaaggtgacagatttggcaattgtggtttctctggcaatgaatacaagaagtgtgccactgggaatgctttgtgtggaaagcttcagtgtgagaatgtacaagagatacctgtatttggaattgtgcctgctattattcaaacgcctagtcgaggcaccaaatgttggggtgtggatttccagctaggatcagatgttccagatcctgggatggttaacgaaggcacaaaatgtggtgctggaaagatctgtagaaacttccagtgtgtagatgcttctgttctgaattatgactgtgatgttcagaaaaagtgtcatggacatggggtatgtaatagcaataagaattgtcactgtgaaaatggctgggctcccccaaattgtgagactaaaggatacggaggaagtgtggacagtggacctacatacaatgaaatgaatactgcattgagggacggacttctggtcttcttcttcctaattgttccccttattgtctgtgctatttttatcttcatcaagagggatcaactgtggagaagctacttcagaaagaagagatcacaaacatatgagtcagatggcaaaaatcaagcaaacccttctagacagccggggagtgttcctcgacatgtttctccagtgacacctcccagagaagttcctatatatgcaaacagatttgcagtaccaacctatgcagccaagcaacctcagcagttcccatcaaggccacctccaccacaaccgaaagtatcatctcagggaaacttaattcctgcccgtcctgctcctgcacctcctttatatagttccctcacttgatttttttaaccttctttttgcaaatgtcttcagggaactgagctaatactttttttttttcttgatgttttcttgaaaagcctttctgttgcaactatgaatgaaaacaaaacaccacaaaacagacttcactaacacagaaaaacagaaactgagtgtgagagttgtgaaatacaaggaaatgcagtaaagccagggaatttacaataacatttccgtttccatcattgaataagtcttattcagtcatcggtgaggttaatgcactaatcatggattttttgaacatgttattgcagtgattctcaaattaactgtattggtgtaagatttttgtcattaagtgtttaagtgttattctgaattttctaccttagttatcattaatgtagttcctcattgaacatgtgataatctaatacctgtgaaaactgactaatcagctgccaataatatctaatatttttcatcatgcacgaattaataatcatcatactctagaatcttgtctgtcactcactacatgaataagcaaatattgtcttcaaaagaatgcacaagaaccacaattaagatgtcatattattttgaaagtacaaaatatactaaaagagtgtgtgtgtattcacgcagttactcgcttccatttttatgacctttcaactataggtaataactcttagagaaattaatttaatattagaatttctattatgaatcatgtgaaagcatgacattcgttcacaatagcactattttaaataaattataagctttaaggtacgaagtatttaatagatctaatcaaatatgttgattcatggctataataaagcaggagcaattataaaatcttcaatcaattgaacttttacaaaaccacttgagaatttcatgagcactttaaaatctgaactttcaaagcttgctattaaatcatttagaatgtttacatttactaaggtgtgctgggtcatgtaaaatattagacactaatattttcatagaaattaggctggagaaagaaggaagaaatggttttcttaaatacctacaaaaaagttactgtggtatctatgagttatcatcttagctgtgttaaaaatgaatttttactatggcagatatggtatggatcgtaaaattttaagcactaaaaattttttcataacctttcataataaagtttaataataggtttattaactgaatttcattagttttttaaaagtgtttttggtttgtgtatatatacatatacaaatacaacatttacaataaataaaatacttgaaattctcaaaaaaaaaaaaaaaaaaaaaaaaaa

SEQ ID NO: 5574 - protein, 819 aa, Homo sapien
MGSGARFPSGTLRVRWLLLLGLVGPVLGAARPGFQQTSHLSSYEIITPWRLTRERREAPRPYSKQVSYVIQAEGKEHIIHLERNKDLLPEDFVVYTYNKEGTLITDHPNIQNHCHYRGYVEGVHNSSIALSDCFGLRGLLHLENASYGIEPLQNSSHFEHIIYRMDDVYKEPLKCGVSNKDIEKETAKDEEEEPPSMTQLLRRRRAVLPQTRYVELFIVVDKERYDMMGRNQTAVREEMILLANYLDSMYIMLNIRIVLVGLEIWTNGNLINIVGGAGDVLGNFVQWREKFLITRRRHDSAQLVLKKGFGGTAGMAFVGTVCSRSHAGGINVFGQITVETFASIVAHELGHNLGMNHDDGRDCSCGAKSCIMNSGASGSRNFSSCSAEDFEKLTLNKGGNCLLNIPKPDEAYSAPSCGNKLVDAGEECDCGTPKECELDPCCEGSTCKLKSFAECAYGDCCKDCRFLPGGTLCRGKTSECDVPEYCNGSSQFCQPDVFIQNGYPCQNNKAYCYNGMCQYYDAQCQVIFGSKAKAAPKDCFIEVNSKGDRFGNCGFSGNEYKKCATGNALCGKLQCENVQEIPVFGIVPAIIQTPSRGTKCWGVDFQLGSDVPDPGMVNEGTKCGAGKICRNFQCVDASVLNYDCDVQKKCHGHGVCNSNKNCHCENGWAPPNCETKGYGGSVDSGPTYNEMNTALRDGLLVFFFLIVPLIVCAIFIFIKRDQLWRSYFRKKRSQTYESDGKNQANPSRQPGSVPRHVSPVTPPREVPIYANRFAVPTYAAKQPQQFPSRPPPPQPKVSSQGNLIPARPAPAPPLYSSLT

SEQ ID NO: 5575 - DNA, 3133 bp, Homo sapien; identical to SEQ ID NO: 1577

SEQ ID NO: 5576 - protein, 616 aa, Homo sapien; identical to SEQ ID NO: 1578

SEQ ID NO: 5577 - DNA, 2668 bp, Homo sapien; identical to SEQ ID NO: 1579

SEQ ID NO: 5578 - protein, 599 aa, Homo sapien; identical to SEQ ID NO: 1580

SEQ ID NO: 5579 - DNA, 3522 bp, Homo sapien; identical to SEQ ID NO: 1529

SEQ ID NO: 5580 - protein, 541 aa, Homo sapien; identical to SEQ ID NO: 1530

SEQ ID NO: 5581 - DNA, 2210 bp, Homo sapien
agccgcggcctcaactaaaagtggccattgacctttcaagctttcgagcagtgatgcaatagaatagtatttcaaagaaaaatgcttatcgaaattttggatccggttttcccgtgattgttaagggtttcttttaaaaagtaggtcacatttcaagtaggtcatatttcgggggcgggtgcgcagacaaggagatgagtttccactaaggccagggggcctccaacggggttggaggtgagaatcccaggtagggtagaggtgccgagatccttccgaatcccagccctggggcgtcagccctgcagggaatggcagagacactctccggactgagggaaccgaggccagtcaccaagccccttccgggcgcgcaggcgatcagtgggtgaccgcggctgcgagggactttgtcatccgtcctccaggatctggggagaaagagccccatcccttctctctctgccaccatttcggacaccccgcagggactcgttttgggattcgcactgacttcaaggaaggacgcgaacccttctctgaccccagctcgggcggccacctgtctttgccgcggtgacccttctctcatgaccctgcggtgccttgagccctccgggaatggcggggaagggacgcggagccagtgggggaccgcggggtcggcggaggagccatccccgcaggcggcgcgtctggcgaaggccctgcgggagctcggtcagacaggatggtactggggaagtatgactgttaatgaagccaaagagaaattaaaagaggcaccagaaggaactttcttgattagagatagctcgcattcagactacctactaacaatatctgttaaaacatcagctggaccaactaatcttcgaatcgaataccaagacggaaaattcagattggactctatcatatgtgtcaaatccaagcttaaacaatttgacagtgtggttcatctgatcgactactatgttcagatgtgcaaggataagcggacaggtccagaagccccccggaacggcactgttcacctttatctgaccaaaccgctctacacgtcagcaccatctctgcagcatctctgtaggctcaccattaacaaatgtaccggtgccatctggggactgcctttaccaacaagactaaaagattacttggaagaatataaattccaggtataaatgtttctctttttttaaacatgtctcacatagagtatctccgaatgcagctatgtaaaagagaaccaaaacttgagtgctctggataactatatggaatgctttctaagaacagctgaagctaatctaatttaaatttaacagcttgaagaggtagctaggtgtttaaagttcctccagatacttttacctgagtgatgcttcccttcctaaggctgaccaagacctgttgatccttttagattaaaaataaaatgtcgcatgtaaaggctgaagtcgcgttttatcagaatgccttgccttcttaggttcttttccattatgtcaaaggtccaggctccagtaggagagaaagaactcctcataggaatactgaagaagtgggaaggaaccaagctgacacaggcctcactgcaatttgatatgcctgctgatcagagtctcttgggcattttatattttgcattctgatgtacctaggagttttgttaaacagatgatgtatgtgagtatttatcccattttatgcaattaaccaaatcaaccaaaaaaagtgaccatgaagtcctgtatttgtctttttactacatgtaggaactctcatgtgaatgagtactgtagtaatccattctatgggagccttatttcagaaatatttcaaactggtgcaaatggaaaagactttctcttttcctttaaagctaaagacaagaatatcatgctatacaggtgcaactcaatccccgttaataaaaaccaatgtaggtataggcattctaccctttgaaatagctgtgtcccaacctgttgccattgattttttggaaatggctttagaaatatccaagttgtccttgaattgtctaaccatggacataaacagttgtctcccttctactgtgtagaatactttgacttaattttcttccagatacagggggatacctgcctgtttttcaaagtgtttatttactgctgttactatttgattagaatgtattaaataaaaaaaacctgatttct

SEQ ID NO: 5582 - protein, 198 aa, Homo sapien
MTLRCLEPSGNGGEGTRSQWGTAGSAEEPSPQAARLAKALRELGQTGWYWGSMTVNEAKEKLKEAPEGTFLIRDSSHSDYLLTISVKTSAGPTNLRIEYQDGKFRLDSIICVKSKLKQFDSVVHLIDYYVQMCKDKRTGPEAPRNGTVHLYLTKPLYTSAPSLQHLCRLTINKCTGAIWGLPLPTRLKDYLEEYKFQV

SEQ ID NO: 5583 - DNA, 1236 bp, Homo sapien
acttggccttacactccgctcggctcaccatgtgtcactctcgcagctgccacccgaccatgaccatcctgcaggccccgaccccggccccctccaccatcccgggaccccggcggggctccggtcctgagatcttcaccttcgaccctctcccggagcccgcagcggcccctgccgggcgccccagcgcctctcgcgggcaccgaaagcgcagccgcagggttctctaccctcgagtggtccggcgccagctgccagtcgaggaaccgaacccagccaaaaggcttctctttctgctgctcaccatcgtcttctgccagatcctgatggctgaagagggtgtgccggcgcccctgcctccagaggacgcccctaacgccgcatccctggcgcccacccctgtgtcccccgtcctcgagccctttaatctgacttcggagccctcggactacgctctggacctcagcactttcctccagcaacacccggccgccttctaactgtgactccccgcactccccaaaaagaatccgaaaaaccacaaagaaacaccaggcgtacctggtgcgcgagagcgtatccccaactgggacttccgaggcaacttgaactcagaacactacagcggagacgccacccggtgcttgaggcgggaccgaggcgcacagagaccgaggcgcatagagaccgaggcacagcccagctggggctaggcccggtgggaaggagagcgtcgttaatttatttcttattgctcctaattaatatttatatgtatttatgtacgtcctcctaggtgatggagatgtgtacgtaatatttattttaacttatgcaagggtgtgagatgttccccctgctgtaaatgcaggtctcttggtatttattgagctttgtgggactggtggaagcaggacacctggaactgcggcaaagtaggagaagaaatggggaggactcgggtgggggaggacgtcccggctgggatgaagtctggtggtgggtcgtaagtttaggaggtgactgcatcctccagcatctcaactccgtctgtctactgtgtgagacttcggcggaccattaggaatgagatccgtgagatccttccatcttcttgaagtcgcctttagggtggctacgaggtagaggggtgggggttggtgggctgtcacggagcgactgtcgagatcgcctagtatgttctgtgaacacaaataaaattgatttactgtctgc

SEQ ID NO: 5584 - protein, 156 aa, Homo sapien
MCHSRSCHPTMTILQAPTPAPSTIPGPRRGSGPEIFTFDPLPEPAAAPAGRPSASRGHRKRSRRVLYPRVVRRQLPVEEPNPAKRLLFLLLTIVFCQILMAEEGVPAPLPPEDAPNAASLAPTPVSPVLEPFNLTSEPSDYALDLSTFLQQHPAAF

SEQ ID NO: 5585 - DNA, 591 bp, Homo sapien
atggcggccatccgcaagaagctggtggtggtgggcgacggcgcgtgtggcaagacgtgcctgctgatcgtgttcagtaaggacgagttccccgaggtgtacgtgcccaccgtcttcgagaactatgtggccgacattgaggtggacggcaagcaggtggagctggcgctgtgggacacggcgggccaggaggactacgaccgcctgcggccgctctcctacccggacaccgacgtcattctcatgtgcttctcggtggacagcccggactcgctggagaacatccccgagaagtgggtccccgaggtgaagcacttctgtcccaatgtgcccatcatcctggtggccaacaaaaaagacctgcgcagcgacgagcatgtccgcacagagctggcccgcatgaagcaggaacccgtgcgcacggatgacggccgcgccatggccgtgcgcatccaagcctacgactacctcgagtgctctgccaagaccaaggaaggcgtgcgcgaggtcttcgagacggccacgcgcgccgcgctgcagaagcgctacggctcccagaacggctgcatcaactgctgcaaggtgctatga

SEQ ID NO: 5586 - protein, 196 aa, Homo sapien
MAAIRKKLVVVGDGACGKTCLLIVFSKDEFPEVYVPTVFENYVADIEVDGKQVELALWDTAGQEDYDRLRPLSYPDTDVILMCFSVDSPDSLENIPEKWVPEVKHFCPNVPIILVANKKDLRSDEHVRTELARMKQEPVRTDDGRAMAVRIQAYDYLECSAKTKEGVREVFETATRAALQKRYGSQNGCINCCKVL

SEQ ID NO: 5587 - DNA, 885 bp, Homo sapien; identical to SEQ ID NO: 1407

SEQ ID NO: 5588 - protein, 175 aa, Homo sapien; identical to SEQ ID NO: 1408

SEQ ID NO: 5589 - DNA, 1255 bp, Homo sapien
ctaaagatgaaacggctggtttgtgtgctcttggtgtgctcctctgcagtggcacagttgcataaagatcctaccctggatcaccactggcatctctggaagaaaacctatggcaaacaatacaaggaaaagaatgaagaagcagtacgacgtctcatctgggaaaagaatctaaagtttgtgatgcttcacaacctggagcattcaatgggaatgcactcatacgatctgggcatgaaccacctgggagacatgaccagtgaagaagtgatgtctttgacgagttccctgagagttcccagccagtggcagagaaatatcacatataagtcaaaccctaatcggatattgcctgattctgtggactggagagagaaagggtgtgttactgaagtgaaatatcaaggttcttgtggtgcttgctgggctttcagtgctgtgggggccctggaagcacagctgaagctgaaaacaggaaagctggtgactctcagtgcccagaacctggtggattgctcaactgaaaaatatggaaacaaaggctgcaatggtggcttcatgacaacggctttccagtacatcattgataacaagggcatcgactcagacgcttcctatccctacaaagccatggatcagaaatgtcaatatgactcaaaatatcgtgctgccacatgttcaaagtacactgaacttccttatgggagagaagatgtcctgaaagaagctgtggccaataaaggcccagtgtctgttggtgtagatgcgcgtcatccttctttcttcctctacagaagtggtgtctactatgaaccatcctgtactcagaatgtgaatcatggtgtacttgtggttggctatggtgatcttaatgggaaagaatactggcttgtgaaaaacagctggggccacaactttggtgaagaaggatatattcggatggcaagaaataaaggaaatcattgtgggattgctagctttccctcttacccagaaatctagaggatctctcctttttataacaaatcaagaaatatgaagcactttctcttaacttaatttttcctgctgtatccagaagaaataattgtgtcatgattaatgtgtatttactgtactaatagaaaatatagtttgaggccgggcactgtctggctcacgcctgtaatcccagtacttgggaggccaaggaggcatatcaacttgaggccaggagttaaagagcagcctggctaactgtgaaaccctctctact

SEQ ID NO: 5590 - protein, 331 aa, Homo sapien
MKRLVCVLLVCSSAVAQLHKDPTLDHHWHLWKKTYGKQYKEKNEEAVRRLIWEKNLKFVMLHNLEHSMGMHSYDLGMNHLGDMTSEEVMSLTSSLRVPSQWQRNITYKSNPNRILPDSVDWREKGCVTEVKYQGSCGACWAFSAVGALEAQLKLKTGKLVTLSAQNLVDCSTEKYGNKGCNGGFMTTAFQYIIDNKGIDSDASYPYKAMDQKCQYDSKYRAATCSKYTELPYGREDVLKEAVANKGPVSVGVDARHPSFFLYRSGVYYEPSCTQNVNHGVLVVGYGDLNGKEYWLVKNSWGHNFGEEGYIRMARNKGNHCGIASFPSYPEI

SEQ ID NO: 5591 - DNA, 2997 bp, Homo sapien; identical to SEQ ID NO: 193

SEQ ID NO: 5592 - protein, 288 aa, Homo sapien; identical to SEQ ID NO: 194

SEQ ID NO: 5593 - DNA, 960 bp, Homo sapien; identical to SEQ ID NO: 2190

SEQ ID NO: 5594 - protein, 247 aa, Homo sapien; identical to SEQ ID NO: 2191

SEQ ID NO: 5595 - DNA, 1221 bp, Homo sapien
gcggcctgggcggccgcaccatggactcgggaaccgaggagtacgagctcaacggcggcctgcctccgggcacacccggctccccggacgcctcgccggcccgctggggctggaggcacgggcccatcaacgtgaaccattacgccagcaagaagagcgcagccgagagcatgctggacatcgcgctgctgatggccaacgcgtcccagctgaaggccgtcgtggaacagggccccagcttcgccttctatgtgcccctggtggtcctcatctccatctcccttgtgctgcagatcggcgtgggggtgctgctcatcttccttgtcaagtacgaccttaacaacccggacaagcacgccaagctggacttcctcaacaacctggccacgggcctggtgttcatcatcgtggtagtcaacatcttcatcacggccttcggggtccagaagcccttgatggacatggcaccccagcagtaggacacccaggaccctggatgctgcctgccctgcaactcagctgcccgaccccaggagtcgccatacctgtgaggtgtccacctccctgcacatggcactacccagactgccagagcccaggctggcctcatctgcaccatgtccccggaccagcccttgctctgactgcggccaagcaccacgcaggaggccactcttgtctctcascagctgttcccaggaggcagctccctcctggcacatgggggctggcacaatagcccagagggtcagaactggacagctgcagagacctgtgcccagagaagggtctcgacccactcaaggacacacagcaggtccgtggatgggctggatgagtgaccagggccagcctctgtctcaggacattccagaaggacaaggagatgtctctccctctcccaaagcaccagcgtccctgcctcccgtgggccctgtccgggttgcccctggtgaccccagcctctgtccacttcctaacccagggaccctgcacagccagaactgcctttggccctacggatggccactggctctggtctaaagtgcctgggcttggtggccatcaagagggagccagtcaggcctgtgagggccgtagaccttgtatataccctgcaccagcagtgaccgggcagagcccaaccccctccacgggggtcccagcacccacttttctaatcatgaatgaacaataaagcccacgctctttgtcaggcaa

SEQ ID NO: 5596 - protein, 152 aa, Homo sapien
MDSGTEEYELNGGLPPGTPGSPDASPARWGWRHGPINVNHYASKKSAAESMLDIALLMANASQLKAVVEQGPSFAFYVPLVVLISISLVLQIGVGVLLIFLVKYDLNNPDKHAKLDFLNNLATGLVFIIVVVNIFITAFGVQKPLMDMAPQQ

SEQ ID NO: 5597 - DNA, 1214 bp, Homo sapien
gtctacaccccctcctcacacgcacttcacctgggtcgggattctcaggtcatgaacggtcccagccacctccgggcagggcgggtgaggacggggacggggcgtgtccaactggctgtgggctcttgaaacccgagcatggcacagcacggggcgatgggcgcgtttcgggccctgtgcggcctggcgctgctgtgcgcgctcagcctgggtcagcgccccaccgggggtcccgggtgcggccctgggcgcctcctgcttgggacgggaacggacgcgcgctgctgccgggttcacacgacgcgctgctgccgcgattacccgggcgaggagtgctgttccgagtgggactgcatgtgtgtccagcctgaattccactgcggagacccttgctgcacgacctgccggcaccacccttgtcccccaggccagggggtacagtcccaggggaaattcagttttggcttccagtgtatcgactgtgcctcggggaccttctccgggggccacgaaggccactgcaaaccttggacagactgcacccagttcgggtttctcactgtgttccctgggaacaagacccacaacgctgtgtgcgtcccagggtccccgccggcagagccgcttgggtggctgaccgtcgtcctcctggccgtggccgcctgcgtcctcctcctgacctcggcccagcttggactgcacatctggcagctgaggagtcagtgcatgtggccccgagagacccagctgctgctggaggtgccgccgtcgaccgaagacgccagaagctgccagttccccgaggaagagcggggcgagcgatcggcagaggagaaggggcggctgggagacctgtgggtgtgagcctggccgtcctccggggccaccgaccgcagccagcccctccccaggagctccccaggccgcaggggctctgcgttctgctctgggccgggccctgctcccctggcagcagaagtgggtgcaggaaggtggcagtgaccagcgccctggaccatgcagttcggcggccgcggctgggccctgcaggagggagagagagacacagtcatggcccccttcctcccttgctggccctgatggggtggggtcttaggacgggaggctgtgtccgtgggtgtgcagtgcccagcacgggacccggctgcaggggaccttcaataaacacttgtccagtgaaaaaaaaaaaaaaa

SEQ ID NO: 5598 - protein, 241 aa, Homo sapien
MAQHGAMGAFRALCGLALLCALSLGQRPTGGPGCGPGRLLLGTGTDARCCRVHTTRCCRDYPGEECCSEWDCMCVQPEFHCGDPCCTTCRHHPCPPGQGVQSQGKFSFGFQCIDCASGTFSGGHEGHCKPWTDCTQFGFLTVFPGNKTHNAVCVPGSPPAEPLGWLTVVLLAVAACVLLLTSAQLGLHIWQLRSQCMWPRETQLLLEVPPSTEDARSCQFPEEERGERSAEEKGRLGDLWV

SEQ ID NO: 5599 - DNA, 1982 bp, Homo sapien; identical to SEQ ID NO: 733

SEQ ID NO: 5600 - protein, 465 aa, Homo sapien; identical to SEQ ID NO: 734

SEQ ID NO: 5601 - DNA, 1168 bp, Homo sapien
ggcacgaggccccagccagctgtcccgagtctggactttccctctgcccctccccactctcaggctggtggggtggggaaagcagcccattcctgggctcagagactcccaccccagctcagagggagcaggggcccagccagggacggaccctcattcctcccagggaccccagacctctgtctctctcgggccttggctccttgaacttttggccgccatgtgcttcccgaaggtcctctctgatgacatgaagaagctgaaggcccgaatggtaatgctcctccctacttctgctcaggggttgggggcctgggtctcagcgtgtgacactgaggacactgtgggacacctgggaccctggagggacaaggatccggccctttggtgccaactctgcctctcttcacagcaccaggccatagaaagattttatgataaaatgcaaaatgcagaatcaggacgtggacaggtgatgtcgagcctggcagagctggaggacgacttcaaagagggctacctggagacagtggcggcttattatgaggagcagcacccagagctcactcctctacttgaaaaagaaagagatggattacggtgccgaggcaacagatcccctgtcccggatgttgaggatcccgcaaccgaggagcctggggagagcttttgtgacaaggtcatgagatggttccaggccatgctgcagcggctgcagacctggtggcacggggttctggcctgggtgaaggagaaggtggtggccctggtccatgcagtgcaggccctctggaaacagttccagagtttctgctgctctctgtcagagctcttcatgtcctctttccagtcctacggagccccacggggggacaaggaggagctgacaccccagaagtgctctgaaccccaatcctcaaaatgaagatactgacaccacctttgccctccccgtcaccgcgcacccaccctgacccctccctcagctgtcctgtgccccgccctctcccgcacactcagtccccctgcctggcgttcctgccgcagctctgacctggtgctgtcgccctggcatcttaataaaacctgcttatacttccctggcaggggagataccctgaaaaaaaaaaaaaaaaaaaaaaaaaaaaaaaaaaaaaaaaaaaaaaaa

SEQ ID NO: 5602 - protein, 234 aa, Homo sapien
MCFPKVLSDDMKKLKARMVMLLPTSAQGLGAWVSACDTEDTVGHLGPWRDKDPALWCQLCLSSQHQAIERFYDKMQNAESGRGQVMSSLAELEDDFKEGYLETVAAYYEEQHPELTPLLEKERDGLRCRGNRSPVPDVEDPATEEPGESFCDKVMRWFQAMLQRLQTWWHGVLAWVKEKVVALVHAVQALWKQFQSFCCSLSELFMSSFQSYGAPRGDKEELTPQKCSEPQSSK

SEQ ID NO: 5603 - DNA, 2574 bp, Homo sapien
cctggcgcagccgcagcagcgacgcgagcgaactcggccgggcccgggcgcgcgggggcgggacgcgcacgcggcgagggcggcgggtgagccgggggcggggacgggggcgggacgggggcgaagggggcggggacgggggcgcccgccggcctaacgggattaggagggcgcgccacccgcttccgctgcccgccggggaatcccccgggtggcgcccagggaagttcccgaacgggcgggcataaaagggcagccgcgccggcgccccacagctctgcagctcgtggcagcggcgcagcgctccagccatgtcgcgcggcctccagcttctgctcctgagctgcgcctacagcctggctcccgcgacgccggaggtgaaggtggcttgctccgaagatgtggacttgccctgcaccgccccctgggatccgcaggttccctacacggtctcctgggtcaagttattggagggtggtgaagagaggatggagacaccccaggaagaccacctcaggggacagcactatcatcagaaggggcaaaatggttctttcgacgcccccaatgaaaggccctattccctgaagatccgaaacactaccagctgcaactcggggacatacaggtgcactctgcaggacccggatgggcagagaaacctaagtggcaaggtgatcttgagagtgacaggatgccctgcacagcgtaaagaagagacttttaagaaatacagagcggagattgtcctgctgctggctctggttattttctacttaacactcatcattttcacttgtaagtttgcacggctacagagtatcttcccagatttttctaaagctggcatggaacgagcttttctcccagttacctccccaaataagcatttagggctagtgactcctcacaagacagaactggtatgagcaggatttctgcaggttcttcttcctgaagctgaggctcaggggtgtgcctgtctgttacactggaggagagaagaatgagcctacgctgaagatggcatcctgtgaagtccttcacctcactgaaaacatctggaaggggatcccaccccattttctgtgggcaggcctcgaaaaccatcacatgaccacatagcatgaggccactgctgcttctccatggccaccttttcagcgatgtatgcagctatctggtcaacctcctggacattttttcagtcatataaaagctatggtgagatgcagctggaaaagggtcttgggaaatatgaatgcccccagctggcccgtgacagactcctgaggacagctgtcctcttctgcatcttggggacatctctttgaattttctgtgttttgctgtaccagcccagatgttttacgtctgggagaaattgacagatcaagctgtgagacagtgggaaatatttagcaaataatttcctggtgtgaaggtcctgctattactaaggagtaatctgtgtacaaagaaataacaagtcgatgaactattccccagcagggtcttttcatctgggaaagacatccataaagaagcaataaagaagagtgccacatttatttttatatctatatgtacttgtcaaagaaggtttgtgtttttctgcttttgaaatctgtatctgtagtgagatagcattgtgaactgacaggcagcctggacatagagagggagaagaagtcagagagggtgacaagatagagagctatttaatggccggctggaaatgctgggctgacggtgcagtctgggtgctcgcccacttgtcccactatctgggtgcatgatcttgagcaagttccttctggtgtctgctttctccattgtaaaccacaaggctgttgcatgggctaatgaagatcatatacgtgaaaattatttgaaaacatataaagcactatacagattcgaaactccattgagtcattatccttgctatgatgatggtgttttggggatgagagggtgctatccatttctcatgttttccattgtttgaaacaaagaaggttaccaagaagcctttcctgtagccttctgtaggaattcttttggggaagtgaggaagccaggtccacggtctgttcttgaagcagtagcctaacacactccaagatatggacacacgggagccgctggcagaagggacttcacgaagtgttgcatggatgttttagccattgttggctttcccttatcaaacttgggcccttcccttcttggtttccaaaggcatttattgctgagttatatgttcactgtccccctaatattagggagtaaaacggataccaagttgatttagtgtttttacctctgtcttggctttcatgttattaaacgtatgcatgtgaagaagggtgtttttctgttttatattcaactcataagactttgggataggaaaaatgagtaatggttactaggcttaatacctgggtgattacataatctgtacaacgaacccccatgatgtaagtttacctatgtaacaaacctgcacttatacccatgaacttaaaatgaaagttaaaaataaaaaacatatacaaataaaaaaaa

SEQ ID NO: 5604 - protein, 205 aa, Homo sapien
MSRGLQLLLLSCAYSLAPATPEVKVACSEDVDLPCTAPWDPQVPYTVSWVKLLEGGEERMETPQEDHLRGQHYHQKGQNGSFDAPNERPYSLKIRNTTSCNSGTYRCTLQDPDGQRNLSGKVILRVTGCPAQRKEETFKKYRAEIVLLLALVIFYLTLIIFTCKFARLQSIFPDFSKAGMERAFLPVTSPNKHLGLVTPHKTELV

SEQ ID NO: 5605 - DNA, 1999 bp, Homo sapien
gccgggagcgccgctccagcgaggcgcgggctgtggggccgccgcgtgcctggccccgctcgcccgtgccggccgctcgcccgccatgcctggcttcgactacaagttcctggagaagcccaagcgacggctgctgtgcccactgtgcgggaagcccatgcgcgagcctgtgcaggtttccacctgcggccaccgtttctgcgatacctgcctgcaggagttcctcagtgaaggagtcttcaagtgccctgaggaccagcttcctctggactatgccaagatctacccagacccggagctggaagtacaagtattgggcctgcctatccgctgcatccacagtgaggagggctgccgctggagtgggccactacgtcatctacagggccacctgaatacctgcagcttcaatgtcattccctgccctaatcgctgccccatgaagctgagccgccgtgatctacctgcacacttgcagcatgactgccccaagcggcgcctcaagtgcgagttttgtggctgtgacttcagtggggaggcctatgagagccatgagggtatgtgcccccaggagagtgtctactgtgagaataagtgtggtgcccgcatgatgcggcggctgctggcccagcatgccacctctgagtgccccaagcgcactcagccctgcacctactgcactaaggagttcgtctttgacaccatccagagccaccagtaccagtgcccaaggctgcctgttgcctgccccaaccaatgtggtgtgggcactgtggctcgggaggacctgccaggccatctgaaggacagctgtaacaccgccctggtgctctgcccattcaaagactccggctgcaagcacaggtgccctaagctggcaatggcacggcatgtggaggagagtgtgaagccacatctggccatgatgtgtgccctggtgagccggcaacggcaggagctgcaggagcttcggcgagagctggaggagctatcagtgggcagtgatggcgtgctcatctggaagattggcagctatggacggcggctacaggaggccaaggccaagcccaaccttgagtgcttcagcccagccttctacacacataagtatggttacaagctgcaggtgtctgcattcctcaatggcaatggcagtggtgagggcacacacctctcactgtacattcgtgtgctgcctggtgcctttgacaatctccttgagtggccctttgcccgccgtgtcaccttctccctgctggatcagagcgaccctgggctggctaaaccacagcacgtcactgagaccttccaccccgacccaaactggaagaatttccagaagccaggcacgtggcggggctccctggatgagagttctctgggctttggttatcccaagttcatctcccaccaggacattcgaaagcgaaactatgtgcgggatgatgcagtcttcatccgtgctgctgttgaactgccccggaagatcctcagctgagtgcaggtggggttcgaggggaaaggacgatggggcatgacctcagtcaggcactggctgaacttggagagggggccggacccccgtcagctgcttctgctgcctaggttctgttaccccatcctccctcccccagccaccaccctcaggtgcctccaattggtgcttcagccctggcccctgtggggaacaggtcttggggtcatgaagggctggaaacaagtgaccccagggcctgtctcccttcttgggtagggcagacatgccttggtgccggtcacactctacacggactgaggtgcctgctcaggtgctatgtcccaagagccataagggggtgggaattggggagggagaaagggtagttcaaagagtctgtcttgagatctgattttttccccctttacctagctgtgccccctctggttatttatttccttagtgccaggagggcacagcaggggagccctgatttttaataaatccggaattgtatttatt

SEQ ID NO: 5606 - protein, 470 aa, Homo sapien
MPGFDYKFLEKPKRRLLCPLCGKPMREPVQVSTCGHRFCDTCLQEFLSEGVFKCPEDQLPLDYAKIYPDPELEVQVLGLPIRCIHSEEGCRWSGPLRHLQGHLNTCSFNVIPCPNRCPMKLSRRDLPAHLQHDCPKRRLKCEFCGCDFSGEAYESHEGMCPQESVYCENKCGARMMRRLLAQHATSECPKRTQPCTYCTKEFVFDTIQSHQYQCPRLPVACPNQCGVGTVAREDLPGHLKDSCNTALVLCPFKDSGCKHRCPKLAMARHVEESVKPHLAMMCALVSRQRQELQELRRELEELSVGSDGVLIWKIGSYGRRLQEAKAKPNLECFSPAFYTHKYGYKLQVSAFLNGNGSGEGTHLSLYIRVLPGAFDNLLEWPFARRVTFSLLDQSDPGLAKPQHVTETFHPDPNWKNFQKPGTWRGSLDESSLGFGYPKFISHQDIRKRNYVRDDAVFIRAAVELPRKILS

SEQ ID NO: 5607 - DNA, 983 bp, Homo sapien; identical to SEQ ID NO: 417

SEQ ID NO: 5608 - protein, 180 aa, Homo sapien; identical to SEQ ID NO: 418

SEQ ID NO: 5609 - DNA, 2646 bp, Homo sapien
agtgcagacgcggctcctagcggatgggtgctattgtgaggcggttgtagaagagtttcgtgagtgctcgcagctcatacctgtggctgtgtatccgtggccacagctggttggcgtcgccttgaaatcccaggccgtgaggagttagcgagccctgctcacactcggcgctctggttttcggtgggtgtgccctgcacctgcctcttcccccattctcattaataaaggtatccatggagaacactgaaaactcagtggattcaaaatccattaaaaatttggaaccaaagatcatacatggaagcgaatcaatggactctggaatatccctggacaacagttataaaatggattatcctgagatgggtttatgtataataattaataataagaattttcataaaagcactggaatgacatctcggtctggtacagatgtcgatgcagcaaacctcagggaaacattcagaaacttgaaatatgaagtcaggaataaaaatgatcttacacgtgaagaaattgtggaattgatgcgtgatgtttctaaagaagatcacagcaaaaggagcagttttgtttgtgtgcttctgagccatggtgaagaaggaataatttttggaacaaatggacctgttgacctgaaaaaaataacaaactttttcagaggggatcgttgtagaagtctaactggaaaacccaaacttttcattattcaggcctgccgtggtacagaactggactgtggcattgagacagacagtggtgttgatgatgacatggcgtgtcataaaataccagtggaggccgacttcttgtatgcatactccacagcacctggttattattcttggcgaaattcaaaggatggctcctggttcatccagtcgctttgtgccatgctgaaacagtatgccgacaagcttgaatttatgcacattcttacccgggttaaccgaaaggtggcaacagaatttgagtccttttcctttgacgctacttttcatgcaaagaaacagattccatgtattgtttccatgctcacaaaagaactctatttttatcactaaagaaatggttggttggtggttttttttagtttgtatgccaagtgagaagatggtatatttggtactgtatttccctctcattttgacctactctcatgctgcagagggtactttaagacatactccttccatcaaatagaaccactatgaagctacctcaaacttccagtcaggtagttgcaattgaattaaattaggaataaataaaaatggatactggtgcagtcattatgagaggcaatgattgttaatttacagctttcatgattagcaagttacagtgatgctgtgctatgaattttcaagtaattgtgaaaaagttaaacattgaagtaatgaatttttatgatattccccccacttaagactgtgtattctagttttgtcaaactgtagaaatgatgatgtggaagaacttaggcatctgtgggcatggtcaaaggctcaaacctttattttagaattgatatacacggatgacttaactgcattttagaccatttatctgggattatggttttgtgatgtttgtcctgaacacttttgttgtaaaaaaataataataataatgtttaatattgagaaagaaactaatattttatgtgagagaaagtgtgagcaaactaacttgacttttaaggctaaaacttaacattcatagaggggtggagttttaactgtaaggtgctacaatgcccctggatctaccagcataaatatcttctgatttgtccctatgcatatcagttgagcttcatataccagcaatatatctgaagagctattatataaaaaccccaaactgttgattattagccaggtaatgtgaataaattctataggaacatatgaaaatacaacttaaataataaacagtggaatataaggaaagcaataaatgaatgggctgagctgcctgtaacttgagagtagatggtttgagcctgagcagagacatgactcagcctgttccatgaaggcagagccatggaccacgcaggaagggcctacagcccatttctccatacgcactggtatgtgtggatgatgctgccagggcgccatcgccaagtaagaaagtgaagcaaatcagaaacttgtgaagtggaaatgttctaaaggtggtgaggcaataaaaatcatagtactctttgtagcaaaattcttaagtatgttattttctgttgaagtttacaatcaaaggaaaatagtaatgttttatactgtttactgaaagaaaaagacctatgagcacataggactctagacggcatccagccggaggccagagctgagcactcagcccgggaggcaggctccaggcctcagcaggtgcggagccgtcactgcaccaagtctcactggctgtcagtatgacatttcacgggagatttcttgttgctcaaaaaatgagctcgcatttgtcaatgacagtttcttttttcttactagacctgtaacttttgtaaatacacacagcatgtaatggtatcttaaagtgtgtttctatgtgacaattttgtacaaatttgttattttccatttttatttcaaaatatacattcaaacttaaaatt

SEQ ID NO: 5610 - protein, 277 aa, Homo sapien
MENTENSVDSKSIKNLEPKIIHGSESMDSGISLDNSYKMDYPEMGLCIIINNKNFHKSTGMTSRSGTDVDAANLRETFRNLKYEVRNKNDLTREEIVELMRDVSKEDHSKRSSFVCVLLSHGEEGIIFGTNGPVDLKKITNFFRGDRCRSLTGKPKLFIIQACRGTELDCGIETDSGVDDDMACHKIPVEADFLYAYSTAPGYYSWRNSKDGSWFIQSLCAMLKQYADKLEFMHILTRVNRKVATEFESFSFDATFHAKKQIPCIVSMLTKELYFYH

SEQ ID NO: 5611 - DNA, 2044 bp, Homo sapien; identical to SEQ ID NO: 711

SEQ ID NO: 5612 - protein, 344 aa, Homo sapien; identical to SEQ ID NO: 712

SEQ ID NO: 5613 - DNA, 1490 bp, Homo sapien
ggcacgaggcgcccccgcagctgccgccgccgccagggcccggactcggacgcgtggtagccccaggatgggtgagttcaacgagaagaagacaacatgtggcaccgtttgcctcaagtacctgctgtttacctacaattgctgcttctggctggctggcctggctgtcatggcagtgggcatctggacgctggccctcaagagtgactacatcagcctgctggcctcaggcacctacctggccacagcctacatcctggtggtggcgggcactgtcgtcatggtgactggggtcttgggctgctgcgccaccttcaaggagcgtcggaacctgctgcgcctgtacttcatcctgctcctcatcatctttctgctggagatcatcgctggtatcctcgcctacgcctactaccagcagctgaacacggagctcaaggagaacctgaaggacaccatgaccaagcgctaccaccagccgggccatgaggctgtgaccagcgctgtggaccagctgcagcaggagttccactgctgtggcagcaacaactcacaggactggcgagacagtgagtggatccgctcacaggaggccggtggccgtgtggtcccagacagctgctgcaagacggtggtggctctttgtggacagcgagaccatgcctccaacatctacaaggtggagggcggctgcatcaccaagttggagaccttcatccaggagcacctgagggtcattggggctgtggggatcggcattgcctgtgtgcaggtctttggcatgatcttcacgtgctgcctgtacaggagtctcaagctggagcactactgaccctgccttgggccttgctgctgctgcacccaactactgagctgagaccactgagtaccaggggctgggctccctgatgacacccaccctgtgccatcaccataacctctggggaccccaacctcagaggcagcttcaagtgccttttgctgcgcaccaatgcccagcaggggaggtgaggggggctggcggggcgaagtttggggggtgttttgtggggctccccggacatactctctgcctggtggtcagatgcaggttggaaggggccttgctgagtggcgcaaggccgagcgttcccagcagggggagaaacccttcacaccccaggcccttcaggaactggggctttgccttgcagccacatggccccatcccagttggggaagccaggtgagctctgacccttgggcctgggcctctgcccctcccaacccagccgtcgtctccctcgacagcgcccctgctgtcttccccaccgcagtcaccaccacccgaaatgccacgtggtcactgtgcactgccctgttcatgtgcctctgcggggcagggccttcctggttttgtacactgctgtacccagatgcctacaaccatccctgccacatacaggtgctcaataaacacttgtagagcagatggaaaaaaaaaaaaaaaaaaa

SEQ ID NO: 5614 - protein, 253 aa, Homo sapien
MGEFNEKKTTCGTVCLKYLLFTYNCCFWLAGLAVMAVGIWTLALKSDYISLLASGTYLATAYILVVAGTVVMVTGVLGCCATFKERRNLLRLYFILLLIIFLLEIIAGILAYAYYQQLNTELKENLKDTMTKRYHQPGHEAVTSAVDQLQQEFHCCGSNNSQDWRDSEWIRSQEAGGRVVPDSCCKTVVALCGQRDHASNIYKVEGGCITKLETFIQEHLRVIGAVGIGIACVQVFGMIFTCCLYRSLKLEHY

SEQ ID NO: 5615 - DNA, 4289 bp, Homo sapien; identical to SEQ ID NO: 1477

SEQ ID NO: 5616 - protein, 387 aa, Homo sapien [sequence omitted]

SEQ ID NO: 5617 - DNA, 1776 bp, Homo sapien; identical to SEQ ID NO: 1211

SEQ ID NO: 5618 - protein, 422 aa, Homo sapien; identical to SEQ ID NO: 1212

SEQ ID NO: 5619 - DNA, 8615 bp, Homo sapien
gagtttgcagaagagagtcttcccgagaaggcagaacgagggtgtgtggagcactgcgggcgagatggagctgagggaaggcagagctgggtctcactctgttgcccaggctggagttcagcggtgcaatcccggctcactgcagccttgactccgtgagctcagggactcatgaagtggcagctaagccctgtccagtggccacccgtcagccaagggccagagaccaggaaaggaagaaaggcagcttcacttcctctttgaggatggagtcgcacagccgcgctggaaagagcagaaaatctgcaaaatttcggtccatctccaggtccctgatgctctgtaatgctaagaccagtgatgatggctctagccctgatgagaaatatcctgatccctttgagatttccttggcccagggcaaggagggaattttccactcatctgtgcagctggcagacacatcggaggctgggcccagcagtgttcctgatctagcactggcctcggaggctgctcaactccaagcagctgggaatgatcgaggcaagacctgtaggaggatattcttcatgaaggaatcttccacagcttcctctcgagaaaagcctggaaaactagaagcacaaagtagtaacttcctgtttcctaaagcctgccaccaaagggcacgcagcaactcaaccagtgttaatccctattgcacaagagaaattgattttccaatgaccaagaaatctgcagcgcccacggacaggcagccttactctctctgcagtaacaggaagtccctctctcaacaattggactgtccagcaggaaaggctgcgggaacttcgagaccaacacggtccctgagcacagctcagctcgtgcagccatctgggggcctccaggcttcagtcatctccaacatcgtgctgatgaagggccaggctaagggtctgggcttcagcatcgttgggggaaaagacagcatttatggccccattgggatttacgtcaaaaccatttttgcagggggagcagcagcagccgatggaaggctacaggaaggtgatgaaattctggagctcaatggtgaatcaatggctggactaacacatcaggatgctttgcagaagttcaagcaagccaaaaaggggctcctcaccctcaccgtgagaacccgcctgacggcgcctccttccctgtgcagccacctgtctcccccactgtgccgctccctgagctccagcacttgtatcaccaaggacagcagctccttcgccttggaaagcccctcggctcccatcagcaccgccaagcccaattacagaatcatggtggaggtttctctgcagaaagaggccggcgtgggcctgggcatcggcctgtgcagcgttccctacttccaatgcatctctggcattttcgtccacacgctgtcaccaggatccgtggcgcacctggacggacgtctccggtgtggggacgagattgtggaaatcagtgattcccctgtgcactgcctgacgctcaatgaagtctacacgatcctgagtcactgtgatcccggtccagtccccatcattgttagccgacatccagacccacaggtctctgaacagcaactcaaagaagctgtggcccaggctgtggaaaacaccaagtttggaaaggagaggcatcagtggagtctggaaggtgtcaaaaggctggaaagcagttggcacgggcggcccaccttggagaaggaacgagagaagaactcagcacccccgcatcgcagggctcagaaggtcatgatccgctccagcagtgacagcagctacatgtctgggtccccagggggaagtcctgggagtggcagtgctgagaagccgtcctctgacgtggacatcagcacacacagccccagcttgcctctggcacgggagccagtggtgctttctatagcatcctccaggctgccccaggagagcccacccctcccagagagccgggacagccacccgccgctgagactgaagaaatcctttgagattttggaagcgagagagctgctgccactgctgctaccacaggaagacacagcagggagaagccctagtgcctctgccggctgcccaggacctggtatcggcccacagaccaagtcctccacagagggcgagccagggtggagaagagccagcccagtgacccaaacatccccgataaaacacccactgcttaagaggcaggctcggatggactatagctttgataccacagccgaagacccttgggttaggatttctgactgcatcaaaaacttatttagccccatcatgagtgagaaccatggccacatgcctctacagcccaatgccagcctgaatgaagaagaagggacacagggccacccagatgggaccccaccaaagctggacaccgccaatggcactcccaaagtttacaagtcagcagacagcagcactgtgaagaaaggtcctcctgtggctcccaagccagcctggtttcgccaaagcttgaaaggtttgaggaatcgtgcttcagacccaagagggctccctgatcctgccttgtccacccagccagcacctgcttccagggagcacctaggatcacacatccgggcctcctcctcctcctcctccatcaggcagagaatcagctcctttgaaacctttggctcctctcaactgcctgacaaaggagcccagagactgagcctccagccctcctctggggaggcagcaaaacctcttgggaagcatgaggaaggacggttttctggactcttggggcgaggggctgcacccactcttgtgccccagcagcctgagcaagtactgtcctcggggtcccctgcagcctccgaggccagagacccaggtgtgtctgagtcccctcccccagggcggcagcccaatcagaaaactctcccccctggcccggacccgctcctaaggctgctgtcaacacaggctgaggaatctcaaggcccagtgctcaagatgcctagccagcgagcacggagcttccccctgaccaggtcccagtcctgtgagacgaagctacttgacgaaaagaccagcaaactctattctatcagcagccaagtgtcatcggctgtcatgaaatccttgctgtgccttccatcttctatctcctgtgcccagactccctgcatccccaaggaaggggcatctccaacatcatcatccaacgaagactcagctgcaaatggttctgctgaaacatctgccttggacacggggttctcgctcaacctttcagagctgagagaatatacagagggtctcacggaagccaaggaagacgatgatggggaccacagttcccttcagtctggtcagtccgttatctccctgctgagctcagaagaattaaaaaaactcatcgaggaggtgaaggttctggatgaagcaacattaaagcaattagacggcatccatgtcaccatcttacacaaggaggaaggtgctggtcttgggttcagcttggcaggaggagcagatctagaaaacaaggtgattacggttcacagagtgtttccaaatgggctggcctcccaggaagggactattcagaagggcaatgaggttctttccatcaacggcaagtctctcaaggggaccacgcaccatgatgccttggccatcctccgccaagctcgagagcccaggcaagctgtgattgtcacaaggaagctgactccagaggccatgcccgacctcaactcctccactgactctgcagcctcagcctctgcagccagtgatgtttctgtagaatctacagcagaggccacagtctgcacggtgacactggagaagatgtcggcagggctgggcttcagcctggaaggagggaagggctccctacacggagacaagcctctcaccattaacaggattttcaaaggtggacacagaggacttcgtgccagaggcaagatccctgtaaatattgttgcacaaaaatctcactagctctcttcccataccacccaatgctgatgtcctcaccacatgcggagaacaaatgtgaagggagtaggatattgggtcagtgtccaaagcagggtctgggcaggactcagctccccagagtcctctatgaactatggacggtgctccaggcaggctaaggcgtggagctgcctgatatttccctcccctggggacagcaagggctatccctttccaaaggccatggagagctggagcctggtgccctaacctctgagtcaccatcttaagagatgcctcattttagaaccaccaacaagcaagctcccaagggatggtgccctgttctctaccaagctatcctggctctttggagatcaaggagaggaggcaactttccttgttccccatcatctgtggaacccattaccttctccctcatttcaggagcagcctcagaacaaagtgagacagtccagcctggagatgaaatcttgcagctgggtggcactgccatgcagggcctcacacggtttgaagcctggaacatcatcaaggcactgcctgatggacctgtcacgattgtcatcaggagaaaaagcctccagtccaaggaaaccacagctgctggagactcctaggcaggacatgctgaagccaaagccaataacacacagctaacacacagctcccataaccgctgattctcagggtctctgctgccgccccacccagatgggggaaagcacaggtgggcttcccagtggctgctgcccaggcccagaccttctaggacgccacccagcaaaaggttgttcctaaaataagggcagagtcacacgggggcagctgatacaaattgcagactgtgtaaaaagagagcttaatgataatattgtggtgccacaaataaaatggatttattagaatttcatatgacattcatgcctggcttcgcaaaatgtttcaagtactgtaactgtgtcatgattcacccccaaacagtgacatttatttttctcatgaatctgcaatgtgggcagagattggaatgggcagctcatctctgtcccacttggcatcagctggcgtcatgcaaagtcatgcaaaggctgggaccacgtgagatcattcactcatacatctggccgttgatgttggctgggaactcacctggggctgctggcctgaatgcttataggtggcctctccttgtggcctgggcctcctcacaacatggtgtctggattcccaggatgagcatcccaggatcgcaagagccatgtagaagctgcatcttgtttatacctttgccttggaagttgcatggcatcacctccaccatactccatcagttagagctgacacaaacctgcctgggtttaaggggagaggaaatattgctggggtcatttatgaaaaatacagtttgtcacatgaaacatttgcaaaattgtttttggttggattggagaagtaatcctagggaagggtggtggagccagtaaacagaggagtacaggtgaagcaccaagctcaaagcgtggacaggtgtgccgacagaaggaaccagcgtgtatatgagggtatcaaataaaattgctactacttacctaccacatgccaagcactgtgctcagggctaaacgggcattgcctttagtgatcacagcagcttctacggtgtatggttctgtgccaatgtattgataagagggcacacactgtgtacagtaaatggcttatccagctggtgagtgatgcggcagattgagttttcttctgtgattcggtggagactatcagcccaagatgctttaagtgcacaacattacagggaatgcctgagtgcctggccaaagggatatttggtttggccatctctggatgcctgattgccaagctcaggaccaggcaatgtgactttgcatcagcaacaaccagcatcccttgaccaggcctgggccagagtattggtctcctctcagcccctgatcctgtgaagtaaggatgtgggggaagacctggcaaggacacagatgaaacacaaacaatagtaattctcaggccatcatcagtggagccatgttaatgtaatctgatggcttctccagggtccacaggaagtgaagaatctgtttcccagcagtggactcaaaacccatctgggctcctaaccttcctgtaaacccctttagtggcttcattagagcaggcgttcagctcactgttctattcatctcaaggaataatgggcttagagcagtttctgtcctgctggttaacttgtttggcctattccattctggattttgtcaagcagtagacaagcaattagacaagaacttggaggcaccatttgtatccactttttagacttaatagaaacattgaagatgaacataatctaccaacgaaagacgtgattcaattcaacactcccttcccatgacccaggctgggcaaggaggccacgtgatgtggagggcacattccttgcctgcacaaactcaccatctgtgcacgcagtggccttccctaaaatcagggaattgttttaagtcttatcaagcagccaagggatgaaagagaaggtgggttttcatcaagactggaaggtggggacagggatgagcatggagctggccgtgggcctggggtaccaagagactccttgagagaccaggcaaagcaagtgattgggacagaggttatctgtcccaggttatctgggcatagatgcaggtgagcccatggccctcccagtacctcctgtctctggcctgttttagaaggttctctcctccccaaggagacacaacaactcctagggccactgaagatataactattgcccaggtttctggtctctaggctggggaagtcctctgggtaggaatcagcaagaagatcctaaaacaaaagctcatccatttgcgttccatgatgctgggatttacacttgaggcttagctttgctctgccaacttcttcagagctgacacaggatgaaggcaatgccatcctcaaacactgcaggcatcacagctaacaattgtgaagtcgtcttaactcaccataaaaaggaatccactcccaggcagccctacttctttgctttgcccagcattttactgattcatacattatctcacttgtgccaacactcaagaagcaggctacactgacactggtattcctgcctccatattttctttaaaagacaaatcaaagcagatatattaagtgactgttcaagagcacacttggcccaagtggcagagcttggactggatgcatgttttccagctcctcatccagggctctgaccagtttaacctgatgcagtcacgtggaggagcagtgcaggcacagtatgtcccataggcccagtgagatgcattcttggttggctggccttccacttggctacacagggatgtacaaggcgatcccatcttgataagaccaccacctcagagtatggagctcagagagggcaggcatgaagtttccttggctggtgcacctagaattggctgaactcatgagaagttgatatagaacagtgcttgccacagagcggggactcggtaagcacttaatgaatgaatgaattctaagtcaatccaagagtctgatgatttcttgaaaagggtgttagctaaaggatcttaggcatgactgtagaatttgtagttgcaatagaacagagaaagaggaagctttctgtctccttaacactgagctgtcatgttttaaagcttgctcacatcttggcacatttaagagacagtcaccccaggactcaaaaatagggaagtaacagtaacgcaggggaaacgttttctgtttggaggagcaaaggctgagaacactgtgaaaacattttgcgcgcacaatagtaacctgggtaaatgcagcgtgaagggattttagtcacacgtggtctttcttacaaggaaggtggtgggggtgcagatgaggttgctagagaatgttagaggatccctctctggattggagatagggaaagaaagttgcacggctgctgaggccccttctaggtggcaaggctgtgctccctggttctgatgatgtgcctgggtggacatggcccctgtgagtttgtacagtcttgcagcaggatctagaggggggatttccagccagggctgctagacggaggcctactcttccatctttcctgatggcaggatggcctggccagggcctggaagacagagacctcctgcctccgcctcagtaagacgacaaggaaaggcaaatgcccaagggaaagaaaaggaaggctcttctccccagagttccccatgcagacatgagtgcgtgctcagttcagaatcacttctgagaactcatccctaatgctgcagatttgggctggaacagattcacactgtctggtttcaccgaggacatgaaactccaccttgcggggataaagagagaaaaacaaattcatcaaatggaagacacattgaaagtgtttttccttaatgcttatcctgtttttaaaccattatttccaagttgacaccttttttaaggaaaaataaatattttgcggcattaaagccataaaaaaaaaaaaaaaaaaaaaaaaaaaaaaaa

SEQ ID NO: 5620 - protein, 1244 aa, Homo sapien
MESHSRAGKSRKSAKFRSISRSLMLCNAKTSDDGSSPDEKYPDPFEISLAQGKEGIFHSSVQLADTSEAGPSSVPDLALASEAAQLQAAGNDRGKTCRRIFFMKESSTASSREKPGKLEAQSSNFLFPKACHQRARSNSTSVNPYCTREIDFPMTKKSAAPTDRQPYSLCSNRKSLSQQLDCPAGKAAGTSRPTRSLSTAQLVQPSGGLQASVISNIVLMKGQAKGLGFSIVGGKDSIYGPIGIYVKTIFAGGAAAADGRLQEGDEILELNGESMAGLTHQDALQKFKQAKKGLLTLTVRTRLTAPPSLCSHLSPPLCRSLSSSTCITKDSSSFALESPSAPISTAKPNYRIMVEVSLQKEAGVGLGIGLCSVPYFQCISGIFVHTLSPGSVAHLDGRLRCGDEIVEISDSPVHCLTLNEVYTILSHCDPGPVPIIVSRHPDPQVSEQQLKEAVAQAVENTKFGKERHQWSLEGVKRLESSWHGRPTLEKEREKNSAPPHRRAQKVMIRSSSDSSYMSGSPGGSPGSGSAEKPSSDVDISTHSPSLPLAREPVVLSIASSRLPQESPPLPESRDSHPPLRLKKSFEILEARELLPLLLPQEDTAGRSPSASAGCPGPGIGPQTKSSTEGEPGWRRASPVTQTSPIKHPLLKRQARMDYSFDTTAEDPWVRISDCIKNLFSPIMSENHGHMPLQPNASLNEEEGTQGHPDGTPPKLDTANGTPKVYKSADSSTVKKGPPVAPKPAWFRQSLKGLRNRASDPRGLPDPALSTQPAPASREHLGSHIRASSSSSSIRQRISSFETFGSSQLPDKGAQRLSLQPSSGEAAKPLGKHEEGRFSGLLGRGAAPTLVPQQPEQVLSSGSPAASEARDPGVSESPPPGRQPNQKTLPPGPDPLLRLLSTQAEESQGPVLKMPSQRARSFPLTRSQSCETKLLDEKTSKLYSISSQVSSAVMKSLLCLPSSISCAQTPCIPKEGASPTSSSNEDSAANGSAETSALDTGFSLNLSELREYTEGLTEAKEDDDGDHSSLQSGQSVISLLSSEELKKLIEEVKVLDEATLKQLDGIHVTILHKEEGAGLGFSLAGGADLENKVITVHRVFPNGLASQEGTIQKGNEVLSINGKSLKGTTHHDALAILRQAREPRQAVIVTRKLTPEAMPDLNSSTDSAASASAASDVSVESTAEATVCTVTLEKMSAGLGFSLEGGKGSLHGDKPLTINRIFKGGHRGLRARGKIPVNIVAQKSH

SEQ ID NO: 5621 - DNA, 1061 bp, Homo sapien
agacaaaaagtaaccttcctgaagaggacatgtgattggaagttgtcaattgttgaagcattggtaactccagtctctaacgttttagaaaatcataacaagcggttctgtaccctgtaaagaacagaaacctggaaatctaaggctcaaagacatccaagtaattggtatctgggagatttgggattcaaacccagctctgcttgacttggtgaactactgagttcttcattatgtctgatggagattatgattacctcatcaagtttttagctttgggagactctggtgtagggaagaccagtgtactttaccaatatacagatggtaaatttaactccaaatttatcacaacagtgggcattgatttcaggccaaaaagagtggtgtacagagccagtgggccggatggaccagtaggtagaggccagagaatccacctgcagttatgggacacagcagggcaggagaggtttcgtagcttaacgacagcgttcttcagagatgctatgggttttcttctactttttgatctgacaaatgagcaaagtttcctcaatgtcagaaactggataagccagctacagatgcatgcatattgtgaaaacccagatatagtgctgtgtggaaacaagagtgatctggaggaccagagagtagtgaaagaggaggaagccatagcactcgcagagaaatatggaatcccctactttgaaactagtgctgccaatgggacaaacataagccaagcaattgagatgcttctggacctgataatgaagcgaatggaacggtgtgtggacaagtcctggattcctgaaggagtggtgcgatcaaatggtcatgcctctacggatcagttaagtgaagaaaaggagaaaggggcatgtggctgttgagaagtcaagtaacgacatagtagttcaggtggcccatgcctgggatcttctctatgattgatacatggcacagtgagagattaatgggcattgtgtacaaattgcttctcaccatccccattagacctacgaataaagcatccggttctaaaattaaaaaaa

SEQ ID NO: 5622 - protein, 221 aa, Homo sapien
MSDGDYDYLIKFLALGDSGVGKTSVLYQYTDGKFNSKFITTVGIDFRPKRVVYRASGPDGPVGRGQRIHLQLWDTAGQERFRSLTTAFFRDAMGFLLLFDLTNEQSFLNVRNWISQLQMHAYCENPDIVLCGNKSDLEDQRVVKEEEAIALAEKYGIPYFETSAANGTNISQAIEMLLDLIMKRMERCVDKSWIPEGVVRSNGHASTDQLSEEKEKGACGC

SEQ ID NO: 5623 - DNA, 768 bp, Homo sapien; identical to SEQ ID NO: 1051

SEQ ID NO: 5624 - protein, 164 aa, Homo sapien; identical to SEQ ID NO: 1052

SEQ ID NO: 5625 - DNA, 4097 bp, Homo sapien
gctggcggcggccgcccagggccggggccgcgcgcccagcctgagcccgccccgccgccgagcgtcaccgaacctgcttgaaatgcagccgaggagccggggcgggcggcagcggcggcggcggcggcggcgggggcagcggcaaccccggcgccgcggcaaggactcggagggctgagacgcggcggcggcggcgcggggagcgcggggcgcggcggccggagcccgggcccgccatgggcctccccgagccgggccctctccggcttctggcgctgctgctgctgctgctgctgctgctgctgctgcggctccagcatcttgcggcggcagcggctgatccgctgctcggcggccaagggccggccaaggagtgcgaaaaggaccaattccagtgccggaacgagcgctgcatcccctctgtgtggagatgcgacgaggacgatgactgcttagaccacagcgacgaggacgactgccccaagaagacctgtgcagacagtgacttcacctgtgacaacggccactgcatccacgaacggtggaagtgtgacggcgaggaggagtgtcctgatggctccgatgagtccgaggccacttgcaccaagcaggtgtgtcctgcagagaagctgagctgtggacccaccagccacaagtgtgtacctgcctcgtggcgctgcgacggggagaaggactgcgagggtggagcggatgaggccggctgtgctacctggctgaacgagtgtctgcacaacaatggcggctgctcacacatctgcactgacctcaagattggctttgaatgcacgtgcccagcaggcttccagctcctggaccagaagacctgtggcgacattgatgagtgcaaggacccagatgcctgcagccagatctgtgtcaattacaagggctattttaagtgtgagtgctaccctggctacgagatggacctactgaccaagaactgcaaggctgctggtggaaagagcccatccctaatcttcaccaaccggtacgaggtgcggaggatcgacctggtgaagcggaactattcacgcctcatccccatgctcaagaatgtcgtggcactagatgtggaagttgccaccaatcgcatctactggtgtgacctctcctaccgtaagatctatagcgcctacatggacaaggccagtgacccgaaagagcaggaggtcctcattgacgagcagttgcactctccagagggcctggcagtggactgggtccacaagcacatctactggactgactcgggcaataagaccatctcagtggccacagttgatggtggccgccgacgcactctcttcagccgtaacctcagtgaaccccgggccatcgctgttgaccccctgcgagggttcatgtattggtctgactggggggaccaggccaagattgagaaatctgggctcaacggtgtggaccggcaaacactggtgtcagacaatattgaatggcccaacggaatcaccctggatctgctgagccagcgcttgtactgggtagactccaagctacaccaactgtccagcattgacttcagtggaggcaacagaaagacgctgatctcctccactgacttcctgagccacccttttgggatagctgtgtttgaggacaaggtgttctggacagacctggagaacgaggccattttcagtgcaaatcggctcaatggcctggaaatctccatcctggctgagaacctcaacaacccacatgacattgtcatcttccatgagctgaagcagccaagagctccagatgcctgtgagctgagtgtccagcctaatggaggctgtgaatacctgtgccttcctgctcctcagatctccagccactctcccaagtacacatgtgcctgtcctgacacaatgtggctgggtccagacatgaagaggtgctaccgagcacctcaatctacctcaactacgacgttagcttctaccatgacgaggacagtacctgccaccacaagagcccccgggaccaccgtccacagatccacctaccagaaccacagcacagagacaccaagcctgacagctgcagtcccaagctcagttagtgtccccagggctcccagcatcagcccgtctaccctaagccctgcaaccagcaaccactcccagcactatgcaaatgaagacagtaagatgggctcaacagtcactgccgctgttatcgggatcatcgtgcccatagtggtgatagccctcctgtgcatgagtggatacctgatctggagaaactggaagcggaagaacaccaaaagcatgaattttgacaacccagtctacaggaaaacaacagaagaagaagatgaagatgagctccatatagggagaactgctcagattggccatgtctatcctgcagcaatcagcagctttgatcgcccactgtgggcagagccctgtcttggggagaccagagaaccggaagacccagcccctgccctcaaggagctttttgtcttgccgggggaaccaaggtcacagctgcaccaactcccgaagaaccctctttccgagctgcctgtcgtcaaatccaagcgagtggcattaagccttgaagatgatggactaccctgaggatgggatcacccccttcgtgcctcatggaattcagtcccatgcactacactctggatggtgtatgactggatgaatgggtttctatatatgggtctgtgtgagtgtatgtgtgtgtgtgattttttttttaaatttatgttgcggaaaggtaaccacaaagttatgatgaactgcaaacatccaaaggatgtgagagtttttctatgtataatgttttatacactttttaactggttgcactacccatgaggaattcgtggaatggctactgctgactaacatgatgcacataaccaaatgggggccaatggcacagtaccttactcatcatttaaaaactatatttacagaagatgtttggttgctgggggggcttttttgggttttggggcatttgttttttgtaaataagatgattatgctttgtggctatccatcaacataagtaaaaaaaaaaaaaaaacacttcaactccctcccccatttagattatttattaacatattttaaaaatcagatgagttctataaataatttagagaagtgagagtatttatttttggcatgtttggcccaccacacagactctgtgtgtgtatgtgtgtgtttatatgtgtatgtgtgtgacaggaaaatctgtagagaagaggcacatctatggctactgttcaaatacataaagataaatttattttcacacagtccacaaggggtatatcttgtagttttcagaaaagcctttggaaatctggatcaggaaatagataccatggtttgtgcaattatgtagtaaaaaaggcaaatcttttcacctctggctattcctgagaccccaggaagtcaggaaaagcctttcagctcacccatggctgctgtgactcctaccagggctttcttggctttggcgaaggtcagtgtacagacattccatggtaccagagtgctcagaaagtcaagataggatatgcctcaccctcagctactccttgttttaaagttcagctctttgagtaacttcttcaatttctttcaggacacttgggttgaattcagtaagtttcctctgaagcaccctgaagggtgccatccttacagagctaagtggagacgtttccagatcagcccaagtttactatagagactggcccaggcactgaatgtctaggacatgctgtggatgaagataaagatggtggaataggttttatcacatctcttatttctcttttccccttactctctaccatttcctttatgtggggaaacattttaaggtaataaataggttacttaccatcatatgttcatatagatgaaactaatttttggcttaagtcagaacaactggcccccaattgaagtcatatttgtggggggaaatggcatacgcaatattatattatattggatatttatgttcacacaggaatttggtttactgctttgtaaataaaagggaaaactccgggtatatgt

SEQ ID NO: 5626 - protein, 793 aa, Homo sapien
MGLPEPGPLRLLALLLLLLLLLLLRLQHLAAAAADPLLGGQGPAKECEKDQFQCRNERCIPSVWRCDEDDDCLDHSDEDDCPKKTCADSDFTCDNGHCIHERWKCDGEEECPDGSDESEATCTKQVCPAEKLSCGPTSHKCVPASWRCDGEKDCEGGADEAGCATWLNECLHNNGGCSHICTDLKIGFECTCPAGFQLLDQKTCGDIDECKDPDACSQICVNYKGYFKCECYPGYEMDLLTKNCKAAGGKSPSLIFTNRYEVRRIDLVKRNYSRLIPMLKNVVALDVEVATNRIYWCDLSYRKIYSAYMDKASDPKEQEVLIDEQLHSPEGLAVDWVHKHIYWTDSGNKTISVATVDGGRRRTLFSRNLSEPRAIAVDPLRGFMYWSDWGDQAKIEKSGLNGVDRQTLVSDNIEWPNGITLDLLSQRLYWVDSKLHQLSSIDFSGGNRKTLISSTDFLSHPFGIAVFEDKVFWTDLENEAIFSANRLNGLEISILAENLNNPHDIVIFHELKQPRAPDACELSVQPNGGCEYLCLPAPQISSHSPKYTCACPDTMWLGPDMKRCYRAPQSTSTTTLASTMTRTVPATTRAPGTTVHRSTYQNHSTETPSLTAAVPSSVSVPRAPSISPSTLSPATSNHSQHYANEDSKMGSTVTAAVIGIIVPIVVIALLCMSGYLIWRNWKRKNTKSMNFDNPVYRKTTEEEDEDELHIGRTAQIGHVYPAAISSFDRPLWAEPCLGETREPEDPAPALKELFVLPGEPRSQLHQLPKNPLSELPVVKSKRVALSLEDDGLP

SEQ ID NO: 5627 - DNA, 2901 bp, Homo sapien; identical to SEQ ID NO: 1497

SEQ ID NO: 5628 - protein, 395 aa, Homo sapien; identical to SEQ ID NO: 1498

SEQ ID NO: 5629 - DNA, 2391 bp, Homo sapien; identical to SEQ ID NO: 199

SEQ ID NO: 5630 - protein, 663 aa, Homo sapien; identical to SEQ ID NO: 200

SEQ ID NO: 5631 - DNA, 1552 bp, Homo sapien; identical to SEQ ID NO: 1761

SEQ ID NO: 5632 - protein, 330 aa, Homo sapien; identical to SEQ ID NO: 1762

SEQ ID NO: 5633 - DNA, 3203 bp, Homo sapien
ccacgcgtccgcaaggtactagtcctaattggtatttcaaatagtccttttaaagccatacttgagtatttgatgaagtgatttggccgttttctctctggttctaatgttttttctcttgtctatatagaagtaagttagctctctgaacttcttcaaggtttgagagtttctataatgttgagaataaattgaaactgcagttttagtggacataaggacttctataaaaagaagtaaagtataatcaagtataattttaaatgtttccttgcaaaaaaaaatctaaacaatgttttcacatttagctcttttaagagaattttttaaaaaatgctctaaccatttatcatcttctcaattccacagaaatatccagagaagttgtattttgagggcctcgcggaacaggtggatcctcctgtacagatccagtctccctatctgcccatctattttgggaatgtgtgtcttcgattccttccagtatttgatatagtaatccacagatttttagagttgcttccggtatccaaatcactggagactctactggatcatctaggaggcttatataaatttcatgatcgtccagtgacttatctgtataacactctgcactattatgaaatgcacctgagagaccgcgcatttctcaaacgaaaactcgtccatgcgatcattggctctctgaaggataatcgaccgcagggctggtgtctaagtgacacttacctgaaatgcgctatgaatgcacgagaggaaaatccttgggttccagatgacacctactattgcagattgattggcagactagtcgatacgatggctggcaaatctcctggtccctttccaaactgtgactggagattcaatgagtttcccaacccagctgcccatgctctccatgttacttgtgtggagctcatggccttggcagtttcaggcaaagaagttgggaatgcccttctaaatgttgtcctaaaaaggtatgtattctggttcatgcagtaagatttgttgtttatttgtaaatagaatggtattctatttcaaacttttaagacaaacctgttgccgcaaggctgatgcacattggatgatgactgttttctggttccagatcttgtctttgtgatataggagttatggaatgagccctggacaggatcctaagatccgggtttgttcctacttctactcattaatagcagtttgacatttaatataggaataatgttaacttgtcacttaaaacaagattctcttcatcttgttttcaagatttcaagattcttttaaaaattagcatgaagtatgggataatgattggggaggaagtatttttaaaaagccttcttgagtttttatgcatattacatttttattcaataaaaaattccccattgttttattgaaatggattagttgtcgatcctctgaattagacatattctttaaaaataagatccgttgtcagccatctaaaatgtttttataaattcatacttacattcttttttgccggttgcagtcagcctttagtgccaagagagaacattacagcatggatgaatgcaattggtttgatcatcactgccctaccagagccatattggattgttcttcatgatcgaattgtgagtgtcatcagcagccccagcttgacgtctgaaacagagtgggttggctatccattccgcctctttgatttcactgcctgtcatcagtcctactctgagatgagttgtagctatacgttagctcttgcacatgctgtgtggcaccattctagcatcggacaactttctctcattccaaagtttcttactgaagtacttcttcctatagtgaagaccgaattccagttgctttatgtataccatcttgttggaccatttttacaaagatttcagcaagagagaactcgttgtatgatagagattggtgtggcgttttatgacatgctgctgaatgttgaccagtgtagcacccatttaaattacatggatcccatctgtgacttcctctatcacatgaagtatatgtttactggtgacagcgtgaaagagcaagtagagaagattatctgtaacttaaaaccagctttaaaacttcgtcttcgattcatcacacacattagcaagatggagccagctgcagtgcctccacaagccatgaacagtgggtctccagcatctcagtctaatcaggtgcccgtgtctttaccagtaactcagtgaagccagactgtactgtggagaaagtagaaatatatccgtctttgagagtggactcaaaccttttaaatctgaatgcgatcacactgtagtgatatagtagaagcagtgatgatattcagattgttttattttgattcaaatgatgaatctgttgacaccttataactcccatctccctatctatatttttgtctctaagagatcaagtaagatacatgttgttcatattcataacaacttattagagctatgtaggaacatagaggtatctgtgatcaaatgacttgtcattggcactttcagtctttcctattctagccgttgtttttgtttgtattttttattattaatgacatatttagtcttcagatatattattttaaaggcaccacacatgtaaaacagttattacaaatattttatacataaatctcttggtagattttcagaataatagagatttatatcaagaaaaggaatctagattttgttgcattgtaggagcaaacaaggcttcatattctttttaaaatgacttgaaattttattataaatttccatagtttctatcaaggtcaactggcagttttattacctttgctatggacttgaacttactgtataaaattagttggaagccatgtaagaaaataacatctgaaaattcttgaacttaaaatcatgcttaaatggttgattctccaatttctttttttaaaaataagttaattgcttttgcaggttgacactctcacctgacagatgatgtaattcttcaatttttataatcttaaaatttttaaattttatatttgtaaatacagtacacattttatttcttggattttgagagacattgttaattttgggggaattggcattgcgaaagacttgaaaactaatgagtaaagtctgctgaatgaataaaccgtgtgattgttaaaaaaaaaaaaaaaaagg

SEQ ID NO: 5634 - protein, 223 aa, Homo sapien
MNAIGLIITALPEPYWIVLHDRIVSVISSPSLTSETEWVGYPFRLFDFTACHQSYSEMSCSYTLALAHAVWHHSSIGQLSLIPKFLTEVLLPIVKTEFQLLYVYHLVGPFLQRFQQERTRCMIEIGVAFYDMLLNVDQCSTHLNYMDPICDFLYHMKYMFTGDSVKEQVEKIICNLKPALKLRLRFITHISKMEPAAVPPQAMNSGSPASQSNQVPVSLPVTQ

SEQ ID NO: 5635 - DNA, 2791 bp, Homo sapien
acgcgtccggccgcggccggaggtatccgcatcggcgagctgcgtctcccgggtgtcggccccggcggctccccgaccgtgcccggctgtggcgaggcggctccagcccagcctgtggcagccgcgacccccggggcgctccggagcccactgcgcggcgcgcgtgccggctgcctgcatggacgcggcactgaagcggagccgctcggaggagccagccgaaatcctgccgcctgcccgggacgaggaggaggaggaggaagaggggatggagcaggggctggaggaggaagaagaggtggatccccggatccagggagaactggagaagttaaatcagtccacggatgatatcaacagacgggagactgaacttgaggatgctcgtcagaagttccgctctgttctggttgaagcaacggtgaaactggatgaactggtgaagaaaattggcaaagctgtggaagactccaagccctactgggaggcacggagggtggcgaggcaggctcagctggaagctcagaaagccacgcaggacttccagagggccacagaggtgctccgcgccgccaaggagacatctccctggccgagcagcggctgctggaggatgacaagcggcagttcgactccgcctggcaggagatgctgaatcacgccactcagagggtcatggaggcggagcagaccaagaccaggagcgagctggtgcataaggagacggcagccaggtacaatgccgccatgggccgcatgcgacagctggagaagaaactcaagagagccatcaacaagtccaagccttattttgaactcaaggcaaagtactatgtgcagctcgagcaactgaaaaagactgtggatgacctgcaggccaaactgaccctggcaaaaggcgagtacaagatggccctgaagaacctggagatgatctcagatgagatccacgagcggcggcgctccagtgccatggggcctcggggatgcggtgttggtgctgagggcagcagcacatctgtggaggatctgccagggagcaaacctgagcctgatgccatttctgtggcctcggaggcctttgaagatgacagctgtagcaactttgtgtctgaagatgactcggaaacccagtccgtgtccagctttagttcaggaccaacaagcccgtctgagatgcctgaccagttccctgcggttgtgaggcctggcagcctggatctgcccagccctgtgtccctgtcagagtttgggatgatgttcccagtgttgggccctcgaagtgaatgcagcggggcctcctcccctgaatgtgaagtagaacgaggagacagggcagaaggggcagagaataaaacaagtgacaaagccaacaacaaccggggcctcagcagtagcagtggcagtggtggcagcagtaagagccaaagcagcacctcccctgagggccaggccttggagaaccggatgaagcagctctccctacagtgctcaaagggaagagatggaattattgctgacataaaaatggtgcagattggctgattcatcctgggccctggccgatgtgcatatcaacatttatacatggaactggagaacattgtgccaataatcatttaatatatgccaaatcttacacgtctactctaaactgctctaatgaagtttcagtgaccttgagggctaaagattgttcttctgggtaagagctcttgggctggtttttcagagcagagttcttgttgtgggtagactgtgactaggttcacagcctttgtggaacattccgtataacggcattgtggaagcaataactagttcctatgaaagaaccagagctgggaagatggctgggaagccaggccaaagtgggggcaacagcttgcttctctttctcttctcaccctcagtttgtatgggaaaatggagatgtcctctccactttatcccacgatatctaaatgaaaaagaaagaaaacccacacacaaagcaaaaactcaagtattaagagcacatatttttgacccagtggaggcttaaaaaaaaaaaaatccaagaacacaattcattttcaccacctctggtgttcagagggggcttttaaaaaagcgtgtatgctgggatacccattaaaaccattttctagaaggctaccatgagctgcactttttggggtgggaaaggtgaatgccagtggggatgcggggggatgagggtaggagggacttatagaaggggatttgtggctgtgggggagaaggttctacagcataagccttatcctgccagccaaggggatttattctaagagaagtgcatgtgaagaatggttgccactgttattagattgacaagatgttaatttctctgtaggttgtaactttaaaaataaatgaaattatttaagggttatgctgcactagtattccttagaggaaacagttctttaaagttaggaaagggagtaggcaggcatgtgttggcaaaggctgttaatagtagttaagtgttaagactgcttttctttaacgttttcatggtaatgcatatttagagcactgtatttttgtcttgttaagaaaatttagcatttctaaaagaaaaaagcaaccctctttcaaactgttaattctgtcacagcctgtatattttagtcatttgtaaatctcttcatacaatagtgacttcttttttgactgatacagtatcttaattacaaggttattttgtacttgtcttaatacactaagtgtaataaaaacggcttgagaaaaaaaaaaaaaaaaa

SEQ ID NO: 5636 - protein, 514 aa, Homo sapien [sequence omitted]

SEQ ID NO: 5637 - DNA, 1638 bp, Homo sapien; identical to SEQ ID NO: 1351

SEQ ID NO: 5638 - protein, 361 aa, Homo sapien [sequence omitted]

SEQ ID NO: 5639 - DNA, 2162 bp, Homo sapien
gggctgcgctgtccagctgtggctatggccccagccccgagatgaggagggagagaactaggggcccgcaggcctgggaatttccgtcccccaccaagtccggatgctcactccaaagtctcagcaggcccctgagggagggagctgtcagccagggaaaaccgagaacaccatcaccatgacaaccagtcaccagcctcaggacagatacaaagctgtctggcttatcttcttcatgctgggtctgggaacgctgctcccgtggaattttttcatgacggccactcagtatttcacaaaccgcctggacatgtcccagaatgtgtccttggtcactgctgaactgagcaaggacgcccaggcgtcagccgcccctgcagcacccttgcctgagcggaactctctcagtgccatcttcaacaatgtcatgaccctatgtgccatgctgcccctgctgttattcacctacctcaactccttcctgcatcagaggatcccccagtccgtacggatcctgggcagcctggtggccatcctgctggtgtttctgatcactgccatcctggtgaaggtgcagctggatgctctgcccttctttgtcatcaccatgatcaagatcgtgctcattaattcatttggtgccatcctgcagggcagcctgtttggtctggctggccttctgcctgccagctacacggcccccatcatgagtggccagggcctagcaggcttctttgcctccgtggccatgatctgcgctattgccagtggctcggaactatcagaaagtgccttcggctactttatcacagcctgtgctgttatcattttgaccatcatctgttacctgggcctgccccgcctggaattctaccgctactaccagcagctcaagcttgaaggacccggggagcaggagaccaagttggacctcattagcaaaggagaggagccaagagcaggcaaagaggaatctggagtttcagtctccaactctcagcccaccaatgaaagccactctatcaaagccatcctgaaaaatatctcagtcctggctttctctgtctgcttcatcttcactatcaccattgggatgtttccagccgtgactgttgaggtcaagtccagcatcgcaggcagcagcacctgggaacgttacttcattcctgtgtcctgtttcttgactttcaatatctttgactggttgggccggagcctcacagctgtattcatgtggcctgggaaggacagccgctggctgccaagcctggtgctggcccggctggtgtttgtgccactgctgctgctgtgcaacattaagccccgccgctacctgactgtggtcttcgagcacgatgcctggttcatcttcttcatggctgcctttgccttctccaacggctacctcgccagcctctgcatgtgcttcgggcccaagaaagtgaagccagctgaggcagagaccgcaggagccatcatggccttcttcctgtgtctgggtctggcactgggggctgttttctccttcctgttccgggcaattgtgtgacaaaggatggacagaaggactgcctgcctccctccctgtctgcctcctgccccttccttctgccaggggtgatcctgagtggtctggcggttttttcttctaactgacttctgctttccacggcgtgtgctgggcccggatctccaggccctggggagggagcctctggacggacagtggggacattgtgggtttggggctcagagtcgagggacggggtgtagcctcggcatttgcttgagtttctccactcttggctctgactgatccctgcttgtgcaggccagtggaggctcttgggcttggagaacacgtgtgtctctgtgtatgtgtctgtgtgtctgcgtccgtgtctgtcagactgtctgcctgtcctggggtggctaggagctgggtctgaccgttgtatggtttgacctgatatactccattctcccctgcgcctcctcctctgtgttttttccatgtccccctcccaactccccatgcccagtttttacccatcatgcaccctgtacagttgccacgttactgccttttttaaaaatatatttgacagaaaccaggtgccttcagaggctctctgatttaaataaacctttcttgttttttt

SEQ ID NO: 5640 - protein, 456 aa, Homo sapien [sequence omitted]

SEQ ID NO: 5641 - DNA, 5775 bp, Homo sapien
tcctaggcggcggccgcggcggcggaggcagcagcggcggcggcagtggcggcggcgaaggtggcggcggctcggccagtactcccggcccccgccatttcggactgggagcgagcgcggcgcaggcactgaaggcggcggcggggccagaggctcagcggctcccaggtgcgggagagaggcctgctgaaaatgactgaatataaacttgtggtagttggagcttgtggcgtaggcaagagtgccttgacgatacagctaattcagaatcattttgtggacgaatatgatccaacaatagaggattcctacaggaagcaagtagtaattgatggagaaacctgtctcttggatattctcgacacagcaggtcaagaggagtacagtgcaatgagggaccagtacatgaggactggggagggctttctttgtgtatttgccataaataatactaaatcatttgaagatattcaccattatagagaacaaattaaaagagttaaggactctgaagatgtacctatggtcctagtaggaaataaatgtgatttgccttctagaacagtagacacaaaacaggctcaggacttagcaagaagttatggaattccttttattgaaacatcagcaaagacaagacagggtgttgatgatgccttctatacattagttcgagaaattcgaaaacataaagaaaagatgagcaaagatggtaaaaagaagaaaaagaagtcaaagacaaagtgtgtaattatgtaaatacaatttgtacttttttcttaaggcatactagtacaagtggtaatttttgtacattacactaaattattagcatttgttttagcattacctaatttttttcctgctccatgcagactgttagcttttaccttaaatgcttattttaaaatgacagtggaagtttttttttcctcgaagtgccagtattcccagagttttggtttttgaactagcaatgcctgtgaaaaagaaactgaatacctaagatttctgtcttggggtttttggtgcatgcagttgattacttcttatttttcttaccaagtgtgaatgttggtgtgaaacaaattaatgaagcttttgaatcatccctattctgtgttttatctagtcacataaatggattaattactaatttcagttgagaccttctaattggtttttactgaaacattgagggacacaaatttatgggcttcctgatgatgattcttctaggcatcatgtcctatagtttgtcatccctgatgaatgtaaagttacactgttcacaaaggttttgtctcctttccactgctattagtcatggtcactctccccaaaatattatattttttctataaaaagaaaaaaatggaaaaaaattacaaggcaatggaaactattataaggccatttccttttcacattagataaattactataaagactcctaatagctttttcctgttaaggcagacccagtatgaatgggattattatagcaaccattttggggctatatttacatgctactaaatttttataataattgaaaagattttaacaagtataaaaaaattctcataggaattaaatgtagtctccctgtgtcagactgctctttcatagtataactttaaatcttttcttcaacttgagtctttgaagatagttttaattctgcttgtgacattaaaagattatttgggccagttatagcttattaggtgttgaagagaccaaggttgcaagccaggccctgtgtgaaccttgagctttcatagagagtttcacagcatggactgtgtgccccacggtcatccgagtggttgtacgatgcattggttagtcaaaaatggggagggactagggcagtttggatagctcaacaagatacaatctcactctgtggtggtcctgctgacaaatcaagagcattgcttttgtttcttaagaaaacaaactcttttttaaaaattacttttaaatattaactcaaaagttgagattttggggtggtggtgtgccaagacattaattttttttttaaacaatgaagtgaaaaagttttacaatctctaggtttggctagttctcttaacactggttaaattaacattgcataaacacttttcaagtctgatccatatttaataatgctttaaaataaaaataaaaacaatccttttgataaatttaaaatgttacttattttaaaataaatgaagtgagatggcatggtgaggtgaaagtatcactggactaggttgttggtgacttaggttctagataggtgtcttttaggactctgattttgaggacatcacttactatccatttcttcatgttaaaagaagtcatctcaaactcttagttttttttttttacactatgtgatttatattccatttacataaggatacacttatttgtcaagctcagcacaatctgtaaatttttaacctatgttacaccatcttcagtgccagtcttgggcaaaattgtgcaagaggtgaagtttatatttgaatatccattctcgttttaggactcttcttccatattagtgtcatcttgcctccctaccttccacatgccccatgacttgatgcagttttaatacttgtaattcccctaaccataagatttactgctgctgtggatatctccatgaagttttcccactgagtcacatcagaaatgccctacatcttattttcctcagggctcaagagaatctgacagataccataaagggatttgacctaatcactaattttcaggtggtggctgatgctttgaacatctctttgctgcccaatccattagcgacagtaggatttttcaaccctggtatgaatagacagaaccctatccagtggaaggagaatttaataaagatagtgcagaaagaattccttaggtaatctataactaggactactcctggtaacagtaatacattccattgttttagtaaccagaaatcttcatgcaatgaaaaatactttaattcatgaagcttacttttttttttttggtgtcagagtctcgctcttgtcacccaggctggaatgcagtggcgccatctcagctcactgcaaccttccatcttcccaggttcaagcgattctcgtgcctcggcctcctgagtagctgggattacaggcgtgtgcactacactcaactaatttttgtatttttaggagagacggggtttcacctgttggccaggctggtctcgaactcctgacctcaagtgattcacccaccttggcctcataaacctgttttgcagaactcatttattcagcaaatatttattgagtgcctaccagatgccagtcaccgcacaaggcactgggtatatggtatccccaaacaagagacataatcccggtccttaggtactgctagtgtggtctgtaatatcttactaaggcctttggtatacgacccagagataacacgatgcgtattttagttttgcaaagaaggggtttggtctctgtgccagctctataattgttttgctacgattccactgaaactcttcgatcaagctactttatgtaaatcacttcattgttttaaaggaataaacttgattatattgtttttttatttggcataactgtgattcttttaggacaattactgtacacattaaggtgtatgtcagatattcatattgacccaaatgtgtaatattccagttttctctgcataagtaattaaaatatacttaaaaattaatagttttatctgggtacaaataaacagtgcctgaactagttcacagacaagggaaacttctatgtaaaaatcactatgatttctgaattgctatgtgaaactacagatctttggaacactgtttaggtagggtgttaagacttgacacagtacctcgtttctacacagagaaagaaatggccatacttcaggaactgcagtgcttatgaggggatatttaggcctcttgaatttttgatgtagatgggcatttttttaaggtagtggttaattacctttatgtgaactttgaatggtttaacaaaagatttgtttttgtagagattttaaagggggagaattctagaaataaatgttacctaattattacagccttaaagacaaaaatccttgttgaagtttttttaaaaaaagactaaattacatagacttaggcattaacatgtttgtggaagaatatagcagacgtatattgtatcatttgagtgaatgttcccaagtaggcattctaggctctatttaactgagtcacactgcataggaatttagaacctaacttttataggttatcaaaactgttgtcaccattgcacaattttgtcctaatatatacatagaaactttgtggggcatgttaagttacagtttgcacaagttcatctcatttgtattccattgatttttttttttcttctaaacattttttcttcaaaacagtatatataactttttttaggggattttttttagacagcaaaaaactatctgaagatttccatttgtcaaaaagtaatgatttcttgataattgtgtagtgaatgttttttagaacccagcagttaccttgaaagctgaatttatatttagtaacttctgtgttaatactggatagcatgaattctgcattgagaaactgaatagctgtcataaaatgctttctttcctaaagaaagatactcacatgagttcttgaagaatagtcataactagattaagatctgtgttttagtttaatagtttgaagtgcctgtttgggataatgataggtaatttagatgaatttaggggaaaaaaaagttatctgcagttatgttgagggcccatctctccccccacacccccacagagctaactgggttacagtgttttatccgaaagtttccaattccactgtcttgtgttttcatgttgaaaatacttttgcatttttcctttgagtgccaatttcttactagtactatttcttaatgtaacatgtttacctggcctgtcttttaactatttttgtatagtgtaaactgaaacatgcacattttgtacattgtgctttcttttgtgggtcatatgcagtgtgatccagttgttttccatcatttggttgcgctgacctaggaatgttggtcatatcaaacattaaaaatgaccactcttttaatgaaattaacttttaaatgtttataggagtatgtgctgtgaagtgatctaaaatttgtaatatttttgtcatgaactgtactactcctaattattgtaatgtaataaaaatagttacagtgactatgagtgtgtatttattcatgcaaatttgaactgtttgccccgaaatggatatggatactttataagccatagacactatagtataccagtgaatcttttatgcagcttgttagaagtatccttttattttctaaaaggtgctgtggatattatgtaaaggcgtgtttgcttaaacaattttccatatttagaagtagatgcaaaacaaatctgcctttatgacaaaaaaataggataacattatttatttatttccttttatcaataaggtaattgatacacaacaggtgacttggttttaggcccaaaggtagcagcagcaacattaataatggaaataattgaatagttagttatgtatgttaatgccagtcaccagcaggctatttcaaggtcagaagtaatgactccatacatattatttatttctataactacatttaaatcattaccagg

SEQ ID NO: 5642 - protein, 188 aa, Homo sapien
MTEYKLVVVGACGVGKSALTIQLIQNHFVDEYDPTIEDSYRKQVVIDGETCLLDILDTAGQEEYSAMRDQYMRTGEGFLCVFAINNTKSFEDIHHYREQIKRVKDSEDVPMVLVGNKCDLPSRTVDTKQAQDLARSYGIPFIETSAKTRQGVDDAFYTLVREIRKHKEKMSKDGKKKKKKSKTKCVIM

SEQ ID NO: 5643 - DNA, 1586 bp, Homo sapien
gaggacaggtttgtgcgctggacgcaagcaccaggcgcagcctcgctcgccgacacccggccagaacgtgttacgagtcagtttttagtgaaaaaacattgagctaggagccaagacccatctcttcactattttggtattgtgcaagtcatcttacctctctggatctcagttgtctcatctgtaaaaaggagataaaaattatttacctgcctgaacatgaggtggaggaccatcctgctacagtattgctttctcttgattacatgtttacttactgctcttgaagctgtgcctattgacatagacaagacaaaagtacaaaatattcaccctgtggaaagtgcgaagatagaaccaccagatactggactttattatgatgaatatctcaagcaagtgattgatgtgctggaaacagataaacacttcagagaaaagctccagaaagcagacatagaggaaataaagagtgggaggctaagcaaagaactggatttagtaagtcaccatgtgaggacaaaacttgatgaactgaaaaggcaagaagtaggaaggttaagaatgttaattaaagctaagttggattcccttcaagatataggcatggaccaccaagctcttctaaaacaatttgatcacctaaaccacctgaatcctgacaagtttgaatccacagatttagatatgctaatcaaagcggcaacaagtgatctggaacactatgacaagactcgtcatgaagaatttaaaaaatatgaaatgatgaaggaacatgaaaggagagaatatttaaaaacattgaatgaagaaaagagaaaagaagaagagtctaaatttgaagaaatgaagaaaaagcatgaaaatcaccctaaagttaatcacccaggaagcaaagatcaactaaaagaggtatgggaagagactgatggattggatcctaatgactttgaccccaagacatttttcaaattacatgatgtcaatagtgatggattcctggatgaacaagaattagaagccctatttactaaagagttggagaaagtatatgaccctaaaaatgaagaggatgatatggtagaaatggaagaagaaaggcttagaatgagggaacatgtaatgaatgaggttgatactaacaaagacagattggtgactctggaggagtttttgaaagccacagaaaaaaaagaattcttggagccagatagctgggagacattagatcagcaacagttcttcacagaggaagaactaaaagaatatgaaaatattattgctttacaagaaaatgaacttaagaagaaggcagatgagcttcagaaacaaaaagaagagctacaacgtcagcatgatcaactggaggctcagaagctggaatatcatcaggtcatacagcagatggaacaaaaaaaattacaacaaggaattcctccatcagggccagctggagaattgaagtttgagccacacatttaaagtctgaagtccaccagaacttggaagaaagctgttaactcaacatctatttcatctttttagctcccttcccttttctctgctcaataaatattttaaaagca

SEQ ID NO: 5644 - protein, 420 aa, Homo sapien
MRWRTILLQYCFLLITCLLTALEAVPIDIDKTKVQNIHPVESAKIEPPDTGLYYDEYLKQVIDVLETDKHFREKLQKADIEEIKSGRLSKELDLVSHHVRTKLDELKRQEVGRLRMLIKAKLDSLQDIGMDHQALLKQFDHLNHLNPDKFESTDLDMLIKAATSDLEHYDKTRHEEFKKYEMMKEHERREYLKTLNEEKRKEEESKFEEMKKKHENHPKVNHPGSKDQLKEVWEETDGLDPNDFDPKTFFKLHDVNSDGFLDEQELEALFTKELEKVYDPKNEEDDMVEMEEERLRMREHVMNEVDTNKDRLVTLEEFLKATEKKEFLEPDSWETLDQQQFFTEEELKEYENIIALQENELKKKADELQKQKEELQRQHDQLEAQKLEYHQVIQQMEQKKLQQGIPPSGPAGELKFEPHI

SEQ ID NO: 5645 - DNA, 1542 bp, Homo sapien
cgaccggcacgttcaccccatccctcaggctttatttattttttttcgacaggttcttttcaaggctccagtcaccgcagcagttgtccatgctgtagtttccactttcctgtatgggcgggctggttaggattccactttcccccaagtgcttagcccagggccagacaaaaagtagttgcttaagaaatacttgttgaaggaataaattaatgaatgaatttgtgcttacagcggctggatggcagacaaacctatgattataggaacatcaggatctcatttggaacagattacggatgctgcattgtggaacttggaaaaacaagagttcttggacaggtttcctgtgaacttgtgtctccaaaactcaatcgggcaacagaaggtattctttttttaaccttgaactctctcagatggccgctccagctttcgaacctggcaggcagtcagatctcttggtgaagttgaatcgactcatggaaagatgtctaagaaattcgaagtgtatagacactgagtctctctgtgttgttgctggtgaaaaggtttggcaaatacgtgtagacctacatttattaaatcatgatggaaatattattgatgctgccagcattgctgcaatcgtggccttatgtcatttccgaagacctgatgtctctgtccaaggagatgaagtaacactgtatacacctgaagagcgtgatcctgtaccattaagtatccaccacatgcccatttgtgtcagttttgcctttttccagcaaggaacatatttattggtggatcccaatgaacgagaagaacgtgtgatggatggcttgctggtgattgccatgaacaaacatcgagagatttgtactatccagtccagtggtgggataatgctactaaaagatcaagttctgagatgcagtaaaatcgctggtgtgaaagtagcagaaattacagagctaatattgaaagctttggagaatgaccaaaaagtaaggaaagaaggtggaaagtttggttttgcagagtctatagcaaatcaaaggatcacagcatttaaaatggaaaaggcccctattgatacctcggatgtagaagaaaaagcagaagaaatcattgctgaagcagaacctccttcagaagttgtttctacacctgtgctatggactcctggaactgcccaaattggagagggagtagaaaactcctggggtgatcttgaagactctgagaaggaagatgatgaaggcggtggtgatcaagctatcattcttgatggtataaaaatggacactggagtagaagtctctgatattggaagccaagatgctcccataatactctcagatagtgaagaagaagaaatgatcattttggaaccagacaagaatccaaagaaaataagaacacagaccaccagtgcaaaacaagaaaaagcaccaagtaaaaagccagtgaaaagaagaaaaaagaagagagctgccaattaaagctaacagttgtatatctgtatatataactattaaaagggatatttattccatt

SEQ ID NO: 5646 - protein, 355 aa, Homo sapien
MAAPAFEPGRQSDLLVKLNRLMERCLRNSKCIDTESLCVVAGEKVWQIRVDLHLLNHDGNIIDAASIAAIVALCHFRRPDVSVQGDEVTLYTPEERDPVPLSIHHMPICVSFAFFQQGTYLLVDPNEREERVMDGLLVIAMNKHREICTIQSSGGIMLLKDQVLRCSKIAGVKVAEITELILKALENDQKVRKEGGKFGFAESIANQRITAFKMEKAPIDTSDVEEKAEEIIAEAEPPSEVVSTPVLWTPGTAQIGEGVENSWGDLEDSEKEDDEGGGDQAIILDGIKMDTGVEVSDIGSQDAPIILSDSEEEEMIILEPDKNPKKIRTQTTSAKQEKAPSKKPVKRRKKKRAAN

SEQ ID NO: 5647 - DNA, 759 bp, Homo sapien; identical to SEQ ID NO: 2078

SEQ ID NO: 5648 - protein, 149 aa, Homo sapien; identical to SEQ ID NO: 2079

SEQ ID NO: 5649 - DNA, 836 bp, Homo sapien; identical to SEQ ID NO: 2072

SEQ ID NO: 5650 - protein, 212 aa, Homo sapien; identical to SEQ ID NO: 2073

SEQ ID NO: 5651 - DNA, 3096 bp, Homo sapien
cgggcgcccagagggcaaatgaggggcggcggggtggcgggtcggggggagacgcggaatttcccagcgcgggggctctggcttaccctgcaaccgggcagtctctttctgtttacggagagaaaggggaaatggaaaagtcggggaggcggtggctggcgtccgctgcgccgcccctgggcaggctcagacgccgtgagtcaggggcagagcagggcggtctgagcgtgcgggcgacgcgggtctcactcgtccgctccgctctggactgcgcgccacgctctggggtccggcgccctggttcctgcttctgccgctgccgccgccggatcccagtggcccggcgtgctcggctcccacaggcctgcagccagcatcgcaccgaaccttcggggggccgcggctggagcgctcggccggcgtgggagcgccaaggccgcagatgcaatcttcttaccgcgaagaagccaggggaataggtagccacatcttgtttgcagataagaaaggaagctaacgcagtatctgcaaagccaggagtctgactcagtacttttctcactcatgcatacaaagcagctaaaaatgacacagcttatttaccatgcccctgacactgcactgagcactttatgagcttgaactctgttaatcctcacgaccacctcatgagactctccagaaagagcaacagtaatggagtacatgagcactggaagtgacaataaagaagagattgatttattaattaaacatttaaatgtgtctgatgtaatagacattatggaaaatctttatgcaagtgaagagccagcagtttatgaacccagtctaatgaccatgtgtcaagacagtaatcaaaacgatgagcgttctaagtctctgctgcttagtggccaagaggtaccatggttgtcatcagtcagatatggaactgtggaggatttgcttgcttttgcaaaccatatatccaacactgcaaagcatttttatggacaacgaccacaggaatctggaattttattaaacatggtcatcactccccaaaatggacgttaccaaatagattccgatgttctcctgatcccctggaagctgacttacaggaatattggttctgattttattcctcggggcgcctttggaaaggtatacttggcacaagatataaagacgaagaaaagaatggcgtgtaaactgatcccagtagatcaatttaagccatctgatgtggaaatccaggcttgcttccggcacgagaacatcgcagagctgtatggcgcagtcctgtggggtgaaactgtccatctctttatggaagcaggcgagggagggtctgttctggagaaactggagagctgtggaccaatgagagaatttgaaattatttgggtgacaaagcatgttctcaagggacttgattttctacactcaaagaaagtgatccatcatgatattaaacctagcaacattgttttcatgtccacaaaagctgttttggtggattttggcctaagtgttcaaatgaccgaagatgtctattttcctaaggacctccgaggaacagagatttacatgagcccagaggtcatcctgtgcaggggccattcaaccaaagcagacatctacagcctgggggccacgctcatccacatgcagacgggcaccccaccctgggtgaagcgctaccctcgctcagcctatccctcctacctgtacataatccacaagcaagcacctccactggaagacattgcagatgactgcagtccagggatgagagagctgatagaagcttccctggagagaaaccccaatcaccgcccaagagccgcagacctactaaaacatgaggccctgaacccgcccagagaggatcagccacgctgtcagagtctggactctgccctcttggagcgcaagaggctgctgagtaggaaggagctggaacttcctgagaacattgctgattcttcgtgcacaggaagcaccgaggaatctgagatgctcaagaggcaacgctctctctacatcgacctcggcgctctggctggctacttcaatcttgttcggggaccaccaacgcttgaatatggctgaaggatgccatgtttgctctaaattaagacagcattgatctcctggaggctggttctgctgcctctacacaggggccctgtacagtgaatggtgccattttcgaaggagcagtgtgacctcctgtgacccatgaatgtgcctccaagcggccctgtgtgtttgacatgtgaagctatttgatatgcaccaggtctcaaggttctcatttctcaggtgacgtgattctaaggcaggaatttgagagttcacagaaggatcgtgtctgctgactgtttcattcactgtgcactttgctcaaaattttaaaaataccaatcacaaggataatagagtagcctaaaattactattcttggttcttatttaagtatggaatattcattttactcagaatagctgttttgtgtatattggtgtatattatataactctttgagcctttattggtaaattctggtatacattgaattcattataatttgggtgactagaacaacttgaagattgtagcaataagctggactagtgtcctaaaaatggctaactgatgaattagaagccatctgacagcaggccactagtgacagtttcttttgtgttcctatggaaacattttatactgtacatgctatgctgaagacattcaaaacgtgatgttttgaatgtggataaaactgtgtaaaccacataatttttgtacatcccaaaggatgagaatgtgacctttaagaaaaatgaaaacttttgtaaattattgatgattttgtaattcttatgactaaattttcttttaagcatttgtatattaaaatagcatactgtgtatgttttatatcaaatgccttcatgaatctttcatacatatatatatttgtaacattgtaaagtatgtgagtagtcttatgtaaagtatgtttttacattatgcaaataaaacccaatacttttgtccaatgtggttggtcaaatcaactgaataaattcagtattttgcctt

SEQ ID NO: 5652 - protein, 467 aa, Homo sapien
MEYMSTGSDNKEEIDLLIKHLNVSDVIDIMENLYASEEPAVYEPSLMTMCQDSNQNDERSKSLLLSGQEVPWLSSVRYGTVEDLLAFANHISNTAKHFYGQRPQESGILLNMVITPQNGRYQIDSDVLLIPWKLTYRNIGSDFIPRGAFGKVYLAQDIKTKKRMACKLIPVDQFKPSDVEIQACFRHENIAELYGAVLWGETVHLFMEAGEGGSVLEKLESCGPMREFEIIWVTKHVLKGLDFLHSKKVIHHDIKPSNIVFMSTKAVLVDFGLSVQMTEDVYFPKDLRGTEIYMSPEVILCRGHSTKADIYSLGATLIHMQTGTPPWVKRYPRSAYPSYLYIIHKQAPPLEDIADDCSPGMRELIEASLERNPNHRPRAADLLKHEALNPPREDQPRCQSLDSALLERKRLLSRKELELPENIADSSCTGSTEESEMLKRQRSLYIDLGALAGYFNLVRGPPTLEYG

SEQ ID NO: 5653 - DNA, 672 bp, Homo sapien
atggcttgccttggatttcagcggcacaaggctcagctgaacctggctgccaggacctggccctgcactctcctgttttttcttctcttcatccctgtcttctgcaaagcaatgcacgtggcccagcctgctgtggtactggccagcagccgaggcatcgccagctttgtgtgtgagtatgcatctccaggcaaagccactgaggtccgggtgacagtgcttcggcaggctgacagccaggtgactgaagtctgtgcggcaacctacatgacggggaatgagttgaccttcctagatgattccatctgcacgggcacctccagtggaaatcaagtgaacctcactatccaaggactgagggccatggacacgggactctacatctgcaaggtggagctcatgtacccaccgccatactacctgggcataggcaacggaacccagatttatgtaattgatccagaaccgtgcccagattctgacttcctcctctggatccttgcagcagttagttcggggttgtttttttatagctttctcctcacagctgtttctttgagcaaaatgctaaagaaaagaagccctcttacaacaggggtctatgtgaaaatgcccccaacagagccagaatgtgaaaagcaatttcagccttattttattcccatcaattga

SEQ ID NO: 5654 - protein, 223 aa, Homo sapien
MACLGFQRHKAQLNLAARTWPCTLLFFLLFIPVFCKAMHVAQPAVVLASSRGIASFVCEYASPGKATEVRVTVLRQADSQVTEVCAATYMTGNELTFLDDSICTGTSSGNQVNLTIQGLRAMDTGLYICKVELMYPPPYYLGIGNGTQIYVIDPEPCPDSDFLLWILAAVSSGLFFYSFLLTAVSLSKMLKKRSPLTTGVYVKMPPTEPECEKQFQPYFIPIN

SEQ ID NO: 5655 - DNA, 2084 bp, Mus musculus; identical to SEQ ID NO: 1958

SEQ ID NO: 5656 - protein, 380 aa, Mus musculus; identical to SEQ ID NO: 1959

SEQ ID NO: 5657 - DNA, 2074 bp, Homo sapien
caagcagcgggttagtggtcgcgcgcccgacctccgcagtcccagccgagccgcgacccttccggccgtccccaccccacctcgccgccatgcgcctccgccgcctagcgctgttcccgggtgtggcgctgcttcttgccgcggcccgcctcgccgctgcctccgacgtgctagaactcacggacgacaacttcgagagtcgcatctccgacacgggctctgcgggcctcatgctcgtcgagttcttcgccccctggtgtggacactgcaagagacttgcacctgagtatgaagctgcagctaccagattaaaaggaatagtcccattagcaaaggttgattgcactgccaacactaacacctgtaataaatatggagtcagtggatatccaaccctgaagatatttagagatggtgaagaagcaggtgcttatgatggacctaggactgctgatggaattgtcagccacttgaagaagcaggcaggaccagcttcagtgcctctcaggactgaggaagaatttaagaaattcattagtgataaagatgcctctatagtaggttttttcgatgattcattcagtgaggctcactccgagttcctaaaagcagccagcaacttgagggataactaccgatttgcacatacgaatgttgagtctctggtgaacgagtatgatgataatggagagggtatcatcttatttcgtccttcacatctcactaacaagtttgaggacaagactgtggcatatacagagcaaaaaatgaccagtggcaaaattaaaaagtttatccaggaaaacatttttggtatctgccctcacatgacagaagacaataaagatttgatacagggcaaggacttacttattgcttactatgatgtggactatgaaaagaacgctaaaggttccaactactggagaaacagggtaatgatggtggcaaagaaattcctggatgctgggcacaaactcaactttgctgtagctagccgcaaaacctttagccatgaactttctgattttggcttggagagcactgctggagagattcctgttgttgctatcagaactgctaaaggagagaagtttgtcatgcaggaggagttctcgcgtgatgggaaggctctggagaggttcctgcaggattactttgatggcaatctgaagagatacctgaagtctgaacctatcccagagagcaatgatgggcctgtgaaggtagtggtagcagagaattttgatgaaatagtgaataatgaaaataaagatgtgctgattgaattttatgccccttggtgtggtcactgtaagaacctggagcccaagtataaagaacttggcgagaagctcagcaaagacccaaatatcgtcatagccaagatggatgccacagccaatgatgtgccttctccatatgaagtcagaggttttcctaccatatacttctctccagccaacaagaagctaaatccaaagaaatatgaaggtggccgtgaattaagtgattttattagctatctacaaagagaagctacaaacccccctgtaattcaagaagaaaaacccaagaagaagaagaaggcacaggaggatctctaaagcagtagccaaacaccactttgtaaaaggactcttccatcagagatgggaaaaccattggggaggactaggacccatatgggaattattacctctcagggccgagaggacagaatggatataatctgaatcctgttaaattttctctaaactgtttcttagctgcactgtttatggaaataccaggaccagtttatgtttgtggttttgggaaaaattatttgtgttgggggaaatgttgtgggggtggggttgagttgggggtattttctaattttttttgtacatttggaacagtgacaataaatgagacccctttaaactgtcaaaaaaaaaaaaaaaaaaaaaaaaaaaaaaaaaaaaaaaaaaaaaaaaaaaaaaaaaaaaaaaaaaaaaaaaaaaaaaaaaaaaaaaaaaaaaaaaaaaaaaaaaaaaaaaaaaaaaaaaaaaaaaaaaaaaaaaaaaaa

SEQ ID NO: 5658 - protein, 505 aa, Homo sapien
MRLRRLALFPGVALLLAAARLAAASDVLELTDDNFESRISDTGSAGLMLVEFFAPWCGHCKRLAPEYEAAATRLKGIVPLAKVDCTANTNTCNKYGVSGYPTLKIFRDGEEAGAYDGPRTADGIVSHLKKQAGPASVPLRTEEEFKKFISDKDASIVGFFDDSFSEAHSEFLKAASNLRDNYRFAHTNVESLVNEYDDNGEGIILFRPSHLTNKFEDKTVAYTEQKMTSGKIKKFIQENIFGICPHMTEDNKDLIQGKDLLIAYYDVDYEKNAKGSNYWRNRVMMVAKKFLDAGHKLNFAVASRKTFSHELSDFGLESTAGEIPVVAIRTAKGEKFVMQEEFSRDGKALERFLQDYFDGNLKRYLKSEPIPESNDGPVKVVVAENFDEIVNNENKDVLIEFYAPWCGHCKNLEPKYKELGEKLSKDPNIVIAKMDATANDVPSPYEVRGFPTIYFSPANKKLNPKKYEGGRELSDFISYLQREATNPPVIQEEKPKKKKKAQEDL

SEQ ID NO: 5659 - DNA, 947 bp, Homo sapien; identical to SEQ ID NO: 1617

SEQ ID NO: 5660 - protein, 257 aa, Homo sapien; identical to SEQ ID NO: 1618

SEQ ID NO: 5661 - DNA, 1877 bp, Homo sapien; identical to SEQ ID NO: 187

SEQ ID NO: 5662 - protein, 314 aa, Homo sapien; identical to SEQ ID NO: 188

SEQ ID NO: 5663 - DNA, 2145 bp, Homo sapien; identical to SEQ ID NO: 1499

SEQ ID NO: 5664 - protein, 403 aa, Homo sapien; identical to SEQ ID NO: 1500

SEQ ID NO: 5665 - DNA, 3225 bp, Homo sapien
ggcggcagcgccctgccgacgccggggagggacgcaggcaggcggcgggcagcgggaggcggcaccccggtgctccccgcggctctcggcggagccccgccgcccgccgcgccatggcccgaagaccccggcacagcatatatagcagtgacgaggatgatgaggactttgagatgtgtgaccatgactatgatgggctgcttcccaagtctggaaagcgtcacttggggaaaacaaggtggacccgggaagaggatgaaaaactgaagaagctggtggaacagaatggaacagatgactggaaagttattgccaattatctcccgaatcgaacagatgtgcagtgccagcaccgatggcagaaagtactaaaccctgagctcatcaagggtccttggaccaaagaagaagatcagagagtgatagagcttgtacagaaatacggtccgaaacgttggtctgttattgccaagcacttaaaggggagaattggaaaacaatgtagggagaggtggcataaccacttgaatccagaagttaagaaaacctcctggacagaagaggaagacagaattatttaccaggcacacaagagactggggaacagatgggcagaaatcgcaaagctactgcctggacgaactgataatgctatcaagaaccactggaattctacaatgcgtcggaaggtcgaacaggaaggttatctgcaggagtcttcaaaagccagccagccagcagtggccacaagcttccagaagaacagtcatttgatgggttttgctcaggctccgcctacagctcaactccctgccactggccagcccactgttaacaacgactattcctattaccacatttctgaagcacaaaatgtctccagtcatgttccataccctgtagcgttacatgtaaatatagtcaatgtccctcagccagctgccgcagccattcagagacactataatgatgaagaccctgagaaggaaaagcgaataaaggaattagaattgctcctaatgtcaaccgagaatgagctaaaaggacagcaggtgctaccaacacagaaccacacatgcagctaccccgggtggcacagcaccaccattgccgaccacaccagacctcatggagacagtgcacctgtttcctgtttgggagaacaccactccactccatctctgccagcggatcctggctccctacctgaagaaagcgcctcgccagcaaggtgcatgatcgtccaccagggcaccattctggataatgttaagaacctcttagaatttgcagaaacactccaatttatagattctttcttaaacacttccagtaaccatgaaaactcagacttggaaatgccttctttaacttccacccccctcattggtcacaaattgactgttacaacaccatttcatagagaccagactgtgaaaactcaaaaggaaaatactgtttttagaaccccagctatcaaaaggtcaatcttagaaagctctccaagaactcctacaccattcaaacatgcacttgcagctcaagaaattaaatacggtcccctgaagatgctacctcagacaccctctcatctagtagaagatctgcaggatgtgatcaaacaggaatctgatgaatctggatttgttgctgagtttcaagaaaatggaccacccttactgaagaaaatcaaacaagaggtggaatctccaactgataaatcaggaaacttcttctgctcacaccactgggaaggggacagtctgaatacccaactgttcacgcagacctcgcctgtgcgagatgcaccgaatattcttacaagctccgttttaatggcaccagcatcagaagatgaagacaatgttctcaaagcatttacagtacctaaaaacaggtccctggcgagccccttgcagccttgtagcagtacctgggaacctgcatcctgtggaaagatggaggagcagatgacatcttccagtcaagctcgtaaatacgtgaatgcattctcagcccggacgctggtcatgtgagacatttccagaaaagcattatggttttcagaacagttcaagttgacttgggatatatcattcctcaacatgaaacttttcatgaatgggagaagaacctatttttgttgtggtacaacagttgagagcacgaccaagtgcatttagttgaatgaagtcttcttggatttcacccaactaaaaggatttttaaaaataaataacagtcttacctaaattattaggtaatgaattgtagccagttgttaatatcttaatgcagatttttttaaaaaaaaacataaaatgatttatctggtattttaaaggatccaacagatcagtattttttcctgtgatgggttttttgaaatttgacacattaaaaggtactccagtatttcacttttctcgatcactaaacatatgcatatatttttaaaaatcagtaaaagcattactctaagtgtagacttaataccatgtgacatttaatccagattgtaaatgctcatttatggttaatgacattgaaggtacatttattgtaccaaaccattttatgagttttctgttagcttgctttaaaaattattactgtaagaaatagttttataaaaaattatatttttattcagtaatttaattttgtaaatgccaaatgaaaaacgttttttgctgctatggtcttagcctgtagacatgctgctagtatcagaggggcagtagagcttggacagaaagaaaagaaacttggtgttaggtaattgactatgcactagtatttcagactttttaattttatatatatatacattttttttccttctgcaatacatttgaaaacttgtttgggagactctgcattttttattgtggtttttttgttattgttggtttatacaagcatgcgttgcacttcttttttgggagatgtgtgttgttcatgttctatgttttgttttgtgtgtagcctgactgttttataatttgggagttctcgatttgatccgcatcccctgtggtttctaagtgtatggtctcagaactgttgcatggatcctgtgtttgcaactggggagacagaaactgtggttgatagccagtcactgccttaagaacatttgatgcaagatggccagcactgaacttttgagatatgacggtgtacttactgccttgtagcaaaataaagatgtgcccttatttt

SEQ ID NO: 5666 - protein, 640 aa, Homo sapien
MARRPRHSIYSSDEDDEDFEMCDHDYDGLLPKSGKRHLGKTRWTREEDEKLKKLVEQNGTDDWKVIANYLPNRTDVQCQHRWQKVLNPELIKGPWTKEEDQRVIELVQKYGPKRWSVIAKHLKGRIGKQCRERWHNHLNPEVKKTSWTEEEDRIIYQAHKRLGNRWAEIAKLLPGRTDNAIKNHWNSTMRRKVEQEGYLQESSKASQPAVATSFQKNSHLMGFAQAPPTAQLPATGQPTVNNDYSYYHISEAQNVSSHVPYPVALHVNIVNVPQPAAAAIQRHYNDEDPEKEKRIKELELLLMSTENELKGQQVLPTQNHTCSYPGWHSTTIADHTRPHGDSAPVSCLGEHHSTPSLPADPGSLPEESASPARCMIVHQGTILDNVKNLLEFAETLQFIDSFLNTSSNHENSDLEMPSLTSTPLIGHKLTVTTPFHRDQTVKTQKENTVFRTPAIKRSILESSPRTPTPFKHALAAQEIKYGPLKMLPQTPSHLVEDLQDVIKQESDESGFVAEFQENGPPLLKKIKQEVESPTDKSGNFFCSHHWEGDSLNTQLFTQTSPVRDAPNILTSSVLMAPASEDEDNVLKAFTVPKNRSLASPLQPCSSTWEPASCGKMEEQMTSSSQARKYVNAFSARTLVM

SEQ ID NO: 5667 - DNA, 1929 bp, Homo sapien; identical to SEQ ID NO: 15

SEQ ID NO: 5668 - protein, 180 aa, Homo sapien; identical to SEQ ID NO: 16

SEQ ID NO: 5669 - DNA, 2518 bp, Homo sapien
cttcgggtgtacgtgctccgggatcttcagcacccgcggccgccatcgccgtcgcttggcttcttctggactcatctgcgccacttgtccgcttcacactccgccgccatcatggtgaagctcgcgaaggcaggtaaaaatcaaggtgaccccaagaaaatggctcctcctccaaaggaggtagaagaagatagtgaagatgaggaaatgtcagaagatgaagaagatgatagcagtggagaagaggtcgtcatacctcagaagaaaggcaagaaggctgctgcaacctcagcaaagaaggtggtcgtttccccaacaaaaaaggttgcagttgccacaccagccaagaaagcagctgtcactccaggcaaaaaggcagcagcaacacctgccaagaagacagttacaccagccaaagcagttaccacacctggcaagaagggagccacaccaggcaaagcattggtagcaactcctggtaagaagggtgctgccatcccagccaagggggcaaagaatggcaagaatgccaagaaggaagacagtgatgaagaggaggatgatgacagtgaggaggatgaggaggatgacgaggacgaggatgaggatgaagatgaaattgaaccagcagcgatgaaagcagcagctgctgcccctgcctcagaggatgaggacgatgaggatgacgaagatgatgaggatgacgatgacgatgaggaagatgactctgaagaagaagctatggagactacaccagccaaaggaaagaaagctgcaaaagttgttcctgtgaaagccaagaacgtggctgaggatgaagatgaagaagaggatgatgaggacgaggatgacgacgacgacgaagatgatgaagatgatgatgatgaagatgatgaggaggaggaagaagaggaggaggaagagcctgtcaaagaagcacctggaaaacgaaagaaggaaatggccaaacagaaagcagctcctgaagccaagaaacagaaagtggaaggcacagaaccgactacggctttcaatctctttgttggaaacctaaactttaacaaatctgctcctgaattaaaaactggtatcagcgatgtttttgctaaaaatgatcttgctgttgtggatgtcagaattggtatgactaggaaatttggttatgtggattttgaatctgctgaagacctggagaaagcgttggaactcactggtttgaaagtctttggcaatgaaattaaactagagaaaccaaaaggaaaagacagtaagaaagagcgagatgcgagaacacttttggctaaaaatctcccttacaaagtcactcaggatgaattgaaagaagtgtttgaagatgctgcggagatcagattagtcagcaaggatgggaaaagtaaagggattgcttatattgaatttaagacagaagctgatgcagagaaaacctttgaagaaaagcagggaacagagatcgatgggcgatctatttccctgtactatactggagagaaaggtcaaaatcaagactatagaggtggaaagaatagcacttggagtggtgaatcaaaaactctggttttaagcaacctctcctacagtgcaacagaagaaactcttcaggaagtatttgagaaagcaacttttatcaaagtaccccagaaccaaaatggcaaatctaaagggtatgcatttatagagtttgcttcattcgaagacgctaaagaagctttaaattcctgtaataaaagggaaattgagggcagagcaatcaggctggagttgcaaggacccaggggatcacctaatgccagaagccagccatccaaaactctgtttgtcaaaggcctgtctgaggataccactgaagagacattaaaggagtcatttgacggctccgttcgggcaaggatagttactgaccgggaaactgggtcctccaaagggtttggttttgtagacttcaacagtgaggaggatgccaaggaggccatggaagacggtgaaattgatggaaataaagttaccttggactgggccaaacctaagggtgaaggtggcttcgggggtcgtggtggaggcagaggcggctttggaggacgaggtggtggtagaggaggccgaggaggatttggtggcagaggccggggaggctttggagggcgaggaggcttccgaggaggcagaggaggaggaggtgaccacaagccacaaggaaagaagacgaagtttgaatagcttctgtccctctgctttcccttttccatttgaaagaaaggactctggggtttttactgttacctgatcaatgacagagccttctgaggacattccaagacagtatacagtcctgtggtctccttggaaatccgtctagttaacatttcaagggcaataccgtgttggttttgactggatattcatataaactttttaaagagttgagtgatagagctaacccttatctgtaagttttgaatttatattgtttcatcccatgtacaaaaccattttttcctac

SEQ ID NO: 5670 - protein, 707 aa, Homo sapien
MVKLAKAGKNQGDPKKMAPPPKEVEEDSEDEEMSEDEEDDSSGEEVVIPQKKGKKAAATSAKKVVVSPTKKVAVATPAKKAAVTPGKKAAATPAKKTVTPAKAVTTPGKKGATPGKALVATPGKKGAAIPAKGAKNGKNAKKEDSDEEEDDDSEEDEEDDEDEDEDEDEIEPAAMKAAAAAPASEDEDDEDDEDDEDDDDDEEDDSEEEAMETTPAKGKKAAKVVPVKAKNVAEDEDEEEDDEDEDDDDDEDDEDDDDEDDEEEEEEEEEEPVKEAPGKRKKEMAKQKAAPEAKKQKVEGTEPTTAFNLFVGNLNFNKSAPELKTGISDVFAKNDLAVVDVRIGMTRKFGYVDFESAEDLEKALELTGLKVFGNEIKLEKPKGKDSKKERDARTLLAKNLPYKVTQDELKEVFEDAAEIRLVSKDGKSKGIAYIEFKTEADAEKTFEEKQGTEIDGRSISLYYTGEKGQNQDYRGGKNSTWSGESKTLVLSNLSYSATEETLQEVFEKATFIKVPQNQNGKSKGYAFIEFASFEDAKEALNSCNKREIEGRAIRLELQGPRGSPNARSQPSKTLFVKGLSEDTTEETLKESFDGSVRARIVTDRETGSSKGFGFVDFNSEEDAKEAMEDGEIDGNKVTLDWAKPKGEGGFGGRGGGRGGFGGRGGGRGGRGGFGGRGRGGFGGRGGFRGGRGGGGDHKPQGKKTKFE

SEQ ID NO: 5671 - DNA, 630 bp, Homo sapien
atggtcgactacctagcaaataagcccaagggtcagaattctttggctttacacaaagtcatcatggtgggcagtggtggcgtgggcaagtcagctctgactctacagttcatgtacgatgagtttgtggaggactatgagcctaccaaagcagacagctatcggaagaaggtagtgctagatggggaggaagtccagatcgatatcttagatacagctgggcaggaggactacgctgcaattagagacaactacttccgaagtggggaggggttcctctgtgttttctctattacagaaatggaatcctttgcagctacagctgacttcagggagcagattttaagagtaaaagaagatgagaatgttccatttctactggttggtaacaaatcagatttagaagataaaagacaggtttctgtagaagaggcaaaaaacagagctgagcagtggaatgttaactacgtggaaacatctgctaaaacacgagctaatgttgacaaggtattttttgatttaatgagagaaattcgagcgagaaagatggaagacagcaaagaaaagaatggaaaaaagaagaggaaaagtttagccaagagaatcagagaaagatgctgcattttataa

SEQ ID NO: 5672 - protein, 209 aa, Homo sapien
MVDYLANKPKGQNSLALHKVIMVGSGGVGKSALTLQFMYDEFVEDYEPTKADSYRKKVVLDGEEVQIDILDTAGQEDYAAIRDNYFRSGEGFLCVFSITEMESFAATADFREQILRVKEDENVPFLLVGNKSDLEDKRQVSVEEAKNRAEQWNVNYVETSAKTRANVDKVFFDLMREIRARKMEDSKEKNGKKKRKSLAKRIRERCCIL

SEQ ID NO: 5673 - DNA, 4343 bp, Homo sapien
agatttgataatgggctgcattaaaagtaaagaaaacaaaagtccagccattaaatacagacctgaaaatactccagagcctgtcagtacaagtgtgagccattatggagcagaacccactacagtgtcaccatgtccgtcatcttcagcaaagggaacagcagttaatttcagcagtctttccatgacaccatttggaggatcctcaggggtaacgccttttggaggtgcatcttcctcattttcagtggtgccaagttcatatcctgctggtttaacaggtggtgttactatatttgtggccttatatgattatgaagctagaactacagaagacctttcatttaagaagggtgaaagatttcaaataattaacaatacggaaggagattggtgggaagcaagatcaatcgctacaggaaagaatggttatatcccgagcaattatgtagcgcctgcagattccattcaggcagaagaatggtattttggcaaaatggggagaaaagatgctgaaagattacttttgaatcctggaaatcaacgaggtattttcttagtaagagagagtgaaacaactaaaggtgcttattccctttctattcgtgattgggatgagataaggggtgacaatgtgaaacactacaaaattaggaaacttgacaatggtggatactatatcacaaccagagcacaatttgatactctgcagaaattggtgaaacactacacagaacatgctgatggtttatgccacaagttgacaactgtgtgtccaactgtgaaacctcagactcaaggtctagcaaaagatgcttgggaaatccctcgagaatctttgcgactagaggttaaactaggacaaggatgtttcggcgaagtgtggatgggaacatggaatggaaccacgaaagtagcaatcaaaacactaaaaccaggtacaatgatgccagaagctttccttcaagaagctcagataatgaaaaaattaagacatgataaacttgttccactatatgctgttgtttctgaagaaccaatttacattgtcactgaatttatgtcaaaaggaagcttattagatttccttaaggaaggagatggaaagtatttgaagcttccacagctggttgatatggctgctcagattgctgatggtatggcatatattgaaagaatgaactatattcaccgagatcttcgggctgctaatattcttgtaggagaaaatcttgtgtgcaaaatagcagactttggtttagcaaggttaattgaagacaatgaatacacagcaagacaaggtgcaaaatttccaatcaaatggacagctcctgaagctgcactgtatggtcggtttacaataaagtctgatgtctggtcatttggaattctgcaaacagaactagtaacaaagggccgagtgccatatccaggtatggtgaaccgtgaagtactagaacaagtggagcgaggatacaggatgccgtgccctcagggctgtccagaatccctccatgaattgatgaatctgtgttggaagaaggaccctgatgaaagaccaacatttgaatatattcagtccttcttggaagactacttcactgctacagagccacagtaccagccaggagaaaatttataattcaagtagcctattttatatgcacaaatctgccaaaatataaagaacttgtgtagattttctacaggaatcaaaagaagaaaatcttctttactctgcatgtttttaatggtaaactggaatcccagatatggttgcacaaaaccacttttttttccccaagtattaaactctaatgtaccaatgatgaatttatcagcgtatttcagggtccaaacaaaatagagctaagatactgatgacagtgtgggtgacagcatggtaatgaaggacagtgaggctcctgcttatttataaatcatttcctttctttttttccccaaagtcagaattgctcaaagaaaattatttattgttacagataaaacttgagagataaaaagctataccataataaaatctaaaattaaggaatatcatgggaccaaataattccattccagttttttaaagtttcttgcatttattattctcaaaagttttttctaagttaaacagtcagtatgcaatcttaatatatgctttcttttgcatggacatgggccaggtttttcaaaaggaatataaacaggatctcaaacttgattaaatgttagaccacagaagtggaatttgaaagtataatgcagtacattaatattcatgttcatggaactgaaagaataagaactttttcacttcagtccttttctgaagagtttgacttagaataatgaaggtaactagaaagtgagttaatcttgtatgaggttgcattgattttttaaggcaatatataattgaaactactgtccaatcaaaggggaaatgttttgatctttagatagcatgcaaagtaagacccagcattttaaaagccctttttaaaaactagacttcgtactgtgagtattgcttatatgtccttatggggatgggtgccacaaatagaaaatatgaccagatcagggacttgaatgcacttttgctcatggtgaatatagatgaacagagaggaaaatgtatttaaaagaaatacgagaaaagaaaatgtgaaagttttacaagttagagggatggaaggtaatgtttaatgttgatgtcatggagtgacagaatggctttgctggcactcagagctcctcacttagctatattctgagactttgaagagttataaagtataactataaaactaatttttcttacacactaaatgggtatttgttcaaaataatgaagttatggcttcacattcattgcagtgggatatggtttttatgtaaaacatttttagaactccagttttcaaatcatgtttgaatctacattcacttttttttgttttcttttttgagacggagtctcgctctgccgcccaggctggagtgcagtggcgcgatctcggctcactgcaagctctgcctcccaggttcacaccattctcctgcctcagcctcccgagtagctgggactacaggtgcccaccaccacgcctggctagttttttgtatttttagtagagacgcagtttcaccgtgttagccaggatggtctcgatctcctgaccttgtgatctgcccgcctcggcctcccaaagtgctgggattacaggcgtgagccaccgcgcccagcctacattcacttctaaagtctatgtaatggtggtcattttttcccttttagaatacattaaatggttgatttggggaggaaaacttattctgaatattaacggtggtgaaaaggggacagtttttaccctaaagtgcaaaagtgaaacatacaaaataagactaatttttaagagtaactcagtaatttcaaaatacagatttgaatagcagcattagtggtttgagtgtctagcaaaggaaaaattgatgaataaaatgaaggtctggtgtatatgttttaaaatactctcatatagtcacactttaaattaagccttatattaggcccctctattttcaggatataattcttaactatcattatttacctgattttaatcatcagattcgaaattctgtgccatggcgtatatgttcaaattcaaaccatttttaaaatgtgaagatggacttcatgcaagttggcagtggttctggtactaaaaattgtggttgttttttctgtttacgtaacctgcttagtattgacactctctaccaagagggtcttcctaagaagagtgctgtcattatttcctcttatcaacaacttgtgacatgagattttttaagggctttatgtgaactatgatattgtaatttttctaagcatattcaaaagggtgacaaaattacgtttatgtactaaatctaatcaggaaagtaaggcaggaaaagttgatggtattcattaggttttaactgaatggagcagttccttatataataacaattgtatagtagggataaaacactaacttaatgtgtattcattttaaattgttctgtatttttaaattgccaagaaaaacaactttgtaaatttggagatattttccaacagcttttcgtcttcagtgtcttaatgtggaagttaacccttaccaaaaaaggaagttggcaaaaacagccttctagcacacttttttaaatgaataatggtagcctaaacttaatatttttataaagtattgtaatattgttttgtggataattgaaataaaaagttctcattgaatgcacctattaaaaaaaaaaaaaaaaaa

SEQ ID NO: 5674 - protein, 543 aa, Homo sapien
MGCIKSKENKSPAIKYRPENTPEPVSTSVSHYGAEPTTVSPCPSSSAKGTAVNFSSLSMTPFGGSSGVTPFGGASSSFSVVPSSYPAGLTGGVTIFVALYDYEARTTEDLSFKKGERFQIINNTEGDWWEARSIATGKNGYIPSNYVAPADSIQAEEWYFGKMGRKDAERLLLNPGNQRGIFLVRESETTKGAYSLSIRDWDEIRGDNVKHYKIRKLDNGGYYITTRAQFDTLQKLVKHYTEHADGLCHKLTTVCPTVKPQTQGLAKDAWEIPRESLRLEVKLGQGCFGEVWMGTWNGTTKVAIKTLKPGTMMPEAFLQEAQIMKKLRHDKLVPLYAVVSEEPIYIVTEFMSKGSLLDFLKEGDGKYLKLPQLVDMAAQIADGMAYIERMNYIHRDLRAANILVGENLVCKIADFGLARLIEDNEYTARQGAKFPIKWTAPEAALYGRFTIKSDVWSFGILQTELVTKGRVPYPGMVNREVLEQVERGYRMPCPQGCPESLHELMNLCWKKDPDERPTFEYIQSFLEDYFTATEPQYQPGENL

SEQ ID NO: 5675 - DNA, 2214 bp, Homo sapien; identical to SEQ ID NO: 419

SEQ ID NO: 5676 - protein, 337 aa, Homo sapien; identical to SEQ ID NO: 420

SEQ ID NO: 5677 - DNA, 1436 bp, Homo sapien; identical to SEQ ID NO: 81

SEQ ID NO: 5678 - protein, 149 aa, Homo sapien; identical to SEQ ID NO: 82

SEQ ID NO: 5679 - DNA, 783 bp, Homo sapien; identical to SEQ ID NO: 2845

SEQ ID NO: 5680 - protein, 165 aa, Homo sapien; identical to SEQ ID NO: 2846

SEQ ID NO: 5681 - DNA, 916 bp, Homo sapien; identical to SEQ ID NO: 1253

SEQ ID NO: 5682 - protein, 206 aa, Homo sapien; identical to SEQ ID NO: 1254

SEQ ID NO: 5683 - DNA, 2386 bp, Homo sapien; identical to SEQ ID NO: 437

SEQ ID NO: 5684 - protein, 431 aa, Homo sapien; identical to SEQ ID NO: 438

SEQ ID NO: 5685 - DNA, 2856 bp, Homo sapien; identical to SEQ ID NO: 1859

SEQ ID NO: 5686 - protein, 541 aa, Homo sapien; identical to SEQ ID NO: 1860

SEQ ID NO: 5687 - DNA, 2412 bp, Homo sapien; identical to SEQ ID NO: 1395

SEQ ID NO: 5688 - protein, 416 aa, Homo sapien; identical to SEQ ID NO: 1396

SEQ ID NO: 5689 - DNA, 865 bp, Homo sapien
gaattccggagttccgggcgcgcgcgacgtcagtttgagttctgtgttctccccgcccgtgtcccgcccgacccgcgcccgcgatgctggcgctgcgctgcggctcccgctggctcggcctgctctccgtcccgcgctccgtgccgctgcgcctccccgcggcccgcgcctgcagcaagggctccggcgacccgtcctcttcctcctcctccgggaacccgctcgtgtacctggacgtggacgccaacgggaagccgctcggccgcgtggtgctggagctgaaggcagatgtcgtcccaaagacagctgagaacttcagagccctgtgcactggtgagaagggcttcggctacaaaggctccaccttccacagggtgatcccttccttcatgtgccaggcgggcgacttcaccaaccacaatggcacaggcgggaagtccatctacggaagccgctttcctgacgagaactttacactgaagcacgtggggccaggtgtcctgtccatggctaatgctggtcctaacaccaacggctcccagttcttcatctgcaccataaagacagactggttggatggcaagcatgttgtgttcggtcacgtcaaagagggcatggacgtcgtgaagaaaatagaatctttcggctctaagagtgggaggacatccaagaagattgtcatcacagactgtggccagttgagctaatctgtggccagggtgctggcatggtggcagctgcaaatgtccatgcacccaggtggccgcgttgggctgtcagccaaggtgcctgaaacgatacgtgtgcccactccactgtcacagtgtgcctgaggaaggctgctagggatgttagacggaattcc

SEQ ID NO: 5690 - protein, 207 aa, Homo sapien; identical to SEQ ID NO: 352

SEQ ID NO: 5691 - DNA, 5826 bp, Homo sapien
ccaggagagcggcgtggacgcgtgcgggcctagaggcccacgtgatccgcagggcggccgaggcaggaagctgtgagtgcgcggttgcggggtcgcattgtggctacggctttgcgtccccggcgggcagccccaggctggtccccgcctccgctctccccaccggcggggaaagcagctggtgtgggaggaaaggctccatcccccgccccctctctcccgctgttggctggcaggatcttttggcagtcctgtggcctcgctccccgcccggatcctcctgaccctgagattcgcgggtctcacgtcccgtgcacgccttgcttcggcctcagttaagcctttgtggactccaggtccctggtgagattagaaacgtttgcaaacatgtcccggatcgaaaagatgagcattctgggcgtgcggagttttggaatagaggacaaagataagcaaattatcactttcttcagcccccttacaattttggttggacccaatggggcgggaaagacgaccatcattgaatgtctaaaatatatttgtactggagatttccctcctggaaccaaaggaaatacatttgtacacgatcccaaggttgctcaagaaacagatgtgagagcccagattcgtctgcaatttcgtgatgtcaatggagaacttatagctgtgcaaagatctatggcatggtgaaaaggtcagtctgagctctaagtgtgcagaaattgaccgagaaatgatcagttctcttggggtttccaaggctgtgctaaataatgtcattttctgtcatcaagaagattctaattggcctttaagtgaaggaaaggctttgaagcaaaagtttgatgagattttttcagcaacaagatacattaaagccttagaaacacttcggcaggtacgtcagacacaaggtcagaaagtaaaagaatatcaaatggaactaaaatatctgaagcaatataaggaaaaagcttgtgagattcgtgatcagattacaagtaaggaagcccagttaacatcttcaaaggaaattgtcaaatcctatgagaatgaacttgatccattgaagaatcgtctaaaagaaattgaacataatctctctaaaataatgaaacttgacaatgaaattaaagccttggatagccgaaagaagcaaatggagaaagataatagtgaactggaagagaaaatggaaaaggtttttcaagggactgatgagcaactaaatgacttatatcacaatcaccagagaacagtaagggagaaagaaaggaaattggtagactgtcatcgtgaactggaaaaactaaataaagaatctaggcttctcaatcaggaaaaatcagaactgcttgttgaacagggtcgtctacagctgcaagcagatcgccatcaagaacatatccgagctagagattcattaattcagtctttggcaacacagctagaattggatggctttgagcgtggaccattcagtgaaagacagattaaaaattttcacaaacttgtgagagagagacaagaaggggaagcaaaaactgccaaccaactgatgaatgactttgcagaaaaagagactctgaaacaaaaacagatagatgagataagagataagaaaactggactgggaagaataattgagttaaaatcagaaatcctaagtaagaagcagaatgagctgaaaaatgtgaagtatgaattacagcagttggaaggatcttcagacaggattcttgaactggaccaggagctcataaaagctgaacgtgagttaagcaaggctgagaaaaacagcaatgtagaaaccttaaaaatggaagtaataagtctccaaaatgaaaaagcagacttagacaggaccctgcgtaaacttgaccaggagatggagcagttaaaccatcatacaacaacacgtacccaaatggagatgctgaccaaagacaaagctgacaaagatgaacaaatcagaaaaataaaatctaggcacagtgatgaattaacctcactgttgggatattttcccaacaaaaaacagcttgaagactggctacatagtaaatcaaaagaaattaatcagaccagggacagacttgccaaattgaacaaggaactagcttcatctgagcagaataaaaatcatataaataatgaactaaaaagaaaggaagagcagttgtccagttacgaagacaagctgtttgatgtttgtggtagccaggattttgaaagtgatttagacaggcttaaagaggaaattgaaaaatcatcaaaacagcgagccatgctggctggagccacagcagtttactcccagttcattactcagctaacagacgaaaaccagtcatgttgccccgtttgtcagagagtttttcagacagaggctgagttacaagaagtcatcagtgatttgcagtctaaactgcgacttgctccagataaactcaagtcaacagaatcagagctaaaaaaaaaggaaaagcggcgtgatgaaatgctgggacttgtgcccatgaggcaaagcataattgatttgaaggagaaggaaataccagaattaagaaacaaactgcagaatgtcaatagagacatacagcgcctaaagaacgacatagaagaacaagaaacactcttgggtacaataatgcctgaagaagaaagtgccaaagtatgcctgacagatgttacaattatggagaggttccagatggaacttaaagatgttgaaagaaaaattgcacaacaagcagctaagctacaaggaatagacttagatcgaactgtccaacaagtcaaccaggagaaacaagagaaacagcacaagttagacacagtttctagtaagattgaattgaatcgtaagcttatacaggaccagcaggaacagattcaacatctaaaaagtacaacaaatgagctaaaatctgagaaacttcagatatccactaatttgcaacgtcgtcagcaactggaggagcagactgtggaattatccactgaagttcagtctttgtacagagagataaaggatgctaaagagcaggtaagccctttggaaacaacattggaaaagttccagcaagaaaaagaagaattaatcaacaaaaaaaatacaagcaacaaaatagcacaggataaactgaatgatattaaagagaaggttaaaaatattcatggctatatgaaagacattgagaattatattcaagatgggaaagacgactataagaagcaaaaagaaactgaacttaataaagtaatagctcaactaagtgaatgcgagaaacacaaagaaaagataaatgaagatatgagactcatgagacaagatattgatacacagaagatacaagaaaggtggctacaagataaccttactttaagaaaaagaaatgaggaactaaaagaagttgaagaagaaagaaaacaacatttgaaggaaatgggtcaaatgcaggttttgcaaatgaaaagtgaacatcagaagttggaagagaacatagacaatataaaaagaaatcataatttggcattagggcgacagaaaggttatgaagaagaaattattcattttaagaaagaacttcgagaaccacaatttcgggatgctgaggaaaagtatagagaaatgatgattgttatgaggacaacagaacttgtgaacaaggatctggatatttattataagactcttgaccaagcaataatgaaatttcacagtatgaaaatggaagaaatcaataaaattatacgtgacctgtggcgaagtacctatcgtggacaagatattgaatacatagaaatacggtctgatgccgatgaaaatgtatcagcttctgataaaaggcggaattataactaccgagtggtgatgctgaagggagacacagccttggatatgcgaggacgatgcagtgctggacaaaaggtattagcctcactcatcattcgcctggccctggctgaaacgttctgcctcaactgtggcatcattgccttggatgagccaacaacaaatcttgaccgagaaaacattgaatctcttgcacatgctctggttgagataataaaaagtcgctcacagcagcgtaacttccagcttctggtaatcactcatgatgaagattttgtggagcttttaggacgttctgaatatgtggagaaattctacaggattaaaaagaacatcgatcagtgctcagagattgtgaaatgcagtgttagctccctgggattcaatgttcattaaaaatatccaagatttaaatgccatagaaatgtaggtcctcagaaagtgtataataagaaacttatttctcatatcaacttagtcaataagaaaatatattctttcaaaggaacattgtgtctaggattttggatgttgagaggttctaaaatcatgaaacttgtttcactgaaaattggacagattgcctgtttctgatttgctgctcttcatcccattccaggcagcctctgtcaggccttcagggttcagcagtacagccgagactcgactctgtgcctccctccccagtgcaaatgcatgcttcttctcaaagcactgttgagaaggagataattactgccttgaaaatttatggttttggtatttttttaaatcatagttaaatgttacctctgaatttacttccttgcatgtggtttgaaaaactgagtattaatatctgaggatgaccagaaatggtgagatgtatgtttggctctgcttttaactttataaatccagtgacctctctctctgggacttggtttccccaactaaaatttgaagtagttgaatggggtctcaaagtttgacaggaaccttaagtaatcatctaagtcagtacccaccaccttcttctcctacatatcccttccagatggtcatccagactcagagctctctctacagagaggaaattctccactgtgcacacccacctttggaaagctctgaccacttgaggcctgatctgcccatcgtgaagaagcctgtaacactcctctgcgtctatcctgtgtagcatactggcttcaccatcaatcctgattcctctctaagtgggcattgccatgtggaaggcaagccaggctcactcacagagtcaaggcctgctccctgtagggtccaaccagacctggaagaacaggcctctccatttgctcttcagatgccacttctaagaaaagcctaatcacagtttttcctggaattgccagctgacatcttgaatccttccattccacacagaatgcaaccaagtcacacgcttttgaattatgctttgtagagttttgtcattcagagtcagccaggaccataccgggtcttgattcagtcacatggcatggttttgtgccatctgtagctataatgagcatgtttgcctagacagcttttctcaactgggtccagaagagaattaagccctaaggtcctaaggcatctatctgtgctaggttaaatggttggcccccaaagatagacaggtcctgatttctagaacccgtgactgttactttatacagcaaaggaaactttgcagatgtgattaaagctaaggaccttaagacagagtatcctgggggtggtggtggggtgggggggggtcctaaatgtaatcacgagtaagattaagagcaaatcaattctagtcatatattaaacatccacaataaccaagatatttttatcccaagaatgcaagatttcagaaaatgaaaaatctgttgataaatccatcactataataaaaccgaaggtgaaaaaaattctgaaaaaaaaaaaaaaaaaaaaaaaaaaaa

SEQ ID NO: 5692 - protein, 1173 aa, Homo sapien
MISSLGVSKAVLNNVIFCHQEDSNWPLSEGKALKQKFDEIFSATRYIKALETLRQVRQTQGQKVKEYQMELKYLKQYKEKACEIRDQITSKEAQLTSSKEIVKSYENELDPLKNRLKEIEHNLSKIMKLDNEIKALDSRKKQMEKDNSELEEKMEKVFQGTDEQLNDLYHNHQRTVREKERKLVDCHRELEKLNKESRLLNQEKSELLVEQGRLQLQADRHQEHIRARDSLIQSLATQLELDGFERGPFSERQIKNFHKLVRERQEGEAKTANQLMNDFAEKETLKQKQIDEIRDKKTGLGRIIELKSEILSKKQNELKNVKYELQQLEGSSDRILELDQELIKAERELSKAEKNSNVETLKMEVISLQNEKADLDRTLRKLDQEMEQLNHHTTTRTQMEMLTKDKADKDEQIRKIKSRHSDELTSLLGYFPNKKQLEDWLHSKSKEINQTRDRLAKLNKELASSEQNKNHINNELKRKEEQLSSYEDKLFDVCGSQDFESDLDRLKEEIEKSSKQRAMLAGATAVYSQFITQLTDENQSCCPVCQRVFQTEAELQEVISDLQSKLRLAPDKLKSTESELKKKEKRRDEMLGLVPMRQSIIDLKEKEIPELRNKLQNVNRDIQRLKNDIEEQETLLGTIMPEEESAKVCLTDVTIMERFQMELKDVERKIAQQAAKLQGIDLDRTVQQVNQEKQEKQHKLDTVSSKIELNRKLIQDQQEQIQHLKSTTNELKSEKLQISTNLQRRQQLEEQTVELSTEVQSLYREIKDAKEQVSPLETTLEKFQQEKEELINKKNTSNKIAQDKLNDIKEKVKNIHGYMKDIENYIQDGKDDYKKQKETELNKVIAQLSECEKHKEKINEDMRLMRQDIDTQKIQERWLQDNLTLRKRNEELKEVEEERKQHLKEMGQMQVLQMKSEHQKLEENIDNIKRNHNLALGRQKGYEEEIIHFKKELREPQFRDAEEKYREMMIVMRTTELVNKDLDIYYKTLDQAIMKFHSMKMEEINKIIRDLWRSTYRGQDIEYIEIRSDADENVSASDKRRNYNYRVVMLKGDTALDMRGRCSAGQKVLASLIIRLALAETFCLNCGIIALDEPTTNLDRENIESLAHALVEIIKSRSQQRNFQLLVITHDEDFVELLGRSEYVEKFYRIKKNIDQCSEIVKCSVSSLGFNVH

SEQ ID NO: 5693 - DNA, 2376 bp, Homo sapien; identical to SEQ ID NO: 3062

SEQ ID NO: 5694 - protein, 491 aa, Homo sapien [sequence omitted]

SEQ ID NO: 5695 - DNA, 1118 bp, Homo sapien; identical to SEQ ID NO: 3245

SEQ ID NO: 5696 - protein, 344 aa, Homo sapien; identical to SEQ ID NO: 3246

SEQ ID NO: 5697 - DNA, 918 bp, Homo sapien
cacgagcttagctgaagatgactgacagtgttatttattccatgttagagttgcctacggcaacccaagcccagaatgactatggaccacagcaaaaatcttcctcttccaggccttcttgttcttgccttgtggcaatagctttggggcttctgactgcagttcttctgagtgtgctgctataccagtggatcctgtgccagggctccaactactccacttgtgccagctgtcctagctgcccagaccgctggatgaaatatggtaaccattgttattatttctcagtggaggaaaaggactggaattctagtctggaattctgcctagccagagactcacacctccttgtgataacggacaatcaggaaatgagcctgctccaagttttcctcagtgaggccttttgctggattggtctgaggaacaattctggctggaggtgggaagatggatcacctctaaacttctcaaggatttcttctaatagctttgtgcagacatgcggtgccatcaacaaaaatggtcttcaagcctcaagctgtgaagttcctttacactgggtgtgtaagaaggtcagactttgatagatgaccactctgtcctgaccctcagatctgtcatgtatccctaaaaggagggagctggccactggctgttgggaaagccatgagtatatagttagcaaatactgaactttctcagatatggcattagatgcaagacaacctcctagggattgatgcctaactgatggattctctttgagactatttagatattatgtgagcaatttaaagaccagatctaagcaaattttgaaatagatgtttgttttttgtatttctcagtatggaaactaatgctgccactctcatccccgtcccaaccatactctgtcaaaaatatacctttttc

SEQ ID NO: 5698 - protein, 189 aa, Homo sapien
MTDSVIYSMLELPTATQAQNDYGPQQKSSSSRPSCSCLVAIALGLLTAVLLSVLLYQWILCQGSNYSTCASCPSCPDRWMKYGNHCYYFSVEEKDWNSSLEFCLARDSHLLVITDNQEMSLLQVFLSEAFCWIGLRNNSGWRWEDGSPLNFSRISSNSFVQTCGAINKNGLQASSCEVPLHWVCKKVRL

SEQ ID NO: 5699 - DNA, 3184 bp, Homo sapien; identical to SEQ ID NO: 891

SEQ ID NO: 5700 - protein, 192 aa, Homo sapien; identical to SEQ ID NO: 892

SEQ ID NO: 5701 - DNA, 2126 bp, Homo sapien; identical to SEQ ID NO: 1035

SEQ ID NO: 5702 - protein, 315 aa, Homo sapien; identical to SEQ ID NO: 1036

SEQ ID NO: 5703 - DNA, 1990 bp, Homo sapien; identical to SEQ ID NO: 2331

SEQ ID NO: 5704 - protein, 465 aa, Homo sapien; identical to SEQ ID NO: 2332

SEQ ID NO: 5705 - DNA, 2313 bp, Homo sapien
catcgcccgaggcgtccgccctgcaaatctgccagcccccgagaggggtttggaaccttagcacccaagtctaagtcaacttcatagtgtgaacatggctacgcctcttcattcccgtccatgccgagcccccgactgcagcattcaaagcccccacggaggttgagccgggcacagaaacacagcagcgggagcagcaacaccagcactgccaacagacgagctcatctgcgcctttgtttagaacgcttaaaagttctgattccactaggaccagactgcacccggcacacaacacttggtttgctcaacaaagccaaagcacacatcaagaaacttgaagaagctgaaagaaaaagccagcaccagctcgagaatttggaacgagaacagagatttttaaagtggcgactggaacagctgcagggtcctcaggagatggaacgaatacgaatggacagcattggatcaactatttcttcagatcgttctgattcagagcgagaggagattgaagtggatgttgaaagcacagagttctcccatggagaagtggacaatataagtaccaccagcatcagtgacattgatgaccacagcagcctgccgagtattgggagtgacgagggttactccagtgccagtgtcaaactttcattcacttcatagaacccagcatgacataacagtgcagggcaaaatattcactgggccaattcaatacaaacaatctcttaaattgggttcatgatgcagtctcctctttaaaacaaaacaaaacaaaactatacttgaacaaaagggtcagaggacctgtatttaagcaaatacttagcaaaaagtggggcagagcctcccaaggagaacaaatattcagaatattcatattggaaaaatcacaatttttaatggcagcagaaaacttgtgtgaaattttcttgatttgagttgattgagaagaggacattggagatgccatcctctttctcttttctagtttgctcatactacattgagtagacacatttaaggatggggttatgaacccttcctgagctttatggtcctaaaagcaaaataaaaactattcgaatgaaaagacaagaaaatcaggtattaatcttggatagctaataatgagctattaaaactcagcctgggacagtttatcatgaagcctgtggatgatcaatcctttattattattttttttttttgaaaaaagctcatttcatgctctgcaaaaggagagactcccatgaagccttttgaaagggatcatcatgcagctcaactttctgttggattccatgctaagcaagctaaccttatcctgcattgttagcactaggcacccagctgccacctctccatcctgctgcccttaggccacatgggagcagtccatgcatgacagcctctatcctacaaggcctatgagtatggattgggggggccaaaaggaaaaagctccatgtgcctctttgtctgcgtgggtcagaagagttgtgcacgcagattagcaggccaaggtctgagccacagcagcatttttatttcagattttgataactgtttatatgtgttgaaaaccaaaatgacatctttttaaagcttatccataaaaaaaaatagatgtcttttatagtggaaaaacacatggggaaaaaaatcatctattttgatgcagcatttgataatgataaaacacctcacacctcactctttatagtgcacaaaatgaatgaggtctgggctaggtagaaaaagggtcaatgctatttttgtttttagaatcattaccttttaccagcttttaaccatctgatatctatagtagacacactatcatagttaacatagttaagttcagcacttgtctcattttaatgtaaagatttgcttccattttcctacaggcagtctctctcttcctcacagtcccactgtgcaggtgctattgttactcttacgaatattttcagtaatgttattttcttctaagtgaaatttctagcctgcactttgatgtcatgtgttccctttgtctttcaaactccaaggttcccctgtggccctctcccttaccctgggaaggcctcttggagaccttacccctggctgtttggactttgtatactttaaataatttaactacccttaattacttaaaaaaaaaaaaaagctttatgattttcataacttattgctgattttaatggattgttaatttcagtcctgtagttttattttatgtttagatagggctgggcaaggaaaaagaaaataaagacaaccatatttagcagtgca

SEQ ID NO: 5706 - protein, 182 aa, Homo sapien
MPSPRLQHSKPPRRLSRAQKHSSGSSNTSTANRRAHLRLCLERLKVLIPLGPDCTRHTTLGLLNKAKAHIKKLEEAERKSQHQLENLEREQRFLKWRLEQLQGPQEMERIRMDSIGSTISSDRSDSEREEIEVDVESTEFSHGEVDNISTTSISDIDDHSSLPSIGSDEGYSSASVKLSFTS

SEQ ID NO: 5707 - DNA, 911 bp, Homo sapien; identical to SEQ ID NO: 1163

SEQ ID NO: 5708 - protein, 230 aa, Homo sapien; identical to SEQ ID NO: 1164

SEQ ID NO: 5709 - DNA, 878 bp, Homo sapien; identical to SEQ ID NO: 1369

SEQ ID NO: 5710 - protein, 262 aa, Homo sapien; identical to SEQ ID NO: 1370

SEQ ID NO: 5711 - DNA, 3198 bp, Homo sapien; identical to SEQ ID NO: 883

SEQ ID NO: 5712 - protein, 816 aa, Homo sapien; identical to SEQ ID NO: 884

SEQ ID NO: 5713 - DNA, 2439 bp, Homo sapien
gcagccgccaccgccgccgccgccgccaccagagccgccctgtccgcgccgcgcctcggcagccggaacagggccgccgtcggggagccccaacacacggtccacagctcatcatgatggacttggagctgccgccgccgggactcccgtcccagcaggacatggatttgattgacatactttggaggcaagatatagatcttggagtaagtcgagaagtatttgacttcagtcagcgacggaaagagtatgagctggaaaaacagaaaaaacttgaaaaggaaagacaagaacaactccaaaaggagcaagagaaagcctttttcgctcagttacaactagatgaagagacaggtgaatttctcccaattcagccagcccagcacatccagtcagaaaccagtggatctgccaactactcccaggttgcccacattcccaaatcagatgctttgtactttgatgactgcatgcagcttttggcgcagacattcccgtttgtagatgacaatgaggtttcttcggctacgtttcagtcacttgttcctgatattcccggtcacatcgagagcccagtcttcattgctactaatcaggctcagtcacctgaaacttctgttgctcaggtagcccctgttgatttagacggtatgcaacaggacattgagcaagtttgggaggagctattatccattcctgagttacagtgtcttaatattgaaaatgacaagctggttgagactaccatggttccaagtccagaagccaaactgacagaagttgacaattatcatttttactcatctataccctcaatggaaaaagaagtaggtaactgtagtccacattttcttaatgcttttgaggattccttcagcagcatcctctccacagaagaccccaaccagttgacagtgaactcattaaattcagatgccacagtcaacacagattttggtgatgaattttattctgctttcatagctgagcccagtatcagcaacagcatgccctcacctgctactttaagccattcactctctgaacttctaaatgggcccattgatgtttctgatctatcactttgcaaagctttcaaccaaaaccaccctgaaagcacagcagaattcaatgattctgactccggcatttcactaaacacaagtcccagtgtggcatcaccagaacactcagtggaatcttccagctatggagacacactacttggcctcagtgattctgaagtggaagagctagatagtgcccctggaagtgtcaaacagaatggtcctaaaacaccagtacattcttctggggatatggtacaacccttgtcaccatctcaggggcagagcactcacgtgcatgatgcccaatgtgagaacacaccagagaaagaattgcctgtaagtcctggtcatcggaaaaccccattcacaaaagacaaacattcaagccgcttggaggctcatctcacaagagatgaacttagggcaaaagctctccatatcccattccctgtagaaaaaatcattaacctccctgttgttgacttcaacgaaatgatgtccaaagagcagttcaatgaagctcaacttgcattaattcgggatatacgtaggaggggtaagaataaagtggctgctcagaattgcagaaaaagaaaactggaaaatatagtagaactagagcaagatttagatcatttgaaagatgaaaaagaaaaattgctcaaagaaaaaggagaaaatgacaaaagccttcacctactgaaaaaacaactcagcaccttatatctcgaagttttcagcatgctacgtgatgaagatggaaaaccttattctcctagtgaatactccctgcagcaaacaagagatggcaatgttttccttgttcccaaaagtaagaagccagatgttaagaaaaactagatttaggaggatttgaccttttctgagctagtttttttgtactattatactaaaagctcctactgtgatgtgaaatgctcatactttataagtaattctatgcaaaatcatagccaaaactagtatagaaaataatacgaaactttaaaaagcattggagtgtcagtatgttgaatcagtagtttcactttaactgtaaacaatttcttaggacaccatttgggctagtttctgtgtaagtgtaaatactacaaaaacttatttatactgttcttatgtcatttgttatattcatagatttatatgatgatatgacatctggctaaaaagaaattattgcaaaactaaccactatgtacttttttataaatactgtatggacaaaaaatggcattttttatattaaattgtttagctctggcaaaaaaaaaaaattttaagagctggtactaataaaggattattatgactgttaaaaaaaaaaaaaaaaaaaaaaaaaaaaaaaaaa

SEQ ID NO: 5714 - protein, 605 aa, Homo sapien
MMDLELPPPGLPSQQDMDLIDILWRQDIDLGVSREVFDFSQRRKEYELEKQKKLEKERQEQLQKEQEKAFFAQLQLDEETGEFLPIQPAQHIQSETSGSANYSQVAHIPKSDALYFDDCMQLLAQTFPFVDDNEVSSATFQSLVPDIPGHIESPVFIATNQAQSPETSVAQVAPVDLDGMQQDIEQVWEELLSIPELQCLNIENDKLVETTMVPSPEAKLTEVDNYHFYSSIPSMEKEVGNCSPHFLNAFEDSFSSILSTEDPNQLTVNSLNSDATVNTDFGDEFYSAFIAEPSISNSMPSPATLSHSLSELLNGPIDVSDLSLCKAFNQNHPESTAEFNDSDSGISLNTSPSVASPEHSVESSSYGDTLLGLSDSEVEELDSAPGSVKQNGPKTPVHSSGDMVQPLSPSQGQSTHVHDAQCENTPEKELPVSPGHRKTPFTKDKHSSRLEAHLTRDELRAKALHIPFPVEKIINLPVVDFNEMMSKEQFNEAQLALIRDIRRRGKNKVAAQNCRKRKLENIVELEQDLDHLKDEKEKLLKEKGENDKSLHLLKKQLSTLYLEVFSMLRDEDGKPYSPSEYSLQQTRDGNVFLVPKSKKPDVKKN

SEQ ID NO: 5715 - DNA, 4426 bp, Homo sapien
tgccttgaccaggacttgggactttgcgaaaggatcgcggggcccggagaggtgttggagagcacaatggctgaacaagtccttcctcaggctttgtatttgagcaatatgcggaaagctgtgaagatacgggagagaactccagaagacatttttaaacctactaatgggatcattcatcattttaaaaccatgcaccgatacacactggaaatgttcagaacttgccagttttgtcctcagtttcgggagatcatccacaaagccctcatcgacagaaacatccaggccaccctggaaagccagaagaaactcaactggtgtcgagaagtccggaagcttgtggcgctgaaaacgaacggtgacggcaattgcctcatgcatgccacttctcagtacatgtggggcgttcaggacacagacttggtactgaggaaggcgctgttcagcacgctcaaggaaacagacacacgcaactttaaattccgctggcaactggagtctctcaaatctcaggaatttgttgaaacggggctttgctatgatactcggaactggaatgatgaatgggacaatcttatcaaaatggcttccacagacacacccatggcccgaagtggacttcagtacaactcactggaagaaatacacatatttgtcctttgcaacatcctcagaaggccaatcattgtcatttcagacaaaatgctaagaagtttggaatcaggttccaatttcgcccctttgaaagtgggtggaatttacttgcctctccactggcctgcccaggaatgctacagataccccattgttctcggctatgacagccatcattttgtacccttggtgaccctgaaggacagtgggcctgaaatccgagctgttccacttgttaacagagaccggggaagatttgaagacttaaaagttcactttttgacagatcctgaaaatgagatgaaggagaagctcttaaaagagtacttaatggtgatagaaatccccgtccaaggctgggaccatggcacaactcatctcatcaatgccgcaaagttggatgaagctaacttaccaaaagaaatcaatctggtagatgattactttgaacttgttcagcatgagtacaagaaatggcaggaaaacagcgagcaggggaggagagaggggcacgcccagaatcccatggaaccttccgtgccccagctttctctcatggatgtaaaatgtgaaacgcccaactgccccttcttcatgtctgtgaacacccagcctttatgccatgagtgctcagagaggcggcaaaagaatcaaaacaaactcccaaagctgaactccaagccgggccctgaggggctccctggcatggcgctcggggcctctcggggagaagcctatgagcccttggcgtggaaccctgaggagtccactggggggcctcattcggccccaccgacagcacccagcccttttctgttcagtgagaccactgccatgaagtgcaggagccccggctgccccttcacactgaatgtgcagcacaacggattttgtgaacgttgccacaacgcccggcaacttcacgccagccacgccccagaccacacaaggcacttggatcccgggaagtgccaagcctgcctccaggatgttaccaggacatttaatgggatctgcagtacttgcttcaaaaggactacagcagaggcctcctccagcctcagcaccagcctccctccttcctgtcaccagcgttccaagtcagatccctcgcggctcgtccggagcccctccccgcattcttgccacagagctggaaacgacgcccctgctggctgcctgtctcaagctgcacggactcctggggacaggacggggacgagcaagtgcagaaaagccggctgcgtgtattttgggactccagaaaacaagggcttttgcacactgtgtttcatcgagtacagagaaaacaaacattttgctgctgcctcagggaaagtcagtcccacagcgtccaggttccagaacaccattccgtgcctggggagggaatgcggcacccttggaagcaccatgtttgaaggatactgccagaagtgtttcattgaagctcagaatcagagatttcatgaggccaaaaggacagaagagcaactgagatcgagccagcgcagagatgtgcctcgaaccacacaaagcacctcaaggcccaagtgcgcccgggcctcctgcaagaacatcctggcctgccgcagcgaggagctctgcatggagtgtcagcatcccaaccagaggatgggccctggggcccaccggggtgagcctgcccccgaagacccccccaagcagcgttgccgggcccccgcctgtgatcattttggcaatgccaagtgcaacggctactgcaacgaatgctttcagttcaagcagatgtatggctaaccggaaacaggtgggtcacctcctgcaagaagtggggcctcgagctgtcagtcatcatggtgctatcctctgaacccctcagctgccactgcaacagtgggcttaagggtgtctgagcaggagaggaaagataagctcttcgtggtgcccacgatgctcaggtttggtaacccgggagtgttcccaggtggccttagaaagcaaagcttgtaactggcaagggatgatgtcagattcagcccaaggttcctcctctcctaccaagcaggaggccaggaacttctttggacttggaaggtgtgcggggactggccgaggcccctgcaccctgcgcatcaggactgcttcatcgtcttggctgagaaagggaaaagacacacaagtcgcgtgggttggagaagccagagccattccacctcccctcccccagcatctctcagagatgtgaagccagatcctcatggcagcgaggccctctgcaagaagctcaaggaagctcagggaaaatggacgtattcagagagtgtttgtagttcatggtttttccctacctgcccggttcctttcctgaggacccggcagaaatgcagaaccatccatggactgtgattctgaggctgctgagactgaacatgttcacattgacagaaaaacaagctgctctttataatatgcaccttttaaaaaattagaatattttactgggaagacgtgtaactctttgggttattactgtctttacttctaaagaagttagcttgaactgaggagtaaaagtgtgtacatatataatatacccttacattatgtatgagggatttttttaaattatattgaaatgctgccctagaagtacaataggaaggctaaataataataacctgttttctggttgttgttggggcatgagcttgtgtatacactgcttgcataaactcaaccagctgcctttttaaagggagctctagtcctttttgtgtaattcactttatttattttattacaaacttcaagattatttaagtgaagatatttcttcagctctggggaaaatgccacagtgttctcctgagagaacatccttgctttgagtcaggctgtgggcaagttcctgaccacagggagtaaattggcctctttgatacacttttgcttgcctccccaggaaagaaggaattgcatccaaggtatacatacatattcatcgatgtttcgtgcttctccttatgaaactccagctatgtaataaaaaactatactctgtgttctgttaatgcctctgagtgtcctacctccttggagatgagatagggaaggagcagggatgagactggcaatggtcacagggaaagatgtggccttttgtgatggttttattttctgttaacactgtgtcctgggggggctgggaagtcccctgcatcccatggtaccctggtattgggacagcaaaagccagtaaccatgagtatgaggaaatctctttctgttgctggcttacagtttctctgtgtgctttgtggttgctgtcatatttgctctagaagaaaaaaaaaaaaggaggggaaatgcattttccccagagataaaggctgccattttgggggtctgtacttatggcctgaaaatatttgtgatccataactctacacagcctttactcatactattaggcacactttccccttagagccccctaagtttttcccagacgaatctttataatttcctttccaaagataccaaataaacttcagtgttttcatctaattctcttaaagttgatatcttaatattttgtgttgatcattatttccattcttaatgtgaaaaaaagtaattatttatacttattataaaaagtatttgaaatttgcacatttaattgtccctaatagaaagccacctattctttgttggatttcttcaagtttttctaaataaatgtaacttttcacaagagtcaacattaaaaaataaattattt

SEQ ID NO: 5716 - protein, 790 aa, Homo sapien; identical to SEQ ID NO: 662

SEQ ID NO: 5717 - DNA, 1287 bp, Homo sapien
ccctttcgctgcggcctttccccaacccggacccggcacttctcgggttccgcgactgccgatcgccccggcgcggcaccgctccctcaggagtcgcctaggccgcgcagtctcccgacttctcgtcaggctttcgcgccggcgctccagcaatcactggctggagaaggtgggcgttccggctcgagaggaccctgccgcggctccggaagagcctcgtcctgggcggcggtggtgcggcggtcgccgttatggccactgggctgggcggctgaccgcgggctaggaaagggcccagggcccgaatctcggtggccgctgctccagcgcggcctgcgccatggcctcctccgccgcctcctcggagcatttcgagaagctgcacgagatcttccgcggcctccatgaagacctacaaggggtgcccgagcggctgctggggacggcggggaccgaagaaaagaagaaattgatcagggattttgatgaaaagcaacaggaagcaaatgaaacgctggcagagatggaggaggagctacgttatgcacccctgtctttccgaaaccccatgatgtctaagcttcgaaactaccggaaggaccttgctaaactccatcgggaggtgagaagcacacctttgacagccacacctggaggccgaggagacatgaaatatggcatatatgctgtagagaatgagcatatgaatcggctacagtctcaaagggcaatgcttctgcagggcactgaaagcctgaaccgggccacccaaagtattgaacgttctcatcggattgccacagagactgaccagattggctcagaaatcatagaagagctgggggaacaacgagaccagttagaacgtaccaagagtagactggtaaacacaagtgaaaacttgagcaaaagtcggaagattctccgttcaatgtccagaaaagtgacaaccaacaagctgctgctttccattatcatcttactggagctcgccatcctgggaggcctggtttactacaaattctttcgcagccattgaacttctatagggaagggtttgtggaccagaactttgaccttgtgaatgcatgatgttagggatgtggatagaataagcatattgctgctgtgggctgacagttcaaggatgcactgtatagccaggctgtgggaggagggaggaaagatgaaaaaccacttaaatgtgaaggaacaacagcaacaagaccagtatgatataccaaggtaataaatgctgtttatgacttctttaaaaaaaaaaaaaaa

SEQ ID NO: 5718 - protein, 232 aa, Homo sapien
MASSAASSEHFEKLHEIFRGLHEDLQGVPERLLGTAGTEEKKKLIRDFDEKQQEANETLAEMEEELRYAPLSFRNPMMSKLRNYRKDLAKLHREVRSTPLTATPGGRGDMKYGIYAVENEHMNRLQSQRAMLLQGTESLNRATQSIERSHRIATETDQIGSEIIEELGEQRDQLERTKSRLVNTSENLSKSRKILRSMSRKVTTNKLLLSIIILLELAILGGLVYYKFFRSH

SEQ ID NO: 5719 - DNA, 2221 bp, Homo sapien
cgcgggggcgggcgcgcaccgggagcgcgtcggaggcgagtggaactggatcgggtttgctgccagcggcgtgagcttcggccgccattttacaacagctccactcgcgccggacacagggagcagcgagcacgcgtttcccgcaacccgataccatcggacaggatttctccgcctcagcccaacggggagatctctggaaacatggctacagaacatgttaatggaaatggtactgaagagcccatggatactacttctgcagttatccattcagaaaattttcagacattgcttgatgctggtttaccacagaaagttgctgaaaaactagatgaaatttacgttgcagggctagttgcacatagtgatttagatgaaagagctattgaagctttaaaagaattcaatgaagacggtgcattggcagttcttcaacagtttaaagacagtgatctctctcatgttcagaacaaaagtgcctttttatgtggagtcatgaagacttacaggcagagagaaaaacaagggaccaaagtagcagattctagtaaaggaccagatgaggcaaaaattaaggcactcttggaaagaacaggctacacacttgatgtgaccactggacagaggaagtatggaggaccacctccagattccgtttattcaggtcagcagccttctgttggcactgagatatttgtgggaaagatcccaagagatctatttgaggatgaacttgttccattatttgagaaagctggacctatatgggatcttcgtctaatgatggatccactcactggtctcaatagaggttatgcgtttgtcactttttgtacaaaagaagcagctcaggaggctgttaaactgtataataatcatgaaattcgttctggaaaacatattggtgtctgcatctcagttgccaacaataggctttttgtgggctctattcctaagagtaaaaccaaggaacagattcttgaagaatttagccaagtaacagagggtcttacagacgtcattttataccaccaaccggatgacaagaaaaaaaacagaggcttttgctttcttgaatatgaagatcacaaaacagctgcccaggcaaggcgtaggttaatgagtggtaaagtcaaggtctgggggaatgttggaactgttgaatgggctgatcctatagaagatcctgatcctgaggttatggcaaaggtaaaagtgctgtttgtacgcaaccttgccaatactgtaacagaagagattttagaaaaggcatttagtcagtttgggaaactggaacgagtgaagaagttaaaagattatgcgttcattcattttgatgagcgagatggtgctgtcaaggctatggaagaaatgaatggcaaagacttggagggagaaaatattgaaattgtttttgccaagccaccagatcagaaaaggaaagaaagaaaagctcagaggcaagcagcaaaaaatcaaatgtatgacgattactactattatggtccacctcatatgccccctccaacaagaggtcgagggcgtggaggtagaggtggttatggatatcctccagattattatggatatgaagattattatgattattatggttatgattaccataactatcgtggtggatatgaagatccatactatggttatgaagattttcaagttggagctagaggaaggggtggtagaggagcaaggggtgctgctccatccagaggtcgtggggctgctcctccccgcggtagagccggttattcacagagaggaggtcctggatcagcaagaggcgttcgaggtgcgagaggaggtgcccaacaacaaagaggccgcgggcagggaaaaggggtcgaggccggtcctgacctgttacaatgaagactgacttgctatgtgggattacaccagaagcttgcagtggagtaatggtaaggaaatcaagcaaccttaaatatgtcggctgtataggagcatattctattgcagaagaccttcctatgaagatcatggaatcaaatacgggacattgaactaatacttggactttgatatgaatttctttaacaattttctctgcagtgcaagttattaaactaaagctactctattttcaaaatgtgttccaacagaaatccttcataactcctagcatggtatcttaataaagaataaagttcttttaaaaatcaaaaaaaaaaaaaaaaaa

SEQ ID NO: 5720 - protein, 562 aa, Homo sapien
MATEHVNGNGTEEPMDTTSAVIHSENFQTLLDAGLPQKVAEKLDEIYVAGLVAHSDLDERAIEALKEFNEDGALAVLQQFKDSDLSHVQNKSAFLCGVMKTYRQREKQGTKVADSSKGPDEAKIKALLERTGYTLDVTTGQRKYGGPPPDSVYSGQQPSVGTEIFVGKIPRDLFEDELVPLFEKAGPIWDLRLMMDPLTGLNRGYAFVTFCTKEAAQEAVKLYNNHEIRSGKHIGVCISVANNRLFVGSIPKSKTKEQILEEFSQVTEGLTDVILYHQPDDKKKNRGFCFLEYEDHKTAAQARRRLMSGKVKVWGNVGTVEWADPIEDPDPEVMAKVKVLFVRNLANTVTEEILEKAFSQFGKLERVKKLKDYAFIHFDERDGAVKAMEEMNGKDLEGENIEIVFAKPPDQKRKERKAQRQAAKNQMYDDYYYYGPPHMPPPTRGRGRGGRGGYGYPPDYYGYEDYYDYYGYDYHNYRGGYEDPYYGYEDFQVGARGRGGRGARGAAPSRGRGAAPPRGRAGYSQRGGPGSARGVRGARGGAQQQRGRGQGKGVEAGPDLLQ

SEQ ID NO: 5721 - DNA, 661 bp, Homo sapien; identical to SEQ ID NO: 803

SEQ ID NO: 5722 - protein, 199 aa, Homo sapien; identical to SEQ ID NO: 804

SEQ ID NO: 5723 - DNA, 921 bp, Homo sapien; identical to SEQ ID NO: 494

SEQ ID NO: 5724 - protein, 271 aa, Homo sapien; identical to SEQ ID NO: 495

SEQ ID NO: 5725 - DNA, 1863 bp, Homo sapien; identical to SEQ ID NO: 95

SEQ ID NO: 5726 - protein, 543 aa, Homo sapien; identical to SEQ ID NO: 96

SEQ ID NO: 5727 - DNA, 1983 bp, Homo sapien; identical to SEQ ID NO: 2429

SEQ ID NO: 5728 - protein, 448 aa, Homo sapien; identical to SEQ ID NO: 2430

SEQ ID NO: 5729 - DNA, 1107 bp, Homo sapien
acacagaagagactccaatcgacaagaagctggaaaagaatgatgttgtccttaaacaacctacagaatatcatctataacccggtaatcccgtttgttggcaccattcctgatcagctggatcctggaactttgattgtgatacgtgggcatgttcctagtgacgcagacagattccaggtggatctgcagaatggcagcagcatgaaacctcgagccgatgtggcctttcatttcaatcctcgtttcaaaagggccggctgcattgtttgcaatactttgataaatgaaaaatggggacgggaagagatcacctatgacacgcctttccaaaaagagaaaaagtcttttgagatcgtgattatggtgctgaaggccaaattccaggtggctgtaaatggaaaacatactctgctctatggccacaggatcggcccagagaaaatagacactctgggcatttatggcaaagtgaatattcactcaattggttttagcttcagctcggacttacaaagtacccaagcatctagtctggaactgacagagataagtagagaaaatgttccaaagtctggcacgccccagcttaggctgccattcgctgcaaggttgaacacccccatgggccctggacgaactgtcgtcgttaaaggagaagtgaatgcaaatgccaaaagctttaatgttgacctactagcaggaaaatcaaaggatattgctctacacttgaacccacgcctgaatattaaagcatttgtaagaaattcttttcttcaggagtcctggggagaagaagagagaaatattacctctttcccatttagtcctgggatgtactttgagatgataatttattgtgatgttagagaattcaaggttgcagtaaatggcgtacacagcctggagtacaaacacagatttaaagagctcagcagtattgacacgctggaaattaatggagacatccacttactggaagtaaggagctggtagcctacctacacagctgctacaaaaaccaaaatacagaatggcttctgtgatactggccttgctgaaacgcatctcactgtcattctattgtttatattgttaaaatgacct

SEQ ID NO: 5730 - protein, 318 aa, Homo sapien
MMLSLNNLQNIIYNPVIPFVGTIPDQLDPGTLIVIRGHVPSDADRFQVDLQNGSSMKPRADVAFHFNPRFKRAGCIVCNTLINEKWGREEITYDTPFQKEKKSFEIVIMVLKAKFQVAVNGKHTLLYGHRIGPEKIDTLGIYGKVNIHSIGFSFSSDLQSTQASSLELTEISRENVPKSGTPQLRLPFAARLNTPMGPGRTVVVKGEVNANAKSFNVDLLAGKSKDIALHLNPRLNIKAFVRNSFLQESWGEEERNITSFPFSPGMYFEMIIYCDVREFKVAVNGVHSLEYKHRFKELSSIDTLEINGDIHLLEVRSW

SEQ ID NO: 5731 - DNA, 2856 bp, Homo sapien
tagtcgcgggtccccgagtgagcacgccagggagcaggagaccaaacgacgggggtcggagtcagagtcgcagtgggagtccccggaccggagcacgagcctgagcgggagagcgccgctcgcacgcccgtcgccacccgcgtacccggcgcagccagagccaccagcgcagcgctgccatggagcccagcagcaagaagctgacgggtcgcctcatgctggctgtgggaggagcagtgcttggctccctgcagtttggctacaacactggagtcatcaatgccccccagaaggtgatcgaggagttctacaaccagacatgggtccaccgctatggggagagcatcctgcccaccacgctcaccacgctctggtccctctcagtggccatcttttctgttgggggcatgattggctccttctctgtgggccttttcgttaaccgctttggccggcggaattcaatgctgatgatgaacctgctggccttcgtgtccgccgtgctcatgggcttctcgaaactgggcaagtcctttgagatgctgatcctgggccgcttcatcatcggtgtgtactgcggcctgaccacaggcttcgtgcccatgtatgtgggtgaagtgtcacccacagcctttcgtggggccctgggcaccctgcaccagctgggcatcgtcgtcggcatcctcatcgcccaggtgttcggcctggactccatcatgggcaacaaggacctgtggcccctgctgctgagcatcatcttcatcccggccctgctgcagtgcatcgtgctgcccttctgccccgagagtccccgcttcctgctcatcaaccgcaacgaggagaaccgggccaagagtgtgctaaagaagctgcgcgggacagctgacgtgacccatgacctgcaggagatgaaggaagagagtcggcagatgatgcgggagaagaaggtcaccatcctggagctgttccgctcccccgcctaccgccagcccatcctcatcgctgtggtgctgcagctgtcccagcagctgtctggcatcaacgctgtcttctattactccacgagcatcttcgagaaggcgggggtgcagcagcctgtgtatgccaccattggctccggtatcgtcaacacggccttcactgtcgtgtcgctgtttgtggtggagcgagcaggccggcggaccctgcacctcataggcctcgctggcatggcgggttgtgccatactcatgaccatcgcgctagcactgctggagcagctaccctggatgtcctatctgagcatcgtggccatctttggctttgtggccttctttgaagtgggtcctggccccatcccatggttcatcgtggctgaactcttcagccagggtccacgtccagctgccattgccgttgcaggcttctccaactggacctcaaatttcattgtgggcatgtgcttccagtatgtggagcaactgtgtggtccctacgtcttcatcatcttcactgtgctcctggttctgttcttcatcttcacctacttcaaagttcctgagactaaaggccggaccttcgatgagatcgcttccggcttccggcaggggggagccagccaaagtgataagacacccgaggagctgttccatcccctgggggctgattcccaagtgtgagtcgccccagatcaccagcccggcctgctcccagcagccctaaggatctctcaggagcacaggcagctggatgagacttccaaacctgacagatgtcagccgagccgggcctggggctcctttctccagccagcaatgatgtccagaagaatattcaggacttaacggctccaggattttaacaaaagcaagactgttgctcaaatctattcagacaagcaacaggttttataatttttttattactgattttgttatttttatatcagcctgagtctcctgtgcccacatcccaggcttcaccctgaatggttccatgcctgagggtggagactaagccctgtcgagacacttgccttcttcacccagctaatctgtagggctggacctatgtcctaaggacacactaatcgaactatgaactacaaagcttctatcccaggaggtggctatggccacccgttctgctggcctggatctccccactctaggggtcaggctccattaggatttgccccttcccatctcttcctacccaaccactcaaattaatctttctttacctgagaccagttgggagcactggagtgcagggaggagaggggaagggccagtctgggctgccgggttctagtctcctttgcactgagggccacactattaccatgagaagagggcctgtgggagcctgcaaactcactgctcaagaagacatggagactcctgccctgttgtgtatagatgcaagatatttatatatatttttggttgtcaatattaaatacagacactaagttatagtatatctggacaagccaacttgtaaatacaccacctcactcctgttacttacctaaacagatataaatggctggtttttagaaacatggttttgaaatgcttgtggattgagggtaggaggtttggatgggagtgagacagaagtaagtggggttgcaaccactgcaacggcttagacttcgactcaggatccagtcccttacacgtacctctcatcagtgtcctcttgctcaaaaatctgtttgatccctgttacccagagaatatatacattctttatcttgacattcaaggcatttctatcacatatttgatagttggtgttcaaaaaaacactagttttgtgccagccgtgatgctcaggcttgaaatcgcattattttgaatgtgaagggaa

SEQ ID NO: 5732 - protein, 492 aa, Homo sapien
MEPSSKKLTGRLMLAVGGAVLGSLQFGYNTGVINAPQKVIEEFYNQTWVHRYGESILPTTLTTLWSLSVAIFSVGGMIGSFSVGLFVNRFGRRNSMLMMNLLAFVSAVLMGFSKLGKSFEMLILGRFIIGVYCGLTTGFVPMYVGEVSPTAFRGALGTLHQLGIVVGILIAQVFGLDSIMGNKDLWPLLLSIIFIPALLQCIVLPFCPESPRFLLINRNEENRAKSVLKKLRGTADVTHDLQEMKEESRQMMREKKVTILELFRSPAYRQPILIAVVLQLSQQLSGINAVFYYSTSIFEKAGVQQPVYATIGSGIVNTAFTVVSLFVVERAGRRTLHLIGLAGMAGCAILMTIALALLEQLPWMSYLSIVAIFGFVAFFEVGPGPIPWFIVAELFSQGPRPAAIAVAGFSNWTSNFIVGMCFQYVEQLCGPYVFIIFTVLLVLFFIFTYFKVPETKGRTFDEIASGFRQGGASQSDKTPEELFHPLGADSQV

SEQ ID NO: 5733 - DNA, 6835 bp, Homo sapien
cggcggcggctgcggcttagtcggtggcggccggcggcggctgcgggctgagcggcgagtttccgatttaaagctgagctgcgaggaaaatggcggcgggaggatcaaaatacttgctggatggtggactcagagaccaataaaaataaactgcttgaacatcctttgactggttagccagttgctgatgtatattcaagatgagtggattaggagaaaacttggatccactggccagtgattcacgaaaacgcaaattgccatgtgatactccaggacaaggtcttacctgcagtggtgaaaaacggagacgggagcaggaaagtaaatatattgaagaattggctgagctgatatctgccaatcttagtgatattgacaatttcaatgtcaaaccagataaatgtgcgattttaaaggaaacagtaagacagatacgtcaaataaaagagcaaggaaaaactatttccaatgatgatgatgttcaaaaagccgatgtatcttctacagggcagggagttattgataaagactccttaggaccgcttttacttcaggcattggatggtttcctatttgtggtgaatcgagacggaaacattgtatttgtatcagaaaatgtcacacaatacctgcaatataagcaagaggacctggttaacacaagtgtttacaatatcttacatgaagaagacagaaaggattttcttaagaatttaccaaaatctacagttaatggagtttcctggacaaatgagacccaaagacaaaaaagccatacatttaattgccgtatgttgatgaaaacaccacatgatattctggaagacataaacgccagtcctgaaatgcgccagagatatgaaacaatgcagtgctttgccctgtctcagccacgagctatgatggaggaaggggaagatttgcaatcttgtatgatctgtgtggcacgccgcattactacaggagaaagaacatttccatcaaaccctgagagctttattaccagacatgatctttcaggaaaggttgtcaatatagatacaaattcactgagatcctccatgaggcctggctttgaagatataatccgaaggtgtattcagagattttttagtctaaatgatgggcagtcatggtcccagaaacgtcactatcaagaagcttatcttaatggccatgcagaaaccccagtatatcgattctcgttggctgatggaactatagtgactgcacagacaaaaagcaaactcttccgaaatcctgtaacaaatgatcgacatggctttgtctcaacccacttccttcagagagaacagaatggatatagaccaaacccaaatcctgttggacaagggattagaccacctatggctggatgcaacagttcggtaggcggcatgagtatgtcgccaaaccaaggcttacagatgccgagcagcagggcctatggcttggcagaccctagcaccacagggcagatgagtggagctaggtatgggggttccagtaacatagcttcattgacccctgggccaggcatgcaatcaccatcttcctaccagaacaacaactatgggctcaacatgagtagccccccacatgggagtcctggtcttgccccaaaccagcagaatatcatgatttctcctcgtaatcgtgggagtccaaagatagcctcacatcagttttctcctgttgcaggtgtgcactctcccatggcatcttctggcaatactgggaaccacagcttttccagcagctctctcagtgccctgcaagccatcagtgaaggtgtggggacttcccttttatctactctgtcatcaccaggccccaaattggataactctcccaatatgaatattacccaaccaagtaaagtaagcaatcaggattccaagagtcctctgggcttttattgcgaccaaaatccagtggagagttcaatgtgtcagtcaaatagcagagatcacctcagtgacaaagaaagtaaggagagcagtgttgagggggcagagaatcaaaggggtcctttggaaagcaaaggtcataaaaaattactgcagttacttacctgttcttctgatgaccggggtcattcctccttgaccaactcccccctagattcaagttgtaaagaatcttctgttagtgtcaccagcccctctggagtctcctcctctacatctggaggagtatcctctacatccaatatgcatgggtcactgttacaagagaagcaccggattttgcacaagttgctgcagaatgggaattcaccagctgaggtagccaagattactgcagaagccactgggaaagacaccagcagtataacttcttgtggggacggaaatgttgtcaagcaggagcagctaagtcctaagaagaaggagaataatgcacttcttagatacctgctggacagggatgatcctagtgatgcactctctaaagaactacagccccaagtggaaggagtggataataaaatgagtcagtgcaccagctccaccattcctagctcaagtcaagagaaagaccctaaaattaagacagagacaagtgaagagggatctggagacttggataatctagatgctattcttggtgatctgactagttctgacttttacaataattccatatcctcaaatggtagtcatctggggactaagcaacaggtgtttcaaggaactaattctctgggtttgaaaagttcacagtctgtgcagtctattcgtcctccatataaccgagcagtgtctctggatagccctgtttctgttggctcaagtcctccagtaaaaaatatcagtgctttccccatgttaccaaagcaacccatgttgggtgggaatccaagaatgatggatagtcaggaaaattatggctcaagtatgggtgggccaaaccgaaatgtgactgtgactcagactccttcctcaggagactggggcttaccaaactcaaaggccggcagaatggaacctatgaattcaaactccatgggaagaccaggaggagattataatacttctttacccagacctgcactgggtggctctattcccacattgcctcttcggtctaatagcataccaggtgcgagaccagtattgcaacagcagcagcagatgcttcaaatgaggcctggtgaaatccccatgggaatgggggctaatccctatggccaagcagcagcatctaaccaactgggttcctggcccgatggcatgttgtccatggaacaagtttctcatggcactcaaaataggcctcttcttaggaattccctggatgatcttgttgggccaccttccaacctggaaggccagagtgacgaaagagcattattggaccagctgcacactcttctcagcaacacagatgccacaggcctggaagaaattgacagagctttgggcattcctgaacttgtcaatcagggacaggcattagagcccaaacaggatgctttccaaggccaagaagcagcagtaatgatggatcagaaggcaggattatatggacagacatacccagcacaggggcctccaatgcaaggaggctttcatcttcagggacaatcaccatcttttaactctatgatgaatcagatgaaccagcaaggcaattttcctctccaaggaatgcacccacgagccaacatcatgagaccccggacaaacacccccaagcaacttagaatgcagcttcagcagaggctgcagggccagcagtttttgaatcagagccgacaggcacttgaattgaaaatggaaaaccctactgctggtggtgctgcggtgatgaggcctatgatgcagccccagcagggttttcttaatgctcaaatggtcgcccaacgcagcagagagctgctaagtcatcacttccgacaacagagggtggctatgatgatgcagcagcagcagcagcagcaacagcagcagcagcagcagcagcagcagcaacagcaacagcaacagcaacagcagcaacagcagcaaacccaggccttcagcccacctcctaatgtgactgcttcccccagcatggatgggcttttggcaggacccacaatgccacaagctcctccgcaacagtttccatatcaaccaaattatggaatgggacaacaaccagatccagcctttggtcgagtgtctagtcctcccaatgcaatgatgtcgtcaagaatgggtccctcccagaatcccatgatgcaacacccgcaggctgcatccatctatcagtcctcagaaatgaagggctggccatcaggaaatttggccaggaacagctccttttcccagcagcagtttgcccaccaggggaatcctgcagtgtatagtatggtgcacatgaatggcagcagtggtcacatgggacagatgaacatgaaccccatgcccatgtctggcatgcctatgggtcctgatcagaaatactgctgacatctctgcaccaggacctcttaaggaaaccactgtacaaatgacactgcactaggattattgggaaggaatcattgttccaggcatccatcttggaagaaaggaccagctttgagctccatcaagggtattttaagtgatgtcatttgagcaggactggattttaagccgaagggcaatatctacgtgtttttcccccctccttctgctgtgtatcatggtgttcaaaacagaaatgttttttggcattccacctcctagggatataattctggagacatggagtgttactgatcataaaacttttgtgtcacttttttctgccttgctagccaaaatctcttaaatacacgtaggtgggccagagaacattggaagaatcaagagagattagaatatctggtttctctagttgcagtattggacaaagagcatagtcccagccttcaggtgtagtagttctgtgttgaccctttgtccagtggaattggtgattctgaattgtcctttactaatggtgttgagttgctctgtccctattatttgccctaggctttctcctaatgaaggttttcatttgccattcatgtcctgtaatacttcacctccaggaactgtcatggatgtccaaatggctttgcagaaaggaaatgagatgacagtatttaatcgcagcagtagcaaacttttcacatgctaatgtgcagctgagtgcactttatttaaaaagaatggataaatgcaatattcttgaggtcttgagggaatagtgaaacacattcctggtttttgcctacacttacgtgttagacaagaactatgattttttttttaaagtactggtgtcaccctttgcctatatggtagagcaataatgctttttaaaaataaacttctgaaaacccaaggccaggtactgcattctgaatcagaatctcgcagtgtttctgtgaatagatttttttgtaaatatgacctttaagatattgtattatgtaaaatatgtatatacctttttttgtaggtcacaacaactcatttttacagagtttgtgaagctaaatatttaacattgttgatttcagtaagctgtgtggtgaggctaccagtggaagagacatcccttgacttttgtggcctgggggaggggtagtgctccacagcttttccttccccaccccccagccttagatgcctcgctcttttcaatctcttaatctaaatgctttttaaagagattatttgtttagatgtaggcattttaattttttaaaaattcctctaccagaactaagcactttgttaatttggggggaaagaatagatatggggaaataaacttaaaaaaaaatcaggaatttaaaaaaacgagcaatttgaagagaatcttttggattttaagcagtccgaaataatagcaattcatgggctgtgtgtgtgtgtgtatgtgtgtgtgtgtgtgtgtatgtttaattatgttaccttttcatcccctttaggagcgttttcagattttggttgctaagacctgaatcccatattgagatctcgagtagaatccttggtgtggtttctggtgtctgctcagctgtcccctcattctactaatgtgatgctttcattatgtccctgtggattagaatagtgtcagttatttcttaagtaactcagtacccagaacagccagttttactgtgattcagagccacagtctaactgagcaccttttaaacccctccctcttctgccccctaccacttttctgctgttgcctctctttgacacctgttttagtcagttgggaggaagggaaaaatcaagtttaattccctttatctgggttaattcatttggttcaaatagttgacggaattgggtttctgaatgtctgtgaatttcagaggtctctgctagccttggtatcattttctagcaataactgagagccagttaattttaagaatttcacacatttagccaatctttctagatgtctctgaaggtaagatcatttaatatctttgatatgcttacgagtaagtgaatcctgattatttccagacccaccaccagagtggatcttattttcaaagcagtatagacaattatgagtttgccctctttcccctaccaagttcaaaatatatctaagaaagattgtaaatccgaaaacttccattgtagtggcctgtgcttttcagatagtatactctcctgtttggagacagaggaagaaccaggtcagtctgtctctttttcagctcaattgtatctgacccttctttaagttatgtgtgtggggagaaatagaatggtgctcttatctttcttgactttaaaaaaattattaaaaacaaaaaaaaaaaaaaaaa

SEQ ID NO: 5734 - protein, 1420 aa, Homo sapien
MSGLGENLDPLASDSRKRKLPCDTPGQGLTCSGEKRRREQESKYIEELAELISANLSDIDNFNVKPDKCAILKETVRQIRQIKEQGKTISNDDDVQKADVSSTGQGVIDKDSLGPLLLQALDGFLFVVNRDGNIVFVSENVTQYLQYKQEDLVNTSVYNILHEEDRKDFLKNLPKSTVNGVSWTNETQRQKSHTFNCRMLMKTPHDILEDINASPEMRQRYETMQCFALSQPRAMMEEGEDLQSCMICVARRITTGERTFPSNPESFITRHDLSGKVVNIDTNSLRSSMRPGFEDIIRRCIQRFFSLNDGQSWSQKRHYQEAYLNGHAETPVYRFSLADGTIVTAQTKSKLFRNPVTNDRHGFVSTHFLQREQNGYRPNPNPVGQGIRPPMAGCNSSVGGMSMSPNQGLQMPSSRAYGLADPSTTGQMSGARYGGSSNIASLTPGPGMQSPSSYQNNNYGLNMSSPPHGSPGLAPNQQNIMISPRNRGSPKIASHQFSPVAGVHSPMASSGNTGNHSFSSSSLSALQAISEGVGTSLLSTLSSPGPKLDNSPNMNITQPSKVSNQDSKSPLGFYCDQNPVESSMCQSNSRDHLSDKESKESSVEGAENQRGPLESKGHKKLLQLLTCSSDDRGHSSLTNSPLDSSCKESSVSVTSPSGVSSSTSGGVSSTSNMHGSLLQEKHRILHKLLQNGNSPAEVAKITAEATGKDTSSITSCGDGNVVKQEQLSPKKKENNALLRYLLDRDDPSDALSKELQPQVEGVDNKMSQCTSSTIPSSSQEKDPKIKTETSEEGSGDLDNLDAILGDLTSSDFYNNSISSNGSHLGTKQQVFQGTNSLGLKSSQSVQSIRPPYNRAVSLDSPVSVGSSPPVKNISAFPMLPKQPMLGGNPRMMDSQENYGSSMGGPNRNVTVTQTPSSGDWGLPNSKAGRMEPMNSNSMGRPGGDYNTSLPRPALGGSIPTLPLRSNSIPGARPVLQQQQQMLQMRPGEIPMGMGANPYGQAAASNQLGSWPDGMLSMEQVSHGTQNRPLLRNSLDDLVGPPSNLEGQSDERALLDQLHTLLSNTDATGLEEIDRALGIPELVNQGQALEPKQDAFQGQEAAVMMDQKAGLYGQTYPAQGPPMQGGFHLQGQSPSFNSMMNQMNQQGNFPLQGMHPRANIMRPRTNTPKQLRMQLQQRLQGQQFLNQSRQALELKMENPTAGGAAVMRPMMQPQQGFLNAQMVAQRSRELLSHHFRQQRVAMMMQQQQQQQQQQQQQQQQQQQQQQQQQQQQQTQAFSPPPNVTASPSMDGLLAGPTMPQAPPQQFPYQPNYGMGQQPDPAFGRVSSPPNAMMSSRMGPSQNPMMQHPQAASIYQSSEMKGWPSGNLARNSSFSQQQFAHQGNPAVYSMVHMNGSSGHMGQMNMNPMPMSGMPMGPDQKYC

SEQ ID NO: 5735 - DNA, 1953 bp, Homo sapien; identical to SEQ ID NO: 1563

SEQ ID NO: 5736 - protein, 342 aa, Homo sapien; identical to SEQ ID NO: 1564

SEQ ID NO: 5737 - DNA, 2603 bp, Homo sapien; identical to SEQ ID NO: 1607

SEQ ID NO: 5738 - protein, 336 aa, Homo sapien; identical to SEQ ID NO: 1608

SEQ ID NO: 5739 - DNA, 4181 bp, Homo sapien
atgaacgcggccctctgtaatggcggagcgtggcggggacgggggcgagagtgaacgattcaacccgggggagctcaggatggcccaacagcaggccttgaggttccgaggtccggctcccccaccaaatgcagtgatgcgaggcccaccacctctgatgcgacctcctccaccttttggtatgatgcgaggccctcctccaccaccacggccgccctttggacgtcctccttttgatcctaatatgccgccaatgcctcctccaggagggatacctccacctatgggccctccacacctccagagaccacctttcatgcctcctcccatgagttccatgcctcctcctccgggtatgatgtttccaccaggaatgcctcctgtgactgctcctggtactccagcactacctcctacggaggagatatgggttgaaaataaaactccagatgggaaggtttattattataatgctcggacacgtgaatctgcatggaccaagccagatggagttaaggttattcagcaatcagaactgacacctatgcttgcagcccaggcacaggttcaggctcaggcccaggcgcaggctcaggcccaggcgcaggctcaggcccaggcacaagctcaggcccaggctcaggctcaggcccaggcccaggcccaggcccaggcccaggcccaagcccaagcccaggcccaggctcaggctcaggcacaagctcaggcccaggcccaggctcaggtccaggcccaggtccaggcacaagtgcaagcacaagcagttggagcttccacccctacgaccagtagcccagcacctgcagtatccacttcaacatcatcatccaccccttcctctaccacttctaccacaacaactgctacttcagttgcgcagacagtatcaacacccacaacacaagatcagaccccaagttctgctgtttcagttgccacgcctacagttagtgtttcaactcctgctcctacagccacacctgtgcaaaccgttccccagccgcaccctcagacgttacctcctgctgttcctcattcagtacctcagccaacaacagcaatacctgcttttccaccagtaatggtacctccgtttcgtgttccccttcctggcatgccaattccacttccaggtgtagcaatgatgcaaatagtcagctgcccgtatgtaaagacagtcgctaccaccaagaccggtgtattgccaggaatggcccctcctatcgtacccatgatacatccccaggttgctattgcagcttcacctgctaccttagctggagcaacagcagtttctgaatggactgaatataaaacagcagatgggaagacatattattataataatagaacattagaatcaacctgggaaaaaccccaagaactaaaggaaaaagaaaagttagaagagaagattaaagagccaattaaagaaccctctgaagagcctctgccaatggagacggaggaggaggatcctaaagaagagcctataaaggagataaaggaggagcccaaagaagaggagatgactgaagaagaaaaggctgcccagaaggcaaagccagttgctactgctcctattcctggtactccatggtgtgtcgtttggactggtgatgagcgggtcttcttttataatcccaccactcgtctttctatgtgggaccgacctgatgatctgattggcagggcagatgttgacaaaattattcaggagccccctcataaaaaaggaatggaggaattgaagaaactaaggcacccaactccgacaatgctgtcgatccaaaagtggcaattctctatgagtgcaattaaagaggaacaagaattaatggaagaaattaatgaagatgagcctgttaaagcaaaaaaacggaagagagacgataataaagacattgactcagagaaagaagctgccatggaagctgaaattaaagctgcccgagaaagggccattgtccctctggaggctcgaatgaagcagttcaaggacatgctgctagagagaggggtgtctgctttttcaacgtgggagaaggagttgcacaagatagtttttgatccccggtacttacttctcaatcctaaagagagaaaacaggtgtttgatcagtatgtaaagaccagggcagaggaagaacgcagggaaaagaaaaataaaataatgcaagccaaggaagatttcaaaaaaatgatggaagaagcaaaatttaatccaagagcaacttttagtgaatttgcagccaagcatgctaaagattcaagattcaaagcaattgaaaagatgaaagaccgagaagccttgtttaatgagtttgtggccgctgctaggaagaaagagaaagaagattcgaagaccagaggtgagaagattaaatcggatttctttgaactattatctaatcatcacttggacagtcagtctcgatggagcaaagtaaaagacaaagtagaaagtgatccacgttacaaagcagtagatagttcatcaatgagagaagaccttttcaaacagtacattgaaaaaatagccaagaatttagactcagaaaaagaaaaggagcttgaaaggcaagcccgcattgaggcaagccttcgagaacgagaaagggaggttcaaaaggcccgttcagaacaaacaaaagaaatagatcgagagagagagcagcacaaacgagaagaagctatccagaatttcaaagctcttctgtctgacatggtacgttcttcagatgtgtcatggtctgatactcgtaggaccctccgaaaagatcaccgctgggaatctggatccttattggaaagagaggagaaagagaagctttttaatgaacacattgaagcacttaccaaaaaaaagagagagcactttaggcaacttctggatgaaacttctgcaattaccttaacatccacgtggaaagaagtaaaaaaaatcattaaggaagatcctcgatgtattaagttctcctccagtgacaggaaaaaacaaagagaatttgaagaatatatcagagacaaatatatcacagccaaagctgacttcaggacgcttttgaaagagaccaaatttataacatatagatccaaaaaattaatccaagaatcagatcagcacctgaaagatgtagaaaaaattttacagaatgacaaacggtatctagtactggactgtgtgccagaggagaggcgtaaactgattgtggcatatgttgatgacctggatcgccggggtccacccccacctcccacagcatcggagcccacgagacgatcaacaaaataattctaaatactcttccataggggcatctattcaaaatgcttgcatgagccaattttcaggtttttacatatatgtgcattagtcaacctattgcgaaaccatctgacaaacagaaggagaagcatttgtgaacagtttctgaacagaacactttggaaatatttatgcttttctttgtgtggcatgactgacatacatactcaaatataggctgtctctagtaaatcttaaaatcttgaagctaaaattcatccttttatgaggtgtggaagtcagtgacttggtgacgttcttcctagcagtgttaatacatgcaagaagtaagagcatttgtggcttgaacttgccagatgcaaataccacagactccaagaaaacccgagttggggtttgttttgttttgattttttttttttaaagcgggtaaaagagaaaacactgaaaattgaattcttatcttccagaggctacaattattataatggacaatacttttacctttgtctctaaagatcagattagttttatttgttcacttacgtgctttgattatcccctctgaattatagaccgagtcttgttgtttagcctaagagaagatttatgtagtaatttcttctcaggtatggaaccacggtcataactaacatgttggccagaatagaaccactggttaaacatattttattcaccattaagtgatctttatcaatattctggattagacaacaaattacctttctgggtgtttcttgtaaactatactcctgtttgaatgttaaactttgttgctaaagtttaattttaagatgtttgaatgttcagtttatgtatttgaactacaataaaccaaccctttttatat

SEQ ID NO: 5740 - protein, 1098 aa, Homo sapien
MAERGGDGGESERFNPGELRMAQQQALRFRGPAPPPNAVMRGPPPLMRPPPPFGMMRGPPPPPRPPFGRPPFDPNMPPMPPPGGIPPPMGPPHLQRPPFMPPPMSSMPPPPGMMFPPGMPPVTAPGTPALPPTEEIWVENKTPDGKVYYYNARTRESAWTKPDGVKVIQQSELTPMLAAQAQVQAQAQAQAQAQAQAQAQAQAQAQAQAQAQAQAQAQAQAQAQAQAQAQAQAQAQAQAQAQVQAQVQAQVQAQAVGASTPTTSSPAPAVSTSTSSSTPSSTTSTTTTATSVAQTVSTPTTQDQTPSSAVSVATPTVSVSTPAPTATPVQTVPQPHPQTLPPAVPHSVPQPTTAIPAFPPVMVPPFRVPLPGMPIPLPGVAMMQIVSCPYVKTVATTKTGVLPGMAPPIVPMIHPQVAIAASPATLAGATAVSEWTEYKTADGKTYYYNNRTLESTWEKPQELKEKEKLEEKIKEPIKEPSEEPLPMETEEEDPKEEPIKEIKEEPKEEEMTEEEKAAQKAKPVATAPIPGTPWCVVWTGDERVFFYNPTTRLSMWDRPDDLIGRADVDKIIQEPPHKKGMEELKKLRHPTPTMLSIQKWQFSMSAIKEEQELMEEINEDEPVKAKKRKRDDNKDIDSEKEAAMEAEIKAARERAIVPLEARMKQFKDMLLERGVSAFSTWEKELHKIVFDPRYLLLNPKERKQVFDQYVKTRAEEERREKKNKIMQAKEDFKKMMEEAKFNPRATFSEFAAKHAKDSRFKAIEKMKDREALFNEFVAAARKKEKEDSKTRGEKIKSDFFELLSNHHLDSQSRWSKVKDKVESDPRYKAVDSSSMREDLFKQYIEKIAKNLDSEKEKELERQARIEASLREREREVQKARSEQTKEIDREREQHKREEAIQNFKALLSDMVRSSDVSWSDTRRTLRKDHRWESGSLLEREEKEKLFNEHIEALTKKKREHFRQLLDETSAITLTSTWKEVKKIIKEDPRCIKFSSSDRKKQREFEEYIRDKYITAKADFRTLLKETKFITYRSKKLIQESDQHLKDVEKILQNDKRYLVLDCVPEERRKLIVAYVDDLDRRGPPPPPTASEPTRRSTK

SEQ ID NO: 5741 - DNA, 2010 bp, Homo sapien; identical to SEQ ID NO: 1781

SEQ ID NO: 5742 - protein, 668 aa, Homo sapien; identical to SEQ ID NO: 1782

SEQ ID NO: 5743 - DNA, 2126 bp, Homo sapien
gctctgtcagtaacacatgtgtaagagccgcggagggagcgagcgagccggctagaggccagcgccgccgccgccgccgcctccgagccgggcagcaacagccccggcagcggcgcaggctccagcgcgccgggcccggccggccgcagcccccgacgcctgggtgcgcctgcctgccggcctccgcaccgtccgccgccgctcccggggctgttgtgtctgcgactgctcccggccggaggtgcagggagctcagccgagccgccgctgccatcccggagcgagcaagcgagcgagcgcgcgggagggaggaaggcggcggcggaggaggaggaggagcgggaggagcgcgggcgggggcgggggccgccgggcgggggaatatacaaagtgaagccacattgccaaacttgcagcagcgattgcagcagttgctgccgctgcgccgcgcctgaagccgcgccgcgcgggccgagggctcctgcagctgctcgcgcgcagtcggaggcggagaaggacgaagactgagactgacacttctgctcccggccgcccggcacttacgcgggggccccccaacccgccccagagcaacgcgatttaaaaaaaaaaaaaaagccgcccttagccccctcctctcctttcctgcttctgcgagaactccctccctccctccagctccgccagcccaggcgccccttccctggaagccgagcggcttcgctcgcatttcaccgccgccgcctctcgcaatattgcaatataggggaaaagcagaccatggtgaatccgggcagcagctcgcagccgcccccggtgacggccggctccctctcctggaagcggtgcgcaggctgcgggggcaagattgcggaccgctttctgctctatgccatggacagctattggcacagccggtgcctcaagtgctcctgctgccaggcgcagctgggcgacatcggcacgtcctgttacaccaaaagtggcatgatcctttgcagaaatgactacattaggttatttggaaatagcggtgcttgcagcgcttgcggacagtcgattcctgcgagtgaactcgtcatgagggcgcaaggcaatgtgtatcatcttaagtgttttacatgctctacctgccggaatcgcctggtcccgggagatcggtttcactacatcaatggcagtttattttgtgaacatgatagacctacagctctcatcaatggccatttgaattcacttcagagcaatccactactgccagaccagaaggtctgctaaaaggtcagagtaatgcagaatgcgtgccttcatctcagatttgttcatcacaggtggatcccatgtgtcttcagtagacaagtcacctttgtagctagcaccagtgccagctccatgccattgcaccttctttagtcttgattgcccttcccgcatttattggtgtattaaaatgactgaatatgaacattaaggactccatgaacctgggctaatgggagactgtagagaaaatgaaaaaagatccaccagaggacatcttggggagggggagggagctgggggggagggaaatgactaatgaagctaattaaaagaagcattcaaatctgctttctaccctcattaacaattagcagggcactggccagagtttgtaccctgtgttttaccttaacaacattctatttgctctttgtatatttaagtgttgtaaggaaacgtgtttcaatcaaaactgaccatgagataaaggaaagagatgtggcttttgtgatattctatcacaaacacttattgtatctctgtaaaatacaatgtatgtatgcatgtaagtgtttttgtcctaatgttgctactcccatggcaaagaaaaaaaaaagaatgaaaaaaagaaaaaaaatttggaaaaaaaaatcaggctcatagcagctactgtgtagaaaattccccctacttctaatttgctgaatgaagaaaaaaaaaaatcttttatttgtgatattttcagagacatttgctctagtatggtgtatttaaataataaaaacttaaaagaaaaaataaaaaaaaaaaaaaaaaaaaaaaaaaaaaaaaaaaaaaaaaaaaaaaaaaaaaaaaaaaaaaaa

SEQ ID NO: 5744 - protein, 165 aa, Homo sapien
MVNPGSSSQPPPVTAGSLSWKRCAGCGGKIADRFLLYAMDSYWHSRCLKCSCCQAQLGDIGTSCYTKSGMILCRNDYIRLFGNSGACSACGQSIPASELVMRAQGNVYHLKCFTCSTCRNRLVPGDRFHYINGSLFCEHDRPTALINGHLNSLQSNPLLPDQKVC

SEQ ID NO: 5745 - DNA, 2697 bp, Homo sapien
acgcgggcacgcacacacggaagcacgcctccacttaactcgcgccgccgcggcagctcgagtccaccagcagcgccgtccgcttgaccgagatgctgcgggcctgtcagttatcgggtgtgaccgccgccgcccagagttgtctctgtgggaagtttgtcctccgtccattgcgaccatgccgcagatactctacttcaggcagctctgggttgactactggcaaaattgctggagctggccttttgtttgttggtggaggtattggtggcactatcctatatgccaaatgggattcccatttccgggaaagtgtagagaaaaccataccttactcagacaaactcttcgagatggttcttggtcctgcagcttataatgttccattgccaaagaaatcgattcagtcgggtccactaaaaatctctagtgtatcagaagtaatgaaagaatctaaacagtctgcctcacaactccaaaaacaaaagggagatactccagcttcagcaacagcacctacagaagcggctcaaattatttctgcagcaggtgataccctgtcggtcccagcccctgcagttcagcctgaggaatctttaaaaactgatcaccctgaaattggtgaaggaaaacccacacctgcactttcagaagaagcatcctcatcttctataagggagcgaccacctgaagaagttgcagctcgccttgcacaacaggaaaaacaagaacaagttaaaattgagtctctagccaagagcttagaagatgctctgaggcaaactgcaagtgtcactctgcaggctattgcagctcagaatgctgcggtccaggctgtcaatgcacactccaacatattgaaagccgccatggacaattctgagattgcaggcgagaagaaatctgctcagtggcgcacagtggagggtgcattgaaggaacgcagaaaggcagtagatgaagctgccgatgcccttctcaaagccaaagaagagttagagaagatgaaaagtgtgattgaaaatgcaaagaaaaaagaggttgctggggccaagcctcatataactgctgcagagggtaaacttcacaacatgatagttgatctggataatgtggtcaaaaaggtccaagcagctcagtctgaggctaaggttgtatctcagtatcatgagctggtggtccaagctcgggatgactttaaacgagagctggacagtattactccagaagtccttcctggatggaaaggaatgagtgtttcagacttagctgacaagctctctactgatgatctgaactccctcattgctcatgcacatcgtcgtattgatcagctgaacagagagctggcagaacagaaggccaccgaaaagcagcacatcacgttagccttggagaaacaaaagctggaagaaaagcgggcatttgactctgcagtagcaaaagcattagaacatcacagaagtgaaatacaggctgaacaggacagaaagatagaagaagtcagagatgccatggaaaatgaaatgagaacccagcttcgccgacaggcagctgcccacactgatcacttgcgagatgtccttagggtacaagaacaggaattgaagtctgaatttgagcagaacctgtctgagaaactctctgaacaagaattacaatttcgtcgtctcagtcaagagcaagttgacaactttactctggatataaatactgcctatgccagactcagaggaatcgaacaggctgttcagagccatgcagttgctgaagaggaagccagaaaagcccaccaactctggctttcagtggaggcattaaagtacagcatgaagacctcatctgcagaaacacctactatcccgctgggtagtgcagttgaggccatcaaagccaactgttctgataatgaattcacccaagctttaaccgcagctatccctccagagtccctgacccgtggggtgtacagtgaagagacccttagagcccgtttctatgctgttcaaaaactggcccgaagggtagcaatgattgatgaaaccagaaatagcttgtaccagtacttcctctcctacctacagtccctgctcctattcccacctcagcaactgaagccgcccccagagctctgccctgaggatataaacacatttaaattactgtcatatgcttcctattgcattgagcatggtgatctggagctagcagcaaagtttgtcaatcagctgaagggggaatccagacgagtggcacaggactggctgaaggaagcccgaatgaccctagaaacgaaacagatagtggaaatcctgacagcatatgccagcgccgtaggaataggaaccactcaggtgcagccagagtgaggtttaggaagattttcataaagtcatatttcatgtcaaaggaaatcagcagtgatagatgaagggttcgcagcgagagtcccggacttgtctagaaatgagcaggtttacaagtactgttctaaatgttaacacctgttgcatttatattctttccatttgctatcatgtcagtgaacgccaggagtgctttctttgcaacttgtgtaacattttctgttttttcaggttttactgatgaggcttgtgaggccaatcaaaataatgtttgtgatctctactactgttgattttgccctcggagcaaactgaataaagcaacaagatg

SEQ ID NO: 5746 - protein, 758 aa, Homo sapien
MLRACQLSGVTAAAQSCLCGKFVLRPLRPCRRYSTSGSSGLTTGKIAGAGLLFVGGGIGGTILYAKWDSHFRESVEKTIPYSDKLFEMVLGPAAYNVPLPKKSIQSGPLKISSVSEVMKESKQSASQLQKQKGDTPASATAPTEAAQIISAAGDTLSVPAPAVQPEESLKTDHPEIGEGKPTPALSEEASSSSIRERPPEEVAARLAQQEKQEQVKIESLAKSLEDALRQTASVTLQAIAAQNAAVQAVNAHSNILKAAMDNSEIAGEKKSAQWRTVEGALKERRKAVDEAADALLKAKEELEKMKSVIENAKKKEVAGAKPHITAAEGKLHNMIVDLDNVVKKVQAAQSEAKVVSQYHELVVQARDDFKRELDSITPEVLPGWKGMSVSDLADKLSTDDLNSLIAHAHRRIDQLNRELAEQKATEKQHITLALEKQKLEEKRAFDSAVAKALEHHRSEIQAEQDRKIEEVRDAMENEMRTQLRRQAAAHTDHLRDVLRVQEQELKSEFEQNLSEKLSEQELQFRRLSQEQVDNFTLDINTAYARLRGIEQAVQSHAVAEEEARKAHQLWLSVEALKYSMKTSSAETPTIPLGSAVEAIKANCSDNEFTQALTAAIPPESLTRGVYSEETLRARFYAVQKLARRVAMIDETRNSLYQYFLSYLQSLLLFPPQQLKPPPELCPEDINTFKLLSYASYCIEHGDLELAAKFVNQLKGESRRVAQDWLKEARMTLETKQIVEILTAYASAVGIGTTQVQPE

SEQ ID NO: 5747 - DNA, 1153 bp, Homo sapien; identical to SEQ ID NO: 61

SEQ ID NO: 5748 - protein, 212 aa, Homo sapien; identical to SEQ ID NO: 62

SEQ ID NO: 5749 - DNA, 3915 bp, Homo sapien; identical to SEQ ID NO: 617

SEQ ID NO: 5750 - protein, 496 aa, Homo sapien; identical to SEQ ID NO: 618

SEQ ID NO: 5751 - DNA, 1666 bp, Homo sapien; identical to SEQ ID NO: 2123

SEQ ID NO: 5752 - protein, 319 aa, Homo sapien; identical to SEQ ID NO: 2124

SEQ ID NO: 5753 - DNA, 1658 bp, Homo sapien; identical to SEQ ID NO: 1043

SEQ ID NO: 5754 - protein, 277 aa, Homo sapien; identical to SEQ ID NO: 1044

SEQ ID NO: 5755 - DNA, 1750 bp, Homo sapien; identical to SEQ ID NO: 1825

SEQ ID NO: 5756 - protein, 348 aa, Homo sapien [sequence omitted]

SEQ ID NO: 5757 - DNA, 1770 bp, Homo sapien; identical to SEQ ID NO: 1437

SEQ ID NO: 5758 - protein, 216 aa, Homo sapien; identical to SEQ ID NO: 1438

SEQ ID NO: 5759 - DNA, 3772 bp, Homo sapien; identical to SEQ ID NO: 2904

SEQ ID NO: 5760 - protein, 640 aa, Homo sapien; identical to SEQ ID NO: 2905

SEQ ID NO: 5761 - DNA, 3415 bp, Homo sapien; identical to SEQ ID NO: 2164

SEQ ID NO: 5762 - protein, 747 aa, Homo sapien; identical to SEQ ID NO: 2165

SEQ ID NO: 5763 - DNA, 3690 bp, Homo sapien
gggccggggtgcggagggagtccctgaaacttctcccaacagccccagggccaatcttccctcagcccactcccctcttcgccagctcccaggtccccactcctgtaccgggggtggggtggggagccaggcccgtctcccgctgggacacacacaggggccggggagcggggacgggacccccgaggcgggggggacgaaccgacagacagacggctgggcgcccgccccagcgggcaggcaggcaggaggaggcggaggcgggggtacgacggggagcactgggtctggggagtttcctctcaactatcgggggagaaactccccgcagccggaggaaagacccagacagtgttttcctcccgggggccgtgctcccccgccccgcgtagcggcggtcgccgccaccggcgcctccacctctaccatctcctctttctccaccacctcgggccccggtgtccccggccagcactatgcccatcttactgttcctgatagacacgtctgcctctatgaaccagcgcagccatctgggcaccacctacctggacacggccaaaggcgcggtagagaccttcatgaagctccgtgcccgggaccctgccagcagaggagacaggtatatgctggtcactttcgaagagccgccctatgctatcaaggctggatggaaagaaaaccatgcaacgtttatgaatgaattgaaaaaccttcaggctgaaggacttacgactcttggccaatccctaaggacagcttttgatttattaaatttaaatagattagtaactggcatagacaactatgggcagggaagaaacccttttttcttggagccagcaataattatcacaattactgatgggagcaagttgactaccaccagtggagtccaggatgagcttcatttacctcttaattctcctttgcctggaagtgaattgaccaaggaaccttttcgttgggatcagagactctttgcattagtgttgcggttgcctggcaccatgtcagtagaatcagaacagttgacaggtgtgcctttagatgactctgcaatcacaccaatgtgtgaagtgacaggcggccgttcatattctgtgtgttctccaagaatgcttaatcagtgtctggagtccttggtgcagaaagtacaaagtggggtggtaataaactttgaaaaagcaggaccagatccttcccctgtagaagatgggcagccagatatatcaaggccttttggatctcagccttggcatagctgtcacaaactcatatatgtcagaccaaatcctaaaactggggttcctataggtcattggcctgttccagagtctttttggccagatcaaaattcgccaacactaccacctcgtacatctcatcctgtagtgaagttttcctgtacagactgtgaaccaatggttattgataaacttccttttgacaaatatgagttggaaccttcaccactgactcaatttatcctggaaaggaaatctcctcaaacatgttggcaggtgtacgtgagcaatagtgcaaaatacagtgaacttggtcatccttttggttacttgaaagccagtacagcactgaactgtgtcaacttatttgtgatgccttacaattatccagtccttcttcccctcttagatgacttgtttaaagtgcataaagcaaaaccaacattgaagtggagacagtcatttgaaagttatttgaagacaatgcctccctactatcttgggcccttgaagaaagctgttaggatgatgggagcacctaacctaatagcagacagtatggaatatggacttagttacagtgtcatttcatacctcaaaaaactgagtcaacaggccaaaatagaatctgatcgagtcattggatctgtaggcaaaaaagtagtacaggagactggaataaaagtccggagccgatcacatggtttatcaatggcatataggaaagattttcaacaactcctccagggaatttcagaggatgtccctcacagactgctagaccttaatatgaaggaatacactgggttccaagttgctttgctgaataaggatttgaagccacagacatttagaaatgcttatgacataccaagacgaaatcttttggatcacttaacaagaatgagatctaatcttttgaagagcactcgcagatttctgaaaggacaggacgaagatcaagtgcacagtgttcctatagcacaaatggggaactaccaggaatacctcaagcaagtaccttctccactaagagaacttgatcctgatcagccacgaaggttgcatacatttggcaacccctttaagctggataagaagggtatgatgatagatgaagcagatgaatttgtggctggacctcaaaataaacataaacgacccggagaaccaaatatgcaagggatccctaaaagacgtcggtgtatgtctccactactaagaggcagacagcagaatcctgttgtaaacaatcatattgggggaaaaggaccacctgcacctacaactcaagcacagccagatcttattaaacctcttcctcttcataaaatttcagaaaccactaatgattcgataatacatgatgtggttgaaaatcatgttgcagaccaactttcatcagacattacaccaaatgctatggatacggaattttcagcatcttctccagccagtttactggaacggccaaccaatcatatggaggctcttggtcatgaccatttaggaaccaatgacctcactgttggtggatttttagaaaatcatgaggagccaagagataaagaacaatgtgctgaagagaacataccagcatcttcactcaacaaaggaaagaaattgatgcattgcagaagccatgaagaggtcaatactgaactaaaagcacaaataatgaaagagatccgaaagccaggaagaaaatatgaaagaatcttcactttactgaagcatgtgcaaggcagtttacaaacaagactaatatttttacaaaatgtcattaaagaagcatcaaggtttaaaaaacgaatgctaatagaacaactggagaacttcttggatgaaattcatcgaagagccaatcagatcaaccatattaatagcaattaaaagaaaatagaatgtggccacttatttcactatcttcttcaaatacaaagtaaataacaagactgttgtgatcttgcattcattttctgacatgcattgttggctatttgaaatactaaaagcaaatctacagatcctttttccatcattttacagtgaccttttcttcattttggtttatttttgtaatgtgaaaagtatcactctaaaaaacatttttaatttaacaaactaaaaatattcctccaaatctcttgcttgtcattgactcttgcgtgtcaatttccctcaggttctattttcttaaaccaacctttaaaattgtcacctctgttaaggttgaactttgccaaaaaaaaaagaagttactttgtaatttttggggaaaaaagcacatacattaaaactaggtaatgttttgtatatacagttattttggatatattattgtaagttgtacaaatgtattttgaagaatatttaagaaaagcacttttgttattccatcaataaatgctctattttaaaaaaaaaaaaaaaaaaaaaaaaa

SEQ ID NO: 5764 - protein, 887 aa, Homo sapien
MPILLFLIDTSASMNQRSHLGTTYLDTAKGAVETFMKLRARDPASRGDRYMLVTFEEPPYAIKAGWKENHATFMNELKNLQAEGLTTLGQSLRTAFDLLNLNRLVTGIDNYGQGRNPFFLEPAIIITITDGSKLTTTSGVQDELHLPLNSPLPGSELTKEPFRWDQRLFALVLRLPGTMSVESEQLTGVPLDDSAITPMCEVTGGRSYSVCSPRMLNQCLESLVQKVQSGVVINFEKAGPDPSPVEDGQPDISRPFGSQPWHSCHKLIYVRPNPKTGVPIGHWPVPESFWPDQNSPTLPPRTSHPVVKFSCTDCEPMVIDKLPFDKYELEPSPLTQFILERKSPQTCWQVYVSNSAKYSELGHPFGYLKASTALNCVNLFVMPYNYPVLLPLLDDLFKVHKAKPTLKWRQSFESYLKTMPPYYLGPLKKAVRMMGAPNLIADSMEYGLSYSVISYLKKLSQQAKIESDRVIGSVGKKVVQETGIKVRSRSHGLSMAYRKDFQQLLQGISEDVPHRLLDLNMKEYTGFQVALLNKDLKPQTFRNAYDIPRRNLLDHLTRMRSNLLKSTRRFLKGQDEDQVHSVPIAQMGNYQEYLKQVPSPLRELDPDQPRRLHTFGNPFKLDKKGMMIDEADEFVAGPQNKHKRPGEPNMQGIPKRRRCMSPLLRGRQQNPVVNNHIGGKGPPAPTTQAQPDLIKPLPLHKISETTNDSIIHDVVENHVADQLSSDITPNAMDTEFSASSPASLLERPTNHMEALGHDHLGTNDLTVGGFLENHEEPRDKEQCAEENIPASSLNKGKKLMHCRSHEEVNTELKAQIMKEIRKPGRKYERIFTLLKHVQGSLQTRLIFLQNVIKEASRFKKRMLIEQLENFLDEIHRRANQINHINSN

SEQ ID NO: 5765 - DNA, 1330 bp, Homo sapien; identical to SEQ ID NO: 1381

SEQ ID NO: 5766 - protein, 339 aa, Homo sapien; identical to SEQ ID NO: 1382

SEQ ID NO: 5767 - DNA, 2718 bp, Homo sapien; identical to SEQ ID NO: 1415

SEQ ID NO: 5768 - protein, 856 aa, Homo sapien; identical to SEQ ID NO: 1416

SEQ ID NO: 5769 - DNA, 853 bp, Homo sapien
cctgggccctcctgctccttgcagccatgctcctgggcaacccagcccctgcctccgcatctgcgtggtgaaggccattggcctcatcggtggatctgcgtttcctcgggcccacactgtctaggattgtgcggggctggtgagagaacaagatctcttccgtgttcaaggcagacttcctgccccctgcaccctgctctctcccgggccttgaggtcagtgtgagccccaagggcaagaacacttctggaagggagagtggatttggctgggcctctggatggaaggtctggtcttctctcgtctgagccctgagtactacgacccggcaagagcccacctgcgtgatggggagaaatcctgcccgtgcgggcaggagggcccccagggtgacctgttgaccaaaacacaggagctgggccgtgactacaggacctgtctgacgatagtccaaaaactgaagaagatggtggataagcccacccagagaagtgtttccaatgctgcgacccgggtgtgtaggacggggaggtcacgatggcgcgacgtctgcagaaatttcatgaggaggtatcagtctagagttatccaaggcctcgtggccggagaaactgcccagcagatctgtgaggacctcaggttgtgtataccttctacaggtcccctctgagccctctcaccttgtcctgtggaagaagcacaggctcctgtcctcagatcccgggaacgtcagcaacctctgccggctcctcgcttcctcgatccagaatccactctccagtctccctcccctgactccctctgctgtcctcccctctcaggggaataaagtgtcaagcaagattttagccgc

SEQ ID NO: 5770 - protein, 129 aa, Homo sapien
MEGLVFSRLSPEYYDPARAHLRDGEKSCPCGQEGPQGDLLTKTQELGRDYRTCLTIVQKLKKMVDKPTQRSVSNAATRVCRTGRSRWRDVCRNFMRRYQSRVIQGLVAGETAQQICEDLRLCIPSTGPL

SEQ ID NO: 5771 - DNA, 2957 bp, Homo sapien
gccagtcaccttcagtttctggagctggccgtcaacatgtcctttcctaaggcgcccttgaaacgattcaatgacccttctggttgtgcaccatctccaggtgcttatgatgttaaaactttagaagtattgaaaggaccagtatcctttcagaaatcacaaagatttaaacaacaaaaagaatctaaacaaaatcttaatgttgacaaagatactaccttgcctgcttcagctagaaaagttaagtcttcggaatcaaagattcgtgttcttctacaggaacgtggtgcccaggacagccggatccaggatctggaaactgagttggaaaagatggaagcaaggctaaatgctgcactaagggaaaaaacatctctctctgcaaataatgctacactggaaaaacaacttattgaattgaccaggactaatgaactactaaaatctaagttttctgaaaatggtaaccagaagaatttgagaattctaagcttggagttgatgaaacttagaaacaaaagagaaacaaagatgaggggtatgatggctaagcaagaaggcatggagatgaagctgcaggtcacccaaaggagtctcgaagagtctcaagggaaaatagcccaactggagggaaaacttgtttcaatagagaaagaaaagattgatgaaaaatctgaaacagaaaaactcttggaatacatcgaagaaattagttgtgcttcagatcaagtggaaaaatacaagctagatattgcccagttagaagaaaatttgaaagagaagaatgatgaaattttaagccttaagcagtctcttgaggagaatattgttatattatctaaacaagtagaagatctaaatgtgaaatgtcagctgcttgaaaaagaaaaagaagaccatgtcaacaggaatagagaacacaacgaaaatctaaatgcagagatgcaaaacttaaaacagaagtttattcttgaacaacaggaacgtgaaaagcttcaacaaaaagaattacaaattgattcacttctgcaacaagagaaagaattatcttcgagtcttcatcagaagctctgttcttttcaagaggaaatggttaaagagaagaatctgtttgaggaagaattaaagcaaacactggatgagcttgataaattacagcaaaaggaggaacaagctgaaaggctggtcaagcaattggaagaggaagcaaaatctagagctgaagaattaaaactcctagaagaaaagctgaaagggaaggaggctgaactggagaaaagtagtgctgctcatacccaggccaccctgcttttgcaggaaaagtatgacagtatggtgcaaagccttgaagatgttactgctcaatttgaaagctataaagcgttaacagccagtgagatagaagatcttaagctggagaactcatcattacaggaaaaagcggccaaggctgggaaaaatgcagaggatgttcagcatcagattttggcaactgagagctcaaatcaagaatatgtaaggatgcttctagatctgcagaccaagtcagcactaaaggaaacagaaattaaagaaatcacagtttcttttcttcaaaaaataactgatttgcagaaccaactcaagcaacaggaggaagactttagaaaacagctggaagatgaagaaggaagaaaagctgaaaaagaaaatacaacagcagaattaactgaagaaattaacaagtggcgtctcctctatgaagaactatataataaaacaaaaccttttcagctacaactagatgcttttgaagtagaaaaacaggcattgttgaatgaacatggtgcagctcaggaacagctaaataaaataagagattcatatgctaaattattgggtcatcagaatttgaaacaaaaaatcaagcatgttgtgaagttgaaagatgaaaatagccaactcaaatcggaagtatcaaaactccgctgtcagcttgctaaaaaaaaacaaagtgagacaaaacttcaagaggaattgaataaagttctaggtatcaaacactttgatccttcaaaggcttttcatcatgaaagtaaagaaaattttgccctgaagaccccattaaaagaaggcaatacaaactgttaccgagctcctatggagtgtcaagaatcatggaagtaaacatctgagaaacctgttgaagattatttcattcgtcttgttgttattgatgttgctgttattatatttgacatgggtattttataatgttgtatttaattttaactgccaatccttaaatatgtgaaaggaacattttttaccaaagtgtcttttgacattttattttttcttgcaaatacctcctccctaatgctcacctttatcacctcattctgaaccctttcgctggctttccagcttagaatgcatctcatcaacttaaaagtcagtatcatattattatcctcctgttctgaaaccttagtttcaagagtctaaaccccagattcttcagcttgatcctggaggtcttttctagtctgagcttctttagctaggctaaaacaccttggcttgttattgcctctactttgattctgataatgctcacttggtcctacctattatccttctacttgtccagttcaaataagaaataaggacaagcctaacttcatagaaacctctctatttttaatcagttgtttaataatttacaggttcttaggctccatcctgtttgtatgaaattataatctgtggattggcctttaagcctgcattcttaacaaactcttcagttaattcttagatacactaaaaatctgagaaactctacatgtaactatttcttcagagtttgtcatatactgcttgtcatctgcatgtctactcagcatttgattaacatttgtgtaatatgaaataaaattacacagtaagtcatttaaccaaaaaaaaaaaaaaaa

SEQ ID NO: 5772 - protein, 709 aa, Homo sapien
MSFPKAPLKRFNDPSGCAPSPGAYDVKTLEVLKGPVSFQKSQRFKQQKESKQNLNVDKDTTLPASARKVKSSESKIRVLLQERGAQDSRIQDLETELEKMEARLNAALREKTSLSANNATLEKQLIELTRTNELLKSKFSENGNQKNLRILSLELMKLRNKRETKMRGMMAKQEGMEMKLQVTQRSLEESQGKIAQLEGKLVSIEKEKIDEKSETEKLLEYIEEISCASDQVEKYKLDIAQLEENLKEKNDEILSLKQSLEENIVILSKQVEDLNVKCQLLEKEKEDHVNRNREHNENLNAEMQNLKQKFILEQQEREKLQQKELQIDSLLQQEKELSSSLHQKLCSFQEEMVKEKNLFEEELKQTLDELDKLQQKEEQAERLVKQLEEEAKSRAEELKLLEEKLKGKEAELEKSSAAHTQATLLLQEKYDSMVQSLEDVTAQFESYKALTASEIEDLKLENSSLQEKAAKAGKNAEDVQHQILATESSNQEYVRMLLDLQTKSALKETEIKEITVSFLQKITDLQNQLKQQEEDFRKQLEDEEGRKAEKENTTAELTEEINKWRLLYEELYNKTKPFQLQLDAFEVEKQALLNEHGAAQEQLNKIRDSYAKLLGHQNLKQKIKHVVKLKDENSQLKSEVSKLRCQLAKKKQSETKLQEELNKVLGIKHFDPSKAFHHESKENFALKTPLKEGNTNCYRAPMECQESWK

SEQ ID NO: 5773 - DNA, 850 bp, Homo sapien; identical to SEQ ID NO: 3515

SEQ ID NO: 5774 - protein, 191 aa, Homo sapien; identical to SEQ ID NO: 3516

SEQ ID NO: 5775 - DNA, 2740 bp, Homo sapien; identical to SEQ ID NO: 3379

SEQ ID NO: 5776 - protein, 710 aa, Homo sapien; identical to SEQ ID NO: 3380

SEQ ID NO: 5777 - DNA, 2331 bp, Homo sapien
cttcgcggcttggtaacataaaagtttgtttcaccacgtaagccggacctcgcactccggtcccggtctcgtcgccaagatggtgaagcccaagtacaaaggacggagcaccatcaacccgtccaaggccagcacaaacccagatcgagtgcagggagcaggaggccaaaacatgagggaccgggccaccatccggcgcctgaatatgtataggcaaaaggagcgcaggaacagtcgtggtaaaataattaaacccctgcaatatcaatcaacggtggcttctggcacagtggcaagagtagagccaaatattaaatggtttggaaacacacgtgtgattaagcagtcatcattacaaaaatttcaagaggaaatggatacagttatgaaggatccatacaaagttgtcatgaagcaaagcaagttaccaatgtctcttctccatgatcgaatccggcctcataacttgaaggtgcacattcttgatactgaaagttttgaaactacatttggccctaagtcacagaggaaacgaccaaacttatttgcaagtgatatgcagtctcttatcgaaaatgctgaaatgtccactgagagctatgaccagggcaaggatcgtgatttggtaactgaagacactggtgtgagaaatgaagctcaagaagagatctataaaaagggacagtccaaaagaatatggggtgagctctacaaggtgatagattcatcagatgttgtagttcaagttcttgatgctagagatccaatgggtactcgttcccctcacattgaaacttacctgaagaaggaaaaaccttggaaacacctcatttttgtacttaacaaatgtgaccttgttccaacctgggcaacaaaacggtgggttgctgtcctctcccaggattatccaacacttgctttccatgcaagccttactaacccgtttggcaagggagcattcattcagcttctgcggcagtttggaaagttgcacactgacaagaaacagatcagtgttgggttcattggctatccaaatgttggcaagagctctgtgataaatacattgcgttctaagaaagtttgcaacgtggctcccattgcaggtgaaacaaaggtctggcagtatattactttgatgcgtcggatattcctgattgactgtccaggtgtggtttacccctctgaggactccgagacagacattgtgctaaaaggagttgttcaagtagaaaaaattaagagtcctgaagaccacattggtgctgtacttgaacgagcaaagccagaatatatcagcaaaacatacaagattgattcttgggagaatgctgaggactttcttgagaagctcgctttccggactgggaagttactaaagggtggagagcccgacttgcagactgtgggtaagatggtcctcaatgactggcagaggggccggattcctttctttgtcaagccacccaatgcagagccacttgtggccccccagcttctaccctcctcatctttggaagttgtcccagaagcagcccagaacaatccaggggaggaagtcacagaaactgcaggtgaagggtcagaatccatcattaaggaagaaacagaagagaacagtcactgtgatgctaacacagagatgcagcagattctcacacgagttcggcagaactttggtaaaatcaacgtggtgcctcagttttctggggatgacctggttcctgtggaggtgtcagatcttgaggaagagcttgagagcttttctgatgaagaggaggaggaacaggagcaacaaagagatgatgcggaagagtcttcctcggagcctgaggaggaaaatgtgggaaacgacaccaaagccgttattaaagcactggatgagaagattgccaaatatcagaagtttctagacaaagccaaagccaaaaagttttcagcagtcagaatatccaagggactgagtgaaaagatatttgcaaaacctgaagaacaaagaaaaacactggaagaagatgtagatgacagagcaccttccaaaaagggaaagaagcggaaggcacaaagggaagaggaacaggaacattcaaataaagctcccagggcgcttacatcaaaagaacggaggcgagcagtacgacagcaacggccgaaaaaagttggtgtgcgctactatgaaacacacaacgtgaaaaataggaacaggaacaaaaagaagaccaatgactcagagggacagaaacacaaacgcaaaaaattcagacaaaagcagtaatgtttaaaaggtttttattaaattatacaaaaacaggcaaaaaaaaaaaaaaaaaa

SEQ ID NO: 5778 - protein, 731 aa, Homo sapien
MVKPKYKGRSTINPSKASTNPDRVQGAGGQNMRDRATIRRLNMYRQKERRNSRGKIIKPLQYQSTVASGTVARVEPNIKWFGNTRVIKQSSLQKFQEEMDTVMKDPYKVVMKQSKLPMSLLHDRIRPHNLKVHILDTESFETTFGPKSQRKRPNLFASDMQSLIENAEMSTESYDQGKDRDLVTEDTGVRNEAQEEIYKKGQSKRIWGELYKVIDSSDVVVQVLDARDPMGTRSPHIETYLKKEKPWKHLIFVLNKCDLVPTWATKRWVAVLSQDYPTLAFHASLTNPFGKGAFIQLLRQFGKLHTDKKQISVGFIGYPNVGKSSVINTLRSKKVCNVAPIAGETKVWQYITLMRRIFLIDCPGVVYPSEDSETDIVLKGVVQVEKIKSPEDHIGAVLERAKPEYISKTYKIDSWENAEDFLEKLAFRTGKLLKGGEPDLQTVGKMVLNDWQRGRIPFFVKPPNAEPLVAPQLLPSSSLEVVPEAAQNNPGEEVTETAGEGSESIIKEETEENSHCDANTEMQQILTRVRQNFGKINVVPQFSGDDLVPVEVSDLEEELESFSDEEEEEQEQQRDDAEESSSEPEEENVGNDTKAVIKALDEKIAKYQKFLDKAKAKKFSAVRISKGLSEKIFAKPEEQRKTLEEDVDDRAPSKKGKKRKAQREEEQEHSNKAPRALTSKERRRAVRQQRPKKVGVRYYETHNVKNRNRNKKKTNDSEGQKHKRKKFRQKQ

SEQ ID NO: 5779 - DNA, 1272 bp, Homo sapien; identical to SEQ ID NO: 1651

SEQ ID NO: 5780 - protein, 319 aa, Homo sapien; identical to SEQ ID NO: 1652

SEQ ID NO: 5781 - DNA, 2168 bp, Homo sapien
tccctgtcctgcgcccgcgcgccccgggagcctacccagcacgcgctccgcgcccactggttccctccagccgccgccgtccagccgagtccccactccggagtcgccgctgccgcggggacatggtcctctgcgttcaggggtgagcacccccttgtaagctcagggctactgttgggtgtcagggaacaaagttttagactgctgcgctccaaagcgggcacacacatgtacctagaacacaccagccactgtccccaccatgatgatgacacagccatggacacacccctgcccagacctcgtcctttgctggctgtggagcggactgggcagcggcccctgtgggccccgtccctggaactgcccaagccagtcatgcagcccttgcctgctggggccttcctcgaggaggtggcagagggtaccccagcccagacagagagtgagccaaaggtgctggacccagaggaggatctgctgtgcatagccaagaccttctcctaccttcgggaatctggctggtattggggttccattacggccagcgaggcccgacaacacctgcagaagatgccagaaggcacgttcttagtacgtgacagcacgcaccccagctacctgttcacgctgtcagtgaaaaccactcgtggccccaccaatgtacgcattgagtatgccgactccagcttccgtctggactccaactgcttgtccaggccacgcatcctggcctttccggatgtggtcagccttgtgcagcactatgtggcctcctgcactgctgatacccgaagcgacagccccgatcctgctcccaccccggccctgcctatgcctaaggaggatgcgcctagtgacccagcactgcctgctcctccaccagccactgctgtacacctaaaactggtgcagccctttgtacgcagaagcagtgcccgcagcctgcaacacctgtgccgccttgtcatcaaccgtctggtggccgacgtggactgcctgccactgccccggcgcatggccgactacctccgacagtaccccttccagctctgactgtacggggcaatctgcccaccctcacccagtcgcaccctggaggggacatcagccccagctggacttgggcccccactgtccctcctccaggcatcctggtgcctgcatacctctggcagctggcccaggaagagccagcaagagcaaggcatgggagaggggaggtgtcacacaacttggaggtaaaatgcccccaggccgcatgtggcttcattatactgagccatgtgtcagaggatggggagacaggcaggaccttgtctcacctgtgggctgggcccaaacctccactcgcttgcctgccctggccacctgaactgtatgggcactctcagccctggtttttcaatccccagggtcggtaggacccctactggcagccagcctctgtttctgggaggatgacatgcagaggaactgagatcgacagtgactagtgaccccttgttgaggggtaagccaggctaggggactgcacaattatacactatttatttatttattctccttggggttggtgtcaggggcaaaccaaccccacctctatgccctgagccctggtagtccaaagaccccaactctgccctggcttctctggttcttccctgtggaaagcccatcctgagacatcttgctggaaccaaggcaatcctggatgtcctggtactgacccacccctctgtgaatgtgtccactctcttctgcccccagccatatttggggaggatggacaactacaataggtaagaaaatgcagccggagcctcagtccccagcagagcctgtgtctcaccccctcacaggacagagctgtatctgcataaagctggtctcactgtggcgcaggccccggggggagtgcctgtgctgtcaggaaaagggggtgctggtttgagggccaccactgcagttctgctaggtctgcttcctgcccaggaaggtgcctgcacatgaaaggagagaaatacacgtctgataagacttcatgaaataataattatagcaaagaacagtttggtggtcttttctcttccactgatttttctgtaatgaacattatacctttattacctctttattttattacctctataataaaatgatacctt

SEQ ID NO: 5782 - protein, 258 aa, Homo sapien; identical to SEQ ID NO: 3972

SEQ ID NO: 5783 - DNA, 1372 bp, Homo sapien; identical to SEQ ID NO: 3227

SEQ ID NO: 5784 - protein, 63 aa, Homo sapien; identical to SEQ ID NO: 3228

SEQ ID NO: 5785 - DNA, 1301 bp, Homo sapien
agactctccacctgctccctgggaccatcgcccaccatggctgtggcccagcagctgcgggccgagagtgactttgaacagcttccggatgatgttgccatctcggccaacattgctgacatcgaggagaagagaggcttcaccagccactttgttttcgtcatcgaggtgaagacaaaaggaggatccaagtacctcatctaccgccgctaccgccagttccatgctttgcagagcaagctggaggagcgcttcgggccagacagcaagagcagtgccctggcctgtaccctgcccacactcccagccaaagtctacgtgggtgtgaaacaggagatcgccgagatgcggatacctgccctcaacgcctacatgaagagcctgctcagcctgccggtctgggtgctgatggatgaggacgtccggatcttcttttaccagtcgccctatgactcagagcaggtgccccaggcactccgccggctccgcccgcgcacccggaaagtcaagagcgtgtccccacagggcaacagcgttgaccgcatggcagctccgagagcagaggctctatttgacttcactggaaacagcaaactggagctgaatttcaaagctggagatgtgatcttcctcctcagtcggatcaacaaagactggctggagggcactgtccggggagccacgggcatcttccctctctccttcgtgaagatcctcaaagacttccctgaggaggacgaccccaccaactggctgcgttgctactactacgaagacaccatcagcaccatcaagtctgtggcctgggagggaggggcctgtccagccttcctgccatccctacgaccaccgcccctcacatcaccttctcatgggtccctctcccactccaaagcccccagtggctcccagatgagccacaatgctgtaacaagccatcaacgtccagggtggcctggccagcctcattcccctttcccccaccccacaccccacttccagcctgatgcctccttactccagcctgtcacccccttagggacatcgcggtggaggaagatctcagcagcactcccctattgaaagacctgctggagctcacaaggcgggagttccagagagaggacatagctctgaattaccgggacgctgagggggatctggttcggctgctgtcggatgaggacgtagcgctcatggtgcggcaggctcgtggcctcccctcccagaagcgcctcttcccctggaagctgcacatcacgcagaaggacaactacagggtctacaacacgatgccatga

SEQ ID NO: 5786 - protein, 348 aa, Homo sapien; identical to SEQ ID NO: 1302

SEQ ID NO: 5787 - DNA, 2189 bp, Homo sapien; identical to SEQ ID NO: 929

SEQ ID NO: 5788 - protein, 259 aa, Homo sapien; identical to SEQ ID NO: 930

SEQ ID NO: 5789 - DNA, 10011 bp, Homo sapien; identical to SEQ ID NO: 3981

SEQ ID NO: 5790 - protein, 1281 aa, Homo sapien; identical to SEQ ID NO: 3982

SEQ ID NO: 5791 - DNA, 3429 bp, Homo sapien; identical to SEQ ID NO: 1417

SEQ ID NO: 5792 - protein, 866 aa, Homo sapien; identical to SEQ ID NO: 1418

SEQ ID NO: 5793 - DNA, 800 bp, Homo sapien
ggcaccaggtccccggcgaagttctgcgctggtcggcggagtagcaagtggccatggggagcctcagcggtctgcgcctggcagcaggaagctgttttaggttatgtgaaagagatgtttcctcatctctaaggcttaccagaagctctgatttgaagagaataaatggattttgcacaaaaccacaggaaagtcccggagctccatcccgcacttacaacagagtgcctttacacaaacctacggattggcagaaaaagatcctcatatggtcaggtcgcttcaaaaaggaagatgaaatcccagagactgtctcgttggagatgcttgatgctgcaaagaacaagatgcgagtgaagatcagctatctaatgattgccctgacggtggtaggatgcatcttcatggttattgagggcaagaaggctgcccaaagacacgagactttaacaagcttgaacttagaaaagaaagctcgtctgaaagaggaacagctatgaaggccaaaacagagtagcagaggtatccgtgttggctggattttgaaaatccaggaattatgttataacgtgcctgtattaaaaaggatgtggtatgaggatccatttcataaagtatgatttgcccaaacctgtaccatttccgtatttctgctgtagaagtagaaataaattttcttaaataatgactgtgttttattgttttgatccaagtcaagtgtagcctctcagccttttggagaaaaatgaaacaatttatttcaacttgaataccaactcttcagagaagcaggtaccata

SEQ ID NO: 5794 - protein, 148 aa, Homo sapien
MGSLSGLRLAAGSCFRLCERDVSSSLRLTRSSDLKRINGFCTKPQESPGAPSRTYNRVPLHKPTDWQKKILIWSGRFKKEDEIPETVSLEMLDAAKNKMRVKISYLMIALTVVGCIFMVIEGKKAAQRHETLTSLNLEKKARLKEEQL

SEQ ID NO: 5795 - DNA, 1875 bp, Homo sapien; identical to SEQ ID NO: 3120

SEQ ID NO: 5796 - protein, 204 aa, Homo sapien; identical to SEQ ID NO: 3121

SEQ ID NO: 5797 - DNA, 1232 bp, Homo sapien; identical to SEQ ID NO: 1365

SEQ ID NO: 5798 - protein, 196 aa, Homo sapien; identical to SEQ ID NO: 1366

SEQ ID NO: 5799 - DNA, 1626 bp, Homo sapien
agcagcggcgggggcccgagggattctgaaggaagatttccattaggtaatttgtttaatcagtgcaagcgaaattaagggaaaatggatgtagaaaatgagcagatactgaatgtaaaccctgcagatcctgataacttaagtgactctctcttttccggtgatgaagaaaatgctgggactgaggaagtaaagaatgaaataaatggaaattggatttcagcatcctccattaacgaagctagaattaatgccaaggcaaaaaggcgactaaggaaaaactcatcccgggactctggcagaggcgattcggtcagcgacagtgggagtgacgcccttagaagtggattaactgtgccaaccagtccaaagggaaggttgctggatgggcgatccagatctgggaaaggaaggggactaccaaagaaaggtggtgcaggaggcaaaggtgtctggggtacacctggacaggggtatgatgtggaggaggtggatgtgaaagatcctaactatgatgatgaccaggagaactgtgtttatgaaactgtagttttgcctttggatgaaagggcatttgagaagactttaacaccaatcatacaggaatattttgagcatggagatactaatgaagttgcggaaatgttaagagatttaaatcttggtgaaatgaaaagtggagtaccagtgttggcagtatccttagcattggaggggaaggctagtcatagagagatgacatctaagtttctttctgacctttgtgggacagtaatgagcacaactgatgtggaaaaatcatttgataaattgttgaaagatctacctgaattagcactggatactcctagagcaccacagttggtgggccagtttattgctagagctgttggagatggaattttatgtaatacctatattgatagttacaaaggaactgtagattgtgtgcaggctagagctgctctggataaggctaccgtgcttctgagtatgtctaaaggtggaaagcgtaaagatagtgtgtggggctctggaggtgggcagcaatctgtcaatcaccttgttaaagagattgatatgctgctgaaagaatatttactctctggagacatatctgaagctgaacattgccttaaggaactggaagtacctcattttcaccatgagcttgtatatgaagctattataatggttttagagtcaactggagaaagtacatttaagatgattttggatttattaaagtccctttggaagtcttctaccattactgtagaccaaatgaaaagaggttatgagagaatttacaatgaaattccggacattaatctggatgtcccacattcatactctgtgctggagcggtttgtagaagaatgttttcaggctggaataatttggaaacaactcagagatctttgtccttcaaggggcagaaagcgttttgtaagcgaaggagatggaggtcgtcttaaaccagagagctactgaatataagaactcttgcagtcttagatgttataaaaatatatatctgaattgtaagagttgttagcacaagtttttttttttttttttttaagcacttgttttgggtacaaggcatttctgacattttgggta

SEQ ID NO: 5800 - protein, 469 aa, Homo sapien
MDVENEQILNVNPADPDNLSDSLFSGDEENAGTEEVKNEINGNWISASSINEARINAKAKRRLRKNSSRDSGRGDSVSDSGSDALRSGLTVPTSPKGRLLDGRSRSGKGRGLPKKGGAGGKGVWGTPGQGYDVEEVDVKDPNYDDDQENCVYETVVLPLDERAFEKTLTPIIQEYFEHGDTNEVAEMLRDLNLGEMKSGVPVLAVSLALEGKASHREMTSKFLSDLCGTVMSTTDVEKSFDKLLKDLPELALDTPRAPQLVGQFIARAVGDGILCNTYIDSYKGTVDCVQARAALDKATVLLSMSKGGKRKDSVWGSGGGQQSVNHLVKEIDMLLKEYLLSGDISEAEHCLKELEVPHFHHELVYEAIIMVLESTGESTFKMILDLLKSLWKSSTITVDQMKRGYERIYNEIPDINLDVPHSYSVLERFVEECFQAGIIWKQLRDLCPSRGRKRFVSEGDGGRLKPESY

SEQ ID NO: 5801 - DNA, 5316 bp, Homo sapien; identical to SEQ ID NO: 623

SEQ ID NO: 5802 - protein, 424 aa, Homo sapien; identical to SEQ ID NO: 624

SEQ ID NO: 5803 - DNA, 5523 bp, Homo sapien
ggcgatcacgttttcacatgatgctcacgctcagggcgcttcaattatccctccccacaaagataggtggcgcgtgtttcagggtctctcgtctctctcctacagaaaagaaaaagaaaaaaatgtcattagaagaggcgtaacacgtcagtccgtccccaggtttgtgtttcctggagtggccgaaagagatcagttctaacctgctctgcaggaataacggtcctgcctcccgacactcttggcgaggtttttgtacagtttgctccgggagctgtttcttcgcttccacctttttctcccccacacttcgcggcttcttcatgctttttcttctcaccatttctggccaaaactacaaacaagacttcgcagatcgagcctgcgtgctgccgaagcagggcgccgagtccatgcgaactgccatctgatccgctcttatcaatgaagcagccgatcatggcggatggcccccggtgcaagaggcgcaaacaagccaatcccaggaggaaaaacgtggtgaactatgacaatgtagtggacacaggttctgaaacagatgaggaagacaagcttcatattgctgaggatgacggtattgccaaccctctggaccaggagacgagtccagctagtgtgcccaaccatgagtcctccccacacgtgagccaagctctgttgccaagagaggaagaggaagatgaaataagggagggtggagtggaacacccctggcacaacaacgagattctacaagcctctgtagatggtccagaagaaatgaaggaagactatgacactatggggccagaagccacgatccagaccgcaattaacaatggtacagtgaagaatgcaaattgcacatcagattttgaggaatactttgccaaaagaaaactggaggaacgcgatggtcatgcagtcagcatcgaggagtaccttcagcgcagtgacacagccattatttacccagaagcccctgaggagctgtctcgccttggcacgccagaggccaatgggcaagaagaaaatgacctgccacctggaactccagatgcttttgcccaactgctgacctgcccctactgcgaccggggctacaagcgcttgacatcactgaaggagcacatcaagtaccgccacgagaagaatgaagagaacttttcctgccctctctgtagctacacgtttgcctaccgcacccagctcgagcggcatatggtgacacacaagccagggacagatcagcaccaaatgctaacccaaggagcaggtaatcgcaagttcaaatgcacagagtgtggcaaggccttcaaatataaacaccatctgaaagaacacctgcgaattcacagtggtgaaaaaccttacgagtgcccaaactgcaagaaacgtttctcccattctggttcctacagttcgcacatcagcagcaagaaatgtattggtttaatctctgtaaatggccgaatgagaaacaatatcaagacgggttcttcccctaattctgtttcttcttctcctactaattcagccattacccagttaagaaacaagttggagaatggaaaaccacttagtatgtctgaacagacaggcttacttaaaattaaaacagaaccactagacttcaatgactataaagttcttatggctacacacgggtttagtggcactagtccctttatgaatggtgggcttggagccaccagccctttaggagttcatccatctgctcagagtccaatgcagcacttaggtgtagggatggaagcccctttacttgggtttcccaccatgaatagtaatttaagtgaggtacaaaaggttctacagattgtggacaatactgtttccaggcaaaaaatggactgcaaggctgaagaaatttcaaagttgaaaggttatcacatgaaggatccatgctctcaacctgaggaacaaggagttacttctcctaatattccgcctgtcggtcttccggtagtgagtcataatggtgccactaaaagtattattgactatacgttggaaaaagtcaatgaagccaaagcttgcctccagagcttgactactgactcaaggagacagatcagtaatataaagaaagagaagctacgtactttaatagatttggtcactgatgacaaaatgattgagaaccacaacatatccactccattttcatgccagttctgtaaagaaagttttcctggccccatccctttgcatcagcatgaacgttacctttgtaagatgaatgaagagatcaaggcggtcctgcagcctcatgaaaacatagtccccaacaaagccggagtttttgttgataataaagccctcctcttgtcatctgtactttctgagaaaggaatgacaagccccatcaacccatacaaggaccacatgtctgtactcaaagcatactatgctatgaacatggagcccaactccgatgaactgctgaaaatttccattgctgtgggccttcctcaggaatttgtgaaggaatggtttgaacaacgaaaagtctaccagtactcaaattccaggtccccatccctggaaagaagctccaagccgttagctcccaacagtaaccctcccacaaaagactctttattacccaggtctcctgtaaaacctatggactccataacatcaccatctatagcagaactccacaacagtgttacgaattgtgatcctcctctcaggctaacaaaaccttcccattttaccaatattaaaccagttgaaaaattggaccactccaggagtaatactccttctcccttaaatctttcctccacatcttctaaaaactcccacagtagttcatacactccaaacagcttctcttctgaggagctccaggctgagcctttagacttgtcattaccaaaacaaatgaaagaacccaaaagtattatagccacaaagaacaaaacaaaagctagtagcatcagtttagatcataacagtgtttcttcctcatctgaaaactcagatgagcctctgaacttgacttttatcaagaaggaattttcaaattcaaataatctggacaacaaaagcactaacccagtgttcagcatgaacccatttagtgccaaacctttatacacagctcttccacctcaaagcgcatttccccctgctactttcatgccaccagtccagaccagtattcctgggctacgaccatacccaggactggatcagatgagcttcctaccacatatggcctacacctacccaactggagcagctacttttgctgatatgcagcaaaggagaaagtaccagcggaaacaaggatttcagggagaattgcttgatggagcacaagactacatgtcaggcctagatgatatgacagactccgactcctgtctgtctcgcaaaaagatcaagaagacagagagtggcatgtatgcatgtgacttatgtgacaagacattccagaaaagcagttcccttctgcgacataaatacgaacacacaggaaaaagaccacatcagtgtcagatttgtaagaaagcgtttaaacacaagcaccaccttatcgagcactcaaggcttcactcgggcgagaagccctatcagtgtgataaatgtggcaagcgcttctcacactcgggctcgtactcgcagcacatgaatcacaggtattcctactgcaagcgggaggcggaggagcgggaagcggcggagcgcgaggcgcgcgagaaagggcacttggaacccaccgagctgctgatgaaccgggcttacttgcagagcattacccctcaggggtactctgactcggaggagagggagagtatgccgagggatggcgagagcgagaaggagcacgagaaagaaggcgaggatggctacgggaagctgggcagacaggatggcgacgaggagttcgaggaggaagaggaagaaagtgaaaataaaagtatggatacggatcccgaaacgatacgagatgaagaagagactggagatcactccatggacgatagttcggaggatgggaaaatggaaaccaaatcagaccacgaggaagacaatatggaagatggcatgtaataaactactgcattttaagcttcctatttttttttccagtagtattgttacctgcttgaaaacactgctgtgttaagctgttcatgcacgtgcctgacgcttccaggaagctgtagagagggacagaaggggcggttcagccaagacagatgtagacggagttggagctgggtattgttaaaaactgcattatgcaaaaattttgtacagtgttaaggcctaaaaactgtgtggttcagagactaattcctgtgtttaatagcatttatactttaagcacaactagaaaattgtaagaattgcactctacttatgtatcactacaaactttaaaaaactatgtctaatttatattaatacattttaaaaaggtgcccgcactaccatacatcagtatttttattattattattgttattcctttttaatttaatgtgctcgcactacaatgcatcagtattatgattcctctgtactttcctttcgctattcatcaatttcccatttttttttttcagcttaagtaaccacacaattttaggcctcaatttttttttttttctgtgaaggaacttgaagtgatgcatgtgtgaatttaagataccgaagtcttaaagtgacctggacgtgaaggaaaaagtaagatgagaaataaagaaagcctttgtaaggtggttttaaaagccttatatgcaaaccttttaatctgtgtttctgcaagtgccatccttgtacagtgttaagagggtaacatgggttacctttgcaccagcttcagtgttaagctcaccctgttctttgaagcacccatgtcagtattagaagaataggcagcagttccttagtttacatatgtttgtgcaattattttctgtacttttttgttcattaattttgtcagtattacaccaaactgtttttgcaacaaaaaaattttttttgcattcatttaattttaggtcaaataacattttatttatgtggctcattttatatttcctaattttatttatttcatactgtagtgtacagtattatagttcttcaatatatagatatattttagtaaaaaaggaacatgacgttgatcatttgggcaaattttacgtaaagagaagagcatttattgtgttttggaacattaattgtgagatgggatttttcaattttattattttatttttgtttttttccaattactggaaattccaaatttgggaacttttgatacgatcttgtgaaaacactgtattttcgactgaaaattccactttcttcatcttgttttttagctaaaaagagggactgttaaatacaatgtatgataccatgacaaaaatctttcctgaattgtctttgtaaaagtattattgaattttcaatttgtaatttcttttgaaaatgaccatgctcgaataaaaatgtagccaaact

SEQ ID NO: 5804 - protein, 1214 aa, Homo sapien
MKQPIMADGPRCKRRKQANPRRKNVVNYDNVVDTGSETDEEDKLHIAEDDGIANPLDQETSPASVPNHESSPHVSQALLPREEEEDEIREGGVEHPWHNNEILQASVDGPEEMKEDYDTMGPEATIQTAINNGTVKNANCTSDFEEYFAKRKLEERDGHAVSIEEYLQRSDTAIIYPEAPEELSRLGTPEANGQEENDLPPGTPDAFAQLLTCPYCDRGYKRLTSLKEHIKYRHEKNEENFSCPLCSYTFAYRTQLERHMVTHKPGTDQHQMLTQGAGNRKFKCTECGKAFKYKHHLKEHLRIHSGEKPYECPNCKKRFSHSGSYSSHISSKKCIGLISVNGRMRNNIKTGSSPNSVSSSPTNSAITQLRNKLENGKPLSMSEQTGLLKIKTEPLDFNDYKVLMATHGFSGTSPFMNGGLGATSPLGVHPSAQSPMQHLGVGMEAPLLGFPTMNSNLSEVQKVLQIVDNTVSRQKMDCKAEEISKLKGYHMKDPCSQPEEQGVTSPNIPPVGLPVVSHNGATKSIIDYTLEKVNEAKACLQSLTTDSRRQISNIKKEKLRTLIDLVTDDKMIENHNISTPFSCQFCKESFPGPIPLHQHERYLCKMNEEIKAVLQPHENIVPNKAGVFVDNKALLLSSVLSEKGMTSPINPYKDHMSVLKAYYAMNMEPNSDELLKISIAVGLPQEFVKEWFEQRKVYQYSNSRSPSLERSSKPLAPNSNPPTKDSLLPRSPVKPMDSITSPSIAELHNSVTNCDPPLRLTKPSHFTNIKPVEKLDHSRSNTPSPLNLSSTSSKNSHSSSYTPNSFSSEELQAEPLDLSLPKQMKEPKSIIATKNKTKASSISLDHNSVSSSSENSDEPLNLTFIKKEFSNSNNLDNKSTNPVFSMNPFSAKPLYTALPPQSAFPPATFMPPVQTSIPGLRPYPGLDQMSFLPHMAYTYPTGAATFADMQQRRKYQRKQGFQGELLDGAQDYMSGLDDMTDSDSCLSRKKIKKTESGMYACDLCDKTFQKSSSLLRHKYEHTGKRPHQCQICKKAFKHKHHLIEHSRLHSGEKPYQCDKCGKRFSHSGSYSQHMNHRYSYCKREAEEREAAEREAREKGHLEPTELLMNRAYLQSITPQGYSDSEERESMPRDGESEKEHEKEGEDGYGKLGRQDGDEEFEEEEEESENKSMDTDPETIRDEEETGDHSMDDSSEDGKMETKSDHEEDNMEDGM

SEQ ID NO: 5805 - DNA, 3988 bp, Homo sapien; identical to SEQ ID NO: 574

SEQ ID NO: 5806 - protein, 1032 aa, Homo sapien; identical to SEQ ID NO: 575

SEQ ID NO: 5807 - DNA, 2475 bp, Homo sapien; identical to SEQ ID NO: 475

SEQ ID NO: 5808 - protein, 227 aa, Homo sapien; identical to SEQ ID NO: 476

SEQ ID NO: 5809 - DNA, 3025 bp, Homo sapien; identical to SEQ ID NO: 1069

SEQ ID NO: 5810 - protein, 752 aa, Homo sapien; identical to SEQ ID NO: 1070

SEQ ID NO: 5811 - DNA, 837 bp, Homo sapien; identical to SEQ ID NO: 558

SEQ ID NO: 5812 - protein, 181 aa, Homo sapien; identical to SEQ ID NO: 559

SEQ ID NO: 5813 - DNA, 4565 bp, Homo sapien; identical to SEQ ID NO: 781

SEQ ID NO: 5814 - protein, 802 aa, Homo sapien; identical to SEQ ID NO: 782

SEQ ID NO: 5815 - DNA, 3851 bp, Homo sapien
gccgcggctcatgcgcggtgcacagaggcttgtttcacatctgtaacaacaggaggaggcccagcctcgtgatgaggaatagcaaggagagaattcagctccagttcaaaagcctacaaaatctgagactgtcattgcttttataaggattccagctttccctcctggccagaaatgttcagcctggactcattcagaaaagatcgggcccagcacaggcagcgtcagtgcaaacttcccccaccccgccttccacccatgtgtgtcaaccctaccccaggagggaccatctctcgagcttctagggacctattaaaagagttcccacagcccaaaaatcttctcaacagtgtgattggaagagccctcggcatctcacatgcaaaagacaaactagtctacgtgcacacaaatggaccgaagaaaaagaaagtcacactgcacataaaatggcccaagagcgtggaggtagaaggctatggcagcaagaagatcgatgctgagcggcaggctgcagctgcagcctgccagctgttcaagggttggggtctgctaggtccccggaatgagttgtttgacgcagccaaataccgagtgctagctgatcgctttggctcccctgccgacagctggtggcgtccggaacccaccatgccccctacttcctggcggcagctgaatccagagagtattcgaccagggggacctgggggcctatcccgctctttaggccgggaagaagaggaggacgaggaggaagagctagaagaagggaccatagatgttaccgacttcttgtccatgacccagcaggattcccacgctccactcagggactcaagggggagttcctttgagatgacagatgacgacagtgccattagggctctgacccagtttccacttcccaagaaccttctggccaaggtgattcagattgcaacgtcatcctccacagctaagaacctcatgcagttccatactgtgggcaccaagaccaagctgtctacactcaccctgctctggccctgccccatgacctttgttgccaaagggcgccgcaaagcagaggctgagaataaggcggcagccttggcctgcaagaaactgaagagcctgggcctggtggacaggaacaacgaaccgcttacacacgccatgtataacctggcctctttgcgtgagctgggtgagacccagcgccgaccatgcaccatccaggtgcccgagcccatcctccgcaagatagagaccttcctgaaccattaccctgtggagagttcatggatcgccccagaactccggctgcagagtgatgacatcttgcccttgggcaaggactcagggcctctgagtgaccctatcacaggcaagccctatgtgcccctgttggaagcagaggaggtacgtctcagccagagtctgctagaactgtggcggcggcgagggccggtctggcaggaggccccccagctacctgtggacccacatcgggacaccatcctcaacgccattgagcagcacccggtggtggtcatctctggggacacgggctgtgggaagaccacgcgcatcccccagctgttgctggagcgctatgtgaccgagggccgaggtgcccgctgcaatgttatcatcacccaacctcgccgcatctctgctgtgtctgtggcacagcgggtcagccacgaactgggcccctccctgcgccggaatgtgggcttccaggtgcggttggaaagtaagcccccatcccgaggcggggccctgctcttctgcactgtgggtatcctgctgcgtaagctgcagagcaaccccagcctggagggcgtgagccacgtcatcgtggatgaggtgcatgagcgggacgtgaacacagactttctgctgatcctgctcaagggcctgcagcggctcaacccggccctgcggctggtgctcatgagtgccacaggggacaatgagcgcttctcccgatactttggtggctgccccgtcatcaaggtgcctggcttcatgtacccagtcaaggagcactacctagaggacatcctggccaagttgggcaagcaccagtacctgcaccggcaccggcaccatgagtctgaggatgaatgcgcactcgatttggaccttgtgactgatctggttctgcacatcgatgctcgcggggaaccaggtgggatcctgtgcttcctgcctgggtggcaggagatcaaaggagtgcagcagcgcctccaggaggccctgggcatgcacgagagcaagtacctcatcctgccagtgcactccaacatccccatgatggatcagaaggccatattccagcagcctccagttggggtgcgcaagattgtcttggccaccaacattgctgagacttccatcacaatcaatgacatcgtgcatgtggtggacagtgggctgcacaaggaagaacgctatgacctgaagaccaaggtgtcctgcctggagacagtgtgggtatcaagagccaatgtgatccagcgccggggccgggcgggccgctgccagtccggctttgcctaccacttgttccctcgaagccggctggagaaaatggtccctttccaagtgccagagatcctgcgcacacctcttgagaacctggtgctgcaagcgaaaatccacatgcctgagaagacggcggtggagttcctgtccaaggctgtggacagtccaaacatcaaggcagtggacgaggctgtgatcttgctccaggagatcggggtgctggaccagcgggagtacctgactaccctggggcagcgcctggctcacatctccaccgacccccggttggccaaggccattgtgttggctgccatcttccgttgcctgcacccactactggtggtcgtttcctgcctcacccgggaccccttcagcagcagcctacagaaccgggcagaggtggacaaggtgaaagcactgttgagccatgacagcggcagtgaccacctggcctttgtgcgggctgtcgccggctgggaggaggtgctgcgttggcaggaccgcagctcccgggagaattacctggaggaaaacctgctgtacgcacccagcctgcgcttcatccacggactcatcaagcagttctcagagaacatttatgaggccttcctggtggggaagccctcggactgcaccctggcctccgcccagtgcaacgagtacagtgaggaggaggagctggtgaagggcgtgctgatggccggcctctaccccaacctcatccaggtgaggcagggcaaggtcacccggcaggggaagttcaagcccaacagcgtcacatataggaccaaatcaggcaacatcctgctgcacaagtcgaccattaacagggaggccacacggttacggagccgatggctgacgtatttcatggcagtcaagtccaatggcagcgtcttcgtccgggactcctctcaggtgcacccgctagctgtgctgctgctgaccgacggggacgtgcacatccgtgatgacgggcgccgggccaccatctcactgagcgacagtgacctgctgcggctggagggtgactcgcgtaccgtgcggctgctgaaggagctgcggcgggccctgggccgcatggtggagcggagcctgcgcagcgagctggctgcacttccccccagcgtacaggaggagcacgggcagctgcttgcgctactggcagagctgctgcgaggaccctgtggcagctttgatgtgcgcaagacagctgacgactgagccctgcttctgctggggctgtgtacagagtgcaaatgtttatttaaaataaagttctatttatcccttgtgaaaaaaaaaaaaaaaaaaaa

SEQ ID NO: 5816 - protein, 1194 aa, Homo sapien
MFSLDSFRKDRAQHRQRQCKLPPPRLPPMCVNPTPGGTISRASRDLLKEFPQPKNLLNSVIGRALGISHAKDKLVYVHTNGPKKKKVTLHIKWPKSVEVEGYGSKKIDAERQAAAAACQLFKGWGLLGPRNELFDAAKYRVLADRFGSPADSWWRPEPTMPPTSWRQLNPESIRPGGPGGLSRSLGREEEEDEEEELEEGTIDVTDFLSMTQQDSHAPLRDSRGSSFEMTDDDSAIRALTQFPLPKNLLAKVIQIATSSSTAKNLMQFHTVGTKTKLSTLTLLWPCPMTFVAKGRRKAEAENKAAALACKKLKSLGLVDRNNEPLTHAMYNLASLRELGETQRRPCTIQVPEPILRKIETFLNHYPVESSWIAPELRLQSDDILPLGKDSGPLSDPITGKPYVPLLEAEEVRLSQSLLELWRRRGPVWQEAPQLPVDPHRDTILNAIEQHPVVVISGDTGCGKTTRIPQLLLERYVTEGRGARCNVIITQPRRISAVSVAQRVSHELGPSLRRNVGFQVRLESKPPSRGGALLFCTVGILLRKLQSNPSLEGVSHVIVDEVHERDVNTDFLLILLKGLQRLNPALRLVLMSATGDNERFSRYFGGCPVIKVPGFMYPVKEHYLEDILAKLGKHQYLHRHRHHESEDECALDLDLVTDLVLHIDARGEPGGILCFLPGWQEIKGVQQRLQEALGMHESKYLILPVHSNIPMMDQKAIFQQPPVGVRKIVLATNIAETSITINDIVHVVDSGLHKEERYDLKTKVSCLETVWVSRANVIQRRGRAGRCQSGFAYHLFPRSRLEKMVPFQVPEILRTPLENLVLQAKIHMPEKTAVEFLSKAVDSPNIKAVDEAVILLQEIGVLDQREYLTTLGQRLAHISTDPRLAKAIVLAAIFRCLHPLLVVVSCLTRDPFSSSLQNRAEVDKVKALLSHDSGSDHLAFVRAVAGWEEVLRWQDRSSRENYLEENLLYAPSLRFIHGLIKQFSENIYEAFLVGKPSDCTLASAQCNEYSEEEELVKGVLMAGLYPNLIQVRQGKVTRQGKFKPNSVTYRTKSGNILLHKSTINREATRLRSRWLTYFMAVKSNGSVFVRDSSQVHPLAVLLLTDGDVHIRDDGRRATISLSDSDLLRLEGDSRTVRLLKELRRALGRMVERSLRSELAALPPSVQEEHGQLLALLAELLRGPCGSFDVRKTADD

SEQ ID NO: 5817 - DNA, 624 bp, Homo sapien; identical to SEQ ID NO: 1525

SEQ ID NO: 5818 - protein, 160 aa, Homo sapien; identical to SEQ ID NO: 1526

SEQ ID NO: 5819 - DNA, 1554 bp, Homo sapien; identical to SEQ ID NO: 3157

SEQ ID NO: 5820 - protein, 325 aa, Homo sapien; identical to SEQ ID NO: 3158

SEQ ID NO: 5821 - DNA, 1669 bp, Homo sapien
ggggcgagacctacgacgccggcgagcagtggccgttacgcctaaaaagatggcggtcttggcacctctaattgctctcgtgtattcggtgccgcgactttcacgatggctcgcccaaccttactaccttctgtcggccctgctctctgctgccttcctactcgtgaggaaactgccgccgctctgccacggtctgcccacccaacgcgaagacggtaacccgtgtgactttgactggagagaagtggagatcctgatgtttctcagtgccattgtgatgatgaagaaccgcagatccatcactgtggagcaacatataggcaacattttcatgtttagtaaagtggccaacacaattcttttcttccgcttggatattcgcatgggcctactttacatcacactctgcatagtgttcctgatgacgtgcaaaccccccctatatatgggccctgagtatatcaagtacttcaatgataaaaccattgatgaggaactagaacgggacaagagggtcacttggattgtggagttctttgccaattggtctaatgactgccaatcatttgcccctatctatgctgacctctcccttaaatacaactgtacagggctaaattttgggaaggtggatgttggacgctatactgatgttagtacgcggtacaaagtgagcacatcacccctcaccaagcaactccctaccctgatcctgttccaaggtggcaaggaggcaatgcggcggccacagattgacaagaaaggacgggctgtctcatggaccttctctgaggagaatgtgatccgagaatttaacttaaatgagctataccagcgggccaagaaactatcaaaggctggagacaatatccctgaggagcagcctgtggcttcaacccccaccacagtgtcagatggggaaaacaagaaggataaataagatcctcactttggcagtgcttcctctcctgtcaattccaggctctttccataaccacaagcctgaggtgcagcttttatttatgttttccctttggctgtgactgggtggggcagcatgcagcttctgattttaaagaggcatctagggaattgtcaggcaccctacaggaaggcctgccatgcttgtggccaactgtttcactggagcaaagaaagagatctcataggacggagggggaaaatggttttccctccaagcttgggtcagtgtgttaactgcttatcagctattcagacatctccatggtttctccatgaaactctgtggtttcatcattccttcttagttgacctgcacagcttggttagacctagatttaaccctaaggtaagatgctggggtatagaacgctaagaattttcccccaaggactcttgcttcctcaagcccttctggcttcgtttatggtcttcattaaaagtataagcctaactttgtcgctagtcctaaggagaaacctttaaccacaaagtttttatcattgaagacaatattgaacaaccccctattttgtggggattgagaaggggtgaatagaggcttgagactttcctttgtgtggtaggacttggaggagaaatcccctggactttcactaaccctctgacatactccccacacccagttgatggctttccgtaataaaaagattgggatttccttttg

SEQ ID NO: 5822 - protein, 296 aa, Homo sapien
MAVLAPLIALVYSVPRLSRWLAQPYYLLSALLSAAFLLVRKLPPLCHGLPTQREDGNPCDFDWREVEILMFLSAIVMMKNRRSITVEQHIGNIFMFSKVANTILFFRLDIRMGLLYITLCIVFLMTCKPPLYMGPEYIKYFNDKTIDEELERDKRVTWIVEFFANWSNDCQSFAPIYADLSLKYNCTGLNFGKVDVGRYTDVSTRYKVSTSPLTKQLPTLILFQGGKEAMRRPQIDKKGRAVSWTFSEENVIREFNLNELYQRAKKLSKAGDNIPEEQPVASTPTTVSDGENKKDK

SEQ ID NO: 5823 - DNA, 3094 bp, Homo sapien; identical to SEQ ID NO: 1471

SEQ ID NO: 5824 - protein, 807 aa, Homo sapien; identical to SEQ ID NO: 1472

SEQ ID NO: 5825 - DNA, 3865 bp, Homo sapien
ctattattcttttactattttttctattaccattttttctagtaccattttttctattattcttttactataattgtatataatatggcagctgcttgccacatgtactatgtggagagatgtaccaccctgcatcagcttttaccctacagaaggaaatcagcgttccattatattttattgttatcaacagtttaggaatacatagctttgcttttgcctttttctttccttccccttgtttcccctcgcctcagagaaaagaaggaaaaaaaaattcatctttcctacccccctctttttggatgataggacttgaagacaatctgaaataccacataaactcacttccagatgttttttgtttcatatgcaattgaattgggctcagactgtgtttttaagctgtatggtaaaaatatcactgtcttctagggccttattggggggcagggagagacgtgacactttgtcagaagggattgagtctgctaacttaaactctccttgattcaggaatacaaagtctccagctgtgaacagagactcatcagtgaaatagagtacaggctagaaaggtctcctatggatgaactcatggtgatgaacgttcacgtacggcagatgctgcctcgtggaaaactggaatggcaccattctttgagatgaagctgaaacattacaagatctttgagggaatgccagtaactttcacatgtagagtggctggaaatccaaagccaaagatctattggtttaaagatgggaagcagatctctccaaagagtgatcactacaccattcaaagagatctcgatgggacctgctccctccataccacagcctccaccctagatgatgatgggaattatacaattatggctgcaaaccctcagggccgcatcagttgtactggacggctaatggtacaggctgtcaaccaaagaggtcgaagtccccggtctccctcaggccatcctcatgtcagaaggcctcgttctagatcaagggacagtggagacgaaaatgaaccaattcaggagcgattcttcagacctcacttcttgcaggctcctggagatctgactgttcaagaaggaaaactctgcagaatggactgcaaagtcagtgggttaccaaccccagatctaagctggcaactagatggaaagcccgtacgccctgacagtgctcacaagatgctggtgcgtgagaacggggtgcactctctgatcatagagccagtcacgtcacgtgatgccggcatctacacatgtatagctaccaaccgagcaggacagaactcattcagcctggagcttgtggttgctgctaaagaagcacacaaaccccctgtgtttattgagaagctccaaaacacaggagttgctgatgggtacccagtgcggctggaatgtcgtgtattgggagtgccaccacctcagatattttggaagaaagaaaatgaatcactcactcacagcactgaccgagtgagcatgcaccaggacaaccacggctacatctgcctgctcattcagggagccacaaaagaagatgctgggtggtatactgtgtcagccaagaatgaagcagggattgtgtcctgtactgccaggctggacgtttacacccagtggcatcagcagtcacagagcaccaagccaaaaaaagtacggccctcagccagtcgctatgcagcactttcggaccagggactagacatcaaagcagcgttccaacctgaggccaacccatctcacctgacactgaatactgccttggtagaaagtgaggacctgtaatccagcattcttgttaaagctgaaacactgaaacagccattgccttgaccaacatattcctttgtcacattatgtaaaaggcagaaacatacctttgactataagaaattaaaaaaaaacaccaaaataatatttttcttacttgatataccaaacttagtttaagtagataatgctaatacaaatatacacattgcacagaaaatacacatttactgtccaatttaaaactttggaattgctgtgattaaagtgatcaaaatgccaaaatactaaaggaaatcaattgttcacaggtaactacaatttgtattatctacaagtgcctttaaacacaagatataggtgctgtgtagcctgatagtgtgaaatgtttaatgagggagttgtaccacaaacagtactacaatgattctgaagcacagtgtattcagacagatacagtgaaccaagtgcaatatgtaaggatgaaagaagaagagatgacaaagaaatccaagtaaatgccttgtctttgcaaatgtttttatattaaatcataaggaaggaactacttgccttaaatgttaatatcaaaagagttttctaacaaggttaataccttagttcttaacattttttttctttatgtgtagtgttttcatgctaccttggtaggaaacttatttacaaaccatattaaaaggctaatttaaatataaataatataaagtgctctgaataaagcagaaatatattacagttcattccacagaaagcatccaaaccacccaaatgaccaaggcatatatagtatttggaggaatcaggggtttggaaggagtagggaggagaatgaaggaaaatgcaaccagcatgattatagtgtgttcatttagataaaagtagaaggcacaggagaggtagcaaaggccaggcttttctttggttttcttcaaacataggtgaaaaaaacactgccattcacaagtcaaggaacccagggccagctggaagtgtggagcacacatgctgtggagcacacatgctgtggagattgcagtgtgtctgaggtttgtgtagtagtggaagattttaggtatgtagagcaagttgaaaatggattgagactgcatggtggcataaatgagaaattgcctgtagcatctagtctacttgaaggaagtggagacataaggagagacaaaaacaggtttgtgccataaagtattttttcaaagacaccaagatgtggtaaatgaaaattattagttcacttccctgctgccatgaaactttgccttaagaaggtgctggattccaaggtttgtaaaggcatctcggtaaagactgctttttgaatgcatatgattttgcatcagctagactgagttgattctgaccagacttgatggttttaagtcggaaccgataaattttaaaaaggagaaaaaataatttgacctagtagtataaaacatgaggctttaatggtactttgctatgaaaagaaaacactgtattccttatgcaaaacacatgtatctttcattatttataagtggcctctcttagctcagttactcaattcatacgtagtattttttaaaataattttatatctgtgtaccaccccatatatttcatattactgtttcacatgtacagctttctacttctttgtaagaacaccaaccaaccaaggtttaagtgattaataggcttgagcaccgggtggcagatgttctatgcagtgtggttcaagtttctttgaccgcacttatatgcattgctaatatggaatttaagataccatacacagtctctcatggacctatctctattgtagaattatgacttatgtcttacttggcaaatttttctgaatgtgacctttttttgctgatttgctgggtttgggattaactagcattattttgccacctttatattgtatttataaaaaaaaagtactatcaatcaatcatactactttggattgttgtgctggtgtaatgtggatttaacatcaataaatatttgacaaataaaaaaaaaaaaaaaaaaaaaaaaaaaaaaaa

SEQ ID NO: 5826 - protein, 385 aa, Homo sapien
MAPFFEMKLKHYKIFEGMPVTFTCRVAGNPKPKIYWFKDGKQISPKSDHYTIQRDLDGTCSLHTTASTLDDDGNYTIMAANPQGRISCTGRLMVQAVNQRGRSPRSPSGHPHVRRPRSRSRDSGDENEPIQERFFRPHFLQAPGDLTVQEGKLCRMDCKVSGLPTPDLSWQLDGKPVRPDSAHKMLVRENGVHSLIIEPVTSRDAGIYTCIATNRAGQNSFSLELVVAAKEAHKPPVFIEKLQNTGVADGYPVRLECRVLGVPPPQIFWKKENESLTHSTDRVSMHQDNHGYICLLIQGATKEDAGWYTVSAKNEAGIVSCTARLDVYTQWHQQSQSTKPKKVRPSASRYAALSDQGLDIKAAFQPEANPSHLTLNTALVESEDL

SEQ ID NO: 5827 - DNA, 1760 bp, Homo sapien; identical to SEQ ID NO: 3126

SEQ ID NO: 5828 - protein, 300 aa, Homo sapien; identical to SEQ ID NO: 3127

SEQ ID NO: 5829 - DNA, 1206 bp, Homo sapien
cccaggaaagcttgaaggcagagatagactcgcgtctctaagacatatacataatatagccgcaaccgcggggcttactttcccggagctgcatccccttttgggcgaagagcggaggcagaccagggactaccctaggtgaaagggcagccacctggccctacccgggctcaacgccgagcctctcggaggtacggcctcccgggggaccttccagactggtcggcgcaagaaagggcggggaccaccgaaggagtgtgtgacttaggcatccagcgcactgcctgacccgaagtaccgacccgagttatgcccaccctccaacttttgcggcggggaccatgttgcttccgaacatcctgctcaccggtacaccaggggttggaaaaaccacactaggcaaagaacttgcgtcaaaatcaggactgaaatacattaatgtgggtgatttagctcgagaagagcaattgtatgatggctatgatgaagagtatgactgtcccattttagatgaagacagagtagttgatgagttagataaccaaatgagagaaggtggagttattgttgattaccatggttgtgatttcttccctgaacgctggtttcatatagtttttgtgctgagaacagataccaatgtattgtacgaaagacttgaaacaaggggttataatgagaagaaactaacagacaatattcagtgtgagatttttcaagttctttatgaagaagccacagcatcctacaaggaagaaatcgtgcatcagctgcccagtaataaaccagaagagctagaaaataatgtagatcagatcttgaaatggattgagcagtggatcaaagatcataactcttgacttataaggctagctacttaataatcactcttgttgatatctctgccgacatcatagaaattggtcaagtgtcagtaacactttattaaaatcatgttgcagaaccagcaggtggatagtatataggtttatgcctggggttctttttcttcatgagaaagctaaacatgaaatataatgaatatagtattattaaggattgagacaaaaactgtgattttaatacttaaattgctaaagaataaataaatctgacaaaatgggtggatatcttttaagtttattacagaaaaaaatgcagatgatctcttaaaataaaactaaagataaagcaaaaaaaaaaaaa

SEQ ID NO: 5830 - protein, 172 aa, Homo sapien; identical to SEQ ID NO: 1006

SEQ ID NO: 5831 - DNA, 2750 bp, Homo sapien; identical to SEQ ID NO: 3485

SEQ ID NO: 5832 - protein, 722 aa, Homo sapien; identical to SEQ ID NO: 3486

SEQ ID NO: 5833 - DNA, 5601 bp, Homo sapien; identical to SEQ ID NO: 4656

SEQ ID NO: 5834 - protein, 1036 aa, Homo sapien; identical to SEQ ID NO: 4657

SEQ ID NO: 5835 - DNA, 1011 bp, Homo sapien
ggcacaacagagccgctcccctctcctcgccccgccaccgggacgagaggcgcccgccgctgcatttccggcgacacctcgcagtcattcctgcggcttgcgcgcccttgtagacagccggggccttcgtgagaccggtgcaggcctggggtagtctcctgtctggacagagaagagaaaaatgcaggacactggctcagtagtgcctttgcattggtttggctttggctacgcagcactggttgcttctggtgggatcattggctatgtaaaagcaggcagcgtgccgtccctggctgcagggctgctctttggcagtctagccggcctgggtgcttaccagctgtctcaggatccaaggaacgtttgggttttcctagctacatctggtaccttggctggcattatgggaatgaggttctaccactctggaaaattcatgcctgcaggtttaattgcaggtgccagtttgctgatggtcgccaaagttggagttagtatgttcaacagaccccattagcagaagtcatgttccagcttagactgatgaagaattaaaaatctgcatcttccactattttcaatatattaagagaaataagtgcagcatttttgcatctgacattttacctaaaaaaaaagacaccaaacttggcagagaggtggaaaatcagtcatgattacaaacctacagaggtggcgagtatgtaacacaagagcttaataagaccctcatagagcttgattcttgtatattgatgttgtcttttctttctgtatctgtaggtaaatctcaagggtaaaatgttaggtgtcagctttcagggctctgaaaccctattccctgctctgaggaacagtgtgaaaaaaagtcttttaggagatttacaatatctgttcttttgctcatcttagaccacagactgactttgaaattatgttaagtgaaatatcaatgaaaataaagtttactataaataataaaaaaaaaaaaaaaaaaaaaaaaaaaaa

SEQ ID NO: 5836 - protein, 112 aa, Homo sapien
MQDTGSVVPLHWFGFGYAALVASGGIIGYVKAGSVPSLAAGLLFGSLAGLGAYQLSQDPRNVWVFLATSGTLAGIMGMRFYHSGKFMPAGLIAGASLLMVAKVGVSMFNRPH

SEQ ID NO: 5837 - DNA, 2527 bp, Homo sapien
ccagccctggcgtgggcccagcccggcccaggcagcaatggggttcctgcagctgctggtcgtagcggtgctggcatccgaacaccgggtggctggtgcagccgaggtcttcgggaattccagcgagggtcttattgaattttctgtggggaaatttagatacttcgagctcaataggccctttccagaggaagctattttgcatgatatttcaagcaatgtgacttttcttattttccaaatacactcacagtatcagaatacaactgtttccttttctccgactctcctttccaattcctcggaaacaggcactgccagtggactggttttcatccttagaccagagcagagtacatgcacttggtacttggggacttcaggcatacagcctgtccagaatatggctatcctactctcctactcagaaagagatcctgtccctggaggctgtaatttggagttcgatttagatattgatcccaacatttacttggagtataatttctttgaaacgactatcaagtttgccccagcaaacctaggctatgcgagaggcgtagatcccccaccatgtgacgctgggacagaccaggactccaggtggaggttgcagtatgatgtctatcagtattttctgcctgagaatgacctcactgaggagatgttgctgaagcatctgcagaggatggtcagtgtgccccaggtgaaggccagtgctctcaaggtggttaccctaacagctaatgataagacaagtgtttccttctcctccctcccgggacaaggtgtcatatacaatgtcattgtttgggacccgtttctaaatacatctgctgcctacattcctgctcacacatacgcttgcagctttgaggcaggagagggtagttgtgcttccctaggaagagtgtcttccaaagtgttcttcactctttttgccctgcttggtttcttcatttgtttctttggacacagattctggaaaacagaattattcttcataggctttatcatcatgggattcttcttttatatactgattacaagactgacacctatcaagtatgatgtgaatctgattctgacagctgtcactggaagcgtcggtggaatgttcttggtagctgtgtggtggcgatttggaatcctctcgatctgcatgctctgtgttggactagtgctggggttcctcatctcgtcagtgactttctttactccactgggaaacctaaagatttttcatgatgatggtgtattctgggtcactttctcttgcatagctatcctcattccagtagttttcatgggctgcctaagaatactgaacatactgacttgtggagtcattggctcctattcggtggttttagccattgacagttactggtccacaagcctttcctacatcactttgaacgtactcaagagagcgctcaacaaggatttccacagagctttcacaaatgtgccttttcaaactaatgacttcattatcctggcagtatggggcatgctggctgtaagtggaattacgttacagattcgaagagagagaggacgaccgttcttccctccccacccatacaagttatggaagcaagagagagagcgccgagtgacaaacattctggaccctagctaccacattcctccattgagagagaggctctatggccgattaacccagattaaagggctcttccagaaggagcagccagctggagagagaacgcctttgcttctgtagatgcccaggggcttggtcagtgtgcctcagctttggagttcatgcctggagtggttcaacagtctctggtgcaagtctaataagagatcaggcatatatatctgttctttgcataatattatggtgcccttattgatatatggtaagggtgtactaggggattaggatgattgtaagagaatgagaaagatgaccaaaaggttggtggtagggaggctttttcttatttccaaatacttgagaaattaccttttggtttacaaatctatgatcaacttattccattaaatagatacattaaaaaaattaaaaactgcaaaaaaaaaaaaaaaactggtgtttctttttataaccccttgaaacaagtctctcacctgagcctgtctaaactttcggagggagtttattattgagtctttatctgtgacagtatttggagatttagggatttgatacttaggcctttgaattttagaatacaaaaagagaagcaagccagacatggtggctcacacctgtaatcccaatactgggaagccaaggtgggagtatcgcttgagcccaggagtttgagaccgacatgggcaacatgacaagaccccatctctacaaaaaaaattaaaaaattagccaggcatggtggcacatgcctactcccagctcccaaggagactgagatgggaggatccctggagccctgaagattgaggctacagtgagccttgattgtgtcactgcactccagcttgggtgacagagaccctgtctcgagaaatt

SEQ ID NO: 5838 - protein, 570 aa, Homo sapien
MGFLQLLVVAVLASEHRVAGAAEVFGNSSEGLIEFSVGKFRYFELNRPFPEEAILHDISSNVTFLIFQIHSQYQNTTVSFSPTLLSNSSETGTASGLVFILRPEQSTCTWYLGTSGIQPVQNMAILLSYSERDPVPGGCNLEFDLDIDPNIYLEYNFFETTIKFAPANLGYARGVDPPPCDAGTDQDSRWRLQYDVYQYFLPENDLTEEMLLKHLQRMVSVPQVKASALKVVTLTANDKTSVSFSSLPGQGVIYNVIVWDPFLNTSAAYIPAHTYACSFEAGEGSCASLGRVSSKVFFTLFALLGFFICFFGHRFWKTELFFIGFIIMGFFFYILITRLTPIKYDVNLILTAVTGSVGGMFLVAVWWRFGILSICMLCVGLVLGFLISSVTFFTPLGNLKIFHDDGVFWVTFSCIAILIPVVFMGCLRILNILTCGVIGSYSVVLAIDSYWSTSLSYITLNVLKRALNKDFHRAFTNVPFQTNDFIILAVWGMLAVSGITLQIRRERGRPFFPPHPYKLWKQERERRVTNILDPSYHIPPLRERLYGRLTQIKGLFQKEQPAGERTPLLL

SEQ ID NO: 5839 - DNA, 1240 bp, Homo sapien; identical to SEQ ID NO: 3229

SEQ ID NO: 5840 - protein, 282 aa, Homo sapien; identical to SEQ ID NO: 3230

SEQ ID NO: 5841 - DNA, 1589 bp, Homo sapien; identical to SEQ ID NO: 3257

SEQ ID NO: 5842 - protein, 142 aa, Homo sapien; identical to SEQ ID NO: 3258

SEQ ID NO: 5843 - DNA, 760 bp, Homo sapien; identical to SEQ ID NO: 3335

SEQ ID NO: 5844 - protein, 115 aa, Homo sapien; identical to SEQ ID NO: 3336

SEQ ID NO: 5845 - DNA, 2135 bp, Homo sapien; identical to SEQ ID NO: 639

SEQ ID NO: 5846 - protein, 331 aa, Homo sapien; identical to SEQ ID NO: 640

SEQ ID NO: 5847 - DNA, 2427 bp, Homo sapien; identical to SEQ ID NO: 3829

SEQ ID NO: 5848 - protein, 531 aa, Homo sapien; identical to SEQ ID NO: 3830

SEQ ID NO: 5849 - DNA, 1554 bp, Homo sapien; identical to SEQ ID NO: 3309

SEQ ID NO: 5850 - protein, 391 aa, Homo sapien; identical to SEQ ID NO: 3310

SEQ ID NO: 5851 - DNA, 2308 bp, Homo sapien
agcaggtttcgaatgctctttacttcctttgtggagcaaaagaaaaaagcaggagtatttgaacaaatcactaagactcatggaacaattattggcattacttcagggattgtcttggtccttctcattatttctattttagtacaagtgaaacagcctcgaaaaaaggtcatggcttgcaaaaccgcttttaataaaaccgggttccaagaagtgtttgatcctcctcattatgaactgttttcactaagggacaaagagatttctgcagacctggcagacttgtcggaagaattggacaactaccagaggatgcggcgctcctccaccgcctcccgctgcatccacgaccaccactgtgggtcgcaggcctccagcgtcaaacaaagcaggaccaacctcagttccatggagcttcctctccgaaatgactttgcacaaccacagccaatgaaaacatttaatagcaccttcaagaaaagtagttacactttcaaacagggacatgagtgccctgagcaggccctggaagaccgagtaatggaggagattccctgtgaaatttatgtcagggggcgagaagattctgcacaagcatccatatccattgacttctaatcttctgctaatggtgatgtgaattcttagggtgtgtacgtacgcagcctccagggcaccatactgtttccagcagccaacccttttctcccatcacaactacgaagaccttgatttaccgttaacctattgtatggtgatgtttttattctctcaggcagtctatatatgttaaaccaatcaaggaacttactctattcagtggaaacaataatcatctctattgcttggtgtcatttataggaagcactgccagttaaagagcattagaagaggtggttggatggagccaggctcaggctgcctcttcgttttagcaacaagaagactgctcttgactgataacagctctgtcaatattttgatgccacaataaacttgatttttctttacattccttttatttttcctttctctaaatttaatttgttttataagcctatcgttttaccatttcattttcttacataagtacaagtggttaatgtaccacatacttcagtataggcatttgttcttgagtgtgtcaaaatacagctagttactgtgccaattaagacccagttgtatttcacccatctgtttcttcttggctaatctctgtacttctgccttttaattactgggcccttattccttattttctgtgagaaataatagatgatatgatttattacctttcaattatatttttctcagttatactagaaaatttcataatcctgggatatatgtaccattgtcagctatgactaaaaatttgaaaaagataaaaatttctagcaagcctttgaagtttaccaagtatagtcacattcagtgacagcccattcattccagtaaagaatcatttcattcactttgggagaggcctataattacatttatttgcaatgtttctcttcgctagattgttacatagctcccattctgttggttttgcttacagcatatggtaaccaaggttagatgccagttaaaattccttagaaattggatgagccttgagattgcttcttaactgggacatgacatttttctagctcttatcaagaataacaacttccacttttttttaaactgcacttttgactttttttatggtataaaaacaataatttataaacataaaagctcattgtgttttttagacttttgatattatttgatactgtacaaactttattaaatcaagatgaaagacctacaggacagattcctttcagtgttcacatcagtggctttgtatgcaaatatgctgtgttggacctggacgctataacttattgtaaagaccttggaaatgtggacataagctctttctttccttttgttactgtatttagtttgtgataaatttttcactgtgtgatatttatgctctaaatcactacacaaatcccatattaaaatatacattgtacctgaccctttaatcatgttatttatgccaccaaggttgtggatcttaaggtatgtatggaaaggaactcatttatcaaattgtaagtaatacagacatgccatttaaaagaggtaaattcttgttttctatattttgttagtaaattctcaatgaaataagttgaagtttcactggatttcattaacttttaaatattacatatatgtgttttctcagattagtgaaaattgtgaccttaaatttaatacacatatactgcctcag

SEQ ID NO: 5852 - protein, 201 aa, Homo sapien
MLFTSFVEQKKKAGVFEQITKTHGTIIGITSGIVLVLLIISILVQVKQPRKKVMACKTAFNKTGFQEVFDPPHYELFSLRDKEISADLADLSEELDNYQRMRRSSTASRCIHDHHCGSQASSVKQSRTNLSSMELPLRNDFAQPQPMKTFNSTFKKSSYTFKQGHECPEQALEDRVMEEIPCEIYVRGREDSAQASISIDF

SEQ ID NO: 5853 - DNA, 3760 bp, Homo sapien
tttatattaacccctgatgacttcactgtaaaaacaaatatttctgaagtaaatgctgctactcttcttttgggaatagagaatcaacataaaataagtgttcctagagcacctacaaaagaggaaatgtctctcagagcttatactgctcggtgtaggttaaacagactacgtcgtgcagcatgccgtttgtttacttctgaaaaaatggttaaagctattaaaaagcttgaaattgaaattgaagctaggcggttaattgttcgaaaagatagacacctatggaaagatgtgggagaacgtcagaaagtcctgaattggctgttgtcctacaatcctttgtggcttcgaattggtctagagacaacttatggagaactcatatctttggaagataacagtgatgtcacagggttggctatgtttattctgaatcgcctactttggaatcctgatatagcagctgagtatagacaccccactgttcctcacctgtatagagatggtcatgaagaagctttgtccaagtttacattgaaaaagttattgttgttggtctgttttcttgattatgctaaaatttccagactcattgatcatgatccttgtctcttctgtaaagatgccgaattcaaggctagtaaagaaatccttttggctttttcacgagatttcctaagtggtgaaggtgacctttcccgtcaccttggcttattgggattacctgttaaccatgttcagacaccatttgatgaatttgattttgccgttacaaatcttgccgtagacttgcaatgtggagtgcgccttgtgcgaaccatggaacttctcacacagaactgggacctctcaaagaaactcaggattccggcaataagtcgtcttcaaaagatgcacaatgttgacattgttcttcaagttcttaaatcacgaggaattgaattaagtgatgagcatggaaatacaattctatctaaggatattgtggataggcacagagaaaaaactctcaggttgctttggaaaatagcgtttgcttttcaggtggatatttcccttaacttagatcaattaaaggaagaaattgcctttctaaaacacacaaagagtataaagaaaacaatatctctactatcatgccattttgatgatcttattaataagaaaaaaggcaaaagggatagtggttcctttgaacaatatagtgaaaacataaagttattgatggattgggtaaatgctgtttgtgccttctataataaaaaggtggagaattttacagtgtctttctcagacggccgtgtgttatgttacctgatccaccattaccatccttgctatgtgccatttgacgctatatgtcagcgtactactcaaactgtggaatgtacgcaaactggttcagtggtattaaattcatcatctgaatctgatgacagttctctggatatgtctcttaaagcatttgatcatgaaaatacttcagagctatacaaagagctcctagaaaatgaaaagaaaaattttcacttggttaggtctgcagttagagaccttggtggaatacctgctatgattaatcattcagatatgtcaaatacaattccagatgaaaaggtggttattacctatttgtcatttctttgtgcaaggcttttggatcttcgtaaagaaataagagctgctcgactcatacaaacaacatggagaaaatataaactaaaaacagatctcaaacgccatcaggagagagagaaagctgcaagaattattcaattggctgtaatcaattttctagcaaaacaaagattgagaaaaagagttaatgcagcactcgtcattcagaaatattggcgaagagtcttagcacagagaaaattattaatgttaaaaaaggaaaagctggaaaaagttcaaaataaagcagcatcacttattcaggctatgtggaggagatatagagccaagaaatatttatgtaaagtgaaagctgcctgcaagattcaagcctggtatagatgttggagagcacacaaagaatatctagctatattaaaagctgttaaaattattcaaggttgcttctataccaaactagagagaacacggtttttgaatgtgagagcatcagcaattatcattcagagaaaatggagagctatacttcctgcaaagatagctcatgaacacttcttaatgataaaaagacatcgagctgcttgtttgatccaagcacattatagaggatataaaggaaggcaggtctttcttcggcagaaatctgctgctttgatcatacaaaaatatatacgagccagggaggctggaaagcatgaaaggataaaatatattgaatttaaaaaatctacagttatcctacaagcactggtgcgtggttggctagtacgaaaaagatttttagaacagagagccaaaattcgacttcttcacttcactgcagctgcatattatcacctgaatgctgttagaattcaaagagcctataaactttacctggctgtgaagaatgctaacaagcaggttaattcagtcatctgtattcagagatggtttcgagcaagattacaagaaaagagatttattcagaaatatcatagcatcaaaaagattgagcatgaaggtcaagaatgtctgagccagcgaaatagggctgcatcagtaatacagaaagcagtgcgccattttctcctccgtaaaaagcaggaaaaattcactagtggaatcattaaaattcaggcattatggagaggctattcttggaggaagaaaaatgattgtacaaaaattaaagctatacgactaagtcttcaagttgttaatagggagattcgagaagaaaacaaactctacaaaagaactgcacttgcacttcattaccttttgacatataagcacctttctgccattcttgaggccttaaaacacctagaggtagttactagattgtctccactttgttgtgagaacatggcccagagtggagcaatttctaaaatatttgttttgatccgaagttgtaatcgcagtattccttgtatggaagtcatcagatatgctgtgcaagtcttgcttaatgtatctaagtatgagaaaactacttcagcagtttatgatgtagaaaattgtatagatatactattggagcttttgcagatataccgagaaaagcctggtaataaagttgcagacaaaggcggaagcatttttacaaaaacttgttgtttgttggctattttactgaagacaacaaatagagcctctgatgtacgaagtaggtccaaagttgttgaccgtatttacagtctctacaaacttacagctcataaacataaaatgaatactgaaagaatactttacaagcaaaagaagaattcttctataagcattccttttatcccagaaacacctgtaaggaccagaatagtttcaagacttaagccagattgggttttgagaagagataacatggaagaaatcacaaatcccctgcaagctattcaaatggtgatggatacgcttggcattccttattagtaaatgtaaacattttcagtatgtatagtgtaaagaaatattaaagccaatcatgagtacgtaaagtgatttttgctctccgtgtacaacttttaaaatctgactttgttttaaaaaaacataaactgttcattacattcttcatttttatcatttatagttttatgcatgtaataaactaatatgtcataaaaaaaaaaaaaaa

SEQ ID NO: 5854 - protein, 1142 aa, Homo sapien
MSLRAYTARCRLNRLRRAACRLFTSEKMVKAIKKLEIEIEARRLIVRKDRHLWKDVGERQKVLNWLLSYNPLWLRIGLETTYGELISLEDNSDVTGLAMFILNRLLWNPDIAAEYRHPTVPHLYRDGHEEALSKFTLKKLLLLVCFLDYAKISRLIDHDPCLFCKDAEFKASKEILLAFSRDFLSGEGDLSRHLGLLGLPVNHVQTPFDEFDFAVTNLAVDLQCGVRLVRTMELLTQNWDLSKKLRIPAISRLQKMHNVDIVLQVLKSRGIELSDEHGNTILSKDIVDRHREKTLRLLWKIAFAFQVDISLNLDQLKEEIAFLKHTKSIKKTISLLSCHFDDLINKKKGKRDSGSFEQYSENIKLLMDWVNAVCAFYNKKVENFTVSFSDGRVLCYLIHHYHPCYVPFDAICQRTTQTVECTQTGSVVLNSSSESDDSSLDMSLKAFDHENTSELYKELLENEKKNFHLVRSAVRDLGGIPAMINHSDMSNTIPDEKVVITYLSFLCARLLDLRKEIRAARLIQTTWRKYKLKTDLKRHQEREKAARIIQLAVINFLAKQRLRKRVNAALVIQKYWRRVLAQRKLLMLKKEKLEKVQNKAASLIQAMWRRYRAKKYLCKVKAACKIQAWYRCWRAHKEYLAILKAVKIIQGCFYTKLERTRFLNVRASAIIIQRKWRAILPAKIAHEHFLMIKRHRAACLIQAHYRGYKGRQVFLRQKSAALIIQKYIRAREAGKHERIKYIEFKKSTVILQALVRGWLVRKRFLEQRAKIRLLHFTAAAYYHLNAVRIQRAYKLYLAVKNANKQVNSVICIQRWFRARLQEKRFIQKYHSIKKIEHEGQECLSQRNRAASVIQKAVRHFLLRKKQEKFTSGIIKIQALWRGYSWRKKNDCTKIKAIRLSLQVVNREIREENKLYKRTALALHYLLTYKHLSAILEALKHLEVVTRLSPLCCENMAQSGAISKIFVLIRSCNRSIPCMEVIRYAVQVLLNVSKYEKTTSAVYDVENCIDILLELLQIYREKPGNKVADKGGSIFTKTCCLLAILLKTTNRASDVRSRSKVVDRIYSLYKLTAHKHKMNTERILYKQKKNSSISIPFIPETPVRTRIVSRLKPDWVLRRDNMEEITNPLQAIQMVMDTLGIPY

SEQ ID NO: 5855 - DNA, 1680 bp, Homo sapien; identical to SEQ ID NO: 3331

SEQ ID NO: 5856 - protein, 185 aa, Homo sapien; identical to SEQ ID NO: 3332

SEQ ID NO: 5857 - DNA, 1047 bp, Homo sapien; identical to SEQ ID NO: 3585

SEQ ID NO: 5858 - protein, 171 aa, Homo sapien; identical to SEQ ID NO: 3586

SEQ ID NO: 5859 - DNA, 636 bp, Homo sapien; identical to SEQ ID NO: 3249

SEQ ID NO: 5860 - protein, 108 aa, Homo sapien; identical to SEQ ID NO: 3250

SEQ ID NO: 5861 - DNA, 1032 bp, Homo sapien
ataacacacatcacactgtttaagagtgggggaaagaatagtcatactgttagagcacaatgtttcctgaaaagaaactgatcaaaacgtttgaagcctttttagttgcctcaaagtgtgacagccactcaatactgctcctaacagtctgctttcagataacgtcataaaataaaataactgtgtgaaaagccatggccttcaaaaaactttatttggttatgagccaagctctgataggaaaagcccacctacgaaaaaaaggtgtgggtatttaagctggtctgattcacagagcttgtacattcatgactcaaaataacacaccctcaaacccaaatgattctaaagccatttcaaccttaaatcatgttattcccttagatgtgcttacattagctttaaaaaatgatctacgtgcagagaggagctgcgccttcctcacaattaattgaaacatgaccaaaaaacggggcataggcaaaaaagtgacatttaaatagcgtatgagggtctctcctcctttactcaatgaacacatatccagaatgagattgaaatggaatcaatgcccaggagcctctcaaagagagcatctccctgtagccaacatgatctggatcctcctaacacaaagcaacccaactactccagctacacaaagccagtaggcctacatatgaaacgcaaaggggttgcatcccccacggtttaaacctaacccatgttagctgcaactccactacagtcttgatcacttagctcaggaaacaaacacccagcaacaaccctcgtatctcattaataccaatctgtggccctcactgactcagtggtacttttttataaaaatatctgaagaagtggcaaacggttacaacggatgtcaggtcgaagcaattccaaaagctgagaaaacgcttcatccgctgcttgtcttctccccctattgctacagttctgccaccaaagggggaaaattacgtgaatatgattgttgtgaccaagccttggcaaaagtcaataaataac

SEQ ID NO: 5862 - DNA, 1816 bp, Homo sapien
gcacgagcgatgtcgctcgtgctgctaagcctggccgcgctgtgcaggagcgccgtaccccgagagccgaccgttcaatgtggctctgaaactgggccatctccagagtggatgctacaacatgatctaatccccggagacttgagggacctccgagtagaacctgttacaactagtgttgcaacaggggactattcaattttgatgaatgtaagctgggtactccgggcagatgccagcatccgcttgttgaaggccaccaagatttgtgtgacgggcaaaagcaacttccagtcctacagctgtgtgaggtgcaattacacagaggccttccagactcagaccagaccctctggtggtaaatggacattttcctacatcggcttccctgtagagctgaacacagtctatttcattggggcccataatattcctaatgcaaatatgaatgaagatggcccttccatgtctgtgaatttcacctcaccaggctgcctagaccacataatgaaatataaaaaaaagtgtgtcaaggccggaagcctgtgggatccgaacatcactgcttgtaagaagaatgaggagacagtagaagtgaacttcacaaccactcccctgggaaacagatacatggctcttatccaacacagcactatcatcgggttttctcaggtgtttgagccacaccagaagaaacaaacgcgagcttcagtggtgattccagtgactggggatagtgaaggtgctacggtgcagctgactccatattttcctacttgtggcagcgactgcatccgacataaaggaacagttgtgctctgcccacaaacaggcgtccctttccctctggataacaacaaaagcaagccgggaggctggctgcctctcctcctgctgtctctgctggtggccacatgggtgctggtggcagggatctatctaatgtggaggcacgaaaggatcaagaagacttccttttctaccaccacactactgccccccattaaggttcttgtggtttacccatctgaaatatgtttccatcacacaatttgttacttcactgaatttcttcaaaaccattgcagaagtgaggtcatccttgaaaagtggcagaaaaagaaaatagcagagatgggtccagtgcagtggcttgccactcaaaagaaggcagcagacaaagtcgtcttccttctttccaatgacgtcaacagtgtgtgcgatggtacctgtggcaagagcgagggcagtcccagtgagaactctcaagactcttccccttgcctttaaccttttctgcagtgatctaagaagccagattcatctgcacaaatacgtggtggtctactttagagagattgatacaaaagacgattacaatgctctcagtgtctgccccaagtaccacctcatgaaggatgccactgctttctgtgcagaacttctccatgtcaagtagcaggtgtcagcaggaaaaagatcacaagcctgccacgatggctgctgctccttgtagcccacccatgagaagcaagagaccttaaaggcttcctatcccaccaattacagggaaaaaacgtgtgatgatcctgaagcttactatgcagcctacaaacagccttagtaattaaaacattttataccaataaaattttcaaatattgctaactaatgtagcattaactaacgattggaaactacatttacaacttcaaagctgttttatacatagaaatcaattacagttttaattgaaaactataaccattttgataatgcaacaataaagcatcttcagccaaaaaaaaaaaaaaaa

SEQ ID NO: 5863 - protein, 426 aa, Homo sapien
MSLVLLSLAALCRSAVPREPTVQCGSETGPSPEWMLQHDLIPGDLRDLRVEPVTTSVATGDYSILMNVSWVLRADASIRLLKATKICVTGKSNFQSYSCVRCNYTEAFQTQTRPSGGKWTFSYIGFPVELNTVYFIGAHNIPNANMNEDGPSMSVNFTSPGCLDHIMKYKKKCVKAGSLWDPNITACKKNEETVEVNFTTTPLGNRYMALIQHSTIIGFSQVFEPHQKKQTRASVVIPVTGDSEGATVQLTPYFPTCGSDCIRHKGTVVLCPQTGVPFPLDNNKSKPGGWLPLLLLSLLVATWVLVAGIYLMWRHERIKKTSFSTTTLLPPIKVLVVYPSEICFHHTICYFTEFLQNHCRSEVILEKWQKKKIAEMGPVQWLATQKKAADKVVFLLSNDVNSVCDGTCGKSEGSPSENSQDSSPCL

SEQ ID NO: 5864 - DNA, 487 bp, Homo sapien
  Unsure 22: Unknown base
ccgtgatgtggcgcctgcacantcctttccctttcggattcccgacgctgtggttgctgtaaggggtcctccctgcgccacacggccgtcgccatggtgaagctgagcaaagaggccaagcagagactacagcagctcttcaaggggagccagtttgccattcgctggggctttatccctcttgtgatttacctgggatttaagaggggtgcagatcccggaatgcctgaaccaactgttttgagcctactttggggataaaggattatttggtcttctggatttggaggcaatcagcggacagcatggaagatgtgtgctctggctcggataagagatgggacatcattcagtcactagttggatggcacaaggctcttcacagacgcatctgtagcagagtggaacttgtactaacttatgatagaatgtatcagaataaatgtttttaacagtgtaaaaaaaaaaaaaaaaaaaaaaaaaaaaa

SEQ ID NO: 5865 - protein, 55 aa, Homo sapien
  Unsure 22: Unknown amino acid
MVKLSKEAKQRLQQLFKGSQFAIRWGFIPLVIYLGFKRGADPGMPEPTVLSLLWG

SEQ ID NO: 5866 - DNA, 1926 bp, Homo sapien
gctgctcccgctcgcgtcggtggcgtttttcctgcagcgcgtgcgtgctgcgctactgagcagcgccatggaggactctgaagcactgggcttcgaacacatgggcctcgatccccggctccttcaggctgtcaccgatctgggctggtcgcgacctacgctgatccaggagaaggccatcccactggccctagaagggaaggacctcctggctcgggcccgcacgggctccgggaagacggccgcttatgctattccgatgctgcagctgttgctccataggaaggcgacaggtccggtggtagaacaggcagtgagaggccttgttcttgttcctaccaaggagctggcacggcaagcacagtccatgattcagcagctggctacctactgtgctcgggatgtccgagtggccaatgtctcagctgctgaagactcagtctctcagagagctgtgctgatggagaagccagatgtggtagtagggaccccatctcgcatattaagccacttgcagcaagacagcctgaaacttcgtgactccctggagcttttggtggtggatgaagctgaccttcttttttcctttggctttgaagaagagctcaagagtctcctctgtcacttgccccggatttaccaggcttttctcatgtcagctacttttaacgaggacgtacaagcactcaaggagctgatattacataacccggttacccttaagttacaggagtcccagctgcctgggccagaccagttacagcagtttcaggtggtctgtgagactgaggaagacaaattcctcctgctgtatgccctgctcaagctgtcattgattcggggcaagtctctgctctttgtcaacactctagaacggagttaccggctacgcctgttcttggaacagttcagcatccccacctgtgtgctcaatggagagcttccactgcgctccaggtgccacatcatctcacagttcaaccaaggcttctacgactgtgtcatagcaactgatgctgaagtcctgggggccccagtcaagggcaagcgtcggggccgagggcccaaaggggacaaggcctctgatccggaagcaggtgtggcccggggcatagacttccaccatgtgtctgctgtgctcaactttgatcttcccccaacccctgaggcctacatccatcgagctggcaggacagcacgcgctaacaacccaggcatagtcttaacctttgtgcttcccacggagcagttccacttaggcaagattgaggagcttctcagtggagagaacaggggccccattctgctcccctaccagttccggatggaggagatcgagggcttccgctatcgctgcagggatgccatgcgctcagtgactaagcaggccattcgggaggcaagattgaaggagatcaaggaagagcttctgcattctgagaagcttaagacatactttgaagacaaccctagggacctccagctgctgcggcatgacctacctttgcaccccgcagtggtgaagccccacctgggccatgttcctgactacctggttcctcctgctctccgtggcctggtacgccctcacaagaagcggaagaagctgtcttcctcttgtaggaaggccaagagagcaaagtcccagaacccactgcgcagcttcaagcacaaaggaaagaaattcagacccacagccaagccctcctgaggttgttgggcctctctggagctgagcacattgtggagcacaggcttacacccttcgtggacaggcgaggctctggtgcttactgcacagcctgaacagacagttctggggccggcagtgctgggccctttagctccttggcacttccaagctggcatcttgccccttgacaacagaataaaaattttagctgccccaaaaaaaaaaaaaaaaaa

SEQ ID NO: 5867 - protein, 547 aa, Homo sapien
MEDSEALGFEHMGLDPRLLQAVTDLGWSRPTLIQEKAIPLALEGKDLLARARTGSGKTAAYAIPMLQLLLHRKATGPVVEQAVRGLVLVPTKELARQAQSMIQQLATYCARDVRVANVSAAEDSVSQRAVLMEKPDVVVGTPSRILSHLQQDSLKLRDSLELLVVDEADLLFSFGFEEELKSLLCHLPRIYQAFLMSATFNEDVQALKELILHNPVTLKLQESQLPGPDQLQQFQVVCETEEDKFLLLYALLKLSLIRGKSLLFVNTLERSYRLRLFLEQFSIPTCVLNGELPLRSRCHIISQFNQGFYDCVIATDAEVLGAPVKGKRRGRGPKGDKASDPEAGVARGIDFHHVSAVLNFDLPPTPEAYIHRAGRTARANNPGIVLTFVLPTEQFHLGKIEELLSGENRGPILLPYQFRMEEIEGFRYRCRDAMRSVTKQAIREARLKEIKEELLHSEKLKTYFEDNPRDLQLLRHDLPLHPAVVKPHLGHVPDYLVPPALRGLVRPHKKRKKLSSSCRKAKRAKSQNPLRSFKHKGKKFRPTAKPS

SEQ ID NO: 5868 - DNA, 1199 bp, Homo sapien
actcccaacgagcgcccaagaagaaaatggccataagtggagtccctgtgctaggatttttcatcatagctgtgctgatgagcgctcaggaatcatgggctatcaaagaagaacatgtgatcatccaggccgagttctatctgaatcctgaccaatcaggcgagtttatgtttgactttgatggtgatgagattttccatgtggatatggcaaagaaggagacggtctggcggcttgaagaatttggacgatttgccagctttgaggctcaaggtgcattggccaacatagctgtggacaaagccaacctggaaatcatgacaaagcgctccaactatactccgatcaccaatgtacctccagaggtaactgtgctcacgaacagccctgtggaactgagagagcccaacgtcctcatctgtttcatcgacaagttcaccccaccagtggtcaatgtcacgtggcttcgaaatggaaaacctgtcaccacaggagtgtcagagacagtcttcctgcccagggaagaccaccttttccgcaagttccactatctccccttcctgccctcaactgaggacgtttacgactgcagggtggagcactggggcttggatgagcctcttctcaagcactgggagtttgatgctccaagccctctcccagagactacagagaacgtggtgtgtgccctgggcctgactgtgggtctggtgggcatcattattgggaccatcttcatcatcaagggagtgcgcaaaagcaatgcagcagaacgcagggggcctctgtaaggcacatggaggtgatgatgtttcttagagagaagatcactgaagaaacttctgctttaatgactttacaaagctggcaatattacaatccttgacctcagtgaaagcagtcatcttcagcgttttccagccctatagccaccccaagtgtggttatgcctcctcgattgctccgtactctaacatctagctggctttccctgtctattgccttttcctgtatctattttcctctatttcctatcattttattatcaccatgcaatgcctctggaataaaacatacaggagtctgtctctgctatggaatgccccatggggctctcttgtgtacttattgtttaaggtttcctcaaactgtgatttttctgaacacaataaactattttgatgatcttgggtggaaaa

SEQ ID NO: 5869 - protein, 254 aa, Homo sapien; identical to SEQ ID NO: 1854

SEQ ID NO: 5870 - DNA, 2820 bp, Homo sapien; identical to SEQ ID NO: 1863

SEQ ID NO: 5871 - protein, 253 aa, Homo sapien; identical to SEQ ID NO: 1864

SEQ ID NO: 5872 - DNA, 1048 bp, Homo sapien; identical to SEQ ID NO: 3193

SEQ ID NO: 5873 - protein, 245 aa, Homo sapien; identical to SEQ ID NO: 3194

SEQ ID NO: 5874 - DNA, 3003 bp, Homo sapien; identical to SEQ ID NO: 371

SEQ ID NO: 5875 - protein, 198 aa, Homo sapien; identical to SEQ ID NO: 372

SEQ ID NO: 5876 - DNA, 1578 bp, Homo sapien
aggaggcctcgtggaggacacagcagcatgggacagtcagggaggtcccggcaccagaagcgcgcccgcgcccaggcgcagctccgcaacctcgaggcctatgccgcgaacccgcactcgttcgtgttcacgcgaggctgcacgggtcgcaacatccggcagctcagcctggacgtgcggcgggtcatggagccgctcactgccagccgtctgcaggttcgtaagaagaactcgctgaaggactgcgtggcagtggctgggcccctcggggtcacacactttctgatcctgagcaaaacagagaccaatgtctactttaagctgatgcgcctcccaggaggccccaccttgaccttccaggtgaagaagtactcgctggtgcgtgatgtggtctcctcactgcgccggcaccgcatgcacgagcagcagtttgcccacccacccctcctggtactcaacagctttggcccccatggtatgcatgtgaagctcatggccaccatgttccagaacctgttcccctccatcaacgtgcacaaggtgaacctgaacaccatcaagcgctgcctcctcatcgactacaaccccgactcccaggagctggacttccgccactatagcatcaaagttgttcctgtgggcgcgagtcgcgggatgaagaagctgctccaggagaagttccccaacatgagccgcctgcaggacatcagcgagctgctggccacgggcgcggggctgtcggagagcgaggcagagcctgacggcgaccacaacatcacagagctgcctcaggctgtcgctggccgtggcaacatgcgggcccagcagagtgcagtgcggctcaccgagatcggcccgcggatgacactgcagctcatcaaggtccaggagggcgtcggggagggcaaagtgatgttccacagttttgtgagcaagacggaggaggagctgcaggccatcctggaagccaaggagaagaagctgcggctgaaggcgcagaggcaggcccagcaggcccagaatgtgcagcgcaagcaggagcagcgggaggcccacagaaagaagagcctggagggcatgaagaaggcacgggtcgggggtagtgatgaagaggcctctgggatcccttcaaggacggcgagcctggagttgggtgaggacgatgatgaacaggaagatgatgacatcgagtatttctgccaggcggtgggcgaggcgcccagtgaggacctgttccccgaggccaagcagaaacggcttgccaagtctccagggcggaagcggaagcggtgggaaatggatcgaggcaggggtcgcctttgtgaccagaagtttcccaagaccaaggacaagtcccagggagcccaggccaggcgggggcccagaggggcttcccgggatggtgggcgaggccggggccggggccgcccagggaagagagtggcctgagcccaagccgcaccggagcagcggctggattgaacgccccagattggggcccgagatgtggccctcggtttcctttcataaaggagttgtgtccccagcccttccactccagtaaagaactgaattggc

SEQ ID NO: 5877 - protein, 473 aa, Homo sapien
MGQSGRSRHQKRARAQAQLRNLEAYAANPHSFVFTRGCTGRNIRQLSLDVRRVMEPLTASRLQVRKKNSLKDCVAVAGPLGVTHFLILSKTETNVYFKLMRLPGGPTLTFQVKKYSLVRDVVSSLRRHRMHEQQFAHPPLLVLNSFGPHGMHVKLMATMFQNLFPSINVHKVNLNTIKRCLLIDYNPDSQELDFRHYSIKVVPVGASRGMKKLLQEKFPNMSRLQDISELLATGAGLSESEAEPDGDHNITELPQAVAGRGNMRAQQSAVRLTEIGPRMTLQLIKVQEGVGEGKVMFHSFVSKTEEELQAILEAKEKKLRLKAQRQAQQAQNVQRKQEQREAHRKKSLEGMKKARVGGSDEEASGIPSRTASLELGEDDDEQEDDDIEYFCQAVGEAPSEDLFPEAKQKRLAKSPGRKRKRWEMDRGRGRLCDQKFPKTKDKSQGAQARRGPRGASRDGGRGRGRGRPGKRVA

SEQ ID NO: 5878 - DNA, 2121 bp, Homo sapien
  Unsure 1524: Unknown base
atgggggacgagcggccccactactacgggaaacacggaacgccacagaagtatgatcccactttcaaaggacccatttacaataggggctgcacggatatcatatgctgtgtgttcctgctcctggccattgtgggctacgtggctgtaggcatcatagcctggactcatggagaccctcgaaaggtgatctaccccactgatagccggggcgagttctgcgggcagaagggcacaaaaaacgagaacaaaccctatctgttttatttcaacattgtgaaatgtgccagccccctggttctgctggaattccaatgtcccactccccagatctgcgtggaaaaatgccccgaccgctacctcacgtacctgaatgctcgcagctcccgggactttgagtactataagcagttctgtgttcctggcttcaagaacaataaaggagtggctgaggtgcttcgagatggtgactgccctgctgtcctcatccccagcaaacccttggcccggagatgcttccccgctatccacgcctacaagggtgtcctgatggtgggcaatgagacgacctatgaggatgggcatggctcccggaaaaacatcacagacctggtggagggcgccaagaaagccaatggagtcctagaggcgcggcaactcgccatgcgcatatttgaagattacaccgtctcttggtactggattatcataggcctggtcattgccatggcgatgagcctcctgttcatcatcctgcttcgcttcctggctggtattatggtctgggtgatgatcatcatggtgattctggtgctgggctacggaatatttcactgctacatggagtactcccgactgcgtggtgaggccggctctgatgtctctttggtggacctcggctttcagacggatttccgggtgtacctgcacttacggcagacctggttggcctttatgatcattctgagtatccttgaagtcattatcatcttgctgctcatctttctccggaagagaattctcatcgcgattgcactcatcaaagaagccagcagggctgtgggatacgtcatgtgctccttgctctacccactggtcaccttcttcttgctgtgcctctgcatcgcctactgggccagcactgctgtcttcctgtccacttccaacgaagcggtctataagatctttgatgacagcccctgcccatttactgcgaaaacctgcaacccagagaccttcccctcctccaatgagtcccgccaatgccccaatgcccgttgccagttcgccttctacggtggtgagtcgggctaccaccgggccctgctgggcctgcagatcttcaatgccttcatgttcttctggttggccaacttcgtgctggcgctgggccaggtcacgctggccggggcctttgcctcctattactgggccctgcgcaagccggacgacctgccggccttcccgctcttctctgcctttggccgggcgctcaggtaccacacaggctccctggcctttggngcgctcatcctggccattgtgcagatcatccgtgtgatactcgagtacctggatcagcggctgaaaggtgcagagaacaagtttgccaagtgcctcatgacctgtctcaaatgctgcttctggtgcctggagaagttcatcaaattccttaataggaatgcctacatcatgattgccatctacggcaccaatttctgcacctcggccaggaatgccttcttcctgctcatgagaaacatcatcagagtggctgtcctggataaagttactgacttcctcttcctgttgggcaaacttctgatcgttggtagtgtggggatcctggctttcttcttcttcacccaccgtatcaggatcgtgcaggatacagcaccacccctcaattattactgggttcctatactgacggtgatcgttggctcctacttgattgcacacggtttcttcagcgtctatggcatgtgtgtggacacgctgttcctctgcttcttggaggacctggagaggaatgacggctcggccgagaggccttacttcatgtcttccaccctcaagaaactcttgaacaagaccaacaagaaggcagcggagtcctga

SEQ ID NO: 5879 - protein, 706 aa, Homo sapien
  Unsure 1524: Unknown amino acid
MGDERPHYYGKHGTPQKYDPTFKGPIYNRGCTDIICCVFLLLAIVGYVAVGIIAWTHGDPRKVIYPTDSRGEFCGQKGTKNENKPYLFYFNIVKCASPLVLLEFQCPTPQICVEKCPDRYLTYLNARSSRDFEYYKQFCVPGFKNNKGVAEVLRDGDCPAVLIPSKPLARRCFPAIHAYKGVLMVGNETTYEDGHGSRKNITDLVEGAKKANGVLEARQLAMRIFEDYTVSWYWIIIGLVIAMAMSLLFIILLRFLAGIMVWVMIIMVILVLGYGIFHCYMEYSRLRGEAGSDVSLVDLGFQTDFRVYLHLRQTWLAFMIILSILEVIIILLLIFLRKRILIAIALIKEASRAVGYVMCSLLYPLVTFFLLCLCIAYWASTAVFLSTSNEAVYKIFDDSPCPFTAKTCNPETFPSSNESRQCPNARCQFAFYGGESGYHRALLGLQIFNAFMFFWLANFVLALGQVTLAGAFASYYWALRKPDDLPAFPLFSAFGRALRYHTGSLAFGALILAIVQIIRVILEYLDQRLKGAENKFAKCLMTCLKCCFWCLEKFIKFLNRNAYIMIAIYGTNFCTSARNAFFLLMRNIIRVAVLDKVTDFLFLLGKLLIVGSVGILAFFFFTHRIRIVQDTAPPLNYYWVPILTVIVGSYLIAHGFFSVYGMCVDTLFLCFLEDLERNDGSAERPYFMSSTLKKLLNKTNKKAAES

SEQ ID NO: 5880 - DNA, 1508 bp, Homo sapien; identical to SEQ ID NO: 3435

SEQ ID NO: 5881 - protein, 241 aa, Homo sapien; identical to SEQ ID NO: 3436

SEQ ID NO: 5882 - DNA, 808 bp, Homo sapien
tgctcccttgggctctagagaggaggcccctcttagccctcagcccctccttcctctctatcttaaagtaatttgatcctcaggaatttgttccgccctcatctggcccggccaaatcccgatttgacaaatgccaggaaaaggaaactgttgagaaaccgaaactactggggaaagggagggctcactgagtaaccatcccagtaacccgaccgccgctggtcttcgctggacaccatgagtcacactgtccaaaccttcttctctcctgtcaacagtggccagccccccaactatgagatgctcaaggaggagcacgaggtggctgtgctgggggggccccacaaccctgctcccccgacgtccaccgtgatccacatccgcagcgagacctccgtgcccgaccatgtcgtctggtccctgttcaacaccctcttcatgaacccctgctgcctgggcttcatagcattcgcctactccgtgaagtctagggacaggaagatggttggcgacgtgaccggggcccaggcctatgcctccaccgccaagtgcctgaacatctgggccctgattctgggcatcctcatgaccattctgctcatcgtcatcccagtgctgatcttccaggcctatggatagatcaggaggcatcactgaggccaggagctctgcccatgacctgtatcccacgtactccaacttccattcctcgccctgcccccggagccgagtcctgtatcagccctttatcctcacacgcttttctacaatggcattcaataaagtgcacgtgtttctggtgctgctg

SEQ ID NO: 5883 - protein, 133 aa, Homo sapien
MSHTVQTFFSPVNSGQPPNYEMLKEEHEVAVLGGPHNPAPPTSTVIHIRSETSVPDHVVWSLFNTLFMNPCCLGFIAFAYSVKSRDRKMVGDVTGAQAYASTAKCLNIWALILGILMTILLIVIPVLIFQAYG

SEQ ID NO: 5884 - DNA, 1544 bp, Homo sapien; identical to SEQ ID NO: 2288
  Unsure 1358: Unknown base

SEQ ID NO: 5885 - protein, 252 aa, Homo sapien; identical to SEQ ID NO: 2289
  Unsure 1358: Unknown amino acid

SEQ ID NO: 5886 - DNA, 2077 bp, Homo sapien; identical to SEQ ID NO: 588

SEQ ID NO: 5887 - protein, 318 aa, Homo sapien; identical to SEQ ID NO: 589

SEQ ID NO: 5888 - DNA, 1297 bp, Homo sapien; identical to SEQ ID NO: 3086

SEQ ID NO: 5889 - protein, 289 aa, Homo sapien; identical to SEQ ID NO: 3087

SEQ ID NO: 5890 - DNA, 5786 bp, Homo sapien
tcccagcttttcaaaagtttattttaagtttggagactagacaaggtcatactggttttacatcctacgtgatataagtatatatacaaagaaaaaaacaacattggaatattacacagcttgaaggtttgcaaaggttatttgtgtcttagttatttctgcacttaatgacacatcagacgcattgagtatatttcataagttgttgactagcaaagatacaatcattagtaacccaagtcttcaaaattcacaccaaactttatgaagtcattcagaaagagaaagtcaatcctaaaattaaaattggcaactatgataaataccttcaaaaggatgtagatataatggagatgtttaaaagtttagtttcattaattgtaaaattagcatgttatatttactcaatatagtgaagactagggggattcttacatgtattctacttatgggactgtactgggtttaggggggaatttacatagaataaatttacttcactttcatggtcatcgacatgaatgacacaaaagctacttcataatactactttacaatagttttcaacatttccatatggtgcgacccctttgctctcatcaattttgggtgtcatgagaacaataggtatcccgttggacatgatgtattgcgaagagcatataaagcagagggaaaatgaaaaagcaagagaaactcatttcaatgctttttctaaaaggtaacaaatataattttaatcaacttccttggaaaatatttttaaaacaggtatcaatagaaaaaattacaaaacatcatatgaagctataaataattttgaaaaactatatcatcataaagcgtaagtaataatcttaaaaatacactcttaagaaggtatgtaatttgcaaaggaaaatggctagatatctgatgggacagtaaaccttgaaagaaactggctaaagagtaagtgtgtgtatatttctgaacctaagtaattatttgtcacgactttaaaatttagccagttacaaatattttaaaatcctaactttaaagttatctaaaaaaggcaatatggaggaaatagtaattttgtttttgaaagatgttgaaaactgatcaccatttcagaggcttcaaattcataatttcataataagaacaagaagtagaaagcatatgggcaaggaacaaatatgtggccagccagtccccttagacgaactaattttgttcttattaaaaatgccaatacaattgactttctctttaaattcttcactatgattgaagaccactccatatatacatcattaagaaatgctgttaacacatggacagacaagacagtaacagtctagtggcttttgttatgcagcacaaatattaaaggaaaaaaatagcagtgttgcgtaggatcttaacatttcatacacataccatcctttcttttccaatacacttaatttaaaactccaataattctgtctaagccttataaaataaatacttgtaaagcttataaattagatgttgaagacttttatggaggcagtgtgagctttaatttgagagacatgtcaatgaaacctccagtatcaataacaaattgttatgataattgcttattttttcaggacctttgaagcaaaataaatagaaatcagttttcatcttgaaaatggtttactactttgtcattagtaaacactttgcttctcacaaataactccacctgtgccttcctgggaaactaccaccagtttcaaatctcaataagatgttagtttcacaggaaatgtggagctgaacaaagaaatgatgagtatgcttggccgaactatgcagcactatattaatatttctttgctaaatttttataaaataaacaaataagccgattttttaaagtaaatataaggatatgtaattaccatctaaatgaagatttaaatttaaagagacatatatattttttgttcttttgtgcaaactgagagtatgggattctttatgaagcaattatttggaaattaaatagttatggcttccttcaaaaataaaactgcagatttaattaacgaatattaaatacagatcaatctactgataggcagtcatgttctacatatatgagtaaacatgacacttcttttagtcaactaataggaaattcaattagaaaaaaattgaattattcaggtaatatacaatattaagaatgtagaatagaactaaaagaaaaagaagtcacataatctcttattagaaataatgaaagtaaaatgagaattataatatcagtactgcatgttacatattcttctttaaaattttgtaataaacattgacagtgtttggtaggcacagggaaacaggataacgtagagtcattacagaagaaaaaaacttattgctaacattgcagtattccttttatcagaattaggtgagtattgattgtaaaagctctatcaactcttgctcttatttgatgactttgagacttttttactcttgctataaaaagaaggctactttctttccctaatatatttctaccaatgcgaataattcaggaaacaatgagagaaaagtaattcacacttaatgtgttgttacttaagagatttgacggataaaataaaatcaaattaaatcattgaaaaggcaggcttagacccccttaaaaacaccgttagttgcctaccataatttgagcactttttcatgaaaaaaaaaaaaaaaccattcagtttcctacagattttgcacagttcattccatggagatacttttagggaaatagggaagagggttgtgaaatgtagcctcccctcattcctcctctgtgcagcccagcagctctgaccgcaatgtgatcctcccgtaccaggaccaaggaaggattcttatgtgtcgtgcatagatgggagggtcgatgacattttttctgtgagtgtcattgtcaaaatttccctggaaaacctaataaagaagagcagaaaaatgtcagtcacctcgtgccgaattcggcacgagcggacgtgctagatcttcacgaggctgggggcgaagatttcgccatggatgaggatggggacgagagcattcacaaactgaaagaaaaagcgaagaaacggaagggtcgcggctttggctccgaagaggggtcccgagcgcggatgcgtgaggattatgacagcgtggagcaggatggcgatgaacccggaccacaacgctctgttgaaggctggattctctttgtaactggagtccatgaggaagccaccgaagaagacatacacgacaaattcgcagaatatggggaaattaaaaacattcatctcaacctcgacaggcgaacaggatatctgaaggggtatactctagttgaatatgaaacatacaaggaagcccaggctgctatggagggactcaatggccaggatttgatgggacagcccatcagcgttgactggtgttttgttcggggtccaccaaaaggcaagaggagaggtggccgaagacgcagcagaagtccagaccggagacgtcgctgacaggtcctctgttgtccaggtgttctcttcaagattccatttgaccatgcagccttggacaaataggactggggtggaacttgctgtgtttatatttaatctcttaccgtatatgcgtagtatttgagttgcgaataaatgttccatttttgttttctacatttaatgttactttcctgtcctaaaattgaaagttctaaagcatagcaaggctgtatggatcattgtgaagatacttctagggactgaactctatgtatttcttttttttcttttttttgagatagagtcttgctgtgttacccagggtggattgcagctgatcatagctcactgcagcttcaaactcttgggctcaagccatccttctgcctcactgtccctagtagttgggattacaggcacatgccaccatgcccagctaaatttttaatatttttgtagagatggggtcttgctgtgttacctgggctagttatgtgagtttctatattagacatagtctcaagtttcaagtaggggtttaaagtagagacactggtcagtatttcttttttggggggaactaggagagcaggagtagaagtgagatgttaagatcttatggcactaaagacttactattctgttcctacatactctgttaggatcagatagatgttatagaaatgccttttgtttctcctgcccttcttgatgtcacagttttttgtacttccagctgtctaaaggcatgaatctcctcttggagcattctcccagacccttctttagaagagtctatactaagttcttggtgccctcttcggcagccaagggtgaaggccccatagaggagaggatccaaaggagcattgaggaggcccaagaggaaaaggatgtggctcaggctgggagggacttcagttagcatggtgggggagaaccagtaccacatacccagtaggtaataaggtgtccagcagaggatgaaggtcagcaagataagcagggccagtctcagggcccggagacgaacacggggacaattgtcaaaggagcgggggagggcaaattcaccagcaggggctaggaatttagaaaatatactgtaattcagacactcagcttctgatctgagtatagggtgaattgatggaggggcatagctagtgagacagagctcgcctcctacaaggaggagaatgttgcaaaccgttttccccttcccaacctgggactatatgatttcttacccccagggattatgatagaaatatgaagccaccaagtctagacttgatggtgttcaagaataaataatactgattgcctccctagtccttgtccagctaactcagctgtttataattgaagggattcaacaaaattatctctagcatcaggtgctagacatggttagaatctcaccatggtttagtgactggtagatagctattaggtaggtagataaataaatgatgctagaggcaacaggtctagggttaaggattaaggcctgggaattggagtctcaccatggctccccttccttgtctggggcctggacacactgaggacaatgcggctatagcagatggccatggcagtcagtggcagcagaaagaggcagcagaaggtgaagaggttataggtggtctcttgccattgagccttgaagctgcctttggtgacacactgagtgaaagggactgggccagctcagtggaccgtgtggaacaggaacagctggagtggagttgaggactattagaactggttcccctcaccacccaacctacccacctatgtcatactgtctcctcccaattcatccttaattccaagtgaagcagcacagtgctgagaaacagtttcatccatggtgccatgttaaagaagttggaaatatatcttgaaaatcctatcttccttttaggcttgaatatgatgctgaacagtaagtttgttaaatcttggaacttaaaacaatcctgctttctcaagtactattctaacattgcgctttataagggatgatatttctaccacctcactcatatttttagctgaaatgattttcctggtatgtctgttattttgtggaaaaagaaatattgtgtaaaatgggtgctgccaaaattccaggccattttgcagggactctgaagtgacctttagtagtaatagtcttatgtgcagtaactataatggtaaagaatgttaaataataaaatttaacattttccaaatgct

SEQ ID NO: 5891 - protein, 158 aa, Homo sapien
MDEDGDESIHKLKEKAKKRKGRGFGSEEGSRARMREDYDSVEQDGDEPGPQRSVEGWILFVTGVHEEATEEDIHDKFAEYGEIKNIHLNLDRRTGYLKGYTLVEYETYKEAQAAMEGLNGQDLMGQPISVDWCFVRGPPKGKRRGGRRRSRSPDRRRR

SEQ ID NO: 5892 - DNA, 1921 bp, Homo sapien
cctgttgctgatgctgccgtgcggtacttgtcatggagctggcactgcggcgctctcccgtcccgcggtggttgctgctgctgccgctgctgctgggcctgaacgcaggagctgtcattgactggcccacagaggagggcaaggaagtatgggattatgtgacggtccgcaaggatgcctacatgttctggtggctctattatgccaccaactcctgcaagaacttctcagaactgcccctggtcatgtggcttcagggcggtccaggcggttctagcactggatttggaaactttgaggaaattgggccccttgacagtgatctcaaaccacggaaaaccacctggctccaggctgccagtctcctatttgtggataatcccgtgggcactgggttcagttatgtgaatggtagtggtgcctatgccaaggacctggctatggtggcttcagacatgatggttctcctgaagaccttcttcagttgccacaaagaattccagacagttccattctacattttctcagagtcctatggaggaaaaatggcagctggcattggtctagagctttataaggccattcagcgagggaccatcaagtgcaactttgcgggggttgccttgggtgattcctggatctcccccgtggattcggtgctctcctggggaccttacctgtacagcatgtctcttctcgaagacaaaggtctggcagaggtgtctaaggttgcagagcaagtactgaatgccgtaaataaggggctctacagagaggccacagagctgtgggggaaagcagaaatgatcattgaacagaacacagatggggtgaacttctataacatcttaactaaaagcactcccacgtctacaatggagtcgagtctagaattcacacagagccacctagtttgtctttgtcagcgccacgtgagacacctacaacgagatgccttaagccagctcatgaatggccccatcagaaagaagctcaaaattattcctgaggatcaatcctggggaggccaggctaccaacgtctttgtgaacatggaggaggacttcatgaagccagtcattagcattgtggacgagttgctggaggcagggatcaacgtgacggtgtataatggacagctggatctcatcgtagataccatgggtcaggaggcctgggtgcggaaactgaagtggccagaactgcctaaattcagtcagctgaagtggaaggccctgtacagtgaccctaaatctttggaaacatctgcttttgtcaagtcctacaagaaccttgctttctactggattctgaaagctggtcatatggttccttctgaccaaggggacatggctctgaagatgatgagactggtgactcagcaagaataggatggatggggctggagatgagctggtttggccttggggcacagagctgagctgaggccgctgaagctgtaggaagcgccattcttccctgtatctaactggggctgtgatcaagaaggttctgaccagcttctgcagaggataaaatcattgtctctggaggcaatttggaaattatttctgcttcttaaaaaaacctaagattttttaaaaaattgatttgttttgatcaaaataaaggatgataatagatattattttttcttatgacagaagcaaatgatgtgatttatagaaaaactgggaaatacaggtacccaaagagtaaatcaacatctgtatacccccttcccaggggtaagcactgttaccaatttagcatatgtccttgcagaatttttttttctatatatacatatatattttttaccaaaatgaatcattactctatgttgttttactatttgtttgacatatcagtatatctgaaacaccttttcatgtcaataaatgttcttctctaacattaa

SEQ ID NO: 5893 - protein, 452 aa, Homo sapien
MELALRRSPVPRWLLLLPLLLGLNAGAVIDWPTEEGKEVWDYVTVRKDAYMFWWLYYATNSCKNFSELPLVMWLQGGPGGSSTGFGNFEEIGPLDSDLKPRKTTWLQAASLLFVDNPVGTGFSYVNGSGAYAKDLAMVASDMMVLLKTFFSCHKEFQTVPFYIFSESYGGKMAAGIGLELYKAIQRGTIKCNFAGVALGDSWISPVDSVLSWGPYLYSMSLLEDKGLAEVSKVAEQVLNAVNKGLYREATELWGKAEMIIEQNTDGVNFYNILTKSTPTSTMESSLEFTQSHLVCLCQRHVRHLQRDALSQLMNGPIRKKLKIIPEDQSWGGQATNVFVNMEEDFMKPVISIVDELLEAGINVTVYNGQLDLIVDTMGQEAWVRKLKWPELPKFSQLKWKALYSDPKSLETSAFVKSYKNLAFYWILKAGHMVPSDQGDMALKMMRLVTQQE

SEQ ID NO: 5894 - DNA, 3014 bp, Homo sapien
cccccagaagcccatcagactgcccccagcacacggaatggatttctgagaaagaagccgaaacagaaggcccgtgggagtcagcatgccgcgtggctgggccgcccccttgctcctgctgctgctccagggaggctggggctgccccgacctcgtctgctacaccgattacctccagacggtcatctgcatcctggaaatgtggaacctccaccccagcacgctcacccttacctggcaagaccagtatgaagagctgaaggacgaggccacctcctgcagcctccacaggtcggcccacaatgccacgcatgccacctacacctgccacatggatgtattccacttcatggccgacgacattttcagtgtcaacatcacagaccagtctggcaactactcccaggagtgtggcagctttctcctggctgagagcatcaagccggctccccctttcaacgtgactgtgaccttctcaggacagtataatatctcctggcgctcagattacgaagaccctgccttctacatgctgaagggcaagcttcagtatgagctgcagtacaggaaccggggagacccctgggctgtgagtccgaggagaaagctgatctcagtggactcaagaagtgtctccctcctccccctggagttccgcaaagactcgagctatgagctgcaggtgcgggcagggcccatgcctggctcctcctaccaggggacctggagtgaatggagtgacccggtcatctttcagacccagtcagaggagttaaaggaaggctggaaccctcacctgctgcttctcctcctgcttgtcatagtcttcattcctgccttctggagcctgaagacccatccattgtggaggctatggaagaagatatgggccgtccccagccctgagcggttcttcatgcccctgtacaagggctgcagcggagacttcaagaaatgggtgggtgcacccttcactggctccagcctggagctgggaccctggagcccagaggtgccctccaccctggaggtgtacagctgccacccaccacggagcccggccaagaggctgcagctcacggagctacaagaaccagcagagctggtggagtctgacggtgtgcccaagcccagcttctggccgacagcccagaactcggggggctcagcttacagtgaggagagggatcggccatacggcctggtgtccattgacacagtgactgtgctagatgcagaggggccatgcacctggccctgcagctgtgaggatgacggctacccagccctggacctggatgctggcctggagcccagcccaggcctagaggacccactcttggatgcagggaccacagtcctgtcctgtggctgtgtctcagctggcagccctgggctaggagggcccctgggaagcctcctggacagactaaagccaccccttgcagatggggaggactgggctgggggactgccctggggtggccggtcacctggaggggtctcagagagtgaggcgggctcacccctggccggcctggatatggacacgtttgacagtggctttgtgggctctgactgcagcagccctgtggagtgtgacttcaccagccccggggacgaaggacccccccggagctacctccgccagtgggtggtcattcctccgccactttcgagccctggaccccaggccagctaatgaggctgactggatgtccagagctggccaggccactgggccctgagccagagacaaggtcacctgggctgtgatgtgaagacacctgcagcctttggtctcctggatgggcctttgagcctgatgtttacagtgtctgtgtgtgtgtgtgcatatgtgtgtgtgtgcatatgcatgtgtgtgtgtgtgtgtgtcttaggtgcgcagtggcatgtccacgtgtgtgtgtgattgcacgtgcctgtgggcctgggataatgcccatggtactccatgcattcacctgccctgtgcatgtctggactcacggagctcacccatgtgcacaagtgtgcacagtaaacgtgtttgtggtcaacagatgacaacagccgtcctccctcctagggtcttgtgttgcaagttggtccacagcatctccggggctttgtgggatcagggcattgcctgtgactgaggcggagcccagccctccagcgtctgcctccaggagctgcaagaagtccatattgttccttatcacctgccaacaggaagcgaaaggggatggagtgagcccatggtgacctcgggaatggcaattttttgggcggcccctggacgaaggtctgaatcccgactctgataccttctggctgtgctacctgagccaagtcgcctcccctctctgggctagagtttccttatccagacagtggggaaggcatgacacacctgggggaaattggcgatgtcacccgtgtacggtacgcagcccagagcagaccctcaataaacgtcagcttccttccttctgcggccagagccgaggcgggcgggggtgagaacatcaatcgtcagcgacagcctgggcacccgcggggccgtcccgcctgcagagggccactcgggggggtttccaggcttaaaatcagtccgtttcgtctcttggaaacagctccccaccaaccaagatttctttttctaacttctgctactaagtttttaaaaattccctttatgcacccaagagatatttattaaacaccaattacgtagcaggccatggctcatgggacccaccccccgtggcactcatggagggggctgcaggttggaactatgcagtgtgctccggccacacatcctgctgggccccctaccctgccccaattcaatcctgccaataaatcctgtcttatttgttcatcctggagaattgaagggaggtcaagttgtttgtcaatgatttgtcagagaacctgttgaaatgtgaattaagaagctaagaaaataaaaaaaaaaaaaaaaaaaaaaaaaaaaaaaaaaaaaa

SEQ ID NO: 5895 - protein, 538 aa, Homo sapien; identical to SEQ ID NO: 3496

SEQ ID NO: 5896 - DNA, 1853 bp, Homo sapien
gcgagatccctaccgcagtagccgcctctgccgccgcggagcttcccgaacctctcagccgcccggagccgctcccggagcccggccgtagaggctgcaatcgcagccgggagcccgcagcccgcgccccgagcccgccgccgcccttcgagggcgccccaggccgcgccatggtgaaggtgacgttcaactccgctctggcccagaaggaggccaagaaggacgagcccaagagcggcgaggaggcgctcatcatcccccccgacgccgtcgcggtggactgcaaggacccagatgatgtggtaccagttggccaaagaagagcctggtgttggtgcatgtgctttggactagcatttatgcttgcaggtgttattctaggaggagcatacttgtacaaatattttgcacttcaaccagatgacgtgtactactgtggaataaagtacatcaaagatgatgtcatcttaaatgagccctctgcagatgccccagctgctctctaccagacaattgaagaaaatattaaaatctttgaagaagaagaagttgaatttatcagtgtgcctgtcccagagtttgcagatagtgatcctgccaacattgttcatgactttaacaagaaacttacagcctatttagatcttaacctggataagtgctatgtgatccctctgaacacttccattgttatgccacccagaaacctactggagttacttattaacatcaaggctggaacctatttgcctcagtcctatctgattcatgagcacatggttattactgatcgcattgaaaacattgatcacctgggtttctttatttatcgactgtgtcatgacaaggaaacttacaaactgcaacgcagagaaactattaaaggtattcagaaacgtgaagccagcaattgtttcgcaattcggcattttgaaaacaaatttgccgtggaaactttaatttgttttaatttgttcttgaacagtcaagaaaaacattattgaggaaaattaatatcacagcataaccccaccctttacattttgtgcagtgattattttttaaagtcttctttcatgtaagtagcaaacagggctttactatcttttcatctcattaattcaattaaaaccattaccttaaaatttttttctttcgaagtgtggtgtcttttatatttgaattagtaactgtatgaagtcatagataatagtacatgtcaccttaggtagtaggaagaattacaatttctttaaatcatttatctggatttttatgttttattagcattttcaagaagacggattatctagagaataatcatatatatgcatacgtaaaaatggaccacagtgacttatttgtagttgttagttgccctgctacctagtttgttagtgcatttgagcacacattttaattttcctctaattaaaatgtgcagtattttcagtgtcaaatatatttaactatttagagaatgatttccacctttatgttttaatatcctaggcatctgctgtaataatattttagaaaatgtttggaatttaagaaataacttgtgttactaatttgtataacccatatctgtgcaatggaatataaatatcacaaagttgtttaactagactgcgtgttgtttttcccgtataataaaaccaaagaatagtttggttcttcaaatcttaagagaatccacataaaagaagaaactattttttaaaaattcacttctatatatacaatgagtaaaatcacagattttttctttaaataaaaataagtcattttaataactaaaccagattctttgtggatactattaaagtaacatttaagcctcaaccttg

SEQ ID NO: 5897 - protein, 277 aa, Homo sapien
MVKVTFNSALAQKEAKKDEPKSGEEALIIPPDAVAVDCKDPDDVVPVGQRRAWCWCMCFGLAFMLAGVILGGAYLYKYFALQPDDVYYCGIKYIKDDVILNEPSADAPAALYQTIEENIKIFEEEEVEFISVPVPEFADSDPANIVHDFNKKLTAYLDLNLDKCYVIPLNTSIVMPPRNLLELLINIKAGTYLPQSYLIHEHMVITDRIENIDHLGFFIYRLCHDKETYKLQRRETIKGIQKREASNCFAIRHFENKFAVETLICFNLFLNSQEKHY

SEQ ID NO: 5898 - DNA, 810 bp, Homo sapien
gctggagccgggccggggcgatgtggagcgcgggccgcggcggggctgcctggccggtgctgttggggctgctgctggcgctgttagtgccgggcggtggtgccgccaagaccggtgcggagctcgtgacctgcgggtcggtgctgaagctgctcaatacgcaccaccgcgtgcggctgcactcgcacgacatcaaatacggatccggcagcggccagcaatcggtgaccggcgtagaggcgtcggacgacgcgaatagctactggcggatccgcggcggctcggagggcgggtgcccgtgcgggtccccggtgcgctgcgggcaggcggtgaggctcacgcatgtgcttacgggcaagaacctgcacacgcaccacttcccgtcgccgctgtccaacaaccaggaggtgagtgcctttggggaagacggcgagggcgacgacctggacctatggacagtgcgctgctctggacagcactgggagcgtgaggctgctgtgcgcttacagcatgtgggcacctctgtgttcctgtcagtcacgggtgagcagtatggaagccccatccgtgggcagcatgaggtccacggcatgcccagtgccaacacgcacaatacgtggaaggccatggaaggcatcttcatcaagcctagtgtggagccctctgcaggtcacgatgaactctgagtgtgtggatggatgggtggatggagggtggcaggtggggcgtctgcagggccactcttggcagagactttgggtttgtaggggtcctcaagtgcctttgtgattaaagaatgttggtctatga

SEQ ID NO: 5899 - protein, 221 aa, Homo sapien
MWSAGRGGAAWPVLLGLLLALLVPGGGAAKTGAELVTCGSVLKLLNTHHRVRLHSHDIKYGSGSGQQSVTGVEASDDANSYWRIRGGSEGGCPCGSPVRCGQAVRLTHVLTGKNLHTHHFPSPLSNNQEVSAFGEDGEGDDLDLWTVRCSGQHWEREAAVRLQHVGTSVFLSVTGEQYGSPIRGQHEVHGMPSANTHNTWKAMEGIFIKPSVEPSAGHDEL

SEQ ID NO: 5900 - DNA, 3325 bp, Homo sapien; identical to SEQ ID NO: 3265

SEQ ID NO: 5901 - protein, 1015 aa, Homo sapien; identical to SEQ ID NO: 3266

SEQ ID NO: 5902 - DNA, 1700 bp, Homo sapien; identical to SEQ ID NO: 3409

SEQ ID NO: 5903 - protein, 486 aa, Homo sapien; identical to SEQ ID NO: 3410

SEQ ID NO: 5904 - DNA, 3257 bp, Homo sapien; identical to SEQ ID NO: 3389

SEQ ID NO: 5905 - protein, 761 aa, Homo sapien; identical to SEQ ID NO: 3390

SEQ ID NO: 5906 - DNA, 5113 bp, Homo sapien
agagcttcagtctgagtcccagcgccgagagcgtgtctgaccggttggacccctacagcagcggcggcggctcctcgtcgtcgtcggaagagctcgaggccgacgcagcctcggccccgacgggggtcccgggccagccccgccgtcccggccaccccgcgcagcccctcccgcttccccagacggcttcctcgcctcagccgcagcagaaagccccgagggccattgacagcccgggcggggccgtccgcgaggggtcgtgcgaggagaaggcagcggcagccgtggccccgggaggcctccagtctacccccgggaggagcggggtgaccgcggagaaggcgcctccgccgcccccgccgcccaccctgtacgtgcagctccacggagagaccacccggcgcttggaggcggaggagaagccattgcagatccaaaatgactacctcttccaactgggatttggggagctgtggagggtgcaggaggaaggcatggactcggagattggctgcctcatccgcttctatgcaggaaaacctcacagcacgggtagctctgaacggattcagctctcaggaatgtataatgtccgtaaaggcaagatgcagttgccagtgaaccgatggacaagacgccaagtcatcctatgtgggacctgcctgatagtatcatctgtgaaagacagcttgaccggaaagatgcatgttctgccactaattggtggaaaagtagaagaagtgaaaaagcaccaacactgtttagcatttagctcctctggaccccaaagccagacttactacatttgctttgatactttcacagaatacttaaggtggctgcgacaagtctccaaggttgcatcccagcgcattagctcagtggacctctcgtgttgtagcctggaacatctgcctgccaacctcttctacagccaagacctcactcatctcaatttaaaacaaaacttcctaaggcagaaccctagccttccagctgccagggggcttaatgaactgcaaaggttcaccaagttgaagagtcttaacctttccaataatcatttaggggacttccctctggcagtctgcagtattccaaccctggcagagctgaacgtgtcctgcaatgccctgcgatcagtcccggcagccgttggagtgatgcacaacttacagacatttttgttggatggaaactttctccaatcccttcctgctgagttggagaacatgaagcagcttagttatctgggtctttctttcaatgaatttactgacattcccgaagtattggagaaattgactgctgtggataaactttgtatgtctggaaactgtgtggagacccttaggctacaggctttaagaaaaatgcctcacattaaacatgtggatctaaggttgaacgtaattaggaagctgatagcagatgaagtggactttctacagcatgttactcagcttgacctacgagacaataagcttggtgatctagatgctatgattttcaacaacattgaagttttacactgtgaaaggaatcaactggtcacattagacatctgtggctatttcctaaaagcgctctatgcctcttctaatgaacttgttcaacttgatgtttacccagttccaaattatctgtcctacatggatgtttcaaggaaccgcttagaaaatgtgcctgagtgggtatgtgaaagccgaaagctagaagttttggatattggccataatcaaatatgtgaacttcctgcccgcttattttgtaatagcagtctccggaaactactggcaggacacaaccagttggcaaggctgcctgaaaggctagaaagaacctcggtggaggtcttggatgtgcaacacaaccagctccttgagctcccacctaaccttctgatgaaggctgacagcctgagattcctgaacgcctctgcgaacaaactggaaagccttcctccagccacgctttccgaagagacaaacagtatcttacaagagttgtatttgacaaataacagcctcacagacaaatgtgtgcccttgttaacgggacacccccatttgaagatccttcacatggcctataaccgacttcagagttttccagcaagtaaaatggcgaaactggaggaacttgaagaaattgatctcagtgggaataagctgaaagccatcccaacaacgatcatgaattgcagccgcatgcacaccgtgattgctcactccaactgcatcgaggtctttcccgaagttatgcagctcccagagatcaagtgtgtggacctgagctgtaatgagctaagtgaagtcacattaccagaaaacctgcctcccaaactgcaggagctagacctgactggaaacccgcgccttgtccttgatcacaaaaccctggaactactgaataatatccgctgtttcaagattgatcagccttctacaggagacgcttccggagccccagctgtatggagtcatggttacactgaagcttcgggggtaaaaaacaagttgtgtgtcgcagccctgtcggtgaataacttctgtgacaaccgcgaagccctgtatggtgtgtttgacggagaccggaatgtggaggtgccctaccttctccagtgcactatgagtgacattttggctgaagagctgcaaaaaacaaaaaacgaagaagaatacatggtcaatacattcattgtcatgcaaaggaaacttggaactgctgggcagaagcttggtggtgccgctgtcctttgtcatatcaagcatgaccctgtggatccaggaggatccttcaccttgacctctgctaatgtgggcaagtgccaaacagttctctgtcgaaatggaaagccgctgcctctgtccagatcttacatcatgagctgtgaagaagagctgaagaggattaaacagcacaaggccattatcactgaggatggcaaggtgaacggagtgactgagtccacgcgcatcctgggctacaccttcctccatcccagtgtggtgcctcgcccccacgtgcagtccgtgctcctgactccccaggatgagttcttcatcctaggcagtaaggggttgtgggacagcctgtccgtcgaggaggccgtggaagccgtgcgcaacgtgcccgatgccctggctgctgccaagaagctgtgtaccctggcccagagctacggctgccacgacagcatcagcgctgtggtggtgcagctcagtgtcactgaggacagcttctgctgctgcgagctcagcgccggtggggctgtgccaccacccagtcctggcatctttcctccctcagtgaacatggtgatcaaggatcggccctcagatgggctgggcgtgccgtcctccagcagcggcatggcttccgagattagcagtgagctctccacttctgagatgagcagcgaggtggggtcaacagcctccgatgagcccccgcccggagccctaagcgagaacagccctgcctaccccagtgagcagcgctgcatgctccaccccatctgtctgtccaactccttccagcgccagctatccagcgccacgttctctagcgccttctccgacaacggccttgacagtgacgatgaggagcccatcgagggcgtcttcaccaacggcagccgggtggaggtggaggtggacatccactgcagccgggccaaggagaaggagaaacagcagcacctgcttcaggtgccagcagaggccagtgatgagggcattgtcatcagcgccaacgaggatgagccaggtctgcccaggaaggcagacttctctgccgttgggaccattgggcgccggagggccaatggctctgttgcgccccaggaaaggagccacaatgtgatagaggtggctacagacgcacctcttcgaaagcctggaggctattttgctgccccggctcagccggatcctgatgatcagtttatcatacccccggagctggaagaggaggtcaaagaaatcatgaagcatcaccaggagcaacagcagcagcagcagccgccaccaccccctcagctccagccgcagctgccgcggcactaccagctggaccagctgccagattattacgacacgccactatgacccagccgagctgtttaacaaataaactaaccacaaaagactgagttgcaagagtctcccaggctcacattaaaccaggggttttactccacatccttcccccagacactgttcccaacctgtcatcgcagctaatctgtaggttctctttctttgggttatttttttaagtaatcaccactttcttctagtgatgctttaccaatatgatttacatttgttaacttctccccctaacatatcagatatgtaaagacaaagaacaaaaggtttaatatattacagagaaacagttaatgataatgtaatattttttaaaatggctttttgttgtttgtttggaaggcagggcaggctgccgttgctaaatgatttaataatattgtaattctgtatttctttggggggaaaaggcttttgttttgttttgttttgttttgttttgtttttgtcttgaaaataatagacatttgtagaatatggagactaactcctaggagttgctttactctgtcaggtgacttaagtcactgggattcactaattttctctgagagaacagctgattgagaatttccattgtaaatagctcagtgttgtatagtgaggcttacgatgttttgtagtcttggcgtaaggacacagcccaagtaactgacgtttcccctccccctcccctctgaggagcctgcctgcctcacaactcaccctcacttcactgaatgaggaggctgagcagctgcagtgtttctgtccggaggaaatggatcttaggccactggacaagaacctgcacccaagggccctgaacccattttcctcccctgtcccagccttcccactttgacagacacttttaactgtgttccttactgctgccacaatcagcatggttgtatagtgccccattaggccatttacatacccagagttatactcaagcagaatgcacaaatggacatgtcataatttttgttacaataaatatgaaatttacaagt

SEQ ID NO: 5907 - protein, 1369 aa, Homo sapien
SFSLSPSAESVSDRLDPYSSGGGSSSSSEELEADAASAPTGVPGQPRRPGHPAQPLPLPQTASSPQPQQKAPRAIDSPGGAVREGSCEEKAAAAVAPGGLQSTPGRSGVTAEKAPPPPPPPTLYVQLHGETTRRLEAEEKPLQIQNDYLFQLGFGELWRVQEEGMDSEIGCLIRFYAGKPHSTGSSERIQLSGMYNVRKGKMQLPVNRWTRRQVILCGTCLIVSSVKDSLTGKMHVLPLIGGKVEEVKKHQHCLAFSSSGPQSQTYYICFDTFTEYLRWLRQVSKVASQRISSVDLSCCSLEHLPANLFYSQDLTHLNLKQNFLRQNPSLPAARGLNELQRFTKLKSLNLSNNHLGDFPLAVCSIPTLAELNVSCNALRSVPAAVGVMHNLQTFLLDGNFLQSLPAELENMKQLSYLGLSFNEFTDIPEVLEKLTAVDKLCMSGNCVETLRLQALRKMPHIKHVDLRLNVIRKLIADEVDFLQHVTQLDLRDNKLGDLDAMIFNNIEVLHCERNQLVTLDICGYFLKALYASSNELVQLDVYPVPNYLSYMDVSRNRLENVPEWVCESRKLEVLDIGHNQICELPARLFCNSSLRKLLAGHNQLARLPERLERTSVEVLDVQHNQLLELPPNLLMKADSLRFLNASANKLESLPPATLSEETNSILQELYLTNNSLTDKCVPLLTGHPHLKILHMAYNRLQSFPASKMAKLEELEEIDLSGNKLKAIPTTIMNCSRMHTVIAHSNCIEVFPEVMQLPEIKCVDLSCNELSEVTLPENLPPKLQELDLTGNPRLVLDHKTLELLNNIRCFKIDQPSTGDASGAPAVWSHGYTEASGVKNKLCVAALSVNNFCDNREALYGVFDGDRNVEVPYLLQCTMSDILAEELQKTKNEEEYMVNTFIVMQRKLGTAGQKLGGAAVLCHIKHDPVDPGGSFTLTSANVGKCQTVLCRNGKPLPLSRSYIMSCEEELKRIKQHKAIITEDGKVNGVTESTRILGYTFLHPSVVPRPHVQSVLLTPQDEFFILGSKGLWDSLSVEEAVEAVRNVPDALAAAKKLCTLAQSYGCHDSISAVVVQLSVTEDSFCCCELSAGGAVPPPSPGIFPPSVNMVIKDRPSDGLGVPSSSSGMASEISSELSTSEMSSEVGSTASDEPPPGALSENSPAYPSEQRCMLHPICLSNSFQRQLSSATFSSAFSDNGLDSDDEEPIEGVFTNGSRVEVEVDIHCSRAKEKEKQQHLLQVPAEASDEGIVISANEDEPGLPRKADFSAVGTIGRRRANGSVAPQERSHNVIEVATDAPLRKPGGYFAAPAQPDPDDQFIIPPELEEEVKEIMKHHQEQQQQQQPPPPPQLQPQLPRHYQLDQLPDYYDTPL

SEQ ID NO: 5908 - DNA, 2049 bp, Homo sapien
ggcacgagggggagtaggcagcggcgccgcgtccgctctcgcccgctctcgcccgctcgccagccggctctcctcccgccgcaggacccgcgcgccgcgctcgggggccatgcagcgcctggccatggacctgcggatgttgtcccgggagctctccctctacctggaacaccaagtccgggtggggttcttcggctcgggggtgggcttatcccttatcctgggcttcagcgtcgcttatgccttctactacctgagcagcattgccaagaaaccccagttagtgaccgggggtgagagtttcagccgcttccttcaagaccactgtcccgtggttacagaaacgtactacccgacggtctggtgctgggagggtcgaggacagaccctgcttagacctttcatcacttcgaagcccccggtgcagtacaggaatgaacttattaaaactgcagatggaggacagatttcactggactggtttgataatgataacagtacgtgttatatggatgccagcaccagacctactatcttattgttgcctggcctcacgggaacaagcaaggagtcatatatccttcatatgatccatcttagtgaagaattaggatacagatgtgtggtttttaacaacagaggagtggcgggggagaatctcttgacgccaaggacttattgttgtgctaacactgaagacttggagacagttattcaccatgtacacagcctgtacccttctgctcctttcctggcagcaggggtttcaatgggaggaatgctgcttctaaattacttgggcaaaattgggtccaaaacgcctttgatggcagctgcaactttttccgttggttggaacaccttcgcttgctcagagtcattggaaaaaccactgaactggctactttttaattactatttgacaacctgccttcagtcttcagttaataagcaccgacatatgtttgtaaaacaagttgatatggatcatgtcatgaaggctaaatccatcagagagtttgataagcgattcacttcagtcatgtttggataccaaacaattgatgattattatactgatgccagtccgagtcctagactgaagtcagtaggaattccagtattgtgtctaaattctgtggatgatgttttctcacccagtcatgctattccaatagaaactgctaagcaaaatcctaatgttgctttggtccttacttcttatggaggccatattggttttctggagggaatctggccaagacagtccacttacatggatcgtgtcttcaagcaatttgtgcaagccatggttgagcatggacatgaactctcttaacatgtagttctttgggtgcattttgtctgaaccacaattgtgaaggcagctcagcttagtgcacaaattttaactgttgtatataaagcaaataagccagcagatgggtgaagaggtccagaatgatatgcaaaaactactttttagagaaacaaaacaactttgtagcaacaaattaaatatagtattagattgttacttacgtagattttatttttactatgccttaccaagtacatccttaaacaaagtagtatgtacatgaaattgcacttaaccaaaactattgtgtaaaacaaattttaattcctcagggttttaatttaaactagtatttttttagattatttgttttaggtgatttaatggtactttaataactactaagaaatattggctatttcaatgtaagttataaggtggtacattcctaagggtatttatagttgatgataacatgaaaactgaaataagataaaatacaacgtgctaaatcttttatgtattctaactttaaaagacaagtgcaacaaagttagactgacttctatatgtgctcttttactctgataatattaaattaggactaacttatgttttataatgattataatttacatgcttatttttaaaatagtatatgtggacacatatatatcattatattaaaataaattctaccattttaaattggaaaaaaaaaaaaaaaa

SEQ ID NO: 5909 - protein, 409 aa, Homo sapien
MQRLAMDLRMLSRELSLYLEHQVRVGFFGSGVGLSLILGFSVAYAFYYLSSIAKKPQLVTGGESFSRFLQDHCPVVTETYYPTVWCWEGRGQTLLRPFITSKPPVQYRNELIKTADGGQISLDWFDNDNSTCYMDASTRPTILLLPGLTGTSKESYILHMIHLSEELGYRCVVFNNRGVAGENLLTPRTYCCANTEDLETVIHHVHSLYPSAPFLAAGVSMGGMLLLNYLGKIGSKTPLMAAATFSVGWNTFACSESLEKPLNWLLFNYYLTTCLQSSVNKHRHMFVKQVDMDHVMKAKSIREFDKRFTSVMFGYQTIDDYYTDASPSPRLKSVGIPVLCLNSVDDVFSPSHAIPIETAKQNPNVALVLTSYGGHIGFLEGIWPRQSTYMDRVFKQFVQAMVEHGHELS

SEQ ID NO: 5910 - DNA, 2121 bp, Homo sapien; identical to SEQ ID NO: 590

SEQ ID NO: 5911 - protein, 439 aa, Homo sapien; identical to SEQ ID NO: 591

SEQ ID NO: 5912 - DNA, 3925 bp, Homo sapien
acagcacagacagattgacctattggggtgtttcgcgagtgtgagagggaagcgccgcggcctgtatttctagacctgcccttcgcctggttcgtggcgccttgtgaccccgggcccctgccgcctgcaagtcggaaattgcgctgtgctcctgtgctacggcctgtggctggactgcctgctgctgcccaactggctggcaagatgaagctctccctggtggccgcgatgctgctgctgctcagcgcggcgcgggccgaggaggaggacaagaaggaggacgtgggcacggtggtcggcatcgacctggggaccacctactcctgcgtcggcgtgttcaagaacggccgcgtggagatcatcgccaacgatcagggcaaccgcatcacgccgtcctatgtcgccttcactcctgaaggggaacgtctgattggcgatgccgccaagaaccagctcacctccaaccccgagaacacggtctttgacgccaagcggctcatcggccgcacgtggaatgacccgtctgtgcagcaggacatcaagttcttgccgttcaaggtggttgaaaagaaaactaaaccatacattcaagttgatattggaggtgggcaaacaaagacatttgctcctgaagaaatttctgccatggttctcactaaaatgaaagaaaccgctgaggcttatttgggaaagaaggttacccatgcagttgttactgtaccagcctattttaatgatgcccaacgccaagcaaccaaagacgctggaactattgctggcctaaatgttatgaggatcatcaacgagcctacggcagctgctattgcttatggcctggataagagggagggggagaagaacatcctggtgtttgacctgggtggcggaaccttcgatgtgtctcttctcaccattgacaatggtgtcttcgaagttgtggccactaatggagatactcatctgggtggagaagactttgaccagcgtgtcatggaacacttcatcaaactgtacaaaaagaagacgggcaaagatgtcaggaaagacaatagagctgtgcagaaactccggcgcgaggtagaaaaggccaaacgggccctgtcttctcagcatcaagcaagaattgaaattgagtccttctatgaaggagaagacttttctgagaccctgactcgggccaaatttgaagagctcaacatggatctgttccggtctactatgaagcccgtccagaaagtgttggaagattctgatttgaagaagtctgatattgatgaaattgttcttgttggtggctcgactcgaattccaaagattcagcaactggttaaagagttcttcaatggcaaggaaccatcccgtggcataaacccagatgaagctgtagcgtatggtgctgctgtccaggctggtgtgctctctggtgatcaagatacaggtgacctggtactgcttgatgtatgtccccttacacttggtattgaaactgtgggaggtgtcatgaccaaactgattccaaggaacacagtggtgcctaccaagaagtctcagatcttttctacagcttctgataatcaaccaactgttacaatcaaggtctatgaaggtgaaagacccctgacaaaagacaatcatcttctgggtacatttgatctgactggaattcctcctgctcctcgtggggtcccacagattgaagtcacctttgagatagatgtgaatggtattcttcgagtgacagctgaagacaagggtacagggaacaaaaataagatcacaatcaccaatgaccagaatcgcctgacacctgaagaaatcgaaaggatggttaatgatgctgagaagtttgctgaggaagacaaaaagctcaaggagcgcattgatactagaaatgagttggaaagctatgcctattctctaaagaatcagattggagataaagaaaagctgggaggtaaactttcctctgaagataaggagaccatggaaaaagctgtagaagaaaagattgaatggctggaaagccaccaagatgctgacattgaagacttcaaagctaagaagaaggaactggaagaaattgttcaaccaattatcagcaaactctatggaagtgcaggccctcccccaactggtgaagaggatacagcagaaaaagatgagttgtagacactgatctgctagtgctgtaatattgtaaatactggactcaggaacttttgttaggaaaaaattgaaagaacttaagtctcgaatgtaattggaatcttcacctcagagtggagttgaaactgctatagcctaagcggctgtttactgcttttcattagcagttgctcacatgtctttgggtgggggggagaagaagaattggccatcttaaaaagcaggtaaaaaacctgggttagggtgtgtgttcaccttcaaaatgttctatttaacaactgggtcatgtgcatctggtgtaggaagttttttctaccataagtgacaccaataaatgtttgttatttacactggtctaatgtttgtgagaagcttctaattagatcaattacttattttaggaaatttaagactagatactcgtgtgtggggtgaggggagggagtatttggtatgttgggataaggaaacacttctatttaatgcttccagggattttttttttttttttttaaccctcctgggcccaagtgatccttccacctcagtctcccagctaattgagaccacaggcttgttaccaccatgctcggcttttgcattaatctaagaaaaggggagagaagttaatccacatctttactcaggcaaggggcatttcacagtgcccaagagtggggttttcttgaacatacttggtttcctatttccccttatctttctaaaactgcctttctggtggctttttttaaaattattactaatgatgcttttatagctgcttggattctctgagaaatgatggggagtgagtgatcactggtattaactttatacacttggatttcatttgtaactttaggatgtaaaggtatattgtgaaccctagctgtgtcagaatctccatccctgaaatttctcattagtggtactggggtgggatcttggatggtgacattgaaactacactaaatcccctcactatgaatgggttgttaaaggcaatggtttgtgtcaaaactggtttaggattacttagattgtgttcctgaagaaaagagtccaggtaaatggtatgatcaataaaggacaggctggtgctaacataaaatccaatattgtaatcctagcactttgggaggccaaggcgggtggatcacaaggtcaagagatagagaccatctttgccaacatggtgaaactccatctctactgaaaatacaaaaattagctgggcgtggtagtgcaagctgaaggctgaggcaggagaatcactcgaacccgggaggcagaggttgcagtgagccgagatcacaccactgtactccagcccggcactccagcctggcgacaagagtgagactccacctcaaaaaaaaaaaaaagaatccaatactgcccaaggataggtattttatagatgggcaactggctgaaaggttaattctctagggctagtagaactggatcccaacaccaaactcttaattagacctaggcctcagctgcactgcccgaaaagcatttgggcagaccctgagcagaatactggtctcaggccaagcccaatacagccattaaagatgacctacagtgctgtgtaccctggggcaatagggttaaatggtagttagcaactagggctagtcttcccttacctcaaaggctctcactaccgtggaccacctagtctgtaactctttctgaggagctgttactgaatattaaaaagatagacttcaaaaaaaaaaaaaaaaaa

SEQ ID NO: 5913 - protein, 654 aa, Homo sapien
MKLSLVAAMLLLLSAARAEEEDKKEDVGTVVGIDLGTTYSCVGVFKNGRVEIIANDQGNRITPSYVAFTPEGERLIGDAAKNQLTSNPENTVFDAKRLIGRTWNDPSVQQDIKFLPFKVVEKKTKPYIQVDIGGGQTKTFAPEEISAMVLTKMKETAEAYLGKKVTHAVVTVPAYFNDAQRQATKDAGTIAGLNVMRIINEPTAAAIAYGLDKREGEKNILVFDLGGGTFDVSLLTIDNGVFEVVATNGDTHLGGEDFDQRVMEHFIKLYKKKTGKDVRKDNRAVQKLRREVEKAKRALSSQHQARIEIESFYEGEDFSETLTRAKFEELNMDLFRSTMKPVQKVLEDSDLKKSDIDEIVLVGGSTRIPKIQQLVKEFFNGKEPSRGINPDEAVAYGAAVQAGVLSGDQDTGDLVLLDVCPLTLGIETVGGVMTKLIPRNTVVPTKKSQIFSTASDNQPTVTIKVYEGERPLTKDNHLLGTFDLTGIPPAPRGVPQIEVTFEIDVNGILRVTAEDKGTGNKNKITITNDQNRLTPEEIERMVNDAEKFAEEDKKLKERIDTRNELESYAYSLKNQIGDKEKLGGKLSSEDKETMEKAVEEKIEWLESHQDADIEDFKAKKKELEEIVQPIISKLYGSAGPPPTGEEDTAEKDEL

SEQ ID NO: 5914 - DNA, 1080 bp, Homo sapien
tggtccctttccttccaaggcccccgagaggaaggcatgcggtgggccctagtggtgcttctagctttcctgtctcctgccagtcagaaatcttccaacttggaagggagaacgaagtcagtcaccaggcagactgggtcatctgctgaaatcacttgcgatcttactgtaacaaataccttctacatccactggtacctacaccaggaggggaaggccccacagcgtcttctgtactatgacgtctccaccgcaagggatgtgttggaatcaggactcagtccaggaaagtattatactcatacacccaggaggtggagctggatattgagactgcaaaatctaattgaaaatgattctggggtctattactgtgccacctgggacaggccccgccttaagaaactctttggcagtggaacaacacttgttgtcacagataaacaacttgatgcagatgtttcccccaagcccactatttttcttccttcgattgctgaaacaaaactccagaaggctggaacatacctttgtcttcttgagaaatttttcccagatattattaagatacattggcaagaaaagaagagcaacacgattctgggatcccaggaggggaacaccatgaagactaacgacacatacatgaaatttagctggttaacggtgccagaagagtcactggacaaagaacacagatgtatcgtcagacatgagaataataaaaacggaattgatcaagaaattatctttcctccaataaagacagatgtcaccacagtggatcccaaatacaattattcaaaggatgcaaatgatgtcatcacaatggatcccaaagacaattggtcaaaagatgcaaatgatacactactgctgcagctcacaaacacctctgcatattacacgtacctcctcctgctcctcaagagtgtggtctattttgccatcatcacctgctgtctgcttagaagaacggctttctgctgcaatggagagaaatcataacagacggtggcacaaggaggccatcttttcctcatcggttattgtccctagaagcgtccccgaattcaaggt

SEQ ID NO: 5915 - protein, 323 aa, Homo sapien [sequence omitted]

SEQ ID NO: 5916 - DNA, 3453 bp, Homo sapien
ttcaatgttgatgtgaaaaactcaatgactttcagcggcccggtggaagacatgtttggatatactgttcaacaatatgaaaatgaagaaggaaaatgggtgcttattggttctccgttagttggccaacccaaaaacagaactggagatgtctataagtgtccagttgggagaggtgaatcattaccttgcgtaaagttggatctaccagttaatacatcaattcccaatgtcacagaagtaaaggagaacatgacatttggatcaactttagtcaccaacccaaatggaggatttctggcttgtgggcccttatatgcctatagatgtggacatttgcattacacaactggaatctgttctgacgtcagccccacatttcaagtcgtgaattccattgcccctgtacaagaatgcagcactcaactggacatagtcatagtgctggatggttccaacagtatttacccatgggacagtgttacagcttttttaaatgacctcttgaaaagaatggatattggtcctaaacagacacaggttggaattgtacagtatggagaaaacgtgacccatgagttcaacctcaataagtattcttccaccgaagaggtacttgttgcagcaaagaaaatagtccagagaggtggccgccagactatgacagctcttggaacagacacagcaagaaaggaggcattcacggaagcccggggtgcccgaagaggagttaaaaaagtcatggttattgtgacagatggagagtctcatgacaatcatcgactgaagaaggtcatccaagactgtgaagatgaaaacattcaacggttttccatagctattcttggcagctataaccgaggaaatttaagcactgaaaaatttgtggaggaaataaaatcaattgcaagtgaacccactgaaaagcatttcttcaatgtctctgatgaattggctctagtcaccattgttaaaactctgggagaaagaatatttgccctggaagccacagctgaccagtcagcagcttcatttgaaatggaaatgtctcagactggcttcagtgctcattattcacaggactgggtcatgcttggagcagtaggagcctatgattggaatggaacagttgtcatgcagaaggctagtcaaatcataatccctcgaaacacaacctttaatgttgagtctaccaaaaagaatgaaccgcttgcttcttatttaggttacactgtaaactctgctactgcttcttctggagatgtgctctatattgctggacagcctcggtacaatcatacaggccaggtcattatctacaggatggaagatggaaacatcaaaattctccagacgctcagtggagaacagattggttcctactttggcagtattttaacaacaactgacattgacaaggattctaatactgacattcttctagtcggagcccctatgtacatgggaacagagaaggaggagcaaggaaaagtgtatgtgtatgctctcaatcagacaaggtttgaatatcaaatgagcctggaacctattaagcagacgtgctgttcatctcggcagcacaattcatgcacaacagaaaacaaaaatgagccatgcggggctcgttttggaactgcaattgctgctgtaaaagacctcaatcttgatggatttaatgacatcgtgataggagctccgctggaagatgatcacgggggagctgtgtacatttatcatggaagtggcaagactataaggaaagagtatgcacaacgtattccatcaggtggggatggtaagacactgaaattttttggccagtctatccacggagaaatggatttaaatggtgacggtctgacagatgtgactattgggggccttggtggtgctgccctcttctggtcccgagatgtggccgtagttaaagtgaccatgaattttgagccaaataaagtgaatattcaaaagaaaaactgccatatggagggaaaggaaacagtatgcataaatgctacagtgtgttttgaggttaaattaaagtctaaagaagacacgatttatgaagctgatttgcagtaccgtgtcaccctagattcactaagacaaatatcacgaagttttttctctggaactcaagagagaaaggttcaaaggaacatcacagttcgaaaatcagaatgcactaagcactccttctacatgttggacaagcatgactttcaggactctgtgagaataacgttggactttaatcttaccgatccagaaaatgggcctgttcttgatgattctctaccaaactcagtacatgaatatattccctttgccaaagattgtggaaataaggaaaaatgtatctcagacctcagcctgcatgtcgccaccactgaaaaggacctgctgattgtccgatcccagaatgataagttcaacgttagcctcacagtcaaaaatacaaaggacagtgcctataacaccaggacaatagtgcattattctccaaatctagttttttcaggaattgaggctatccaaaaagacagttgtgaatctaatcataatatcacatgtaaagttggatatcccttcctgagaagaggagagatggtaactttcaaaatattgtttcagtttaacacatcctatctcatggaaaatgtgaccatttatttaagtgcaacaagtgacagcgaagaacctcctgaaaccctttctgataatgtagtaaacatttctatcccggtaaaatatgaagttggactacagttttacagctctgcaagtgaataccacatttcaattgctgccaatgagacagtccctgaagttattaattctactgaggacattggaaatgaaattaatatcttctacttgattagaaaaagtggatcttttccaatgccagagcttaagctgtcaatttcattccccaatatgacatcaaatggttaccctgtgctgtacccaactggattgtcatcttctgagaatgcaaactgcagaccccatatctttgaggatcctttcagtatcaactctggaaagaaaatgactacatcaactgaccatctcaaacgaggcacaattctggactgcaatacatgtaaatttgctaccatcacatgtaatctcacttcttctgacatcagccaagtcaatgtttcgcttatcttgtggaaaccaacttttataaaatcatatttttccagcttaaatcttactataaggggagaacttcggagtgaaaatgcatctctggttttaagtagcagcaatcaaaaaagagagcttgctattcaaatatccaaagatgggctaccgggcagagtgccattatgggtcatcctgctgagtgcttttgccggattgttgctgttaatgctgctcattttagcactgtggaagattggattcttcaaaagaccactgaaaaagaaaatggagaaa

SEQ ID NO: 5917 - protein, 1143 aa, Homo sapien
MTFSGPVEDMFGYTVQQYENEEGKWVLIGSPLVGQPKNRTGDVYKCPVGRGESLPCVKLDLPVNTSIPNVTEVKENMTFGSTLVTNPNGGFLACGPLYAYRCGHLHYTTGICSDVSPTFQVVNSIAPVQECSTQLDIVIVLDGSNSIYPWDSVTAFLNDLLKRMDIGPKQTQVGIVQYGENVTHEFNLNKYSSTEEVLVAAKKIVQRGGRQTMTALGTDTARKEAFTEARGARRGVKKVMVIVTDGESHDNHRLKKVIQDCEDENIQRFSIAILGSYNRGNLSTEKFVEEIKSIASEPTEKHFFNVSDELALVTIVKTLGERIFALEATADQSAASFEMEMSQTGFSAHYSQDWVMLGAVGAYDWNGTVVMQKASQIIIPRNTTFNVESTKKNEPLASYLGYTVNSATASSGDVLYIAGQPRYNHTGQVIIYRMEDGNIKILQTLSGEQIGSYFGSILTTTDIDKDSNTDILLVGAPMYMGTEKEEQGKVYVYALNQTRFEYQMSLEPIKQTCCSSRQHNSCTTENKNEPCGARFGTAIAAVKDLNLDGFNDIVIGAPLEDDHGGAVYIYHGSGKTIRKEYAQRIPSGGDGKTLKFFGQSIHGEMDLNGDGLTDVTIGGLGGAALFWSRDVAVVKVTMNFEPNKVNIQKKNCHMEGKETVCINATVCFEVKLKSKEDTIYEADLQYRVTLDSLRQISRSFFSGTQERKVQRNITVRKSECTKHSFYMLDKHDFQDSVRITLDFNLTDPENGPVLDDSLPNSVHEYIPFAKDCGNKEKCISDLSLHVATTEKDLLIVRSQNDKFNVSLTVKNTKDSAYNTRTIVHYSPNLVFSGIEAIQKDSCESNHNITCKVGYPFLRRGEMVTFKILFQFNTSYLMENVTIYLSATSDSEEPPETLSDNVVNISIPVKYEVGLQFYSSASEYHISIAANETVPEVINSTEDIGNEINIFYLIRKSGSFPMPELKLSISFPNMTSNGYPVLYPTGLSSSENANCRPHIFEDPFSINSGKKMTTSTDHLKRGTILDCNTCKFATITCNLTSSDISQVNVSLILWKPTFIKSYFSSLNLTIRGELRSENASLVLSSSNQKRELAIQISKDGLPGRVPLWVILLSAFAGLLLLMLLILALWKIGFFKRPLKKKMEK

SEQ ID NO: 5918 - DNA, 1578 bp, Homo sapien
acgaacaggccaataaggagggagcagtgcggggtttaaatctgaggctaggctggctcttctcggcgtgctgcggcggaacggctgttggtttctgctggttgtaggtccttggctggtcgggcctccggtgttctgcttctccccgctgagctgctgcctggtgaagaggaagccatggcgctccgagtcaccaggaactcgaaaattaatgctgaaaataaggcgaagatcaacatggcaggcgcaaagcgcgttcctacggcccctgctgcaacctccaagcccggactgaggccaagaacagctcttggggacattggtaacaaagtcagtgaacaactgcaggccaaaatgcctatgaagaaggaagcaaaaccttcagctactggaaaagtcattgataaaaaactaccaaaacctcttgaaaaggtacctatgctggtgccagtgccagtgtctgagccagtgccagagccagaacctgagccagaacctgagcctgttaaagaagaaaaactttcgcctgagcctattttggttgatactgcctctccaagcccaatggaaacatctggatgtgcccctgcagaagaagacctgtgtcaggctttctctgatgtaattcttgcagtaaatgatgtggatgcagaagatggagctgatccaaacctttgtagtgaatatgtgaaagatatttatgcttatctgagacaacttgaggaagagcaagcagtcagaccaaaatacctactgggtcgggaagtcactggaaacatgagagccatcctaattgactggctagtacaggttcaaatgaaattcaggttgttgcaggagaccatgtacatgactgtctccattattgatcggttcatgcagaataattgtgtgcccaagaagatgctgcagctggttggtgtcactgccatgtttattgcaagcaaatatgaagaaatgtaccctccagaaattggtgactttgcttttgtgactgacaacacttatactaagcaccaaatcagacagatggaaatgaagattctaagagctttaaactttggtctgggtcggcctctacctttgcacttccttcggagagcatctaagattggagaggttgatgtcgagcaacatactttggccaaatacctgatggaactaactatgttggactatgacatggtgcactttcctccttctcaaattgcagcaggagctttttgcttagcactgaaaattctggataatggtgaatggacaccaactctacaacattacctgtcatatactgaagaatctcttcttccagttatgcagcacctggctaagaatgtagtcatggtaaatcaaggacttacaaagcacatgactgtcaagaacaagtatgccacatcgaagcatgctaagatcagcactctaccacagctgaattctgcactagttcaagatttagccaaggctgtggcaaaggtgtaacttgtaaacttgagttggagtactatatttacaaataaaattggcaccatgtgccatctgtaaaaaaaaaaaaaaaaaaaaaaaaaaaaaaaaaaaaaa

SEQ ID NO: 5919 - protein, 433 aa, Homo sapien
MALRVTRNSKINAENKAKINMAGAKRVPTAPAATSKPGLRPRTALGDIGNKVSEQLQAKMPMKKEAKPSATGKVIDKKLPKPLEKVPMLVPVPVSEPVPEPEPEPEPEPVKEEKLSPEPILVDTASPSPMETSGCAPAEEDLCQAFSDVILAVNDVDAEDGADPNLCSEYVKDIYAYLRQLEEEQAVRPKYLLGREVTGNMRAILIDWLVQVQMKFRLLQETMYMTVSIIDRFMQNNCVPKKMLQLVGVTAMFIASKYEEMYPPEIGDFAFVTDNTYTKHQIRQMEMKILRALNFGLGRPLPLHFLRRASKIGEVDVEQHTLAKYLMELTMLDYDMVHFPPSQIAAGAFCLALKILDNGEWTPTLQHYLSYTEESLLPVMQHLAKNVVMVNQGLTKHMTVKNKYATSKHAKISTLPQLNSALVQDLAKAVAKV

SEQ ID NO: 5920 - DNA, 4643 bp, Homo sapien
cctactctattcagatattctccagattcctaaagattagagatcatttctcattctcctaggagtactcacttcaggaagcaaccagataaaagagaggtgcaacggaagccagaacattcctcctggaaattcaacctgtttcgcagtttctcgaggaatcagcattcagtcaatccgggccgggagcagtcatctgtggtgaggctgattggctgggcaggaacagcgccggggcgtgggctgagcacagcgcttcgctctctttgccacaggaagcctgagctcattcgagtagcggctcttccaagctcaaagaagcagaggccgctgttcgtttcctttaggtctttccactaaagtcggagtatcttcttccaagatttcacgtcttggtggccgttccaaggagcgcgaggtcgggatggatcttgaaggggaccgcaatggaggagcaaagaagaagaacttttttaaactgaacaataaaagtgaaaaagataagaaggaaaagaaaccaactgtcagtgtattttcaatgtttcgctattcaaattggcttgacaagttgtatatggtggtgggaactttggctgccatcatccatggggctggacttcctctcatgatgctggtgtttggagaaatgacagatatctttgcaaatgcaggaaatttagaagatctgatgtcaaacatcactaatagaagtgatatcaatgatacagggttcttcatgaatctggaggaagacatgaccaggtatgcctattattacagtggaattggtgctggggtgctggttgctgcttacattcaggtttcattttggtgcctggcagctggaagacaaatacacaaaattagaaaacagttttttcatgctataatgcgacaggagataggctggtttgatgtgcacgatgttggggagcttaacacccgacttacagatgatgtctccaagattaatgaaggaattggtgacaaaattggaatgttctttcagtcaatggcaacatttttcactgggtttatagtaggatttacacgtggttggaagctaacccttgtgattttggccatcagtcctgttcttggactgtcagctgctgtctgggcaaagatactatcttcatttactgataaagaactcttagcgtatgcaaaagctggagcagtagctgaagaggtcttggcagcaattagaactgtgattgcatttggaggacaaaagaaagaacttgaaaggtacaacaaaaatttagaagaagctaaaagaattgggataaagaaagctattacagccaatatttctataggtgctgctttcctgctgatctatgcatcttatgctctggccttctggtatgggaccaccttggtcctctcaggggaatattctattggacaagtactcactgtattttctgtattaattggggcttttagtgttggacaggcatctccaagcattgaagcatttgcaaatgcaagaggagcagcttatgaaatcttcaagataattgataataagccaagtattgacagctattcgaagagtgggcacaaaccagataatattaagggaaatttggaattcagaaatgttcacttcagttacccatctcgaaaagaagttaagatcttgaagggtctgaacctgaaggtgcagagtgggcagacggtggccctggttggaaacagtggctgtgggaagagcacaacagtccagctgatgcagaggctctatgaccccacagaggggatggtcagtgttgatggacaggatattaggaccataaatgtaaggtttctacgggaaatcattggtgtggtgagtcaggaacctgtattgtttgccaccacgatagctgaaaacattcgctatggccgtgaaaatgtcaccatggatgagattgagaaagctgtcaaggaagccaatgcctatgactttatcatgaaactgcctcataaatttgacaccctggttggagagagaggggcccagttgagtggtgggcagaagcagaggatcgccattgcacgtgccctggttcgcaaccccaagatcctcctgctggatgaggccacgtcagccttggacacagaaagcgaagcagtggttcaggtggctctggataaggccagaaaaggtcggaccaccattgtgatagctcatcgtttgtctacagttcgtaatgctgacgtcatcgctggtttcgatgatggagtcattgtggagaaaggaaatcatgatgaactcatgaaagagaaaggcatttacttcaaacttgtcacaatgcagacagcaggaaatgaagttgaattagaaaatgcagctgatgaatccaaaagtgaaattgatgccttggaaatgtcttcaaatgattcaagatccagtctaataagaaaaagatcaactcgtaggagtgtccgtggatcacaagcccaagacagaaagcttagtaccaaagaggctctggatgaaagtatacctccagtttccttttggaggattatgaagctaaatttaactgaatggccttattttgttgttggtgtattttgtgccattataaatggaggcctgcaaccagcatttgcaataatattttcaaagattataggggtttttacaagaattgatgatcctgaaacaaaacgacagaatagtaacttgttttcactattgtttctagcccttggaattatttcttttattacatttttccttcagggtttcacatttggcaaagctggagagatcctcaccaagcggctccgatacatggttttccgatccatgctcagacaggatgtgagttggtttgatgaccctaaaaacaccactggagcattgactaccaggctcgccaatgatgctgctcaagttaaaggggctataggttccaggcttgctgtaattacccagaatatagcaaatcttgggacaggaataattatatccttcatctatggttggcaactaacactgttactcttagcaattgtacccatcattgcaatagcaggagttgttgaaatgaaaatgttgtctggacaagcactgaaagataagaaagaactagaaggtgctgggaagatcgctactgaagcaatagaaaacttccgaaccgttgtttctttgactcaggagcagaagtttgaacatatgtatgctcagagtttgcaggtaccatacagaaactctttgaggaaagcacacatctttggaattacattttccttcacccaggcaatgatgtatttttcctatgctggatgtttccggtttggagcctacttggtggcacataaactcatgagctttgaggatgttctgttagtattttcagctgttgtctttggtgccatggccgtggggcaagtcagttcatttgctcctgactatgccaaagccaaaatatcagcagcccacatcatcatgatcattgaaaaaacccctttgattgacagctacagcacggaaggcctaatgccgaacacattggaaggaaatgtcacatttggtgaagttgtattcaactatcccacccgaccggacatcccagtgcttcagggactgagcctggaggtgaagaagggccagacgctggctctggtgggcagcagtggctgtgggaagagcacagtggtccagctcctggagcggttctacgaccccttggcagggaaagtgctgcttgatggcaaagaaataaagcgactgaatgttcagtggctccgagcacacctgggcatcgtgtcccaggagcccatcctgtttgactgcagcattgctgagaacattgcctatggagacaacagccgggtggtgtcacaggaagagattgtgagggcagcaaaggaggccaacatacatgccttcatcgagtcactgcctaataaatatagcactaaagtaggagacaaaggaactcagctctctggtggccagaaacaacgcattgccatagctcgtgcccttgttagacagcctcatattttgcttttggatgaagccacgtcagctctggatacagaaagtgaaaaggttgtccaagaagccctggacaaagccagagaaggccgcacctgcattgtgattgctcaccgcctgtccaccatccagaatgcagacttaatagtggtgtttcagaatggcagagtcaaggagcatggcacgcatcagcagctgctggcacagaaaggcatctatttttcaatggtcagtgtccaggctggaacaaagcgccagtgaactctgactgtatgagatgttaaatactttttaatatttgtttagatatgacatttattcaaagttaaaagcaaacacttacagaattatgaagaggtatctgtttaacatttcctcagtcaagttcagagtcttcagagacttcgtaattaaaggaacagagtgagagacatcatcaagtggagagaaatcatagtttaaactgcattataaattttataacagaattaaagtagattttaaaagataaaatgtgtaattttgtttatattttcccatttggactgtaactgactgccttgctaaaagattatagaagtagcaaaaagtattgaaatgtttgcataaagtgtctataataaaactaaactttcatgtg

SEQ ID NO: 5921 - protein, 1279 aa, Homo sapien
MDLEGDRNGGAKKKNFFKLNNKSEKDKKEKKPTVSVFSMFRYSNWLDKLYMVVGTLAAIIHGAGLPLMMLVFGEMTDIFANAGNLEDLMSNITNRSDINDTGFFMNLEEDMTRYAYYYSGIGAGVLVAAYIQVSFWCLAAGRQIHKIRKQFFHAIMRQEIGWFDVHDVGELNTRLTDDVSKINEGIGDKIGMFFQSMATFFTGFIVGFTRGWKLTLVILAISPVLGLSAAVWAKILSSFTDKELLAYAKAGAVAEEVLAAIRTVIAFGGQKKELERYNKNLEEAKRIGIKKAITANISIGAAFLLIYASYALAFWYGTTLVLSGEYSIGQVLTVFSVLIGAFSVGQASPSIEAFANARGAAYEIFKIIDNKPSIDSYSKSGHKPDNIKGNLEFRNVHFSYPSRKEVKILKGLNLKVQSGQTVALVGNSGCGKSTTVQLMQRLYDPTEGMVSVDGQDIRTINVRFLREIIGVVSQEPVLFATTIAENIRYGRENVTMDEIEKAVKEANAYDFIMKLPHKFDTLVGERGAQLSGGQKQRIAIARALVRNPKILLLDEATSALDTESEAVVQVALDKARKGRTTIVIAHRLSTVRNADVIAGFDDGVIVEKGNHDELMKEKGIYFKLVTMQTAGNEVELENAADESKSEIDALEMSSNDSRSSLIRKRSTRRSVRGSQAQDRKLSTKEALDESIPPVSFWRIMKLNLTEWPYFVVGVFCAIINGGLQPAFAIIFSKIIGVFTRIDDPETKRQNSNLFSLLFLALGIISFITFFLQGFTFGKAGEILTKRLRYMVFRSMLRQDVSWFDDPKNTTGALTTRLANDAAQVKGAIGSRLAVITQNIANLGTGIIISFIYGWQLTLLLLAIVPIIAIAGVVEMKMLSGQALKDKKELEGAGKIATEAIENFRTVVSLTQEQKFEHMYAQSLQVPYRNSLRKAHIFGITFSFTQAMMYFSYAGCFRFGAYLVAHKLMSFEDVLLVFSAVVFGAMAVGQVSSFAPDYAKAKISAAHIIMIIEKTPLIDSYSTEGLMPNTLEGNVTFGEVVFNYPTRPDIPVLQGLSLEVKKGQTLALVGSSGCGKSTVVQLLERFYDPLAGKVLLDGKEIKRLNVQWLRAHLGIVSQEPILFDCSIAENIAYGDNSRVVSQEEIVRAAKEANIHAFIESLPNKYSTKVGDKGTQLSGGQKQRIAIARALVRQPHILLLDEATSALDTESEKVVQEALDKAREGRTCIVIAHRLSTIQNADLIVVFQNGRVKEHGTHQQLLAQKGIYFSMVSVQAGTKRQ

SEQ ID NO: 5922 - DNA, 3493 bp, Homo sapien; identical to SEQ ID NO: 1285

SEQ ID NO: 5923 - protein, 873 aa, Homo sapien; identical to SEQ ID NO: 1286

SEQ ID NO: 5924 - DNA, 1150 bp, Homo sapien
ttcttactgtgggctttagctttttgtttttctacaggggcacgctgtgtgacaaagtaacccagagttccccggaccagacggtggcgagtggcagtgaggtggtactgctctgcacttacgacactgtatattcaaatccagatttattctggtaccggataaggccagattattcctttcagtttgtcttttatggggataacagcagatcagaaggtgcacattttactcaaggacggttttctgtgaaacacattctgacccagaaagcctttcacttggtgatctctccagtaaggactgaagacagtgccacttactactgtgcctccctcaacctaaactgggggtctgaggacgttagctcctgggacacccgacagatgtttttcggaactggcatcaaactcttcgtggagccccgaagtcagcctcataccaaaccatccgtttttgtcatgaaaaatggaacaaatgtcgcttgtctggtgaaggaattctaccccaaggatataagaataaatctcgtgtcatccaagaagataacagagtttgatcctgctattgtcatctctcccagtgggaagtacaatgctgtcaagcttggtaaatatgaagattcaaattcagtgacatgttcagttcaacacgacaataaaactgtgcactccactgactttgaagtgaagacagattctacagatcacgtaaaaccaaaggaaactgaaaacacaaagcaaccttcaaagagctgccataaacccaaagccatagttcataccgagaaggtgaacatgatgtccctcacagtgcttgggctacgaatgctgtttgcaaagactgttgccgtcaattttctcttgactgccaagttatttttcttgtaaggctgactggcatgaggaagctacactcctgaagaaaccaaaggcttacaaaaatgcatctccttggcttctgacttctttgtgattcaagttgacctgtcatagccttgttaaaatggctgctagccaaaccactttttcttcaaagacaacaaacccagctcatcctccagcttgatgggaagacaaaagtcctggggaaggggggtttatgtcctaactgctttgtatgctgtttttataaagggatagaaggatat

SEQ ID NO: 5925 - DNA, 2889 bp, Homo sapien
cctgtctctcttcgggtctcgggcccttgggcgcagcggggcgcgcgccatggcgaaggcgaagaaggtcggggcgcgaaggaaggcctccggggcgccggcgggagcgcgagggggcccggcgaaggccaactccaatccgttcgaggtgaaagttaacaggcagaagttccagatcctgggccggaagacgcgccacgacgtgggactgcccggggtgtctcgcgcacgggccctcaggaagcgtacacagactttactaaaagagtacaaagaaagggataaatccaatgtattcagagataaacgcttcggagaatacaacagcaacatgagccccgaggagaagatgatgaagaggtttgctctggaacagcagcgacatcatgagaaaaaaagcatctacaatctaaatgaagatgaagaattgactcattatggccagtctttggcagacatcgagaagcataatgacattgtggacagtgacagcgatgctgaggatcgaggaacgttgtctgctgagctgactgctgcccactttggaggaggcggtgggctccttcacaagaagactcaacaggaaggcgaggagcgggagaaaccgaagtcccggaaagagctgattgaagagctcattgccaagtcaaaacaagagaagagggagagacaagctcaacgagaagatgccctcgagctcacggagaagctagaccaagactggaaagaaattcagactctcctgtcccacaaaactcccaagtcagagaacagagacaaaaaggaaaaacccaagcccgatgcatatgacatgatggttcgcgagcttggctttgaaatgaaggcgcagccctctaacaggatgaagacggaggcagaattggcaaaggaagagcaggagcacctcaggaagctggaggctgagagacttcgaagaatgcttggaaaggatgaggatgaaaatgttaagaaaccaaaacatatgtcagcagatgatctgaatgatggcttcgtgctagataaagatgacaggcgtttgctttcctacaaagatggaaagatgaatgtcgaggaagatgtccaggaagagcaaagcaaggaagccagtgaccctgagagcaacgaggaagaaggtgacagttcaggcggggaggacacagaggagagcgacagcccagatagccacttggacctggaatccaacgtggagagtgaggaagaaaacgagaagccagcaaaagagcagaggcagactcctgggaaagggttgataagcggcaaggaaagagctggaaaagctaccagagacgagctgccctacacgttcgcagcccctgaatcctatgaggaactgagatctctgttgttaggaagatcgatggaagagcagcttttggtggtggagagaattcagaagtgcaaccacccgagtctcgcagaaggaaacaaagcaaaattagaaaaactgtttggctttcttttggaatacgttggcgatttggctacagatgacccaccagacctcacagtcattgataagttggttgtgcacttatatcatctttgccagatgtttcctgaatctgcaagtgacgctatcaaatttgttctccgagatgcgatgcatgagatggaagaaatgattgagaccaaaggccgggcggcattgccagggttggatgtgctcatttatttgaaaatcactgggctgctatttccaacttccgacttctggcacccagtggtgacccctgccctcgtgtgcctcagtcagctgctcaccaagtgccccatcctgtccctccaggacgtggtgaagggcctgttcgtgtgctgcctgttcctggagtatgtggctttgtcccagaggtttatacctgagcttattaattttcttcttgggattctttacatagcaactccaaacaaagcaagccaaggttccactctggtgcaccctttcagagcgcttgggaagaactcggaactgctcgtggtgtctgctagagaggatgtggccacgtggcagcagagcagcctctccctccgctgggcgagtagactgagggccccaacttcgacagaggccaatcacatccgactgtcctgcctggctgtgggcctggccctgctgaagcgctgcgtgctcatgtacgggtccctgccatccttccacgccatcatggggcctctccaagccctcctcacggatcacctggcggactgcagccacccgcaggagctccaggagctgtgtcagagcacactgaccgaaatggaaagccagaagcagctctgccggccgctgacctgtgagaagagcaagcctgtcccactgaagcttttcacaccccggctggtcaaagtcctcgagtttggaagaaaacaaggcagtagtaaggaggaacaggaaaggaagaggctgatccacaaacacaagcgtgaatttaaaggggccgttcgagaaatccgcaaggacaatcagttcctggcgaggatgcaactctcagaaatcatggaacgggatgcggaaagaaagcggaaagtaaagcagctttttaacagcctggctacacaggaaggcgaatggaaggctctgaagaggaaaaagttcaaaaaataaattacattttataaataagctccccccacccgctgcctgcggttttgtttctgttaaaacgtcacctgatgaaatagaatgaatcctgaaatgcacctctgggatcgggaatggtctgtgtgttatcagctgcgactggttcactgcgtctggacaagcctcatggggactggggattctggccagtgtaatttctgtcaaccacggacgtttgccttcatgtgtagaatttactgttgttatgcaaattatattttcaattataa

SEQ ID NO: 5926 - protein, 873 aa, Homo sapien
LSLFGSRALGRSGARAMAKAKKVGARRKASGAPAGARGGPAKANSNPFEVKVNRQKFQILGRKTRHDVGLPGVSRARALRKRTQTLLKEYKERDKSNVFRDKRFGEYNSNMSPEEKMMKRFALEQQRHHEKKSIYNLNEDEELTHYGQSLADIEKHNDIVDSDSDAEDRGTLSAELTAAHFGGGGGLLHKKTQQEGEEREKPKSRKELIEELIAKSKQEKRERQAQREDALELTEKLDQDWKEIQTLLSHKTPKSENRDKKEKPKPDAYDMMVRELGFEMKAQPSNRMKTEAELAKEEQEHLRKLEAERLRRMLGKDEDENVKKPKHMSADDLNDGFVLDKDDRRLLSYKDGKMNVEEDVQEEQSKEASDPESNEEEGDSSGGEDTEESDSPDSHLDLESNVESEEENEKPAKEQRQTPGKGLISGKERAGKATRDELPYTFAAPESYEELRSLLLGRSMEEQLLVVERIQKCNHPSLAEGNKAKLEKLFGFLLEYVGDLATDDPPDLTVIDKLVVHLYHLCQMFPESASDAIKFVLRDAMHEMEEMIETKGRAALPGLDVLIYLKITGLLFPTSDFWHPVVTPALVCLSQLLTKCPILSLQDVVKGLFVCCLFLEYVALSQRFIPELINFLLGILYIATPNKASQGSTLVHPFRALGKNSELLVVSAREDVATWQQSSLSLRWASRLRAPTSTEANHIRLSCLAVGLALLKRCVLMYGSLPSFHAIMGPLQALLTDHLADCSHPQELQELCQSTLTEMESQKQLCRPLTCEKSKPVPLKLFTPRLVKVLEFGRKQGSSKEEQERKRLIHKHKREFKGAVREIRKDNQFLARMQLSEIMERDAERKRKVKQLFNSLATQEGEWKALKRKKFKK

SEQ ID NO: 5927 - DNA, 2486 bp, Homo sapien
ccgggactttgcaggcagcggcggccgggggcggagcgggatcgagccctcgccgaggcctgccgccatgggcccgcgccgccgccgccgcctgtcacccgggccgcgcgggccgtgagcgtcatggccttggccggggcccctgcgggcggcccatgcgcgccggcgctggaggccctgctcggggccggcgcgctgcggctgctcgactcctcgcagatcgtcatcatctccgccgcgcaggacgccagcgccccgccggctcccaccggccccgcggcgcccgccgccggcccctgcgaccctgacctgctgctcttcgccacaccgcaggcgccccggcccacacccagtgcgccgcggcccgcgctcggccgcccgccggtgaagcggaggctggacctggaaactgaccatcagtacctggccgagagcagtgggccagctcggggcagaggccgccatccaggaaaaggtgtgaaatccccgggggagaagtcacgctatgagacctcactgaatctgaccaccaagcgcttcctggagctgctgagccactcggctgacggtgtcgtcgacctgaactgggctgccgaggtgctgaaggtgcagaagcggcgcatctatgacatcaccaacgtccttgagggcatccagctcattgccaagaagtccaagaaccacatccagtggctgggcagccacaccacagtgggcgtcggcggacggcttgaggggttgacccaggacctccgacagctgcaggagagcgagcagcagctggaccacctgatgaatatctgtactacgcagctgcgcctgctctccgaggacactgacagccagcgcctggcctacgtgacgtgtcaggaccttcgtagcattgcagaccctgcagagcagatggttatggtgatcaaagcccctcctgagacccagctccaagccgtggactcttcggagaactttcagatctcccttaagagcaaacaaggcccgatcgatgttttcctgtgccctgaggagaccgtaggtgggatcagccctgggaagaccccatcccaggaggtcacttctgaggaggagaacagggccactgactctgccaccatagtgtcaccaccaccatcatctcccccctcatccctcaccacagatcccagccagtctctactcagcctggagcaagaaccgctgttgtcccggatgggcagcctgcgggctcccgtggacgaggaccgcctgtccccgctggtggcggccgactcgctcctggagcatgtgcgggaggacttctccggcctcctccctgaggagttcatcagcctttccccaccccacgaggccctcgactaccacttcggcctcgaggagggcgagggcatcagagacctcttcgactgtgactttggggacctcacccccctggatttctgacagggcttggagggaccagggtttccagagtagctcaccttgtctctgcagccctggagccccctgtccctggccgtcctcccagcctgtttggaaacatttaatttatacccctctcctctgtctccagaagcttctagctctggggtctggctaccgctaggaggctgagcaagccaggaagggaaggagtctgtgtggtgtgtatgtgcatgcagcctacacccacacgtgtgtaccgggggtgaatgtgtgtgagcatgtgtgtgtgcatgtaccggggaatgaaggtgaacatacacctctgtgtgtgcactgcagacacgccccagtgtgtccacatgtgtgtgcatgagtccatctctgcgcgtgggggggctctaactgcactttcggcccttttgctcgtggggtcccacaaggcccagggcagtgcctgctcccagaatctggtgctctgaccaggccaggtggggaggctttggctggctgggcgtgtaggacggtgagagcacttctgtcttaaaggttttttctgattgaagctttaatggagcgttatttatttatcgaggcctctttggtgagcctggggaatcagcaaaaggggaggaggggtgtggggttgataccccaactccctctacccttgagcaagggcaggggtccctgagctgttcttctgccccatactgaaggaactgaggcctgggtgatttatttattgggaaagtgagggagggagacagactgactgacagccatgggtggtcagatggtggggtgggccctctccagggggccagttcagggcccagctgccccccaggatggatatgagatgggagaggtgagtgggggaccttcactgatgtgggcaggaggggtggtgaaggcctcccccagcccagaccctgtggtccctcctgcagtgtctgaagcgcctgcctccccactgctctgccccaccctccaatctgcactttgatttgcttcctaacagctctgttccctcctgctttggttttaataaatattttgatgacgtt

SEQ ID NO: 5928 - protein, 437 aa, Homo sapien
MALAGAPAGGPCAPALEALLGAGALRLLDSSQIVIISAAQDASAPPAPTGPAAPAAGPCDPDLLLFATPQAPRPTPSAPRPALGRPPVKRRLDLETDHQYLAESSGPARGRGRHPGKGVKSPGEKSRYETSLNLTTKRFLELLSHSADGVVDLNWAAEVLKVQKRRIYDITNVLEGIQLIAKKSKNHIQWLGSHTTVGVGGRLEGLTQDLRQLQESEQQLDHLMNICTTQLRLLSEDTDSQRLAYVTCQDLRSIADPAEQMVMVIKAPPETQLQAVDSSENFQISLKSKQGPIDVFLCPEETVGGISPGKTPSQEVTSEEENRATDSATIVSPPPSSPPSSLTTDPSQSLLSLEQEPLLSRMGSLRAPVDEDRLSPLVAADSLLEHVREDFSGLLPEEFISLSPPHEALDYHFGLEEGEGIRDLFDCDFGDLTPLDF

SEQ ID NO: 5929 - DNA, 3587 bp, Homo sapien; identical to SEQ ID NO: 2844

SEQ ID NO: 5930 - protein, 355 aa, Homo sapien
IQHNEGAMECQFNVSLVLEGKKNTCNGGNSEAVPLTSPNIAKFSTPPAILRKKRKMRVGHSPGSELRDGSLNDGGNMALKHTPLKTLPFSPSQFFNTCPGNEQLNIENPSFTSTPICGQKALITTPLHKETTPKDQKENVGFRTPTIRRSILGTTPRTPTPFKNALAAQEKKYGPLKIVSQPLAFLEEDIREVLKEETGTDLFLKEEDEPAYKSCKQENTASGKKVRKSLVLDNWEKEESGTQLLTEDISDMQSENRFTTSLLMIPLLEIHDNRCNLIPEKQDINSTNKTYTLTKKKPNPNTSKVVKLEKNLQSNCEWETVVYGKTEDQLIMTEQARRYLSTYTATSSTSRALIL

SEQ ID NO: 5931 - DNA, 1143 bp, Homo sapien; identical to SEQ ID NO: 3151

SEQ ID NO: 5932 - protein, 170 aa, Homo sapien; identical to SEQ ID NO: 3152

SEQ ID NO: 5933 - DNA, 3372 bp, Homo sapien; identical to SEQ ID NO: 2532

SEQ ID NO: 5934 - protein, 724 aa, Homo sapien
MSAEGYQYRALYDYKKEREEDIDLHLGDILTVNKGSLVALGFSDGQEARPEEIGWLNGYNETTGERGDFPGTYVEYIGRKKISPPTPKPRPPRPLPVAPGSSKTEADVEQQALTLPDLAEQFAPPDIAPPLLIKLVEAIEKKGLECSTLYRTQSSSNLAELRQLLDCDTPSVDLEMIDVHVLADAFKRYLLDLPNPVIPAAVYSEMISLAPEVQSSEEYIQLLKKLIRSPSIPHQYWLTLQYLLKHFFKLSQTSSKNLLNARVLSEIFSPMLFRFSAASSDNTENLIKVIEILISTEWNERQPAPALPPKPPKPTTVANNGMNNNMSLQNAEWYWGDISREEVNEKLRDTADGTFLVRDASTKMHGDYTLTLRKGGNNKLIKIFHRDGKYGFSDPLTFSSVVELINHYRNESLAQYNPKLDVKLLYPVSKYQQDQVVKEDNIEAVGKKLHEYNTQFQEKSREYDRLYEEYTRTSQEIQMKRTAIEAFNETIKIFEEQCQTQERYSKEYIEKFKREGNEKEIQRIMHNYDKLKSRISEIIDSRRRLEEDLKKQAAEYREIDKRMNSIKPDLIQLRKTRDQYLMWLTQKGVRQKKLNEWLGNENTEDQYSLVEDDEDLPHHDEKTWNVGSSNRNKAENLLRGKRDGTFLVRESSKQGCYACSVVVDGEVKHCVINKTATGYGFAEPYNLYSSLKELVLHYQHTSLVQHNDSLNVTLAYPVYAQQRR

SEQ ID NO: 5935 - DNA, 1716 bp, Homo sapien; identical to SEQ ID NO: 4481

SEQ ID NO: 5936 - protein, 245 aa, Homo sapien; identical to SEQ ID NO: 4482

SEQ ID NO: 5937 - DNA, 956 bp, Homo sapien
agaaagtcgacgggcgtggcgggggaggggacgctgagggcccatgtgctgaaaatccgaagtgccgcggaaagtggaggtgagggccgcccgccctagaggtgcccgtccgagaggcagagctgacaaggaaggtttcgagcgttttgctggcaaagggatttcttacaacctccaggcatgcgtctttctgccctgctggccttggcatccaaggtcactctgcccccccattaccgctatgggatgagccccccaggctctgttgcagacaagaggaagaaccccccatggatcaggcggcgcccagtggttgtggaacccatctctgatgaagactggtatctgttctgtggggacacggtggagatcctagaaggcaaggatgccgggaagcagggcaaagtggttcaagttatccggcagcgaaactgggtggtcgtgggagggctgaacacacattaccgctacattggcaagaccatggattaccggggaaccatgatccctagtgaagcccccttgctccaccgccaggtcaaacttgtggatcctatggacaggaaacccactgagatcgagtggagatttactgaagcaggagagcgggtacgagtctccacacgatcagggagaattatccctaaacccgaatttcccagagctgatggcatcgtccctgaaacgtggattgatggccccaaagacacatcagtggaagatgctttagaaagaacctatgtgccctgtctaaagacactgcaggaggaggtgatggaggccatggggatcaaggagacccggaaatacaagaaggtctattggtattgagcctggggcagagcagctcctccccaacttctgtcccagccttgaaggctgaggcacttctttttcagatgccaataaagagcactttatgagtccaaaaaaaaaaaaaaaaaaaaaaaaaaaaa

SEQ ID NO: 5938 - protein, 216 aa, Homo sapien
MRLSALLALASKVTLPPHYRYGMSPPGSVADKRKNPPWIRRRPVVVEPISDEDWYLFCGDTVEILEGKDAGKQGKVVQVIRQRNWVVVGGLNTHYRYIGKTMDYRGTMIPSEAPLLHRQVKLVDPMDRKPTEIEWRFTEAGERVRVSTRSGRIIPKPEFPRADGIVPETWIDGPKDTSVEDALERTYVPCLKTLQEEVMEAMGIKETRKYKKVYWY

SEQ ID NO: 5939 - DNA, 2078 bp, Homo sapien; identical to SEQ ID NO: 2551

SEQ ID NO: 5940 - DNA, 3000 bp, Homo sapien
cccgagcggcgagacggtccccgccatgtctgcggccatgagggagaggttcgaccggttcctgcacgagaagaactgcatgactgaccttctggccaagctcgaggccaaaaccggcgtgaacaggagcttcatcgctcttggtgtcatcggactggtggccttgtacctggtgttcggttatggagcctctctcctctgcaacctgataggatttggctacccagcctacatctcaattaaagctatagagagtcccaacaaagaagatgatacccagtggctgacctactgggtagtgtatggtgtgttcagcattgctgaattcttctctgatatcttcctgtcatggttccccttctactacatgctgaagtgtggcttcctgttgtggtgcatggccccgagcccttctaatggggctgaactgctctacaagcgcatcatccgtcctttcttcctgaagcacgagtcccagatggacagtgtggtcaaggaccttaaagacaaggccaaagagactgcagatgccatcactaaagaagcgaagaaagctaccgtgaatttactgggtgaagaaaagaagagcacctaaaccagactggatggaaacttcctgccctctctgtaccttcctactggagcttgatgttatattagggactgtggtataattattttaataatgttgccttggaaacatttttgagatattaaagattggaatgtgttgtaagtttctttgcttacttttactgtctatatatatagggagcactttaaacttaatgcagtgggcagtgtccacgtttttggaaaatgtattttgcctctgggtaggaaaagatgtatgttgctatcctgcaggaaatataaacttaaaataaaattatataccccacaggctgtgtactttactgggctctccctgcacgcattttctctgtagttacatttaggataatctttatggttctacttcctataatgtacaattttatataattctgaaatgtttttaatgtatttgtgcacatgtacatatggaaatgttactgtctgactacaacatgcatcatgctcatggggagggagcaggggaaggttgtatgtgtcatttataacttctgtacagtaagaccacctgccaaaagctggaggaaccattgtgctggtgtggtctactaaataatactttaggaaatacgtgattaatatgcaagtgaacaaagtgagaaatgaaatcgaatggagattggcctggttgtttccctagtatatggcatatgaataccaggatagctttataaagcagttagttagttactcactctagtgataaatcgggaaatttacacacacacacacacacacacacacacagagtaacctgtaactctcaattccctgaaaaactagtaatactgtcttatctgctataaactttacatatttgtctattgtcaagatgctacaatggaaaccatttctggttttatcttcaaagcggagaaacatgttgatttagtcttctttcccaatcttcttttttaaaccagtttaaggaacttctgaagatttgtccacctctgattacatgtatgttcttgtttgtatcattagcaacaacatgctaatgacgacacctagctctaagagcaattctgggagaatgaaaggaagtataaagtaacccataatctgcttggcaatagttaagtcaatctatcttcagtttttctctggcctttaaggtcaaacacaagaggcttccctagtttacaagtcagagtcacttgtagtccatttaaatgccctcatccgtattctttgtgttgataagctgcacatgactacatagtaagtacagaacagtaaagttaaaacggatgtctccattgatctgccaaatcgttatagagagcaatttgtctggactagaaaatctgagttttacaccatactgttaagagtccttttgaattaaactagactaaaacaagtgtataactaaactaacaagattaaatatccagccagtacagtattttttaaggcaaataaagatgattagctcaccttgagataacaatcaggtaagatcataacaatgtctcatgatgtaaaaaatattaaagatatcaatactaagtgacagtatcactctaatataatatggatcagagcatttattttggggaggaaaacagtggtgattaccggcattttattaaacttaaaactttgtagaaagcaaacaaaattgttcttgggagaaaatcaacttttagattaaaaaaattttaagtatctaggagtatttaaatccttttcccataaataaaagtacagttttcttggtggcagaatgaaaatcagcaacttctagcatatagactatataatcagattgacagcatatagaatatattatcagacaagatgaggaggtataaaagttactattgctcataatgacttacaggctaaaattagttttaaaatactatattaaattctgaatgcaatttttttttgttcccttgagaccaaaatttaagttaactgttgctggcagtctaagtgtaaatgttaacagcaggagaagttaagaattgagcagttctgttgcatgatttcccaaatgaaatactgccttggctagagtttgaaaaactaattgagcctgtgcctggctagaaaacaagcgtttatttgaatgtgaatagtgtttcaaaggtatgtagttacagaattcctaccaaacagcttaaattcttcaagaaagaattcctgcagcagttattcccttacctgaaggcttcaatcatttggatcaacaactgctactctcgggaagactcctctactcacagctgaagaaaatgagcacacccttcacactgttattacctatcctgaagatgtgatacactgaatggaaataaatagatgtaaataaaattgagttctcatttaacaaaaaaaaaaaaaaaaaaa

SEQ ID NO: 5941 - protein, 185 aa, Homo sapien
MRERFDRFLHEKNCMTDLLAKLEAKTGVNRSFIALGVIGLVALYLVFGYGASLLCNLIGFGYPAYISIKAIESPNKEDDTQWLTYWVVYGVFSIAEFFSDIFLSWFPFYYMLKCGFLLWCMAPSPSNGAELLYKRIIRPFFLKHESQMDSVVKDLKDKAKETADAITKEAKKATVNLLGEEKKST

SEQ ID NO: 5942 - DNA, 1261 bp, Homo sapien
  Unsure 481: Unknown base
gttttcaaactcatttctaagccaaatagtttagataaatatttacccttatatttggggggaattcaggctcaccatttgccgaggcaagcccatcaacagtctagaggcatattctgtgtcattccttcccgtctccttcatagaatactactttttccttttgtctcctggccattctccatcatctgctgattattgctaaccacaggatgctggcaaagcttacagtgataggcacatgtgttcagtgatgtccaatacactcttatcacagtggttattgcttcttactcttttcaaatgcattattctacccctcaacctayatccaatcattagaactatacctgactggagcccagaacttgggaccaatacttaattcaaatagcaggggcttgctcacaaacattaagcccaamaagaagcacagcactttkgaaaagtcaaataggsctttggtagctctgtacatttngcaatttacattgttattaagtttatagcactaataacacttcagtcgtgaatctacagtctcaatatgataagtcttagaacatgttctagaaatagtggtaccttgctgctattatacttagtaacttataccccaatataataataagtattaaatacagattgtgtatgcattctttgtgtgtatatgccaactgtactacttaacctcactgatgagcaattagaaaaatacacaaattgtcatagtgaaaataagtcttggtcaattcagatgatacgtgaacctgataaatgctctaatagatatgctattttgtcctgtattgcttgttttacagtatggtgcatgttgtttgctaagtaaaatgataataataataaagtatacccaattttaaggttagaattaaaattttgcacatatgcttcttgatattctgaaatgtattctgtggsttmattatcttattcatacacattkmgctwggctttttacccctaggaaataactgtccaagtatatatctcgtcttctttcttgtaactttgattaaactgcttacttcaacttacaacattgtaaagccagaatacctcattttaacagtgaaaaaaaatattatgacctgatgtgttctcttgtatttgatttgaactacctaaataggcttaactgtaataataaatatacaattttggcaaaaaaaaaaaaaaaaaaaaaaaaaaaaaaaaaaaaaaaaaaaaaaaaaaaaaaaaaaaaaaaaaaagggcggcc

SEQ ID NO: 5943 - protein, 43 aa, Homo sapien
  unsure 26: unknown amino acid
  Unsure 481: Unknown amino acid
MSNTLLSQWLLLLTLFKCIILPLNLXPIIRTIPDWSPELGTNT

SEQ ID NO: 5944 - DNA, 1958 bp, Homo sapien
gggcccgcctcgattttcccaggcgagggcacgcccgcgtcagtcgcctccggggcaccttcctcgccacgacacgcaggtaaccgggccccgggagccggtcggcggcggcggactgggaccttgatcctgcctgcccggccgcccgacaagggaatgagagcggaccccgaactccacacacccgcgtttagccgccacacctaaggggcagaacagtctttttgggtaagggccgggctgggggcgacgcgccccgcccgctttgcagacttcggggtgctctgcacgacgcctgaaaggccgcggggcccgcatttctctgtgctgccctcctggagaaccgggacacggggacgggagggccagcatcggctacggcccggtttcccgtttctttcctctgtcgcgtctgggccctcctgcagcgtccatgatgaaggccaggggctgttgctttcctctcgcccagtagccaacccaagcaagggaattaattatctgaagaaatggatacttctccctccagaaaatatccagttaaaaaacgggtgaaaatacatcccaacacagtgatggtgaaatatacttctcattatccccagcctggcgatgatggatatgaagaaatcaatgaaggctatgggaattttatggaggaaaatccaaagaaaggtctgctgagtgaaatgaaaaaaaaagggagagctttctttggaaccatggataccctacctccaccaacagaagacccaatgatcaatgagattggacaattccagagctttgcagaaaaaaacatttttcaatcccgaaaaatgtggatagtgctgtttggatctgctttggctcatggatgtgtagctcttatcactaggcttgtttctgatcggtctaaagttccatctctagaactgatttttatccgttctgtttttcaggtcttatctgtgttagttgtgtgttactatcaggaggccccctttggacccagtggatacagattacgactcttcttttatggtgtatgcaatgtcatttctatcacttgtgcttatacatcattttcaatagttcctcccagcaatgggaccactatgtggagagccacaactacagtcttcagtgccattttggcttttttactcgtagatgagaaaatggcttatgttgacatggctacagttgtttgcagcatcttaggtgtttgtcttgtcatgatcccaaacattgttgatgaagacaattctttgttaaatgcctggaaagaagcctttgggtacaccatgactgtgatggctggactgaccactgctctctcaatgatagtatacagatccatcaaggagaagatcagcatgtggactgcgctgtttacttttggttggactgggacaatttggggaatatctactatgtttattcttcaagaacccatcatcccattagatggagaaacctggagttatctcattgctatatgtgtctgttctactgcagcattcttaggagtttattatgccttggacaaattccatccagctttggttagcacagtacaacatttggagattgtggtagctatggtcttgcagcttctcgtgctgcacatatttcctagcatctatgatgtttttggaggggtaatcattatgattagtgtttttgtccttgctggctataaactttactggaggaatttaagaaggcaggactaccaggaaatactagactctcccattaaatgaatacctgattattattgtctcattaatgttcagttattaatatgtatactgccattttaatgtttacctatgaatgtcttttgtgttatataactgacagagtgctataaaatatataatatatacaaatgcagaaaatttattctagtctaatatattcaaatacaaatattaaatatatgaaatacgttaaaaaaaaaaaaaaaaaaa

SEQ ID NO: 5945 - protein, 412 aa, Homo sapien
MDTSPSRKYPVKKRVKIHPNTVMVKYTSHYPQPGDDGYEEINEGYGNFMEENPKKGLLSEMKKKGRAFFGTMDTLPPPTEDPMINEIGQFQSFAEKNIFQSRKMWIVLFGSALAHGCVALITRLVSDRSKVPSLELIFIRSVFQVLSVLVVCYYQEAPFGPSGYRLRLFFYGVCNVISITCAYTSFSIVPPSNGTTMWRATTTVFSAILAFLLVDEKMAYVDMATVVCSILGVCLVMIPNIVDEDNSLLNAWKEAFGYTMTVMAGLTTALSMIVYRSIKEKISMWTALFTFGWTGTIWGISTMFILQEPIIPLDGETWSYLIAICVCSTAAFLGVYYALDKFHPALVSTVQHLEIVVAMVLQLLVLHIFPSIYDVFGGVIIMISVFVLAGYKLYWRNLRRQDYQEILDSPIK

SEQ ID NO: 5946 - DNA, 10742 bp, Homo sapien
caaaaatcagtctgatctcgggaaacctggagaaatttattttctgtactctaatgttctttcattttggtgaccatcaaggtgctgggagaggaattagatggctgtaattcaaagttaatggaattagatgcagcagtacagaaattcttggaacagaatggccaactgggtaagccactggccaagaagataggaaaactgactgaacttcaccagcagaccattagacaagctgagaatcggctctccaagctcaatcaggcaacatcacatttagaagaatacaatgaaatgcttgaattaattttgaagtggattgaaaaagctaaagtcttggctcatggaactattgcatggaattctgcaagccagcttcggaaacaatatattttgcatcagaccctgctagaagaatccaaagaaattgacagtgagctggaagcaatgactgagaaattacagtacctcactagcgtgtactgtacagaaaaaatgtctcagcaagtggcagaactgggacgggagactgaggagttgcgacagatgatcaaaattcgtttgcagaacctccaagatgcagctaaggatatgaaaaaatttgaagcagagttgaaaaagttacaagctgccttggagcaagcccaggcaacactgacttctccagaagttggacgtctcagtctcaaggagcagctctctcatcggcagcatttgttgtctgagatggagtcactgaagccgaaggtgcaagcagtgcagctctgccagagtgccctccggatccccgaggatgtggttgccagcttacctctctgtcatgctgctctgcggctgcaggaagaggccagccggctgcagcacaccgccatccagcagtgtaacatcatgcaggaagctgtggtacaatatgaacaatatgagcaagaaatgaaacatctccagcaactgatagaaggagctcacagagagattgaggataaacctgttgccaccagtaacatacaggagctgcaggctcagatttctcggcatgaggagctggcgcagaaaattaagggctaccaggagcagatcgcttctttgaattccaagtgcaagatgctgacgatgaaagccaagcacgccaccatgctgctgacggtgaccgaggtcgaggggctggcggaagggacagaggacctggatggggagctcctccccacgccttcggcccacccctctgtggtcatgatgactgcaggtcgctgtcacactttgctgtcaccggtcactgaggagtctggggaggagggaaccaacagtgagatttcctctccacctgcctgtcgctccccttcacctgtggctaatacagatgcttctgttaaccaggacattgcatattaccaagccttgtctgctgagaggttgcagacagatgctgcaaaaattcaccccagcacatccgcatcccaggagttctatgaaccgggattggagccatccgctactgccaaactgggtgatttgcagcgttcttgggaaaccttaaagaatgtgatcagtgagaagcagcgcacactctatgaagctttggagcgccagcagaagtaccaggactccctccagtccatctctacgaagatggaggccattgagctgaaactcagtgagagcccagagcctggcaggagtccagaaagccagatggctgaacatcaggcattgatggatgagattctcatgctccaggatgaaatcaatgagctccagtcctctctcgcagaggagctggtatccgagtcttgtgaggccgaccctgcggagcagctggccttgcagtccacgctcactgtcttagccgagcgaatgtccaccatcaggatgaaagcctcggggaaacggcagcttttggaggagaagttgaatgatcagctggaggaacaaaggcaggaacaggccctgcagaggtatcgctgtgaagccgatgagctggacagctggctcttgagtaccaaggccactctggacactgcgctgagtccacccaaggagcccatggacatggaggcccagcttatggactgccagaatatgctggtggaaatagagcagaaggtggtggctttatcagaactgtcagtccacaatgagaacctgctgctggagggcaaagctcacaccaaggacgaggccgagcagctggctggaaagctgagaaggctcaaggggagcctgctggagctgcagagagccctgcatgataagcagctcaacatgcagggaacagcacaggagaaggaggagagcgatgttgacctaacagccacgcagagccccggcgtccaggaatggctggcccaagctcgcaccacatggacccagcagcggcagagcagtctccagcaacaaaaagagttagaacaggaattagccgagcagaagagtctccttcgctcagtagccagtcgtggagaggagattctaattcaacattcggcggcagagacctctggtgatgctggcgaaaaacctgatgtgttatcccaggagttggggatggaaggggagaaatcatccgctgaagaccagatgagaatgaaatgggaaagcctacatcaagaatttagtaccaagcagaaactactacagaatgttctggaacaggaacaagagcaagtgctttatagcaggccaaatcgactcttgtctggtgtgccactgtacaaaggggacgtgccaacccaagataaatctgcagttacatctttgctggatggactgaaccaagccttcgaggaggtttcatcccagagtggaggggcaaagaggcagagtatacacttggagcagaagttgtatgatggagtctcagccacctctacttggttggatgacgttgaagaacgtttatttgttgccacagcacttttaccagaagaaacagagacttgtctcttcaaccaagagattcttgccaaagacattaaggaaatgtctgaagaaatggataagaacaaaaacttgttttcccaagcttttccagagaatggtgataatcgagatgttattgaagatactttgggttgtcttttgggcaggttatccttgctagactcagtagtgaatcaacgatgtcatcagatgaaagaaagacttcagcaaatactaaatttccagaatgatctgaaagtgctgtttacatcactggctgacaacaaatacatcattctgcaaaaactggcaaatgtgtttgaacagcccgtagcagaacaaatagaggcaatacaacaggctgaagatggactcaaagaatttgatgcaggaatcattgaattaaagaggcgtggtgacgagctacaggtcgagcagccgtccatgcaagaactctccaagctccaggacatgtatgatgagctgatgatgatcattggctcccggaggagtggtctgaatcagaaccttacactcaagagtcagtatgagagggccctacaagatctggctgacctgctagaaactggtcaggagaagatggcaggagaccagaaaatcatcgtgtcttccaaagaggaaatccagcaaccacttgacaaacataaggaatactttcagggcctggaatctcatatgatcttgactgtaacactcttcagaaagataatcagctttgcagtccaaaaggaaacccagttccatacagagctgatggctcaggcttctgctgtactgaaacgggctcacaagaggggtgtggagctggagtacattctagagacgtggtcccatctggatgaggaccagcaggagctcagcagacagctggaggtggtggaaagcagcatcccaagcgtgggtctggtggaggagaacgaggacaggcttattgaccgcataacactctaccagcatttaaaatctagccttaatgaataccagcccaaattatatcaagtattagatgatgggaaacgacttctgatatccatcagctgctcagatctagaaagccaactaaatcaacttggagagtgctggctaagtaacaccaataaaatgtctaaggaacttcacagactggaaacaatattgaaacactggaccagatatcaaagtgaatctgcagatctaattcactggttacaatctgcaaaagaccggctagaattttggactcagcaatctgtgacagtcccacaagagctggaaatggtccgtgatcatctaaatgctttcctggagttttctaaagaagtggatgcccaatcttccctgaaatcatctgttctgagtactggaaatcagctccttcgactaaaaaaggtggacacagccacgctgcgctctgagttgtcgcgcattgatagccagtggactgacctgctaaccaatatcccagccgtccaggagaagctccaccagctccagatggataaactgccttcccgccatgccatttctgaagtcatgagttggacttctctaatggaaaatgctattcagaaggatgaagataatattaaaaattccataggttacaaggcaattcatgaataccttcagaaatataagggttttaagatagacattaactgtaaacagctgacagtggattttgtgaaccagtccgtgctacaaatcagcagtcaggatgtggaaagtaagcgtagtgataagactgattttgctgagcaacttggagcaatgaataaaagttggcaaattctgcaaggtctagtaactgagaagatccagctgttggaaggcttattggaatcttggtcagaatatgaaaataatgtacaatgtctgaaaacatggtttgaaacccaggaaaagagactaaaacaacagcatcgaattggagatcaggcttctgttcaaaatgcactgaaagactgtcaggatctggaagatctgattaaagcaaaagataaagaagtagagaaaattgagcagaatggacttgctttgattcagaccaagaaagaagacgtctctagcattgtcatgagcacactgcgagagctcggccaaacctgggcaaatttagatcacatggttggacaattaaagatactgctgaaatcagtgcttgaccaatggagtagtcacaaagtggcctttgacaagataaacagttacctcatggaggccagatactctctttcccgattccgtctgctgactggctccttagaagctgtgcaagttcaggtggacaatcttcagaatctccaagatgatctggaaaaacaggaaaggagcttacagaaatttggctctatcaccaaccaattattaaaagagtgtcacccacccgtgacagaaactcttaccaatacactgaaagaagtcaacatgagatggaataacttgctggaagagattgctgagcagctacagtccagcaaggccctacttcagctttggcaaagatacaaggactactccaaacagtgtgcttcgacagttcagcagcaggaggatcgaaccaatgagctgttgaaggcagccacaaacaaggacattgccgatgatgaggttgccacatggattcaagattgcaacgacctcctcaaaggactgggcacagttaaagattccctctttgttctccatgagctgggagagcaactgaagcaacaagtggatgcttccgcagcatcagctattcaatcggatcaactctctttgagtcaacacttgtgtgccctggagcaagctctctgcaaacagcagacttcattacaggctggagttcttgattatgaaacctttgccaagagtttagaagctttggaggcctggatagtggaagctgaagaaatactacaagggcaggaccctagccactcatctgacctctccacaatccaggaaaggatggaagaacttaagggacagatgttaaaattcagcagcatggctccagatttagaccgtctaaatgagcttggatataggttacccttgaatgataaggaaatcaaaagaatgcagaatctgaaccgccattggtctctgatctcctctcagactacagaaagattcagcaagttgcagtcatttttgctacaacatcagactttcttggaaaaatgtgaaacatggatggaattcctagttcagacagaacaaaagttagcagtagagatttcaggaaattatcagcaccttttggaacagcagagagcacacgagttgtttcaagccgagatgttcagtcgtcagcagattttgcactcaatcattattgatgggcaacgtcttctagaacaaggtcaagttgatgacagggatgaattcaacctgaaattgacactcctcagtaatcaatggcagggagtgattcgcagggcccagcagaggcgggggatcattgacagccagattcgccagtggcagcgctatagggagatggcagaaaagcttcgtaaatggttggttgaagtgtcctacctccccatgagtggtctcggaagtgttcctataccactgcaacaagcaaggaccctctttgatgaagtgcagttcaaagaaaaagtgtttctgcggcaacaaggcagctacatcctgactgtggaggctggcaagcaactccttctctcggcggacagtggcgctgaggccgccttgcaggccgaactcgctgaaatccaagagaaatggaaatcagccagcatgcggctggaagaacagaagaaaaaactagccttcttgttgaaagactgggaaaaatgtgagaaaggaatagcagattccctggagaaactacgaactttcaaaaagaagctttcgcagtctctcccggatcaccatgaagagctccatgcagaacaaatgcgttgcaaggaattagaaaatgcagttgggagctggacagatgacttgacccagttgagcctgctgaaggacaccctctctgcctatatcagtgctgatgatatctccattcttaatgaacgcgtagagcttctgcaaaggcagtgggaagaactatgccaccagctctccttaaggcggcagcaaataggtgaaagattgaatgaatgggcagtcttcagtgaaaagaacaaggaactctgtgagtggttgactcaaatggaaagcaaagtttctcagaatggagacattctcattgaagaaatgatagagaagctcaagaaggattatcaagaggaaattgctattgctcaagagaacaaaatacagctccaacaaatgggagaacgacttgctaaagccagccatgaaagcaaagcatctgagattgaatacaagctgggaaaggtcaacgaccggtggcagcatctcctggacctcattgcagccagggtgaagaagctgaaggagaccctggtagccgtgcagcagcttgataagaacatgagcagcctgaggacctggctcgctcacatcgagtcagagctggccaagccaatagtctacgattcctgtaactcggaagaaatacagagaaagcttaatgagcagcaggagcttcagagagacatagagaagcacagtacaggtgttgcatctgtcctcaacctgtgtgaagtcctgctgcacgactgtgacgcctgtgccactgatgccgagtgtgactctatacagcaggctacgagaaacctggaccggcggtggagaaacatttgtgctatgtccatggaaaggaggctgaaaatcgaagagacgtggcgattgtggcagaaatttctggatgactattcacgttttgaagattggctgaagtcttcagaaaggacagctgcttttcccagctcttctggggtgatctatacagttgccaaggaagaactaaagaaatttgaggctttccagcgacaggtccacgagtgcctgacgcagctggaactgatcaacaagcagtaccgccgcctggccagggagaaccgcactgattcagcatgtagcctcaaacagatggttcacgaaggcaaccagagatgggacaacctgcaaaagcgtgtcacctccatcttgcgcagactcaagcattttattggccagcgtgaggagtttgagactgcgcgggacagcattctggtctggctcacagagatggatctgcagctcactaatattgaacatttttctgagtgtgatgttcaagctaaaataaagcaactcaaggccttccagcaggaaatttcactgaaccacaataagattgagcagataattgcccaaggagaacagctgatagaaaagagtgagcccttggatgcagcgatcatcgaggaggaactagatgagctccgacggtactgccaggaggtcttcgggcgtgtggaaagataccataagaaactgatccgcctgcctctcccagacgatgagcacgacctctcagacagggagctggagctggaagactctgcagctctgtcggacctgcactggcacgaccgctctgcagacagcctgctttctccacagccttcctccaatctctccctctcgctcgctcagcccctccggagcgagcggtcaggacgagacaccccagctagtgtggactccatccccctggagtgggatcacgactatgacctcagtcgggacctggagtctgcaatgtccagagctctgccctctgaggatgaagaaggtcaggatgacaaagatttctacctccggggagctgttgccttatcaggggaccacagtgccctagagtcacagatccgacaactgggcaaagccctggatgatagccgctttcagatacagcaaaccgaaaatatcattcgcagcaaaactcccacggggccggagctagacaccagctacaaaggctacatgaaactgctgggcgaatgcagtagcagtatagactccgtgaagagactggagcacaaactgaaggaggaagaggagagccttcctggctttgttaacctgcatagtaccgaaacccaaacggctggtgtgattgaccgatgggagcttctccaggcccaggcattgagcaaggagttgaggatgaagcagaacctccagaagtggcagcagtttaactcagacttgaacagcatctgggcctggctgggggacacggaggaggagttggaacagctccagcgtctggaactcagcactgacatccagaccatcgagctccagatcaaaaagctcaaggagctccagaaagctgtggaccaccgcaaagccatcatcctctccatcaatctctgcagccctgagttcacccaggctgacagcaaggagagccgggacctgcaggatcgcttgtcgcagatgaatgggcgctgggaccgagtgtgctctctgctggaggagtggcggggcctgctgcaggatgccctgatgcagtgccagggtttccatgaaatgagccatggtttgcttcttatgctggagaacattgacagaaggaaaaatgaaattgtccctattgattctaaccttgatgcagagatacttcaggaccatcacaaacagcttatgcaaataaagcatgagctgttggaatcccaactcagagtagcctctttgcaagacatgtcttgccaactactggtgaatgctgaaggaacagactgtttagaagccaaagaaaaagtccatgttattggaaatcggctcaaacttctcttgaaggaggtcagtcgtcatatcaaggaactggagaagttattagacgtgtcaagtagtcagcaggatttgtcttcctggtcttctgctgatgaactggacacctcagggtctgtgagtcccacatcaggaaggagcaccccaaacagacagaaaacgccacgaggcaagtgtagtctctcacagcctggaccctctgtcagcagtccacatagcaggtccacaaaaggtggctccgattcctccctttctgagccagggccaggtcggtccggccgcggcttcctgttcagagtcctccgagcagctcttccccttcagcttctcctgctcctcctcatcgggcttgcctgccttgtaccaatgtcagaggaagactacagctgtgccctctccaacaactttgcccggtcattccaccccatgctcagatacacgaatggccctcctccactctgaactaagcagatgccatctgcagaagtgctggtagcataaggaggatcgggtcataagcaatcccaaactaccaacaagaggaccttgatcttggcgaaagccctcggtgtggcagctttagccctcctccagatcacatgtgtgcaaattatggcttcagaggtggaagataaacagtgacgggggaacaaacagacaacaagaaggtttggaagaaatctggtttgagactctgaaccttagcactaaggagattgagtaaggacctccaaagttccccggactcatgaattctgggcccttggcccattctgtgcacagccaaggacttcagtagaccatctgggcagctttcccatggtgctgctccaaccatcagataaatgaccctcccaagcaccatgtcagtgtcgtacaatctaccaaccaaccagtgctgaagagattttagaaccttgtaacatacaatttttaagagcttatatggcagcttcctttttaccttgttttcctttggggcatgatgttttaacctttgctttagaagcacaagctgtaaatctaaaaggcacttttttttagaggtataaagaaaaactagatgtaataaataagatcatggaaggctttatgtgaaaaaagttgaatgttatagt

SEQ ID NO: 5947 - protein, 3321 aa, Homo sapien
MELDAAVQKFLEQNGQLGKPLAKKIGKLTELHQQTIRQAENRLSKLNQATSHLEEYNEMLELILKWIEKAKVLAHGTIAWNSASQLRKQYILHQTLLEESKEIDSELEAMTEKLQYLTSVYCTEKMSQQVAELGRETEELRQMIKIRLQNLQDAAKDMKKFEAELKKLQAALEQAQATLTSPEVGRLSLKEQLSHRQHLLSEMESLKPKVQAVQLCQSALRIPEDVVASLPLCHAALRLQEEASRLQHTAIQQCNIMQEAVVQYEQYEQEMKHLQQLIEGAHREIEDKPVATSNIQELQAQISRHEELAQKIKGYQEQIASLNSKCKMLTMKAKHATMLLTVTEVEGLAEGTEDLDGELLPTPSAHPSVVMMTAGRCHTLLSPVTEESGEEGTNSEISSPPACRSPSPVANTDASVNQDIAYYQALSAERLQTDAAKIHPSTSASQEFYEPGLEPSATAKLGDLQRSWETLKNVISEKQRTLYEALERQQKYQDSLQSISTKMEAIELKLSESPEPGRSPESQMAEHQALMDEILMLQDEINELQSSLAEELVSESCEADPAEQLALQSTLTVLAERMSTIRMKASGKRQLLEEKLNDQLEEQRQEQALQRYRCEADELDSWLLSTKATLDTALSPPKEPMDMEAQLMDCQNMLVEIEQKVVALSELSVHNENLLLEGKAHTKDEAEQLAGKLRRLKGSLLELQRALHDKQLNMQGTAQEKEESDVDLTATQSPGVQEWLAQARTTWTQQRQSSLQQQKELEQELAEQKSLLRSVASRGEEILIQHSAAETSGDAGEKPDVLSQELGMEGEKSSAEDQMRMKWESLHQEFSTKQKLLQNVLEQEQEQVLYSRPNRLLSGVPLYKGDVPTQDKSAVTSLLDGLNQAFEEVSSQSGGAKRQSIHLEQKLYDGVSATSTWLDDVEERLFVATALLPEETETCLFNQEILAKDIKEMSEEMDKNKNLFSQAFPENGDNRDVIEDTLGCLLGRLSLLDSVVNQRCHQMKERLQQILNFQNDLKVLFTSLADNKYIILQKLANVFEQPVAEQIEAIQQAEDGLKEFDAGIIELKRRGDELQVEQPSMQELSKLQDMYDELMMIIGSRRSGLNQNLTLKSQYERALQDLADLLETGQEKMAGDQKIIVSSKEEIQQPLDKHKEYFQGLESHMILTVTLFRKIISFAVQKETQFHTELMAQASAVLKRAHKRGVELEYILETWSHLDEDQQELSRQLEVVESSIPSVGLVEENEDRLIDRITLYQHLKSSLNEYQPKLYQVLDDGKRLLISISCSDLESQLNQLGECWLSNTNKMSKELHRLETILKHWTRYQSESADLIHWLQSAKDRLEFWTQQSVTVPQELEMVRDHLNAFLEFSKEVDAQSSLKSSVLSTGNQLLRLKKVDTATLRSELSRIDSQWTDLLTNIPAVQEKLHQLQMDKLPSRHAISEVMSWTSLMENAIQKDEDNIKNSIGYKAIHEYLQKYKGFKIDINCKQLTVDFVNQSVLQISSQDVESKRSDKTDFAEQLGAMNKSWQILQGLVTEKIQLLEGLLESWSEYENNVQCLKTWFETQEKRLKQQHRIGDQASVQNALKDCQDLEDLIKAKDKEVEKIEQNGLALIQTKKEDVSSIVMSTLRELGQTWANLDHMVGQLKILLKSVLDQWSSHKVAFDKINSYLMEARYSLSRFRLLTGSLEAVQVQVDNLQNLQDDLEKQERSLQKFGSITNQLLKECHPPVTETLTNTLKEVNMRWNNLLEEIAEQLQSSKALLQLWQRYKDYSKQCASTVQQQEDRTNELLKAATNKDIADDEVATWIQDCNDLLKGLGTVKDSLFVLHELGEQLKQQVDASAASAIQSDQLSLSQHLCALEQALCKQQTSLQAGVLDYETFAKSLEALEAWIVEAEEILQGQDPSHSSDLSTIQERMEELKGQMLKFSSMAPDLDRLNELGYRLPLNDKEIKRMQNLNRHWSLISSQTTERFSKLQSFLLQHQTFLEKCETWMEFLVQTEQKLAVEISGNYQHLLEQQRAHELFQAEMFSRQQILHSIIIDGQRLLEQGQVDDRDEFNLKLTLLSNQWQGVIRRAQQRRGIIDSQIRQWQRYREMAEKLRKWLVEVSYLPMSGLGSVPIPLQQARTLFDEVQFKEKVFLRQQGSYILTVEAGKQLLLSADSGAEAALQAELAEIQEKWKSASMRLEEQKKKLAFLLKDWEKCEKGIADSLEKLRTFKKKLSQSLPDHHEELHAEQMRCKELENAVGSWTDDLTQLSLLKDTLSAYISADDISILNERVELLQRQWEELCHQLSLRRQQIGERLNEWAVFSEKNKELCEWLTQMESKVSQNGDILIEEMIEKLKKDYQEEIAIAQENKIQLQQMGERLAKASHESKASEIEYKLGKVNDRWQHLLDLIAARVKKLKETLVAVQQLDKNMSSLRTWLAHIESELAKPIVYDSCNSEEIQRKLNEQQELQRDIEKHSTGVASVLNLCEVLLHDCDACATDAECDSIQQATRNLDRRWRNICAMSMERRLKIEETWRLWQKFLDDYSRFEDWLKSSERTAAFPSSSGVIYTVAKEELKKFEAFQRQVHECLTQLELINKQYRRLARENRTDSACSLKQMVHEGNQRWDNLQKRVTSILRRLKHFIGQREEFETARDSILVWLTEMDLQLTNIEHFSECDVQAKIKQLKAFQQEISLNHNKIEQIIAQGEQLIEKSEPLDAAIIEEELDELRRYCQEVFGRVERYHKKLIRLPLPDDEHDLSDRELELEDSAALSDLHWHDRSADSLLSPQPSSNLSLSLAQPLRSERSGRDTPASVDSIPLEWDHDYDLSRDLESAMSRALPSEDEEGQDDKDFYLRGAVALSGDHSALESQIRQLGKALDDSRFQIQQTENIIRSKTPTGPELDTSYKGYMKLLGECSSSIDSVKRLEHKLKEEEESLPGFVNLHSTETQTAGVIDRWELLQAQALSKELRMKQNLQKWQQFNSDLNSIWAWLGDTEEELEQLQRLELSTDIQTIELQIKKLKELQKAVDHRKAIILSINLCSPEFTQADSKESRDLQDRLSQMNGRWDRVCSLLEEWRGLLQDALMQCQGFHEMSHGLLLMLENIDRRKNEIVPIDSNLDAEILQDHHKQLMQIKHELLESQLRVASLQDMSCQLLVNAEGTDCLEAKEKVHVIGNRLKLLLKEVSRHIKELEKLLDVSSSQQDLSSWSSADELDTSGSVSPTSGRSTPNRQKTPRGKCSLSQPGPSVSSPHSRSTKGGSDSSLSEPGPGRSGRGFLFRVLRAALPLQLLLLLLIGLACLVPMSEEDYSCALSNNFARSFHPMLRYTNGPPPL

SEQ ID NO: 5948 - DNA, 1116 bp, Homo sapien
gtgtgaggccatcacggaagatgctgctgcttctgctgcttctggggctagcaggctccgggcttggtgctgtcgtctctcaacatccgagctgggttatctgtaagagtggaacctctgtgaagatcgagtgccgttccctggactttcaggccacaactatgttttggtatcgtcagttcccgaaacagagtctcatgctgatggcaacttccaatgagggctccaaggccacatacgagcaaggcgtcgagaaggacaagtttctcatcaaccatgcaagcctgaccttgtccactctgacagtgaccagtgcccatcctgaagacagcagcttctacatctgcagtgctagagagtcgactagcgatccaaaaaatgagcagttcttcgggccagggacacggctcaccgtgctagaggacctgaaaaacgtgttcccacccgaggtcgctgtgtttgagccatcagaagcagagatctcccacacccaaaaggccacactggtgtgcctggccacaggcttctaccccgaccacgtggagctgagctggtgggtgaatgggaaggaggtgcacagtggggtcagcacagacccgcagcccctcaaggagcagcccgccctcaatgactccagatactgcctgagcagccgcctgagggtctcggccaccttctggcagaacccccgcaaccacttccgctgtcaagtccagttctacgggctctcggagaatgacgagtggacccaggatagggccaaacctgtcacccagatcgtcagcgccgaggcctggggtagagcagactgtggcttcacctccgagtcttaccagcaaggggtcctgtctgccaccatcctctatgagatcttgctagggaaggccaccttgtatgccgtgctggtcagtgccctcgtgctgatggccatggtcaagagaaaggattccagaggctagctccaaaaccatcccaggtcattcttcatcctcacccaggattctcctgtacctgctcccaatctgtgttcctaaaagtgattctcactctgcttctcatctcctacttacatgaatacttctctcttttttctgtttccctgaagattgagctccc

SEQ ID NO: 5949 - protein, 312 aa, Homo sapien [sequence omitted]

SEQ ID NO: 5950 - DNA, 10709 bp, Homo sapien; identical to SEQ ID NO: 1053

SEQ ID NO: 5951 - protein, 3012 aa, Homo sapien
MASQQDSGFFEISIKYLLKSWSNTSPVGNGYIKPPVPPASGTHREKGPPTMLPINVDPDSKPGEYVLKSLFVNFTTQAERKIRIIMAEPLEKPLTKSLQRGEDPQFDQVISSMSSLSEYCLPSILRTLFDWYKRQNGIEDESHEYRPRTSNKSKSDEQQRDYLMERRDLAIDFIFSLVLIEVLKQIPLHPVIDSLIHDVINLAFKHFKYKEGYLGPNTGNMHIVADLYAEVIGVLAQAKFPAVKKKFMAELKELRHKEQNPYVVQSIISLIMGMKFFRIKMYPVEDFEASLQFMQECAHYFLEVKDKDIKHALAGLFVEILVPVAAAVKNEVNVPCLRNFVESLYDTTLELSSRKKHSLALYPLVTCLLCVSQKQLFLNRWHIFLNNCLSNLKNKDPKMARVALESLYRLLWVYMIRIKCESNTATQSRLITIITTLFPKGSRGVVPRDMPLNIFVKIIQFIAQERLDFAMKEIIFDFLCVGKPAKAFSLNPERMNIGLRAFLVIADSLQQKDGEPPMPVTGAVLPSGNTLRVKKTYLSKTLTEEEAKMIGMSLYYSQVRKAVDNILRHLDKEVGRCMMLTNVQMLNKEPEDMITGERKPKIDLFRTCVAAIPRLLPDGMSKLELIDLLARLSIHMDDELRHIAQNSLQGLLVDFSDWREDVLFGFTNFLLREVNDMHHTLLDSSLKLLLQLLTQWKLVIQTQGKVYEQANKIRNSELIANGSSHRIQSERGPHCSVLHAVEGFALVLLCSFQVATRKLSVLILKEIRALFIALGQPEDDDRPMIDVMDQLSSSILESFIHVAVSDSATLPLTHNVDLQWLVEWNAVLVNSHYDVKSPSHVWIFAQSVKDPWVLCLFSFLRQENLPKHCPTALSYAWPYAFTRLQSVMPLVDPNSPINAKKTSTAGSGDNYVTLWRNYLILCFGVAKPSIMSPGHLRASTPEIMATTPDGTVSYDNKAIGTPSVGVLLKQLVPLMRLESIEITESLVLGFGRTNSLVFRELVEELHPLMKEALERRPENKKRRERRDLLRLQLLRIFELLADAGVISDSTNGALERDTLALGALFLEYVDLTRMLLEAENDKEVEILKDIRAHFSAMVANLIQCVPVHHRRFLFPQQSLRHHLFILFSQWAGPFSIMFTPLDRYSDRNHQITRYQYCALKAMSAVLCCGPVFDNVGLSPDGYLYKWLDNILACQDLRVHQLGCEVVVLLLELNPDQINLFNWAIDRCYTGSYQLASGCFKAIATVCGSRNYPFDIVTLLNLVLFKASDTNREIYEISMQLMQILEAKLFVYSKKVAEQRPGSILYGTHGPLPPLYSVSLALLSCELARMYPELTLPLFSGKPAIPHNTPQRAPDHAYLPAALAAQHRAGGQQAPPPGSSPSSPEDEVKDREGDVTASHGLRGNGWGSPEATSLVLNNLMYMTAKYGDEVPGPEMENAWNALANNEKWSNNLRITLQFLISLCGVSSDTVLLPYIKKVAIYLCRNNTIQTMEELLFELQQTEPVNPIVQHCDNPPFYRFTASSKASAAASGTTSSSNTVVAGQENFPDAEENKILKESDERFSNVIRAHTRLESRYSNSSGGSYDEDKNDPISPYTGWLLTITETKQPQPLPMPCTGGCWAPLVDYLPETITPRGPLHRCNIAVIFMTEMVVDHSVREDWALHLPLLLHAVFLGLDHYRPEVFEHSKKLLLHLLIALSCNSNFHSIASVLLQTREMGEAKTLTVQPAYQPEYLYTGGFDFLREDQSSPVPDSGLSSSSTSSSISLGGSSGNLPQMTQEVEDVDTAAETDEKANKLIEFLTTRAFGPLWCHEDITPKNQNSKSAEQLTNFLRHVVSVFKDSKSGFHLEHQLSEVALQTALASSSRHYAGRSFQIFRALKQPLSAHALSDLLSRLVEVIGEHGDEIQGYVMEALLTLEAAVDNLSDCLKNSDLLTVLSRSSSPDLSSSSKLTASRKSTGQLNMNPGTTSGNTATAERSRHQRSFSVPKKFGVIDRSSDPPRSATLDRIQACTQQGLSSKTRSSSSLKDSLTDPSHINHPTNLLATIFWVTVALMESDFEFEYLMALRLLSRLLAHMPLDKAENREKLEKLQAQLKWADFSGLQQLLLKGFTSLTTTDLTLQLFSLLTPVSKISMVDASHAIGFPLNVLCLLPQLIQHFENPNQFCKDIAERIAQVCLEEKNPKLSNLAHVMTLYKTHSYTRDCATWVNVVCRYLHEAYADITLNMVTYLAELLEKGLPSVQQPLLQVIYSLLSYMDLSVVPVKQFNVEVLKTIEKYVQSVHWREALNILKLVVSRSASLVLPSYQHSDLSKIEIHRVWTSASKELPGKTLDFHFDISETPIIGRRYDELQNSSGRDGKPRAMAVTRSTSSTSSGSNSNVLVPVSWKRPQYSQKRTKEKLVHVLSLCGQEVGLSKNPSVIFSSCGDLDLLEHQTSLVSSEDGAREQENMDDTNSEQQFRVFRDFDFLDVELEDGEGESMDNFNWGVRRRSLDSLDKCDMQILEERQLSGSTPSLNKMHHEDSDESSEEEDLTASQILEHSDLIMTLSPSEETNPMELLTTACDSTPAEPHSFNTRMSSFDASLPDMNNLQISEGSKAEAVREEEDTTVHEDDLSSSINELPAAFECSDSFSLDMTEGEEKGNRALDQFTLASFGEGDRGVSPPPSPFFSAILAAFQPAACDDAEEAWRSHINQLMCDSDGSCAVYTFHVFSSLFKNIQKRFCFLTCDAASYLGDNLRGIGSKFVSSSQMLTSCSECPTLFVDAETLLSCGLLDKLKFSVLELQEYLDTYNNRKEATLSWLANCKATFAGGSRDGVITCQPGDSEEKQLELCQRLYKLHFQLLLLFQSYCKLIGQVHEVSSMPELLNMSRELSDLKKHLKEASAVIAADPLYSDGAWSEPTFTSTEAAIQSMLECLKNNELGKALRQIRECRSLWPNDIFGSSSDDEVQTLLNIYFRHQTLGQTGTYALVGSNQSLTEICTKLMELNMEIRDMIRRAQSYRVLTTFLPDSSVSGTSL

SEQ ID NO: 5952 - DNA, 5287 bp, Homo sapien
ctggccgcggcgtggggacagcgaggcgcactggggcctcccagcgccgggccggccgcgccgtccagcccgaggtctacggctttgcgctccgagcccagaggaagatgcctgccggcaccgagctcgggctgcggggctgaacgcctgtcttccaggcgcacggcagcactgccctcggccggtgtcggtagcggcactcggcgtgccccgggcggacgaagagcgcaggctgggtacaccttgcccgaatcggcggagttcgcagctagcgagggcgggccggccggcccggatgggcgcggggtttgcggcccccgccgggtgctccggagcggcccgggcaccgggggcacgctgagtgccggagccgcggccgcagagagaacttggggcgggggccatgcaccggtgcggagtctagagccgagcggagcgccccgcgggcccgcccgcgtctgcggccgttcgggtcctcacagtccccgcgcccggagttcgcagcgcgctccagacaagatggcgcggccggtccggggagggctcggggccccgcgccgctcgccttgccttctccttctctggctgcttttgcttcggctggagccggtgaccgccgcggccggcccgcgggcgccctgcgcggccgcctgcacttgcgctggggactcgctggactgcggtgggcgcgggctggctgcgttgcccggggacctgccctcctggacgcggagcctaaacctgagttacaacaaactctctgagattgaccctgctggttttgaggacttgccgaacctacaggaagtgtacctcaataataatgagttgacagcggtaccatccctgggcgctgcttcatcacatgtcgtctctctctttctgcagcacaacaagattcgcagcgtggaggggagccagctgaaggcctacctttccttagaagtgttagatctgagtttgaacaacatcacggaagtgcggaacacctgctttccacacggaccgcctataaaggagctcaacctggcaggcaatcggattggcaccctggagttgggagcatttgatggtctgtcacggtcgctgctaactcttcgcctgagcaaaaacaggatcacccagcttcctgtaagagcattcaagctacccaggctgacacaactggacctcaatcggaacaggattcggctgatagagggcctcaccttccaggggctcaacagcttggaggtgctgaagcttcagcgaaacaacatcagcaaactgacagatggggccttctggggactgtccaagatgcatgtgctgcacctggagtacaacagcctggtagaagtgaacagcggctcgctctacggcctcacggccctgcatcagctccacctcagcaacaattccatcgctcgcattcaccgcaagggctggagcttctgccagaagctgcatgagttggtcctgtccttcaacaacctgacacggctggacgaggagagcctggccgagctgagcagcctgagtgtcctgcgtctcagccacaattccatcagccacattgcggagggtgccttcaagggactcaggagcctgcgagtcttggatctggaccataacgagatttcgggcacaatagaggacacgagcggcgccttctcagggctcgacagcctcagcaagctgactctgtttggaaacaagatcaagtctgtggctaagagagcattctcggggctggaaggcctggagcacctgaaccttggagggaatgcgatcagatctgtccagtttgatgcctttgtgaagatgaagaatcttaaagagctccatatcagcagcgacagcttcctgtgtgactgccagctgaagtggctgcccccgtggctaattggcaggatgctgcaggcctttgtgacagccacctgtgcccacccagaatcactgaagggtcagagcattttctctgtgccaccagagagtttcgtgtgcgatgacttcctgaagccacagatcatcacccagccagaaaccaccatggctatggtgggcaaggacatccggtttacatgctcagcagccagcagcagcagctcccccatgacctttgcctggaagaaagacaatgaagtcctgaccaatgcagacatggagaactttgtccacgtccacgcgcaggacggggaagtgatggagtacaccaccatcctgcacctccgtcaggtcactttcgggcacgagggccgctaccaatgtgtcatcaccaaccactttggctccacctattcacataaggccaggctcactgtgaatgtgttgccatcattcaccaaaacgccccacgacataaccatccggaccaccaccatggcccgcctcgaatgtgctgccacaggtcacccaaaccctcagattgcctggcagaaggatggaggcacggatttccccgctgcccgtgagcgacgcatgcatgtcatgccggatgacgacgtgtttttcatcactgatgtgaaaatagatgacgcaggggtttacagctgtactgctcagaactcagccggttctatttcagctaatgccaccctgactgtcctagagaccccatccttggtggtccccttggaagaccgtgtggtatctgtgggagaaacagtggccctccaatgcaaagccacggggaaccctccgccccgcatcacctggttcaagggggaccgcccgctgagcctcactgagcggcaccacctgacccctgacaaccagctcctggtggttcagaacgtggtggcagaggatgcgggccgatatacctgtgagatgtccaacaccctgggcacggagcgagctcacagccagctgagcgtcctgcccgcagcaggctgcaggaaggatgggaccacggtaggcatcttcaccattgctgtcgtgagcagcatcgtcctgacgtcactggtctgggtgtgcatcatctaccagaccaggaagaagagtgaagagtacagtgtcaccaacacagatgaaaccgtcgtgccaccagatgttccaagctacctctcttctcaggggaccctttctgaccgacaagaaaccgtggtcaggaccgagggtgcgggccctcaggccaatgggcacattgagagcaatggtgtgtgtccaagagatgcaagccactttccagagcccgacactcacagcgttgcctgcaggcagccaaagctctgtgctgggtctgcgtatcacaaagagccgtggaaagcgattgagaaagctgaagggacacctgggccacataagatggaacacggtggccgggtcgtatgcagtgactgcaacaccgaagtggactgttactccaggggacaagccttccacccccagcctgtgtccagagacagcgcacagccaagtgcgccaaatggcccggagccgggtgggagtgaccaagagcattctccacatcaccagtgcagcaggactgccgctgggtcctgccccgagtgccaagggtcgctctaccccagtaaccacgatagaatgctgacggctgtgaagaaaaagccaatggcatctctagatgggaaaggggattcttcctggactttagcaaggttgtatcacccggactctacagagctacagcctgcatcttcattaacttcaggcagtccagagcgcgcggaagcccagtacttgcttgtttccaatggccacctccccaaagcatgtgacgccagtcccgagtccacgccactgacaggacagctccccgggaaacagagggtgccactgctgttggcaccaaaaagctaggttttgtctacctcagttcttgtcataccaatctctacgggaaagagaggtaggagaggctgcgaggaagcttgggttcaagcgtcactcatctgtacatagttgtaactcccatgtggagtatcagtcgctcacaggacttggatctgaagcacagtaaacgcaagaggggatttgtgtacaaaaggcaaaaaaagtatttgatatcattgtacataagagttttcagagatttcatatatatcttttacagaggctattttaatctttagtgcatggttaacagaaaaaaattatacaattttgacaatattatttttcgtatcaggttgctgtttaattttggagggggtggggaaatagttctggtgccttaacgcatggctggaatttatagaggctacaaccacatttgttcacaggagtttttggtgcgggtggggaaggatggaaggccttggatttatattgcacttcatagacccctaggctgctgtgcggtgggactccacatgcgccggaaggagcttcaggtgagcactgctcatgtgtggatgcccctgcaacaggcttccctgtctgtagagccaggggtgcaagtgccatccacacttgcagtgaatggcttttccttttaggtttaagtcctgtctgtctgtaaggcgtagaatctgtccgtctgtaaggcgtagaatgagggttgttaatccatcacaagcaaaaggtcagaacagttaaacactgcctttcctcctcctcttattttatgataaaagcaaatgtggccttctcagtatcattcgattgctatttgagacttttaaattaaggtaaaggctgctggtgttggtacctgtggatttttctatactgatgttttcgttttgccaatataatgagtattacattggccttgggggacagaaaggaggaagttctgacttttcagggctaccttatttctactaaggacccagagcaggcctgtccatgccattccttcgcacagatgaaactgagctgggactggaaaggacagcccttgacctgggttctgggtataatttgcacttttgagactggtagctaaccatcttatgagtgccaatgtgtcatttagtaaaacttaaatagaaacaaggtccttcaaatgttcctttggccaaaagctgaagggagttactgagaaaatagttaacaattactgtcaggtgtcatcactgttcaaaaggtaagcacatttagaattttgttcttgacagttaactgactaatcttacttccacaaaatatgtgaatttgctgcttctgagaggcaatgtgaaagagggagtattacttttatgtacaaagttatttatttatagaaattttggtacagtgtacattgaaaaccatgtaaaatattgaagtgtctaacaaatggcattgaagtgtctttaataaaggttcatttataaatgtcaaaaaaaaaaaaaaaaaa

SEQ ID NO: 5953 - protein, 1094 aa, Homo sapien
MARPVRGGLGAPRRSPCLLLLWLLLLRLEPVTAAAGPRAPCAAACTCAGDSLDCGGRGLAALPGDLPSWTRSLNLSYNKLSEIDPAGFEDLPNLQEVYLNNNELTAVPSLGAASSHVVSLFLQHNKIRSVEGSQLKAYLSLEVLDLSLNNITEVRNTCFPHGPPIKELNLAGNRIGTLELGAFDGLSRSLLTLRLSKNRITQLPVRAFKLPRLTQLDLNRNRIRLIEGLTFQGLNSLEVLKLQRNNISKLTDGAFWGLSKMHVLHLEYNSLVEVNSGSLYGLTALHQLHLSNNSIARIHRKGWSFCQKLHELVLSFNNLTRLDEESLAELSSLSVLRLSHNSISHIAEGAFKGLRSLRVLDLDHNEISGTIEDTSGAFSGLDSLSKLTLFGNKIKSVAKRAFSGLEGLEHLNLGGNAIRSVQFDAFVKMKNLKELHISSDSFLCDCQLKWLPPWLIGRMLQAFVTATCAHPESLKGQSIFSVPPESFVCDDFLKPQIITQPETTMAMVGKDIRFTCSAASSSSSPMTFAWKKDNEVLTNADMENFVHVHAQDGEVMEYTTILHLRQVTFGHEGRYQCVITNHFGSTYSHKARLTVNVLPSFTKTPHDITIRTTTMARLECAATGHPNPQIAWQKDGGTDFPAARERRMHVMPDDDVFFITDVKIDDAGVYSCTAQNSAGSISANATLTVLETPSLVVPLEDRVVSVGETVALQCKATGNPPPRITWFKGDRPLSLTERHHLTPDNQLLVVQNVVAEDAGRYTCEMSNTLGTERAHSQLSVLPAAGCRKDGTTVGIFTIAVVSSIVLTSLVWVCIIYQTRKKSEEYSVTNTDETVVPPDVPSYLSSQGTLSDRQETVVRTEGAGPQANGHIESNGVCPRDASHFPEPDTHSVACRQPKLCAGSAYHKEPWKAIEKAEGTPGPHKMEHGGRVVCSDCNTEVDCYSRGQAFHPQPVSRDSAQPSAPNGPEPGGSDQEHSPHHQCSRTAAGSCPECQGSLYPSNHDRMLTAVKKKPMASLDGKGDSSWTLARLYHPDSTELQPASSLTSGSPERAEAQYLLVSNGHLPKACDASPESTPLTGQLPGKQRVPLLLAPKS

SEQ ID NO: 5954 - DNA, 6509 bp, Homo sapien
  Unsure 3682, 3696, 3699-3700: Unknown base
ggcgaggcgaggtttgctggggtgaggcagcggcgcggccgggccgggccgggccacaggcggtggcggcgggaccatggaggcggcggtcgctgctccgcgtccccggctgctcctcctcgtgctggcggcggcggcggcggcggcggcggcgctgctcccgggggcgacggcgttacagtgtttctgccacctctgtacaaaagacaattttacttgtgtgacagatgggctctgctttgtctctgtcacagagaccacagacaaagttatacacaacagcatgtgtatagctgaaattgacttaattcctcgagataggccgtttgtatgtgcaccctcttcaaaaactgggtctgtgactacaacatattgctgcaatcaggaccattgcaataaaatagaacttccaactactgtaaagtcatcacctggccttggtcctgtggaactggcagctgtcattgctggaccagtgtgcttcgtctgcatctcactcatgttgatggtctatatctgccacaaccgcactgtcattcaccatcgagtgccaaatgaagaggacccttcattagatcgcccttttatttcagagggtactacgttgaaagacttaatttatgatatgacaacgtcaggttctggctcaggtttaccattgcttgttcagagaacaattgcgagaactattgtgttacaagaaagcattggcaaaggtcgatttggagaagtttggagaggaaagtggcggggagaagaagttgctgttaagatattctcctctagagaagaacgttcgtggttccgtgaggcagagatttatcaaactgtaatgttacgtcatgaaaacatcctgggatttatagcagcagacaataaagacaatggtacttggactcagctctggttggtgtcagattatcatgagcatggatccctttttgattacttaaacagatacacagttactgtggaaggaatgataaaacttgctctgtccacggcgagcggtcttgcccatcttcacatggagattgttggtacccaaggaaagccagccattgctcatagagatttgaaatcaaagaatatcttggtaaagaagaatggaacttgctgtattgcagacttaggactggcagtaagacatgattcagccacagataccattgatattgctccaaaccacagagtgggaacaaaaaggtacatggcccctgaagttctcgatgattccataaatatgaaacattttgaatccttcaaacgtgctgacatctatgcaatgggcttagtattctgggaaattgctcgacgatgttccattggtggaattcatgaagattaccaactgccttattatgatcttgtaccttctgacccatcagttgaagaaatgagaaaagttgtttgtgaacagaagttaaggccaaatatcccaaacagatggcagagctgtgaagccttgagagtaatggctaaaattatgagagaatgttggtatgccaatggagcagctaggcttacagcattgcggattaagaaaacattatcgcaactcagtcaacaggaaggcatcaaaatgtaattctacagctttgcctgaactctccttttttcttcagatctgctcctgggttttaatttgggaggtcaattgttctacctcactgagagggaacagaaggatattgcttccttttgcagcagtgtaataaagtcaattaaaaacttcccaggatttctttggacccaggaaacagccatgtgggtcctttctgtgcactatgaacgcttctttcccaggacagaaaatgtgtagtctacctttattttttattaacaaaacttgttttttaaaaagatgattgctggtcttaactttaggtaactctgctgtgctggagatcatctttaagggcaaaggagttggattgctgaattacaatgaaacatgtcttattactaaagaaagtgatttactcctggttagtacattctcagaggattctgaaccactagagtttccttgattcagactttgaatgtactgttctatagtttttcaggatcttaaaactaacacttataaaactcttatcttgagtctaaaaatgacctcatatagtagtgaggaacataattcatgcaattgtattttgtatactattattgttctttcacttattcagaacattacatgccttcaaaatgggattgtactataccagtaagtgccacttctgtgtctttctaatggaaatgagtagaattgctgaaagtctctatgttaaaacctatagtgtttgaattcaaaaagcttatttatctgggtaacccaaactttttctgtttgtttttggaagggttttgtggtatgtcatttggtattctattctgaaaatgcctttctcctaccaaaatgtgcttaagccactaaagaaatgaagtggcattaattagtaaattattagcatggtcatgtttgaatattctcacatcaagcttttgcattttaattgtgttgtctaagtatacttttaaaaaatcaagtggcactctagatgcttatagtactttaatatttgtagcatacagactaatttttctaaaagggaaagtctgtctagctgcttgtgaaaagttatgtggtattctgtaagccatttttttctttatctgttcaaagacttattttttaagacatgaattacatttaaaattagaatatggttaatattaaataataggcctttttctaggaaggcgaaggtagttaataatttgaatagataacagatgtgcaagaaagtcacatttgttatgtatgtaggagtaaacgttcggtggatcctctgtctttgtaactgaggttagagctagtgtggttttgaggtctcactacactttgaggaaggcagcttttaattcagtgtttccttatgtgtgcgtacattgcaactgcttacatgtaatttatgtaatgcattcagtgcacccttgttacttgggagaggtggtagctaaagaacattctgagtataggtttttctccatttacagatgtctttggtcaaatattgaaagcaaacttgtcatggtcttcttacattaagttgaaactagcttataataactggtttttacttccaatgctatgaagtctctgcagggcttttacagttttcgaagtccttttatcactgtgatcttattctgaggggagaaaaaactatcatagctctgaggcaagacttcgactttatagtgctatcagttccccgatacagggtcagagtaacccatacagtattttggtcaggaagagaaagtggccatttacactgaatgagttgcattctgataatgtcttatctcttatacgtagaataaatttgaaagactatttgatcttaaaaccaaagtaattttagaatgagtgacatattacataggaatttagtgtcaatttcatgtgtttaaaaacatcatgggaaaaatgcttagaggttactattttgactacaaagttgagtttttttctgtagttaccataatttcattgaagcaaatgaatgagtttgagaggtttgtttttatagttgtgttgtattacttgtttaataataatctctaattctgtgatcaggtactttttttgtgggggttttttttttgtttntttttcgtcgttgntgnntttgggccatttctaagcctaccagatctgctttatgaaatccaggggaccaatgcattttatcactaaaactatttttatataattttaagaatataccaaaagttgtctgatttaaagttgtaatacatgatttctcactttcatgtaaggttatccacttttgctgaagatattttttattgaatcaaagattgagttacaattatacttttcttacctaagtggataaaatgtacttttgatgaatcagggaatttttttaaagttggagtttagttctaaattgactttacgtattactgcagttaattccttttttggctagggatggtttgataaaccacaattggctgatattgaaaatgaaagaaacttaaaaggtgggatggatcatgattactgtcgataactgcagataaatttgattagagtaataattttgtcatttaaaaacacagttgtttatactgcccatcctaggatgctcaccttccaagattcaacgtggctaaaacatcttctggtaaattgtgcgtccatattcattttgtcagtagccaggagaaatggggatgggggaaatacgacttagtgaggcatagacatccctggtccatcctttctgtctccagctgtttcttggaacctgctctcctgcttgctggtccctgacgcagagaccgttgcctcccccacagccgtttgactgaaggctgctctggagacctagagtaaaacggctgatggaagttgtgggacccacttccatttccttcagtcattagaggtggaagggaggggtctccaagtttggagattgagcagatgaggcttgggatgcccctgctttgacttcagccatggatgaggagtgggatggcagcaaggtggctcctgtggcagtggagttgtgccagaaacagtggccagttgtatcgcctataagacagggtaaggtctgaagagctgagcctgtaattctgctgtaataatgatagtgctcaagaagtgccttgagttggtgtacagtgccatggccatcaagaatcccagatttcaggttttattacaaaatgtaagtggtcacttggcgattttgtagtacatgcatgagttaccttttttctctatgtctgagaactgtcagattaaaacaagatggcaaagagatcgttagagtgcacaacaaaatcactatcccattagacacatcatcaaaagcttatttttattcttgcactggaagaatcgtaagtcaactgtttcttgaccatggcagtgttctggctccaaatggtagtgattccaaataatggttctgttaacactttggcagaaaatgccagctcagatattttgagatactaaggattatctttggacatgtactgcagcttcttgtctctgttttggattactggaatacccatgggccctctcaagagtgctggacttctaggacattaagatgattgtcagtacattaaacttttcaatcccattatgcaatcttgtttgtaaatgtaaacttctaaaaatatggttaataacattcaacctgtttattacaacttaaaaggaacttcagtgaatttgtttttattttttaacaagatttgtgaactgaatatcatgaaccatgttttgatacccctttttcacgttgtgccaacggaatagggtgtttgatatttcttcatatgttaaggagatgcttcaaaatgtcaattgctttaaacttaaattacctctcaagagaccaaggtacatttacctcattgtgtatataatgtttaatatttgtcagagcattctccaggtttgcagttttatttctataaagtatgggtattatgttgctcagttactcaaatggtactgtattgtttatatttgtaccccaaataacatcgtctgtactttctgttttctgtattgtatttgtgcaggattctttaggctttatcagtgtaatctctgccttttaagatatgtacagaaaatgtccatataaatttccattgaagtcgaatgatactgagaagcctgtaaagaggagaaaaaaacataagctgtgtttccccataagtttttttaaattgtatattgtatttgtagtaatattccaaaagaatgtaaataggaaatagaagagtgatgcttatgttaagtcctaacactacagtagaagaatggaagcagtgcaaataaattacatttttcccaagtgccagtggcatattttaaaataaagtgtatacgttggaatgagtcatgccatatgtagttgctgtagatggcaactagaacctttgagttacaagagtctttagaagttttctaaccctgcctagtgcaagttacaatattatagcgtgttcggggagtgccctcctgtctgcaggtgtgtctctgtgcctgggggcttttctccacatgcttaggggtgtgggtcttccattggggcatgatggacctgtctacaggtgatctctgttgcctttgggtcagcacatttgttagtctcctgggggtgaaaacttggcttacaagagaactggaaaaatgatgagatgtggtccccaaacccttgattgactctggggaggggctttgtgaataggattgctctcacattaaagatagttacttcaatttgaaggctggatttagggattttttttttttccttataacaaagacatcaccaggatatgaagcttttgttgaaagttggaaaaaaagtgaaattaaagacattcccagacaaatactaagacaatttgttgcctatggacgtctgcct

SEQ ID NO: 5955 - protein, 503 aa, Homo sapien
  Unsure 3682, 3696, 3699-3700: Unknown amino acid
MEAAVAAPRPRLLLLVLAAAAAAAAALLPGATALQCFCHLCTKDNFTCVTDGLCFVSVTETTDKVIHNSMCIAEIDLIPRDRPFVCAPSSKTGSVTTTYCCNQDHCNKIELPTTVKSSPGLGPVELAAVIAGPVCFVCISLMLMVYICHNRTVIHHRVPNEEDPSLDRPFISEGTTLKDLIYDMTTSGSGSGLPLLVQRTIARTIVLQESIGKGRFGEVWRGKWRGEEVAVKIFSSREERSWFREAEIYQTVMLRHENILGFIAADNKDNGTWTQLWLVSDYHEHGSLFDYLNRYTVTVEGMIKLALSTASGLAHLHMEIVGTQGKPAIAHRDLKSKNILVKKNGTCCIADLGLAVRHDSATDTIDIAPNHRVGTKRYMAPEVLDDSINMKHFESFKRADIYAMGLVFWEIARRCSIGGIHEDYQLPYYDLVPSDPSVEEMRKVVCEQKLRPNIPNRWQSCEALRVMAKIMRECWYANGAARLTALRIKKTLSQLSQQEGIKM

SEQ ID NO: 5956 - DNA, 805 bp, Homo sapien
ggcacgaggtccctaattgtcttgtacctagccctagggtgaccagggcaggggaatcatggcgagaagcgtaagggcctgatgaagaaggtgtgctgggtgtgggctctagcccacttggttttgtgtgagaggtggctgacagcaggttgtttgctgtatgtaggagttatccagccctgcaagggcagtccctccagtgtctgcaaagcccgaagatgtctgcatccaaaatacagaataaaaagatatggttactacaagtactcagtaagactgataatctgtcatcatcatcctcatgcccttaaagcagagctaactgatgattaatatatgcttctatgttaacagtcttggactttattaatggtgggtggaagttaacttaatgtatgtatgcaaactaaaaagtggcatccttttcattaatgacccaaccattattcaagagctatgtctagttagggacttcagacttttgaaagaaatgaagaaataatgccagatacatgggctcgcacttggaatcccagctacttgggggaccgaggtgggaggaccgcttgagcccaggagttcgagaccagcctgggcaacatagcgaaaccctgcctcagttttaaaaaagaaaaaaagaagtagtgaagaaattggaaaggattctgagaagaaatatgcaaggtggaaaagagcctagaaagaaaggtgacagatgctgggatttggtcgtcagaagagatatctaggaaatagcatggcagccctcaagtactagctccacttaaaaaaaaaaaaaaaaaaa

SEQ ID NO: 5957 - protein, 83 aa, Homo sapien
MKKVCWVWALAHLVLCERWLTAGCLLYVGVIQPCKGSPSSVCKARRCLHPKYRIKRYGYYKYSVRLIICHHHPHALKAELTDD

SEQ ID NO: 5958 - DNA, 4485 bp, Homo sapien
tgcgccgctgcgggagccacaggaagtgaagagcttccgccgggagaccgcggctgcaggaacggaggcggaaggggccctgcggcgacgacgtcgtcgacgggggtggccgtgggagctgagcacggagaagactccctctctcggaagccggatcccgagccgggcaggatggatcaccaccagccggggactgggcgctaccaggtgcttcttaatgaagaggataactcagaatcatcggctatagagcagccacctacttcaaacccagcaccgcagattgtgcaggctgcgtcttcagcaccagcacttgaaactgactcttcccctccaccatatagtagtattactgtggaagtacctacaacttcagatacagaagtttacggtgagttttatcccgtgccacctccctatagcgttgctacctctcttcctacatacgatgaagctgagaaggctaaagctgctgcaatggcagctgcagcagcagaaacatctcaaagaattcaggaggaagagtgtccaccaagagatgacttcagtgatgcagaccagctcagagtggggaatgatggcattttcatgctggcatttttcatggcatttattttcaactggcttggattttgtttatccttctgtatcaccaataccatagctggaaggtatggtgctatctgcggatttggcctttccttgatcaaatggatccttattgtcaggttttctgattattttactggatatttcaatggacagtattggctttggtggatatttcttgtacttggcctgctccttttcttcagaggatttgttaattatctaaaagtcagaaacatgtctgaaagtatggcagctgctcatagaacaaggtatttcttcttattgtagagactgcatcaacccgacattcctttcttataccaatgtgaaatttccagatcatctgtaaacctacaactttaatagaagactactaataacagaagacaaattagtgaagaaaagacagagtttcgaaattgaatggcagggtggtttttgcttacaagccatttctgttcattctttaagtatctatatttcatttgttttgcacatatgcatatgtgcccatttaagatatttgcatatacttgatagaaaccataaagttgtagcagttaagtccagtcacatttggttaatcagtgtttgatataattgaaagagttgagtggataaacagtcttccagcttgtaaatgccattgacttctgacctgacatttagtataataaaaatgaaattcttaaccatgtcaaatgatttagtttctggctcttagactcatctggcagttctacacatgaaacatcttttgttatataaggtgtattgaaacctgcagtgctgattattagaaaggatttgtcagatttttgaacatgatatttacattattatttaggaaaactcttcctgtaaataaccatgcataacttactttctgcaatgttttcttagaaattgtgtccagatagctttcactaattttaaattaagtgaactaaatatatatgtgtatatgtatacacatatatatacacacacacatatatatatttagaaacgtgagtgttaaagatagaatttgttttaggacaaattttaagaaaatgtgggaataccaaatgtcctttataagaaaaataaattttattttaagggacatactagttttagggattttcagatgggaagctgcatttttaggattgcccatcttaagagatcttgcaggaagagattgtattagatattatatttatttcatttaagataattttcaaagttaattttctaaataagataattctcatttgtgtttgtcttttaaaaggccaataaaatatctttcagtatcattgtaataattttttagagtttaatttgtaaagcttagcaaataaaatcttgtactatgaatagcttcttgctttatgactttaggattaacttgtaaaaaacatatcctgaactgagatatgcaaaatactcattttcaagttatggaaatgtgtttgtggcatataggactgtggggtctgtgtgtgtagtgagagtgtgtagccactattataactggaatttaatttacattcataaactactatatttcccatcttgcaaatcattttatgtctcatctgtttttcctttcggttatatctttggttttgaataccaacatttaaaatgatggtattttatcttttaaacttaaaaattatttaatacagctatatggaccttataaaattgatttcttatttattattagacattactactaaaaggtacatctaactattcagggacatttttccatttccaaaaaataaaatttattatgctttataacctcttctgtattttctaattttttcattgtctttgataaataaaacagttttgttttgctaatatagcctattttttgttttgtctcattcagtttactttcctgcgtagaatttttattgttatattaaaatttttattgttgtattaaagtacctgtgttacaccccttgaagtaagacagtagcatggggtaaagaaaaaatatttagtttagttgcctaatttggaagttaattaaaattaaactgtactaataacatattcaaactcatgctggatctctttcatattaatttcttatagacctgtactttattctttcaataatttttaaatgaaattaagctttgctacatggtaattaaataattactaggaagcttagctatcaaacatcgacttactaaaatttcattttagcttttatggtatatgtgcttgttttctgaatatggatacatgttacttttgatccagcatcaaaacttcactttttgttttgacttttccccccaaatctgtaaggttcaagtatacatattactgaatcctctataattggcataattcaatggtagccttaaatctcatcatgtaagcaggggaatcagaatgttattttcaagaacttaatgttcccttcagatatataaaatcctgcatacttcatttcctgtgagcttgaacagctgctgttgtgttttggggatgcttgatcatctttgcactctgccttaaagattgaaaaatcaaaactcttgttagggtatctaaacatttttgagtgtgaactggggattggaagttaatacaaaaaatttcaaattatttctattgtaaatgaataagctagtcatggctaggataatccattttcatgtatttatgcaataaactgaattttaaggcaaaaacaacacttttctatatagtgtatgcaggacagattttagaaacttagattaaaatacaaatcccattacatttggttaaaatgaaaatctctgcttaatggaaaaaatactaatctttagcctattttgagtctataagatatatttcattttagacatgccttctaagttgttcacagatttttacctgctaaaacaatattatttccagtaaaacctctcctaacaggaaaagtggagttcaaaatatccaattggagaaaaattcagagttccttcattaaatataatttttttcatctagtatgtactatttcaagaagtgcaaaaagtaatgatagtgaatgtgataccatacttaactaaggtaatatatatccttagtttgctcaaaagagtcctggttattcctgttttctcagcttaatagtgcctcatcgtactctcaaaagtgttctaatttggaggataagttatatgatcatcctgtgtataattgtagactgtaccaagaagcaactaccttagctccactgccctttgagggatggaactggggtaagggcaggagccagttattattgccacagtgttttctaatgaaccatttggcctgtagaagaggaatagtattttttttaatagttgtatttgaatgattccagcttatcgtaaatactaaactgaatggcttttatatttttaactgctgttaaatgttattttagcatttattagttgtttattatttaattcttcaaatagtcatatgaaaacatatatttgataaaggtcaattgttagatgataatgtgccattcattatcataggaatgtccttgcccatatataaaacatgctggcatgtattttacttgttaataaagttgtatagatgtggaagtgtgaacctgtgatgcatccttttcaaaatcagtttaagattcgcatattatcatgactgtgacctcactaaactgtttatgtgacaaacctttcaagattggagatgaaaacaacacttgtgaaattaggttggggttgcaacatcttttaacttctcagttatttgtatgtcaggagacagattgtggtttaattttaataaacaaaatatcatctttttgaaaataaaaaaaaaaaaagggcggccgct

SEQ ID NO: 5959 - protein, 242 aa, Homo sapien; identical to SEQ ID NO: 4085

SEQ ID NO: 5960 - DNA, 3668 bp, Homo sapien; identical to SEQ ID NO: 2068

SEQ ID NO: 5961 - protein, 497 aa, Homo sapien; identical to SEQ ID NO: 2069

SEQ ID NO: 5962 - DNA, 5932 bp, Homo sapien; identical to SEQ ID NO: 3023

SEQ ID NO: 5963 - DNA, 3958 bp, Homo sapien
ggggggagacgagcaggtccgcgacgctgctgctgtgcctgctgggctgccacgtctggaaggcggtgacaagacgctgcgggagcccggcgccggagcccaagaggtgacgttaaaggtgcacatcagcgacgccagcacccaccagcccgtagcagatgcgctcatcgagatcttcaccaaccaggcctccatagcctctggcacctcggggactgatggcgtcgcctttatcaagttccagtataagctgggcagtcagttgattgtcaccgcctcgaagcatgcctacgtgccaaactctgccccatggaagccaatccggttacctgtattttcctctctgagccttggcctgcttccagaacgctctgccactctaatggtatatgaagatgtcgtccaaatagtatcaggattccaaggtgcccggccacagcctcgcgttcatttccagagaagggctctgaggttgcctgagaacaccagctacagtgacctgaccgcgtttctcacggccgccagctccccttcggaggtggacagttttccttatttgcgaggattagacggaaatggaacaggaaacagcaccaggcatgacctgaccccagtcacagccgtcagcgtccacttgctgagcagtaatggaacgccggtgctggtggatggtcccatctatgtcactgtgcccctggccacgcagagcagcctgaggcacaatgcctatgtcgcggcgtggcggtttgaccagaagctgggaacgtggctgaagagcggtctgggtcttgtgcaccaggaaggcagccagctgacgtggacatacattgccccccagttggggtactgggtggccgccatgtcccctcccatcccaggtcccgttgtaacacaggacattaccacgtatcacacggtgtttcttttggccattttaggaggaatggctttcatacttttggttttgctgtgtctccttttatattattgcaggaggaagtgcttgaaacctcgtcagcaccacagaaaactgcagctccctgcaggactggagagttccaaaagagaccagtccacgtccatgtcacacattaacttgctgttttcacgccgagcgtcagaattccctggcccgctgtccgtcaccagccacggccgccccgaggcccccggcacgaaggaactgatgagtggagtccatttggaaatgatgtctccgggcggcgaaggggacctgcacacccccatgctcaagctctcctacagcacctcccaggaatttagctcccgggaggagctcctctcttgcaaggaagaggataaaagccagatctcctttgataacctcactccaagtgggacgctggggaaagactaccataagtcagtggaggttttttccttaaaggcaagaaaatctatggaaagagaaggctacgagtcctcgggcatgatgactacaggggtagttacaacaccgtgctctcacagcctttatttgaaaagcaggacagagaaggtccagcctccacgggaagcaaactcaccattcaggaacatctgtaccccgcgccttcatcacctgagaaagaacagctgctggaccgcagacccactgaatgtatgatgtcgcgatcagtagatcacctcgagagacctacgtccttcccacggcccggccagttaatctgctgcagttctgtcgaccaggtcaatgacagcgtttacaggaaagtactgcctgccttggtcatcccggctcattatatgaaactccccggggaccactcctatgtcagccagcccctcgtcgtcccggctgatcagcagcttgagatagaaagactacaggctgagctgtccaatccccatgccgggatcttcccacacccgtcctcacagatccagccccagcccctgtcttcccaggccatctctcagcagcacctgcaggatgcgggcacccgggagtggagccctcagaacgcatccatgtcggagtctctctccatcccagcttccctgaacgacgcggctttggctcagatgaacagtgaggtgcagctcctgactgaaaaggccctgatggagcttgggggtgggaagccgcttccgcacacccgggcgtggttcgtctccttggatggcaggtccaacgctcacgttagacattcatacattgatctccaaagagctggaaggaacggaagtaatgatgccagtttggactctggcgtagatatgaatgaaccaaaatcagcccggaagggaaggggagatgctttgtctctgcagcagaactacccgcccgtccaagagcaccagcagaaagagcctcgagccccagacagcacggcctacacgcagctcgtgtacctggatgacgtggaacagagtggtagcgaatgtgggaccacggtctgtacccccgaggacagtgccctgcgatgcttgttggaggggtcgagtcggagaagtggtggccagctgcccagcctgcaggaggagacgaccagacggactgcggatgccccctcggagccagcagccagcccccaccagagaagatctgcccacgaggaagaggaagacgatgatgatgatgaccaaggagaagacaagaaaagcccctggcagaaacgggaggagaggcccctgatggcgtttaacattaaatgagctatcgcagacccacctgactgtggaatataaaattgccaaatatcctttctcatggaagcgcgtacccgttcgtggaggaaacggaacggcagcccagccgtgggacggacgtggacgtttactgcattcctgtttgccgtgtaaatgttagaaaggaattaaagttattactcggaataaaggatgactttggcggatgtcgcccctgcaaggaggtggctgaaagtggtgtccagatgtccttccgaggactcggcgtatccgccaccagggacattaagaaaccgcacgtgatgtcgctatgctctaacgatcacctcagttctccctcggattctgggaacagatgaaactttttgcatcgcttgagtcatttttatcacaataatcctactgtgaagctgtcgttgagaacttaggttggcacgtagcgtctcaaggtatgcgttctctcaaaggaaagctatgcatcgctgcttctttgtctgattttgcttagattttgctttggttaggttgcgttttggggtttgcctttttttgttgtcgcttaaatgcaatttggttgtaaagatttgattcctttgtgttcatctgttccgcttctcagcggtccatctcagcgtctcccttcaggaaccgctgagtgtcctctcttaacatccaagccttttaatgaaatcgtactgaaatctgtatcagctaagagtcctccaatcctggtcccattaactccaagtgcctttttgtcagtgacaacagacagtccctcgctttttgttgttgttggttttcttaacccctttaatggaactgcctggattttatacagttattaaaggatgtctcttttgctttaaactgcatgctgccaagtgccatttggggtcagcatcctcgtttcaacacagtgtgctctctagttatcatgtgtaacgtgggttctgtttagcgaagatagactagaggacacgttagagatgcccttccctgctccatccctgtggcaccattatggttttttggctgtttgtatatacggttacgtattaactctggaatcctatgggctcatcttgctcacccaatgtgggagtctggtttgagcaagcgagctgaatgtgactattaaaaaaaatttaaaaaaaaaaaagaaaatcttatgtactatccaaaagtgccagaatgactcttctgtgcattcttcttaaagagctgcttggttatccaaaaatgaaaattcaaaataaactctgaaaaaaaaaaaaaaaaaaaa

SEQ ID NO: 5964 - DNA, 2320 bp, Homo sapien; identical to SEQ ID NO: 5002

SEQ ID NO: 5965 - protein, 301 aa, Homo sapien; identical to SEQ ID NO: 5003

SEQ ID NO: 5966 - DNA, 825 bp, Homo sapien
  Unsure 290, 480, 491, 589, 698: Unknown base
gaattcggcacgagttttttttttctgcagttgtgtgtatgtgtgtttgtgtgaagaaaaacagactctgtccaggtagaaatggtgaggagggggaagagaattacatttccagggtcagaaacttggcaacagttttcctakagtgactcagacacaccacagtaacaactctcgctgcaattttattttaatttgagaaataaagatttcctccaagccacatgaggactctggcacccacccacaaagcaagacctgtatttataagccgagggtgcagggagctnaactgcgggacccgtcagggccccgtggacccatccccgtccccacccccccctccaccgytggggcccatcagtgtgtgttgggggggatgcttgggcagctggggggtgagggagacaacaaacctyggggaaytgggagccagagctgcggcctgactgacgccttttgatgctcacgggaaatttntgcccaggatntcagccccaggctggttgtttctacaaatctctctcaaatgtattattttggtgacaaaaatgaaggagctttgtaaatttttttaaaattatgaatncatatcaagtagttgtttacatttcttgaaaaaataggaactcgggcagcagaatcagattggcagaatctttagactacacaggcaataatcaagtctgctgttttgncctttcgtagtagaagtggttgtagtgtttagatatctgtttggtcttgcttcttgtattgcatttttttcaataaacaacaacaaaaagaaaaaaaaaaaaaaaaaaaaaaaagatctttaattaa

SEQ ID NO: 5967 - protein, 74 aa, Homo sapien
  Unsure 290, 480, 491, 589, 698: Unknown amino acid
MRTLAPTHKARPVFISRGCRELNCGTRQGPVDPSPSPPPPPPLGPISVCWGGCLGSWGVRETTNLGELGARAAA

SEQ ID NO: 5968 - DNA, 1405 bp, Homo sapien
  Unsure 8, 35, 59: Unknown base
ccctcctncccttccttggtccttccaaccttaantcctttttccaaaaaaaaaaagangaactgtgaagaacccccaaaaaacttcccacttcctgggaggccagcccacaggaacagggaacaatatttatttgggtctcttcagttccccctttgagaacaacattaaatacatgttagctggggctcccagggcattctccttcccacagtagtgcggccaaattcccagtctggccagtctctttgttgagactgaatagaaggactgcaggtttttttggaggatgagataatttttcctcgcaggcatttttcccttgccttccttatgcatgaatggtccctttgaatattatttccaaaagtgagagctaagacaaagtcatcaaaaagagaggataacagaaggtgggggcgggggcggggtgcagtggggtagggttacctgttaattgctgagactcagatgaaagtccagctctccctgggcaaccctagagggcagcagaggaccccagagctcattcaggccttgctgcttgttctaaactacaccttaggattttttcttctttccaaaacattccattgattttataaagactttctatagagaggctttcacttttgagttctttgagtttaaagattgcttttcttgaaacgctctttttttaatgtagaaaaattttactttttcaaatatgcatacaatttttaaaacagtagaagcaaattcattttaatgaccatgtaaagagcgaatgtcagacagtattattaccagtttattcaaattacatacatgttcctaccaaggtggaaagaaattcaaacctcatggtaaaacttaagcacgatttaagataaaagcatagtatttcttcagtgtagacttattaagtgccttattgaacaggatcttaacctgctttttctgtttttttgaaagagttaatgcaattgttgaagcttctaaccaagaaacaacttaaggaattgggagacttggtcccctcgttgtcagggttctggctataagtacctccccacctttgggttttcttaaatatgccaaaaggaattctagtttttataaccaatgggtttttttgtttgtgtgcttatggatttgtgtaatcattgatgcttaatgttgtggattcataatataaaaagtggctcctgtcctttatatttattcatgtgctagaaatagtatgcattatataaagagtatgaagttttcataagcctttatatttcaagctctttatttaaacattgttggaatatgtggcataagccttgtttcatttatttaataaactggagtaatatataataataaaaaaaaaaaaaaaaaactcgagggggggcccggtacccaatcgccctat

SEQ ID NO: 5969 - protein, 41 aa, Homo sapien
  Unsure 8, 35, 59: Unknown amino acid
MKVQLSLGNPRGQQRTPELIQALLLVLNYTLGFFLLSKTFH

SEQ ID NO: 5970 - DNA, 3045 bp, Homo sapien; identical to SEQ ID NO: 1107

SEQ ID NO: 5971 - protein, 265 aa, Homo sapien; identical to SEQ ID NO: 1108

SEQ ID NO: 5972 - DNA, 2343 bp, Homo sapien
gctcctgctaaccccatcactgtggaaatgaaaggcctgaagacagatttggaccttcagcagtacagctttataaatcagatgtgttatgagcgagccctccactggtatgccaagtatttcccttaccttgtcctcatccataccctggtctttatgctctgcagtaacttttggttcaaattccctggttccagctccaaaatagaacatttcatctccattctggggaagtgttttgactctccttggaccacacgggctttatctgaagtgtctggggaggactcagaagaaaaggacaacaggaagaacaacatgaacaggtccaacaccatccaatctggtccagaaggcagcctggtcaactctcagtctttaaagtccattcctgagaagtttgtagttgataaatccactgcaggggctctggataaaaaggaaggtgagcaggctaaggccttatttgagaaggtgaagaagttcaggctgcatgtggaagaaggtgatattctatatgccatgtatgttcgccagactgtacttaaagttatcaaattcctaatcatcattgcatataatagtgctctggtttccaaggtccagtttacagtggactgtaatgtggacattcaggacatgactggatataaaaacttttcttgcaatcataccatggcacacttgttctcaaaactgtccttttgctatctgtgctttgttagtatctatggattgacgtgcctttataccttatactggctgttctaccgttctctacgggaatattcctttgagtatgtccgtcaggagactggaattgatgatattccagatgtgaaaaatgactttgcttttatgcttcatatgatagatcagtatgaccctctctattccaagagatttgcagtgttcctgtctgaagtcagtgaaaacaaattaaagcagctgaacttaaataacgaatggactcctgataaactgaggcagaagctacagacaaatgcccataatcgactggaattgcctcttatcatgctctctggccttccagacactgtttttgaaatcacagagttgcaatctctaaaacttgaaatcattaagaacgtaatgataccagccaccattgcacagctagacaatcttcaagagctctctctgcaccagtgttctgtcaaaatccacagtgcggcgctctctttcctgaaggaaaacctcaaggtcttgagcgtcaagtttgatgacatgagggaactccccccctggatgtatgggctccgaaatctggaagagctgtacctagttggctctctaagtcatgatatttccagaaatgtcacccttgagtctctgcgggatctcaaaagccttaaaattctctctatcaaaagcaacgtttccaaaatccctcaggcagtggttgatgtttccagccatctccagaagatgtgcatacataatgatggcaccaagctggtgatgctcaacaacttaaagaagatgaccaatctgacagagctggagctggtccactgtgacctggagcgtattcctcatgctgtgttcagcctactcagcctccaggaattggacctgaaggaaaacaatctgaaatctatagaagaaatcgttagctttcagcacttaagaaagttgacagtgctaaaactgtggcataacagcatcacctacatcccagagcatataaagaaactcaccagcctggaacgcctgtcctttagtcacaataaaatagaggtgctgccttcccacctcttcctatgcaacaagatccgatacttggacttatcgtacaatgacattcgatttatcccccctgaaattggagttctacaaagtttacagtatttttccatcacatgtaacaaagtggaaagccttccagatgaactctacttctgcaagaaacttaaaactctgaagattggaaaaaacagcctatctgtactttcaccgaaaattggaaatttgctatttctttcctacttagatgtaaaaggtaatcactttgaaatcctccctcctgaactgggtgactgtcgggctctgaagcgagctggtttagttgtagaagatgctctgtttgaaactctgccttctgacgtccgggagcaaatgaaaacagaataacttatttttcgttaaagtttgactgaaacacgcttctaccaaatacagtataaataattaggtagtcttaatgcctttcctatttttttttccttttcacacaaaatgtacacaaagatcgcgtaaggagtatgtatttttaataaaaatttaattgtattttttcaatattaaaaaaaaaaaaaaaaa

SEQ ID NO: 5973 - protein, 708 aa, Homo sapien
MKGLKTDLDLQQYSFINQMCYERALHWYAKYFPYLVLIHTLVFMLCSNFWFKFPGSSSKIEHFISILGKCFDSPWTTRALSEVSGEDSEEKDNRKNNMNRSNTIQSGPEGSLVNSQSLKSIPEKFVVDKSTAGALDKKEGEQAKALFEKVKKFRLHVEEGDILYAMYVRQTVLKVIKFLIIIAYNSALVSKVQFTVDCNVDIQDMTGYKNFSCNHTMAHLFSKLSFCYLCFVSIYGLTCLYTLYWLFYRSLREYSFEYVRQETGIDDIPDVKNDFAFMLHMIDQYDPLYSKRFAVFLSEVSENKLKQLNLNNEWTPDKLRQKLQTNAHNRLELPLIMLSGLPDTVFEITELQSLKLEIIKNVMIPATIAQLDNLQELSLHQCSVKIHSAALSFLKENLKVLSVKFDDMRELPPWMYGLRNLEELYLVGSLSHDISRNVTLESLRDLKSLKILSIKSNVSKIPQAVVDVSSHLQKMCIHNDGTKLVMLNNLKKMTNLTELELVHCDLERIPHAVFSLLSLQELDLKENNLKSIEEIVSFQHLRKLTVLKLWHNSITYIPEHIKKLTSLERLSFSHNKIEVLPSHLFLCNKIRYLDLSYNDIRFIPPEIGVLQSLQYFSITCNKVESLPDELYFCKKLKTLKIGKNSLSVLSPKIGNLLFLSYLDVKGNHFEILPPELGDCRALKRAGLVVEDALFETLPSDVREQMKTE

SEQ ID NO: 5974 - DNA, 2894 bp, Homo sapien
agcactttcattggacgagccaatcatttcttcactgtaactgaccccaggaacattctgttaaccaacgaacaactcgagagtgcgagaaaaatagtacatgattacaggcaaggaattgttcctcctggtcttacagaaaatgaattgtggagagcaaagtacatctatgattcagcttttcatcctgacactggtgagaagatgattttgataggaagaatgtcagcccaggttcccatgaacatgaccatcacaggttgtatgatgacgttttacaggactacgccggctgtgctgttctggcagtggattaaccagtccttcaatgccgtcgtcaattacaccaacagaagtggagacgcacccctcactgtcaatgagttgggaacagcttacgtttctgcaacaactggtgccgtagcaacagctctaggactcaatgcattgaccaagcatgtctcaccactgataggacgttttgttccctttgctgccgtagctgctgctaattgcattaatattccattaatgaggcaaagggaactcaaagttggcattcccgtcacggatgagaatgggaaccgcttgggggagtcggcgaacgctgcgaaacaagccatcacgcaagttgtcgtgtccaggattctcatggcagcccctggcatggccatccctccattcattatgaacactttggaaaagaaagcctttttgaagaggttcccatggatgagtgcacccattcaagttgggttagttggcttctgtttggtgtttgctacacccctgtgttgtgccctgtttcctcagaaaagttccatgtctgtgacaagcttggaggccgagttgcaagctaagatccaagagagccatcctgaattgcgacgcgtgtacttcaataagggattgtaaagcagggaggaaacctctgcagctcattctgccactgcaaagctggtgtagccatgctggtgagaaaaatcctgttcaacctgggttctcccagttacggaaaccttttaaagatccacattagccttttagaataaagctgctactttaacagagcacctggcgtgggccaagtgcctgatactcccttacactgaatcatgttatgatttatagaaatacctttcctgtagcttttatagtcattgtttttcaaagacgatataccagccctcacccaggttttaaaaaagcactggtaggcatagaataggtgctcagtatatggtcagtaaatgttctattgattatcaatcagtgaaaaaagaaatctgtttaaaatactgaattttcatctcactcccattgcaaatcaaggagatctcagcagtgaactgggaaaatacaaaagctctgggctaatctataaaaacttaccctgaaatattaagggcagtttgcttctagtttggggattgcgctagcccaatgaaggtgatgaagcttttggatttggagggtaaaagctccttcacaccccttccaaaagtcagtcacagaccactgcaacatgccttccctgctggatcattatatacattcagattgtgagtggattgccttggttgacttttaatttattgttttttgttcttataaagatgataatcttaccttgcagttattgactttatattcaattatttacatcaaataatgaaataactgaaatgtacaaatgtcaaattttggaagtatattcaataccaatgctgtatgagtgggctgaatccagttcattgttttttttttggtaagaagtgagactacagttccagctacctacatgtcttttcttgtcatccttatagatctctttggctttcagaaagatacagtgataatgtgtgtatgaatcagtcacaatgaattttacttgaatattgtatgttgcattccacttcatttgaaaataatgaaaccatgtaccactgtttacatcatctgtagtgatttcatagataatatatttaatatgacagattatgtttcaactctgtagatgtttaacgtcatagacagttggccctctgtatccgtgagctctatatctgtgaattcaaccaagtttggatggaaaattttttttttttttttttttttgagacggagtctcgctctgtcacccaggctggagtgcagtggcgtagtctcggctcactgcaagctccgcctcctgggttcacgccgttctcctgcctcagcctctctgagaagctgggactacaggcgcccgccaccacgcccggctaatttttttgtatttttagtagagacggggtttcactgtggtctcgatctcctgacctcgtgatccgcccgccttggcctcccaaggtgctgggattacaagcgtgagccaccgcacccggcctgaaaatattttctaaaaagataaaaaatatacataacgatgaaaaataatacaaatttaaaaaccaatacagtataacaactatttacatagtgcttacattgtattaggtgttataagcaatctagagatgatttagcaagtatacaggaggatgtgcctaggttatatgcaaatactgtgccattttatatcaggaacttgagcatctgcagatattggtatcggagggcggtcctggaaccaagcatccacggatactgaggggtgacatttcatgaagtgtagatcattgtattcagagattgtaaatgaaaaaaatatagaaactatttagttttggtagattttttttctgacaatgtgaccagactgaatttcctcataaagaaaaaatggcgtgccttgtgtctgtgtttctcttttctctgaaaggattaatagatctgaagctttgggccacttagagccttaaaaaaaaaaaaaaaaaaaaaaaaaaaaaaaa

SEQ ID NO: 5975 - protein, 236 aa, Homo sapien
MILIGRMSAQVPMNMTITGCMMTFYRTTPAVLFWQWINQSFNAVVNYTNRSGDAPLTVNELGTAYVSATTGAVATALGLNALTKHVSPLIGRFVPFAAVAAANCINIPLMRQRELKVGIPVTDENGNRLGESANAAKQAITQVVVSRILMAAPGMAIPPFIMNTLEKKAFLKRFPWMSAPIQVGLVGFCLVFATPLCCALFPQKSSMSVTSLEAELQAKIQESHPELRRVYFNKGL

SEQ ID NO: 5976 - DNA, 3049 bp, Homo sapien
ttgctcggcgtttattagtgctgtctgggtagcattcccattgctcacaaagctctgtgtgcataaggacttcaagcagcatggtgcccaaggaaaatttattgctttttaccttttggggatgtttattccttatctttatgcattgtacctcatctgggcagtatttgagatgtttacccctatcctcgggagaagtggttctgaaatcccacctgatgttgtgctggcatccattttggctggctgtacaatgattctctcgtcctattttattaacttcatctaccttgccaagagcacaaaaaaaaccatgctaactttaactttggtatgtgcaattacattcctccttgtttgcagtggaacattttttccatatagctccaatcctgctaatccgaagccaaagagagtgtttcttcagcatatgactagaacattccatgacttggaaggaaatgcagttaaacgggactctggaatatggatcaatgggtttgattatactggaatttctcacataacccctcacattcctgcgatcaatgatagtatccgagctcactgtgaggagaatgcacctctttgtggttttccttggtatcttccagtgcactttctgatcaggaaaaactggtatcttcctgccccagaagtttctccaagaaatcctcctcatttccgactcatatccaaagaacagacaccttgggattctataaaattgacttttgaagcaacaggaccaagccatatgtccttctatgttcgagcccacaaagggtcaacactttctcagtggtctcttggcaatggcaccccagtcacaagtaaaggaggagactactttgtcttttactcccatggactccaggcctctgcatggcagttctggatagaagtgcaggtttcagaagaacatcctgaaggaatggtcaccgtggccattgctgcccactatctgtctggggaagacaagagatcccctcaactggatgctctgaaggaaaagttcccagattggacatttccctctgcctgggtgtgcacctacgatctctttgtattttaatcttgtggatgagctctaagtacatgcccagtggatactccatgtgacatggtttctccctatgttacgtggatgtttgtaacgtaagtcaatgaattttaatgatcatatgttcaaagagctttctgggttaacgcttttcagggccaagcactataagggtttagctgtggcgcagtgatgcatggcctgttgacacttgaaaatgccagtcttttggcacttcagcacatgtgggtactgccactacacacacgtcattttatatgaccttaaggacaaagccaacaatccacttcaatagctgcccctttaggatcaagaaagatgtacactgtcagagcattgttaatgagacaaaagttgtttccaatttaagccccaaaaccatttgttgtattagtggatggtgggtaaaatatcattcactgaggtaatgattccccttgagaatataactctgtgtaggtcactggaaagtgattgccatagggctgggagagaagcattgcactcttgaggctgtagcctgtgtcaagctgtttcttcaggcagcctctcaaatgtgctttgtctctctgtgctgaggcctggaccctgtgctgagctggtgactcactgtcctgacaagtggacacacagatgcactgctgtgctgctttcctgaggtggttttctatgcctgttttcctctgaaacatgtctgttacccctctccatcttaccaagttgaaaaggggaatatttggccacatacccctctggttttcgtaggttcttttggttcagaatattgtttgtgccagtacatgaccttaacttccttcctcagagcactgagctgccatctgggctattccggggtagaaggaaggctgggagtggtgggaattttataaatatttattctcttttctttgtttcataggagtcttgtgttatacaaggttagtccttcatggtataatcttactgatgcactgggcctatctttttgttttccagccagttgaatagattagtttttctcagtaacttactatccagcagactggctttcctgagacttgaggttgtggcttgtactggaatgagaccactgtacgtgtaggtggttcagatcctgcgtaatggcagcatgaggacttaaaaggtggttttcattttgaagatggctatgtagcttgtaaggtgtatcacagcagtacctctcatggctttttggttccagcagtgagggcattggtgagatcaatggtaaactgtgcaagctttctttttatcattaggaaatgtgaaacgttggacaaattttgagttttaacaaggacaaaaagttgaaagaaaaggcacagttaacaaaaaagggtggctagatttatcttgggtgatggaggaaatgagagaggaatgctcttgaaaggtggtctgtggatctgtctgaatagaaagagcacagtaagtatgcattgccggagaaaacgtccttgaagctgcttgtctcatgtgtatgatgtgctttttaaatcatgcccctcgttgcctgcctaatctgtgactccctaaaaactaactgggcccatgtagatggggctgcaaccagagctgaataacatgttaggctcacacatgcatcagcactgcacactgaaatcattgctcttcctggactttgtagaaatcagtctcaagtgcttcaagagtctggctcctgctacttttatctgtcaggtagcacataaggtttgcagggtttatattttgtatagaatcacagttgtggagaaaaagtaataatttctcaatgaattttaaaaatgggcctattttctatccccgtggttcatctgatataattagtgttccctgtgaattccccccctctatgggaaggatgcctttactctttatcagtaataaattatgactgttttcatattgccttagggttaaaaaaaaaaaaaaaaaaaaaaa

SEQ ID NO: 5977 - protein, 317 aa, Homo sapien
MFIPYLYALYLIWAVFEMFTPILGRSGSEIPPDVVLASILAGCTMILSSYFINFIYLAKSTKKTMLTLTLVCAITFLLVCSGTFFPYSSNPANPKPKRVFLQHMTRTFHDLEGNAVKRDSGIWINGFDYTGISHITPHIPAINDSIRAHCEENAPLCGFPWYLPVHFLIRKNWYLPAPEVSPRNPPHFRLISKEQTPWDSIKLTFEATGPSHMSFYVRAHKGSTLSQWSLGNGTPVTSKGGDYFVFYSHGLQASAWQFWIEVQVSEEHPEGMVTVAIAAHYLSGEDKRSPQLDALKEKFPDWTFPSAWVCTYDLFVF

SEQ ID NO: 5978 - DNA, 1445 bp, Homo sapien
gttgggcgagatgaagctacactgtgaggtggaggtgatcagccggcacttgcccgccttggggcttaggaaccggggcaaggtcgtccgatccgtgttgagcctctgtcagcagacttccaggagtcagccgccggtccgagccttcctgctcatctccaccctgaaggacaagcgcgggacccgctatgagctaagggagaacattgagcaattcttcaccaaatttgtagatgaggggaaagccactgttcggttaaaggagcctcctgtggatatctgtctaagtaaggccatttccagcagtttaaaaggtttcctttcagctatgagactggctcatagaggctgtaatgttgatacaccagtttcaacgctcacaccagtgaagacttcagaatttgaaaactttaaaactaaaatggttatcacatccaaaaaagactatcctctaagtaagaattttccatattccttggaacatcttcagacttcttactgtgggcttgtccgagttgatatgcgtatgctttgcttaaaaagccttaggaaattagacttgagtcacaaccatataaaaaagcttccagctacaattggagacctcatacaccttcaagaacttaacctgaatgacaatcacttggagtcatttagtgtagccttgtgtcattctacgctccagaagtcacttcggagtttggacctcagcaagaacaaaatcaaggcactccctgtgcagttttgccagctccaggaacttaagaatttaaaacttgacgataatgaattgattcaatttccttgcaagataggacaactaataaaccttcgctttttgtcagcagctcgaaataagcttccatttttgcctagtgaatttagaaatttatcccttgaatacttggatctttttggaaatacttttgaacaaccaaaagtccttccagtaataaagctgcaagcaccattaactttattggaatcttctgcacgaaccatattacataataggatcccatatggctctcatatcattccattccatctctgccaagatttggataccgcaaaaatttgtgtttgtggaagattctgtctgaactctttcattcaaggaactactaccatgaatctgcattctgttgcccacactgtggtcttagtagataatttgggtggtactgaagcacctattatctcttatttctgttctctaggctgttatgttaattcctctgatatgttaaagtaatgggtgagaccagaaaaagaaatttcaataacagatcagtttggggtgcatgtatgattttgcagcgtcaaattggagtaagggaagatttctgtatacttgctggagaggaggaatgtgtatagttactcatttagatgactccaaacttttattaaaaccaattttagttttaaaaaaaaaaaaaaaa

SEQ ID NO: 5979 - protein, 414 aa, Homo sapien [sequence omitted]

SEQ ID NO: 5980 - DNA, 1170 bp, Homo sapien
ggcggtacagacacttttaactcacagtaaaagcaaaagcaacagctcaagcagcctccttggagaaaacctgaaaattcaacttgttcaagagaaggtcttgtacgtgcctaagttctagagcctcctgacgtgagcatggctgagagtgaggaccgctccctgaggatcgttctggtagggaaaactggaagtgggaaaagtgcaacagcgaacaccatccttggagaggaaatctttgattctagaattgctgcccaagctgttaccaagaactgtcaaaaagcatcccgggaatggcaggggagagaccttcttgttgtggacactccagggctctttgacaccaaggagagcctggacaccacctgcaaggaaatcagccgctgcatcatctcctcctgcccagggccccatgctattgtcctagttctgctgctgggccgctacacagaggaggagcagaaaaccgttgcattgatcaaggctgtctttgggaagtcagccatgaagcacatggtcatcttgttcactcgcaaagaagagttggagggccagagcttccatgacttcatagcagatgcggatgtgggcctaaaaagcatcgtcaaggagtgcgggaaccgctgctgtgcctttagcaacagcaagaaaaccagtaaggcagagaaggaaagtcaagtgcaggagttggtggagctgatagagaaaatggtgcagtgcaacgaaggggcttacttttctgatgacatatacaaggacacagaggaaaggctgaaacaacgggaagaggttttgaggaaaatctacactgaccaattaaatgaagaaattaaactagtagaagaggataagcataaatcagaggaagaaaaggagaaagaaattaaattactaaaattaaaatatgatgaaaaaataaaaaatataagggaagaagctgagagaaatatatttaaagatgtttttaataggatttggaagatgctttcagaaatatggcataggtttttgtcgaaatgtaagttttattcttcctaatttactgtgatttgttaatggatgaattgtattttgcaaagatagagaaatacctccttccccttagctttattaaggtatcattgataaataaaaataaaatatgtttaatgtatataatgtgattct

SEQ ID NO: 5981 - protein, 346 aa, Homo sapien
AVQTLLTHSKSKSNSSSSLLGENLKIQLVQEKVLYVPKVLEPPDVSMAESEDRSLRIVLVGKTGSGKSATANTILGEEIFDSRIAAQAVTKNCQKASREWQGRDLLVVDTPGLFDTKESLDTTCKEISRCIISSCPGPHAIVLVLLLGRYTEEEQKTVALIKAVFGKSAMKHMVILFTRKEELEGQSFHDFIADADVGLKSIVKECGNRCCAFSNSKKTSKAEKESQVQELVELIEKMVQCNEGAYFSDDIYKDTEERLKQREEVLRKIYTDQLNEEIKLVEEDKHKSEEEKEKEIKLLKLKYDEKIKNIREEAERNIFKDVFNRIWKMLSEIWHRFLSKCKFYSS

SEQ ID NO: 5982 - DNA, 721 bp, Homo sapien
atgaaggctgaggtgtgcgccttttttttttttccttcttagtcgtgtgtacatcattgggaatggagggaaataaatgactggatggtcgctgctttttaagtttcaaattgacattccagacaagcggtgcctgagcccgtgcctgtcttcagatcttcacagcacagttcctgggaagggtggagccaccagcctctccctgaataactgggagatgaaacaggaagctctatgacacacttgatcgaatatgacagacactgaaaatcacgactcatccccctccagcacctctacctgttgcccgccgatcacagccggaatgcagctgaaagattccctggggcctggttccaaccgcccactgtggactctgaggcctctgcatttgcgggtggtctgcctgtgatattttggtcatgggctggtctggtcggtttcccatttgtctggccagtctctgtgtgtcttaatcccttgtccttcattaaaagcaaaactaatgaaacaataatcatatcctctcctcttcgctctctctacccctctccctctacacctctaactccctccccttctacccaacaatttcggcccgcttggcccagcccatttttacctctgccaggtttatcaatgcgctccgaattcgggtccacttggcccaattcccccttaagggggcccgtttactccatggcccgcgttttcgcgtccg

SEQ ID NO: 5983 - protein, 26 aa, Homo sapien
MRSEFGSTWPNSPLRGPVYSMARVFA

SEQ ID NO: 5984 - DNA, 2721 bp, Homo sapien
ggggatttgagggtcattggttctgagggccctccgcctgctcttttgcttctaaatccagcatcttctgtatgacctttgtcccgctcctgccaccccacgaagacagacgtgagggtcaggggagccgcggtgctaactgccactctgggcgggcacaggcgagggctgtgcagcacccgggcacgtggggtcttcggaggggctgctccccacaccacttcccctgcccctgccgagccctgccgtggggtggggggcgcagggagagaaagcagctgccctgggtgagagccaggagggacactgggcaggcagatgccaccccaggtgtggggacccccgctactgagtggccgggaggagcccacaggctccccacatgcagctgagcccagggttgtggtcgtgggtcgtgggtcaaggatggtggctgctgtggttgggggagaggctcaaggcccgcctgccaaccttgtcacctatgtgggggtgaggggagcccgccagaggccagagcccccactgtcccttcccaccctccagccaggctccaggcctcctagggccagagtatctgagccttctctcgcttgccgggcctgtggtttgggggtttgtgtggagcctggtccaggagccctccttcctgatctgcactggctggccctcctgacagccccaggcccccgtgccctctgccaggaggtgccttgccacttggcatggcccgtcacgggtggcacatctggggtgaatgcacgtcagtggaggcagaatcattctgtctgaatgaatggagtttccaggcccccactggccctctgtgtgagggtctgcagggtttggcaggacaggtctttctctccggcgagagcacccaccctgaccggctgctggatgagggcaccaaagctcgctagggagggctctgtccttagggaggagctgcggaatccctgcagctgtgcccccaggccctgccttgcacacttcctgcagccagggcgcccctggggaggtcagggcaggccggggaggctgaggcccacctgccatagtgggcaggtgcgggagccagggcggcagtggcctcggggctgggtggggcgcctggcctctggtctctggagcagtcaggggctctgcagacgctgagaggcctgctcatagtggactgggagatgctggagcagcctcagagccatggccggcccacggcgggagacggccctgctgctgcccctctgcctgtgcgtgtgcacctgtgggcacctgcgtgtgctggggcaggcagggctgtattgggaccaggtcccgtaacagcctgcctgcttaccgtctgctcccatccctggggaaagcaagggagctcggggtcctaggacctgacctcagcgctcacccccaccagcaccacagtcaccaggactctgtgactcagtttaccccacgagagcccctgggattcccagggcatcagaaggcccatcagcctcccgtgaactgctggggtgggcctggccttgggacgcgggtgcaggggcctctcctcactgcccccatggcacccacagccagtgcccgagcctgctgcagccccgacccggcagagcaagcggctctgctacctcagccacgtagctgatggcatccttcaggttcagctcgtggaagacattcaggatccggtctcgagacttctgggccgaccgtctcatgaggaccctgctgaggaacttcctgtcgaagtgggaccacctgtagggacagaccttgggtgtgagcctcaggtgacaggcgccctagagcccgccggacgcgtggcccggccccttctctcctgaattttgtttgctatagtgaccctgtaggcgcgtttaaaatgagggaagcagcccctgccacacgcccaggccgtccgccgttctcccgcctgtcctgttggatggaggccgttagacgcatatgaaactgcatgccgcctcctccagagggtggctcaggacacggtgggtgtcaggcctggtcaggcaagggggctttggccacatgggggggcaccttcaggtgcacaggaggaagggcaggggcggacagacaccctgagcccttagacttgtgggagccaagctgaccagagtgaggttttttttagcctaacggaattagagtattcgctggttatccggatcagaagggacggtggcctggccggacttagaggaaactctggggcacaaggaggtgatgcctgtcacttggacatgggtgcagccgccagagccgccctccagggcacagggtgggcccgggtgagcttgtgtgctcacacctgggcaggccccgcggcagcaatggcagctctcctgtacaggctgagtttcagccacaccaagaagtcaaagctaaccgaggctgtgccttccgagacccccgggatggcccctgggaggccaaggagtcggggactgggtacccggagcagagtcactgtggccacggagaaccgcagctgagctttatgaagccacgtggccacacctcccggtgcctccaccccaagcaaacacagatcgctcagaaaatgggaacccagggcaaattgtatgtgctccttactgggtttattataagtgtcacatgttttttataataaaacataggtgatttcaccttaatggaaaaaaaaaaaaaaaaaaaaaaaaaaaaaaaaaaaaa

SEQ ID NO: 5985 - DNA, 2147 bp, Homo sapien
tgagagctccaggcgcacatccgcagtcagccacgtcgcgcgcgcctccaggagcaaggatggagaggctggtgatcaggatgcccttctgtcatctgtctacctacagcctggtttgggtcatggcagcagtggtgctgtgcacagcacaagtgcaagtggtgacccaggatgaaagagagcagctgtacacacctgcttccttaaaatgctctctgcaaaatgcccaggaagccctcattgtgacatggcagaaaaagaaagctgtaagcccagaaaacatggtcaccttcagcgagaaccatggggtggtgatccagcctgcctataaggacaagataaacattacccagctgggactccaaaactcaaccatcaccttctggaatatcaccctggaggatgaagggtgttacatgtgtctcttcaatacctttggttttgggaagatctcaggaacggcctgcctcaccgtctatgtacagcccatagtatcccttcactacaaattctctgaagaccacctaaatatcacttgctctgccactgcccgcccagcccccatggtcttctggaaggtccctcggtcagggattgaaaatagtacagtgactctgtctcacccaaatgggaccacgtctgttaccagcatcctccatatcaaagaccctaagaatcaggtggggaaggaggtgatctgccaggtgctgcacctggggactgtgaccgactttaagcaaaccgtcaacaaaggctattggttttcagttccgctattgctaagcattgtttccctggtaattcttctcgtcctaatctcaatcttactgtactggaaacgtcaccggaatcaggaccgagagccctaaataagtcacacagcaccctgaaagtgattccctggtctacttgaatttgacacaagagaaaagcaggaggaaaaggggccattctccaaaggacctgaaagagcaaaagaggtgggagcgaaagccttaaggatcccacgactttttactgccatctgagctactcagtgtttgaatcccaagaggaagtcagtttacctctcaggtctgttgtaggacttgattttgtaaagcaatgccatgttatgtggttgaaagggcactggacttagttagtatcaggagcactgagctcacagactgacttgggctcctactggtggggacctctgttagtcactttacctcatccaaagtataaaggaattggaccaaataatttaccacatagctctaaaacttaatttaaaatgtaattccagaaaaaaaaagggaataagcaaagggggaagaattgaaagagagagagaagaaagaatacagagagcttaccttttgcctttctgttgatgttacatctcttcttcctatgttcttaggtctatgagtctgtttccccatcatttggtatctagtccagttcctgcttactgctttgctaatagctggccttgctagaatccttggtttcactgctgttcttcatgtgcttctatgagatttactccaacacaaataggactgaatttattgtgaagtaacattggcaatcttaacttattcatttaacttatttttatagctagataaatattgttagtcttagacaatagctcacattttttgagaagcatgccctccctgtccatttgtcttataacatgacccagccctattttacgtcattctaaattcagcctcatataatgaaaatacattatgaaaacagatgtttaggagatttcctgtatagcagtcagccaattcatatgctttgtctctgctggcttctttttccatgcgttaacttttcccaatagcagaggaggcaaatatgagcatacaatccctttgttctaaagatattgttccagctagtggaatgatgttgaatctttaataaccataattagttgctttttcagtatcttctgctttgtctgtgtctatccagtggcctaggaattaaagtgtaagttgttttcgctgttaaattggatatttatatatatatatatagcaagattttcatgtgttatttaattctgtattgtttcttatatttgtagtaaaatattgaacaattaaaaaaaaaaaaaaaagaaaaaaaaaaaaaaa

SEQ ID NO: 5986 - protein, 269 aa, Homo sapien; identical to SEQ ID NO: 2053

SEQ ID NO: 5987 - DNA, 752 bp, Homo sapien
actgaacagtggttaatcctgactctgtttttgactgacagttaacagttacatgaaccattcatattacagctcttacttaaatttgaccaagccaggatatatctgttaggccacattcatttagggatcatgttttccaaagcaggtttgggcaaaattaatccacaggactgaaaggtatacatctgtgagttttgttctcacttccacctctaatttgaagaacactttaattgacacagaatacatttcacatatttaacctctacaataagttctgacacattttccatgaaacaaaccatcgctatattcaagataatgaacctatctatcatactcccaaattccttctkgcatctttgtaatttctcactcttccttctccctctccccgtcccatcccaaccactgatctgctcaggcaactaccaatcttctttctgtcactatagattaatttgcatttttaaagaaatttacatacatggaaccatacatcatctatgctttgtagtatgactcctgtcactcagtacaattattttgagattcatttatgttawtgtatgtatcaatagttcatcccttttattggtaagtaacatttttttgtataggtataccatgatttgttgatgaacaaatttacctgttgatgaacatttacgttgttaccaagatttttgctattgaaaataaagtttttatgaatatttatatatataaaaaaaaaaaaaaaaactcga

SEQ ID NO: 5988 - protein, 66 aa, Homo sapien
  unsure 12: unknown amino acid
MNLSIILPNSFXHLCNFSLFLLPLPVPSQPLICSGNYQSSFCHYRLICIFKEIYIHGTIHHLCFVV

SEQ ID NO: 5989 - DNA, 978 bp, Homo sapien
gcaggactttgtgtacagttaaaggagagatggccaagccaggacaaatgtctattagaaaacggtcctaagagattctatggtgtttggcactttaaggtcatcggtgggcagaagtttagcattaatagttgttctgaaacgtgtttatcaggtttagagcccatgttgagtcttcttttcatgggttttcataatattttaaaactatttgtttagcgatggttttgttcgtttaagtaaaggttaatcttgatgatatacataataatctttctaaaattgtatgctgaccatacttgctgtcagaataatgctaggcatatgctttttgctaaatatgtatgtacagagtatttggaagttaagaattgattagactagtgaatttaggagtatttgaggtgggtggggggaagagggaaatgacaactgcaaatgtagactatactgtaaaaattcagtttgttgctttaaagaaacaaactgatacctgaattttgctgtgtttccattttttagagatttttatcatttttttctctctcttggcattcttttttctcatactcttcaaaaagcagttctgcagctggttaattcatgtaactgtgagagcaaatgaataattcctgctattctgaaattgcctacatgtttcaataccagttatatggagtgcttgaatttaataagcagtttttacggagtttacagtacagaaataggctttaattttcaagtgaattttttgccaaacttagtaactctgttaaatatttggaggatttaaagaacatcccagtttgaattcatttcaaactttttaaatttttttgtactatgtttggttttattttccttctgttaatcttttgtattcacttatgctctcgtacattgagtacttttattccaaaactagtgggttttctctactggaaattttcaataaacctgtcattatccaaatacaac

SEQ ID NO: 5990 - protein, 72 aa, Homo sapien [sequence omitted]

SEQ ID NO: 5991 - DNA, 3425 bp, Homo sapien
  Unsure 3397, 3409: Unknown base
atgggtgggtaaaagtgaacgacagcttacaaattcaaaaataaaactcttggttattaaagtcattccaggcatggacagagggatgcgaggctggccttccctgtccacggtcctctgaggcagctgaagtctcccatgtctggaccccgaatcttgtgcagattgaacagtggatccggggtgctctgagcaggcagcagggagcagctctggtgacgcttcatgtggtagcctcactctccattctctgcccctctcgtgcccacaaacaccaccaagagattcacggtgagaaatatcagcaaacccagatcccagatcaccaactccatggtcttaggacttccttggactgtccttggatctaaggctgagactttacccacgcagatttccggaggctcttcctctgcaacagccactgaaagcatgtgagggacagccccacagcaggacagaacgtggaaccacgggataccactttcaccttgcttcccctacatcatccaagccccaggaacagcacatgactcttacaagcaccgcagctcagcctcttcttgaagacacgtcacctggggccactgggcacacaggacagaggtcagctgacaatcctgggacctcaggatccatgctctcccagaggacgcctctcacacacatggggcggcagtcatgttacactcccaggggcattctcaccccgcggacagtggaagcccctcagggggtgcagaacagagtgctgcaggagagagagggcgctggctggtgcgaagccgtccgaggtgcagcacagcccacaaggcccgccagtgtctttcccgaggacacgcgaatcctggggggctcactccggcaaagaggacgagacactgcaccaaggacagggcctgacctctctggccgccttccccggggcctcagtttcccccgatggtgagagtggagccgaccatgcgccctgctgtggactcacccggcgccctggcgtcgagtggcggcggagacctgacagacagcgtgggaaaaatcaagatgtctgcagatttcgagagatggggtgcggtggcgggcgctggcggcggcggaggagagggagcagcgtcacgggcgcccggcccgttaaaacgctgctggctggagccacctccctccctgcagcccgcaacgggaatggagtaaagggagacccgtcgacctggccacggggatcagcgatggaattaaagcaatctttgtccacccatctggaagccgagaagcctctgaggcgctatggggcggtggaggagacggcttggaaaacggagagactggggagaaatcagctggacatcatctccatggcggagacaaccatgatgccagaggagattgagctggagatggcaaaaattcagcgtctccgggaagtcttggtccgccgggagtctgagctcaggttcatgatggatgacatccagctctgcaaggacatcatggacttgaagcaggagctgcagaacttggtcgccatcccagaaaaagaaaaaaccaaactgcagaagcagagagaggatgagctaatccagaagatccacaaactggtgcagaagagagacttcctggtggacgatgcggaggtcgagcggttaagggagcaagaagaagacaaggaaatggctgatttcctgagaatcaagttaaaacctctagacaaagtaaccaaatctccagccagctcccgggcagagaagaaagcagagcccccacctagcaagcccacggtggccaagacggggctggcactgatcaaggattgttgcggggccacccagtgcaacatcatgtagcccccacgtggggtgccctgggccatggggacccccccccaccctcttgtctttatagcccccatttcaccggggcccaagagctctccaaggcagaaggggttgaaggcaagcccgtgactgtcaccagaggccatgggcacggcaggcgggcctggccaccctgtacagagtgtagcagtagggagtctctcaccgtcgcatggtcctccccagagcatgccgaacccaggagtctgtctcactgtttatccaaacaccaggaaaggtcctccctcaaaaaagcatatctccacttctctctagctgtatctaacccaccgtgtgaatgaactgggagaggggcatgctccccagctgtgtgtagtcgtgacttctcaacaatctagcaccatgtcggacacgttccccatccaccctcctagctctgctctcagagctaggcacatgggcacaggtcccctcccgtctgtcctctcccagcaactgtgccctggagggctccacatggcccccgtgtctctcgggcaccacccatatagcagtcccagagggcccatctgtaaagatcgagcttgtgtgtggtgtcgtggtcacatctcccgcttccccccatcctgtgtctgggcacagttcacatcaggacagcgtccattgtgctctcagtctgcctcaggtgtgtgcctggagggggcctggactggcatggatccagtgtgcagaagagccagcagggaaccggaagctctgatgtcaaggccagagcagttgagaatgggacccagagtagatgctgacctgggcactccaccattccggggccaccacagagatgccagcaggatgccactttgccagcccgacacacggacctttgtaaagaacagcaacaggcaggagaggcagcgtgtgaccagattgtgtcccgtcattgggtggcatatgttaactagctgccaaacaacttcaacccgtgtaattcatgtacatttgcaacagccagcccggtacagcctgtgtgacttctctgtatgtgtgtgtgtgtcgtgaccagcctaagtagttagcataactcaagatgctgatgtgcagtcacccatcagagaaaataaaaatggaaaccacgttcacagcattttaaaagtttttactttttttcttgattatggaagtaatccatgtacatagtaaatcattttaaaagtacaaaaagtatgaagaagtttgtcttaaaaaaaaaaaaattattcctccaactagagaccactctgatgtttcgacgttttaaaaaagtctttttttgtgcattttttcatcgttgacatcatattgtgatatcatttataaccagttttttcctacttattataccaccatcttccacatcattaaaagctctttgtaaacattaaacactcttcataaatcatgccaatgtctgtttagtaatccatcttgtggatgtactgtaattcatctaatcatttcctcactattggatgtgtagactggttctaggttttcttataaatagtgtcttggattagccaggcatngtaatgggtgcngtaatcccagctactt

SEQ ID NO: 5992 - protein, 258 aa, Homo sapien
  Unsure 3397, 3409: Unknown amino acid
MGCGGGRWRRRRRGSSVTGARPVKTLLAGATSLPAARNGNGVKGDPSTWPRGSAMELKQSLSTHLEAEKPLRRYGAVEETAWKTERLGRNQLDIISMAETTMMPEEIELEMAKIQRLREVLVRRESELRFMMDDIQLCKDIMDLKQELQNLVAIPEKEKTKLQKQREDELIQKIHKLVQKRDFLVDDAEVERLREQEEDKEMADFLRIKLKPLDKVTKSPASSRAEKKAEPPPSKPTVAKTGLALIKDCCGATQCNIM

SEQ ID NO: 5993 - DNA, 3568 bp, Homo sapien
gaagtagcaactaaagtggcagtgtttcttctgaaattctcaggcagtcagactgtcttaggcaaatcttgataaaatagcccttatccaggtttttatctaaggaatcccaagaagactggggaatggagagacagtcaagggttatgtcagaaaaggatgagtatcagtttcaacatcagggagcggtggagctgcttgtcttcaattttttgctcatccttaccattttgacaatctggttatttaaaaatcatcgattccgcttcttgcatgaaactggaggagcaatggtgtatggccttataatgggactaattttacgatatgctacagcaccaactgatattgaaagtggaactgtctatgactgtgtaaaactaactttcagtccatcaactctgctggttaatatcactgaccaagtttatgaatataaatacaaaagagaaataagtcagcacaacatcaatcctcatcaaggaaatgctatacttgaaaagatgacatttgatccagaaatcttcttcaatgttttactgccaccaattatatttcatgcaggatatagtctaaagaagagacacttttttcaaaacttaggatctattttaacgtatgccttcttgggaactgccatctcctgcatcgtcatagggttaattatgtatggttttgtgaaggctatgatacatgctggccagctgaaaaatggagactttcatttcactgactgtttattttttggttcactgatgtctgctacagatccagtgacagtgctggccattttccatgaactgcacgtcgaccctgacctgtacacactcttgtttggagagagtgtgttgaatgatgcagtggccatagtccttacatattctatatccatttacagtcccaaggagaatccaaatgcatttgatgccgcagcattcttccagtctgtggggaatttcctgggaatcttcgctggctcatttgcaatggggtctgcgtatgccatcatcacagcactgttgaccaaatttaccaagctgtgtgagttcccgatgctggaaaccggcctgtttttcctgctttcttggagtgccttcctgtctgccgaggctgccggcctaacagggatagttgctgttctcttctgtggagtcacacaagcacattatacctacaacaatctgtcttcggattccaaaataagaactaaacagttgtttgaatttatgaactttttggcggagaacgtcatcttctgttacatgggcctggcactgttcacgttccagaatcatatctttaatgctctttttatacttggagcctttctagcaatttttgttgccagagcctgcaacatatatcccctctccttcctcctgaatctaggccgaaaacagaagatcccctggaactttcagcacatgatgatgttttcaggtttgcgaggagcgatcgcatttgccttagctattcggaacacagaatctcagcccaaacaaatgatgtttaccactacgctgctcctcgtgttcttcactgtctgggtatttggaggaggaacaacccccatgttgacttggcttcagatcagagttggcgtggacctggatgaaaatctgaaggaggacccctcctcacaacaccaggaagcaaataacttggataaaaacatgacgaaagcagagagtgctcggctcttcagaatgtggtatagctttgaccacaagtatctgaaaccaattttaacccactctggtcctccgctgactacaacattacctgaatggtgtggtccgatttccaggctgcttaccagtcctcaagcctatggggaacagctaaaagaggatgatgtggaatgcattgtaaaccaggatgaactagccataaattaccaggagcaagcctcctcaccctgcagtcctcctgcaaggctaggtctggaccagaaagcttcaccccagacgccaggcaaggaaaacatttatgagggagacctcggcctgggaggctatgaactcaagcttgagcaaactttgggtcaatcccagttgaattaattggcatgaagagtacagatgtaatcacaagtaatgcaagactcactgaggaatacaagccaagctgatgaggcagtacaggggagaggctggaaaacatattaagagcataaattggagagaatcaaagccttgtcacatggatcctctggtgcctgaagaaatgagattttattatccctctctattatgcaaatgaatttagttttttgacagcagccattctgattactggattggctggggtggggatgggggtatcaggagtctagctgctggaggatgggacagctgtgctgggtcttcagggcatttctgctgcgaatgcggctctccaggcccttcacttctattctggattttattccctccattaaggagagtttaaaaataaaagaaagcttctgagagtaaacattttgctcctaagctgaagggaatgcccagctatttagtaagtgataagtttcttattttgaggacttgactcccatttgctctcagtgaccccagggcagagcccagagaagtgttccgtacccactgctgatggtttcccagagcccacactgagttgaagaacctattgttcttcttggcatccttcttatgctacttctcccatcgctcaaaggggttgcctatggctgggtgtgccctgccctaaatgcagcaccactttcaagcttagtaggaccattccaagaaaaccaggtttcttctccccataccacgttgtgcctgaagaacaagccttcccgtccttgcctgcatgtgagtcacttcttggctgtgcagcaggtcccccccctccccgcgatatgctggagggtaggattctgcagcctgtgttgctctctacctggcagcagactgtgcaggagccccaacctgtcctccaattccagcattcacagctgatgagcagtgcaggagcagggcgagaggaacagagccaatgatgtgtgggttacactgaggagccaaggacagggcctcaggtctcccccttacaaggcgtggctcatggcctgcattccagagaccaacatgatagcttttaattcagctgcatgacctgtgccttttaagccataaagatacctcaagcctagcacctcttgaaatccagatgttcatattagactcgaaaaaataggctccaggcctaggtgcccaggctatgatgagtctgcttttgaaggaggtagggaatgacatcttccttggacccaaagcttaaaagtaatgtatgctttgctgaccactgtttgttaggccttaaacaacattcactgtggtggtatcaggcacactgctatgtgcatcaattatttttttgctttccaaacagaatctctggggcacaagttttacactcaagctaagtataactttgtcatttcaggtaaatatgacaagtggtggagcatgaagttttctaatttgacttaatcctaataaatttttgttacaaagtaaaaaaaaaaaaaaaaaaaaaaaaa

SEQ ID NO: 5994 - protein, 645 aa, Homo sapien
MERQSRVMSEKDEYQFQHQGAVELLVFNFLLILTILTIWLFKNHRFRFLHETGGAMVYGLIMGLILRYATAPTDIESGTVYDCVKLTFSPSTLLVNITDQVYEYKYKREISQHNINPHQGNAILEKMTFDPEIFFNVLLPPIIFHAGYSLKKRHFFQNLGSILTYAFLGTAISCIVIGLIMYGFVKAMIHAGQLKNGDFHFTDCLFFGSLMSATDPVTVLAIFHELHVDPDLYTLLFGESVLNDAVAIVLTYSISIYSPKENPNAFDAAAFFQSVGNFLGIFAGSFAMGSAYAIITALLTKFTKLCEFPMLETGLFFLLSWSAFLSAEAAGLTGIVAVLFCGVTQAHYTYNNLSSDSKIRTKQLFEFMNFLAENVIFCYMGLALFTFQNHIFNALFILGAFLAIFVARACNIYPLSFLLNLGRKQKIPWNFQHMMMFSGLRGAIAFALAIRNTESQPKQMMFTTTLLLVFFTVWVFGGGTTPMLTWLQIRVGVDLDENLKEDPSSQHQEANNLDKNMTKAESARLFRMWYSFDHKYLKPILTHSGPPLTTTLPEWCGPISRLLTSPQAYGEQLKEDDVECIVNQDELAINYQEQASSPCSPPARLGLDQKASPQTPGKENIYEGDLGLGGYELKLEQTLGQSQLN

SEQ ID NO: 5995 - DNA, 2920 bp, Homo sapien; identical to SEQ ID NO: 4397

SEQ ID NO: 5996 - protein, 589 aa, Homo sapien; identical to SEQ ID NO: 4398

SEQ ID NO: 5997 - DNA, 1566 bp, Homo sapien
  Unsure 501: Unknown base
atcaacttataatattgaattaatgttaatagtgtcattttaggtgaactagacttcattgaaggaggtgggagccttatggagagagagtatatgattatctctatttgtatttaattaccatttcatctaaccattcagaacatatttcaagaataattttaattcaagttgtagataaaacttactataccattttcattttgacgctttccaagaatgagatacacggtattttaaagacaaagattgatcttacatgttactattaaaaaaaacacgataattttgttctacatttatacttttaatttttctgtggataataagaaatgccaagagtcgattgtgtccatgctggcaagtggcctaataaattgtccttttatttggtggtcctcagagtggcagttaacatcttgctattctgccttgtggacttgaggtggaaaggttcatggaattatatccttgcttttggatgtgcaaactgaggctcanagagtttaagacacatagtcactttcaccaattaaatgatgaagctgccatgtaaacgtatttcatcacactcccgagaccttcttctccagtagtgttttcaagctttttgagcatgcagacactaccatcaaaaaattatgtagagacatacttgagagttacagtttaaagaaaaacaaggtgtaattatttggttattagtagcatttacatatgcttgaaaacttctgctatatatacagtaagattaatttattctaacaatgatcttgataatccccctgattcccagactccttggaatagctccacagctatcagtggttctgccacaggttcagagccttcccagtactgccttcttatttgagaggtgtgctaagagctataaagcagaggcttcaattgtacacagtttggaagtttaggcaaaagtcatttcttccctatattttgtcatgcttatctcctgtctctttctgttttacagattagcaataaactccttaaaacccaaaggtttgggcttctgttcctttcacttgcagtcagacatggagttagtggagaagacgacagaaggggtaacctgcatggtgacagctactgaggggatggataggaaagcaggctgagtccctggggccagtggttaccaaagccaaggagagagcaaggggagcccagtgggcctggccatggactgctctggaattccgagtgtgaactttcagccaagaaggtagtgtgaaaatattactgtgaggttttaaaagtacacaaataacaattgttttttgtaaaaaaaaaaaaaaaaaaaaaaaaaaaaaaagagatatgccaaaaaaaaaaaaaaaaaaaaaaaaaaaattgtgtcttctgttaacatattaaaatttattcttttagatttttatgtgtctatatacatgtaaaatatatatgcatccccaaattgtattatactcttttgagacctcacatttttttcacccaagaatataacattaatttctttcctttagaaaagacatgagactaaagaatgtttattgagttgag

SEQ ID NO: 5998 - DNA, 1316 bp, Homo sapien
cactcattaagaacagaggaggctgcctgttactcctggtgttgcatccctccagacactctgctgtttcctgcctaggcgtggctgcagccatggctaggaaagcgctgccacccacccacctgggccagagctggttctgctcctgctgcagggacactgagctggctatctcggcgcttcgggcaagaactgcaacaggctctcctgggtcctgcaggtgtacagccgggcccctgccttgtgcctcagctctcgagagctgctgctgccgggtgacctgatccaacctgataaggtgccatcttcagctaccactgcaaggccctgagggcaacagcagcacggcactgcccacccggctgctgatggcctggtgccagctgggagtcctcccggcacttcgaggccactgagccacccttccagccccagcccaccatggacaggggtatccagcttcctcctcaacctcgtcctctgcccctgagccagtgacgcccaaggacatgcctgttacccaggtcctgtaccagcactagctggtcaagggcatgacagtgctggaggccgtcttggagatccaggccatcactggcagcaggctgctctccatggtgccagggcccgccaggccaccaggctcatgctgggacccaacccagtgcacaaggacttggctgctgagccacacacccaggagaaggtggataagtgggctaccaagggcttcctgcaggctaggggaggagccacccccgcttccctattgtgaccaggcctatggggaggagctgtccatacgccaccgtgagacctgggcctggctctcaaggacagacaccgcctggcctggtgctccaggggtgaagcaggccagaatcctgggggagctgctcctggtttgagctgcattcaggaagtgcgggacatggtaggggaggcaaaaagccttgggcactaccctccctgtggagctgttcggtgtccgtcgagctagccacaccctgacaccatgttcaagggtaccggaagagaagggtgtctgcccccaacctcccctgtgggtgtcactggccagatgtcatgagggaagcaggccttgtgagtggacactgaccatgagtccctggggggagtgatcccccaggcatcgtgtgccatgttgcacttctgcccaggcagcagggtgggtgggtaccatgggtgcccacccctccaccacatggggccccaaagcactgcaggccaagcagggcaaccccacacccttgacataaaagcatcttgaagcttttaaaaaaaaaaaaaaaaaa

SEQ ID NO: 5999 - protein, 117 aa, Homo sapien
MTVLEAVLEIQAITGSRLLSMVPGPARPPGSCWDPTQCTRTWLLSHTPRRRWISGLPRASCRLGEEPPPLPYCDQAYGEELSIRHRETWAWLSRTDTAWPGAPGVKQARILGELLLV

SEQ ID NO: 6000 - DNA, 1880 bp, Homo sapien; identical to SEQ ID NO: 1731

SEQ ID NO: 6001 - protein, 591 aa, Homo sapien; identical to SEQ ID NO: 1732

SEQ ID NO: 6002 - DNA, 3389 bp, Homo sapien
gtagatgaacaggaagcaactggaggtaatacctatgatttgggtaatatctctagataagagtaaagggacttttcacataggcagtcacttcacctctacgagtctcattttttccaactgcacaaatacagattttcgatactttatttatgcagtgacatacactgtcattcttgtgccaggtctcatagggaatatattagccctgtgggtattctatggttatatgaaagaaacaaaacgagctgtgatatttatgataaacttagccattgctgacttactacaagttctttccttgccactgaggatcttctactacttgaatcatgactggccatttgggcctggtctctgcatgttctgtttctacctgaagtatgtcaacatgtatgcaagcatctacttcttggtctgcatcagtgtgcgacgattttggtttctcatgtacccctttcgcttccatgactgcaaacagaaatatgacctgtacatcagcattgctggctggctgatcatctgccttgcctgtgtactctttccactcctcagaaccagtgatgatacccctggcaataggaccaaatgctttgtggatcttcctaccaggaatgtcaacctggcccagtccgttgttatgatgaccattggcgagttgattgggtttgtaactccgcttctgattgtcctatattgtacctggaagacggttttatcactgcaagataaatatcccatggcccaagatcttggagagaaacagaaagccttgaagatgattctaacctgtgcaggggtattcctaatttgctttgcaccttatcatttcagttttcctttagatttcctggtgaagtccaatgaaattaaaagctgcctagccagaagggtgattctaatatttcattctgtggcattgtgtcttgctagtctgaattcatgtcttgacccagtcatatactacttttccactaatgagttccgaagacggctttcaagacaagatttgcatgacagcatccaactccatgcaaaatcctttgtgagtaaccatacagcttccaccatgacacctgaattatgctaaaacaaaaaaccaaactgaatgtgacctgaaatgcaagtacatcagaacatatctgcaatacccaagccacagggaagaacttgcaaaacaacacagcttttcagttctgctctatcttactgctatggggaattcacttcttcaaagcaggacctatttggagcattacgatccacgattattgatgttgacatgtccatgtagtaatttttcttcaagtctgtaaatcttaaaatatcaaatttctgtgacatcctataaacatatgcactcaactgtagtcagtacttttacctgtgaacctcaggcacaaaaagattattagcttggagtcaccataaacatttagttttgttgcaacagatactgagtctttatgttcagaggaaatgtaagtgtctttttatattagtaatcacagtttacatgccattttcatatgtttggttatattttagtgggatagatgatatattaccctgtgtaaagaaaatgtaaacataagatcatttttatctctcaagtgtgattactcttcagagtttgaagattaaaatagctattttcttcattttgtgtcaacatgaaacatcatttgtcacacctgttcacagaatgaaaatctgaactcaggcctctggcatatttaaactaagaacaatatacatatttacatacgacaaccctctgtgactggaaaagatgccgtgttgcatctacctaggacaggtagttgtcaaagtccatacaaggtgactcaattgggctctaggcctaggagaaagcagaaaggtgacaatcacaattctgctctcttacactttttctaaagaacacttctggagatgtatggacccgcctagtagaggaagtttttatcatgtttctagagatacattgaggtaatgttgacaggttcctgcactttctgagcctgtggaagaagtagtgcactaatgaatcattaaacctgggccagagtgaaaagatgaagcaaagttgggtaatctttttaaaattctcatcacattgtatttcttactctaatacaaggacacttacttagcttagactgccaagttacttacacaagccagagtaagtctctctgccccatcattgcatacatattacagtcagtcacatggaccctagaatccacattgattttttttggtctagctttgccccagacataccattctaaagcctacaaagcctagctcttagcagctggggaaggcaattatttcacctcttgaaaaatgcatagaagattaatttggtcagcctttggcaaccaatggccaatgacttgcctactacctgtttggtactattgtgtgggaaacagacccaggatattagtcgtaattaaaccttaggttgtaagtattagaatattttgaaacatgttttagcaaaaagctctaactttaagaaagttctacttaaaatctgtgtgctatataatgaagataccttctacgtctcacagaaggaatgtagaacccaatcaaaggctttatcatatttagaggaaaggggttgttttaggcatacagttatgatactaatacattaggggaaaactggtgacatcaaaatgaattctaatatctagactgatggaaagttttctaaagttttctttggacaagtgttgattttacacatatgttgttattaagataataccctattagaaaactgactttgtgctgctagcaagtgtatctatgtgtctcctaactaatcattgtaaggtatatgttttgatgtgttaaataagttttcaataagtgttaaactgtattttaaatagggcatctataactgtgtcttgtctctttgctttaaagtgtcttttgtttgactataatttagtgttgcaataggattgcaagtaataattttgtggaattgtgaaataactgtgggtacttttaatgtgagagtcttatctatagtatttgtgcttagtattttctagattagcatgaattacacttcctaaggtcactttggaagatgattgatttgatttaattaacatattgatttcactttgactatatttttcttaaagaggaagggaaatattttcaggagatgtttgaccttcttagatgaatggttgagggtagggcccatttgttaggcagccatttacatcattccaaaaaaaggaccagtattcagtgttatgctgcttagctgaggacaccctttttccccagggcctgccaatctaacgttgtattcaggtgctctgatttacttaattcacccttatcca

SEQ ID NO: 6003 - protein, 361 aa, Homo sapien
MNRKQLEVIPMIWVISLDKSKGTFHIGSHFTSTSLIFSNCTNTDFRYFIYAVTYTVILVPGLIGNILALWVFYGYMKETKRAVIFMINLAIADLLQVLSLPLRIFYYLNHDWPFGPGLCMFCFYLKYVNMYASIYFLVCISVRRFWFLMYPFRFHDCKQKYDLYISIAGWLIICLACVLFPLLRTSDDTPGNRTKCFVDLPTRNVNLAQSVVMMTIGELIGFVTPLLIVLYCTWKTVLSLQDKYPMAQDLGEKQKALKMILTCAGVFLICFAPYHFSFPLDFLVKSNEIKSCLARRVILIFHSVALCLASLNSCLDPVIYYFSTNEFRRRLSRQDLHDSIQLHAKSFVSNHTASTMTPELC

SEQ ID NO: 6004 - DNA, 1696 bp, Homo sapien; identical to SEQ ID NO: 3531

SEQ ID NO: 6005 - protein, 354 aa, Homo sapien; identical to SEQ ID NO: 3532

SEQ ID NO: 6006 - DNA, 1812 bp, Homo sapien; identical to SEQ ID NO: 3287

SEQ ID NO: 6007 - protein, 307 aa, Homo sapien; identical to SEQ ID NO: 3288

SEQ ID NO: 6008 - DNA, 446 bp, Homo sapien; identical to SEQ ID NO: 3579
  Unsure 180-181: Unknown base

SEQ ID NO: 6009 - protein, 71 aa, Homo sapien; identical to SEQ ID NO: 3580
  unsure 30-31: unknown amino acid
  Unsure 180-181: Unknown amino acid

SEQ ID NO: 6010 - DNA, 2119 bp, Homo sapien; identical to SEQ ID NO: 1173

SEQ ID NO: 6011 - protein, 445 aa, Homo sapien; identical to SEQ ID NO: 1174

SEQ ID NO: 6012 - DNA, 3780 bp, Homo sapien; identical to SEQ ID NO: 4219

SEQ ID NO: 6013 - protein, 432 aa, Homo sapien; identical to SEQ ID NO: 4220

SEQ ID NO: 6014 - DNA, 1074 bp, Homo sapien
ctcggggagtggttgtctccctttcctggagtcatttgtgggagttagggtcttatcctgatctttcctcgtcccccgctcccccgtcctccgaggtggcagctgcgtagaagtctggaacgttttttcttagagttccagaattgtgactgaagtgtacccagagacacaaagaaatacagaagtccagaatgatcaaatgagatcactacccaatgaaatgataggccgaggagccagaaattgtcctactacctgctttccaggtccagattccacgagagccttctgggctcccaccagagaccctcagtgaagactctgttgaagactttaagaccatgctagaaagcctcccggcagaggttcaggaagttctgctatgaggatgcagctggccccagggatgtcctcaggcatctctaggaccttgctggacggtggtggctgagacctgatatccacacaaaggagcagactgtggaaatgctggtgcaggagcaattccaggctgtcctgcccgaaggagctcagagctcaagcacagagatgtcatcctggaatcagaatcactggctaagtcttgctgcttgcttcttgctcagcctgcatatgagaagtcaaccaagcattctcttggatgcaagatccaactgcacccatgggaaatctgaacttccactttctttgagcttgtctttggttgtaataagaatccatcaaaacccatgtctggatctctctttggctgaggcagctttatttcctacagagtttctctgtcctcttgttaggacaatcagcctgctgctttgggcttttccaagagcctatttttcatctgctggatgcctctttttttttttttttttgcactttgtgacatgctttaatatatatattttttatgtatccaaagaggtaatcaactttaactttcagaattcatgaatcttggtttggtggcatgaatgaaaggttatgtaaccccaccagtaactcatttggggtgcccttgaaatattaaagtttggtcctcaatcaaaaaaaaaaaaaaaaaaaaaaaaaaaaaaa

SEQ ID NO: 6015 - protein, 154 aa, Homo sapien
MLVQEQFQAVLPEGAQSSSTEMSSWNQNHWLSLAACFLLSLHMRSQPSILLDARSNCTHGKSELPLSLSLSLVVIRIHQNPCLDLSLAEAALFPTEFLCPLVRTISLLLWAFPRAYFSSAGCLFFFFFLHFVTCFNIYIFYVSKEVINFNFQNS

SEQ ID NO: 6016 - DNA, 3443 bp, Homo sapien; identical to SEQ ID NO: 3213

SEQ ID NO: 6017 - protein, 442 aa, Homo sapien; identical to SEQ ID NO: 3214

SEQ ID NO: 6018 - DNA, 2473 bp, Homo sapien
aatcgcgaaacccggcgagcggcgcgctggctatcgagcgagcggggcggaaccgggagttgcgccgccgctcgggcgccgggctccgtcgcggccgcagccccgcgggtcgccctcccgtgcctcgcccgcggacaccctggccgtggacaccctggccgtgggcacccgcggggcgcggcgcgggcgctgcgcggcggcggcggcggcatgaaggtcacgtcgctcgacgggcgccagctgcgcaagatgctccgcaaggaggcggcggcgcgctgcgtggtgctcgactgccggccctatctggccttcgctgcctcgaacgtgcgcggctcgctcaacgtcaacctcaactcggtggtgctgcggcgggcccggggcggcgcggtgtcggcgcgctacgtgctgcccgacgaggcggcgcgcgcgcggctcctgcaggagggcggcggcggcgtcgcggccgtggtggtgctggaccagggcagccgccactggcagaagctgcgagaggagagcgccgcgcgtgtcgtcctcacctcgctactcgcttgcctacccgccggcccgcgggtctacttcctcaaagggggatatgagactttctactcggaatatcctgagtgttgcgtggatgtaaaacccatttcacaagagaagattgagagtgagagagccctcatcagccagtgtggaaaaccagtggtaaatgtcagctacaggccagcttatgaccagggtggcccagttgaaatccttcccttcctctaccttggaagtgcctaccatgcatccaagtgcgagttcctcgccaacttgcacatcacagccctgctgaatgtctcccgacggacctccgaggcctgcatgacccacctacactacaaatggatccctgtggaagacagccacacggctgacattagctcccactttcaagaagcaatagacttcattgactgtgtcagggaaaagggaggcaaggtcctggtccactgtgaggctgggatctcccgttcacccaccatctgcatggcttaccttatgaagaccaagcagttccgcctgaaggaggccttcgattacatcaagcagaggaggagcatggtctcgcccaactttggcttcatgggccagctcctgcagtacgaatctgagatcctgccctccacgcccaacccccagcctccctcctgccaaggggaggcagcaggctcttcactgataggccatttgcagacactgagccctgacatgcagggtgcctactgcacattccctgcctcggtgctggcaccggtgcctacccactcaacagtctcagagctcagcagaagccctgtggcaacggccacatcctgctaaaactgggatggaggaatcggcccagccccaagagcaactgtgatttttgtttttaagactcatggacatttcatacctgtgcaatactgaagacctcattctgtcatgctgccccagtgagatagtgagtggtcaccaggcttgcaaatgaacttcagacggacctcagggtaggttctcgggactgaaggaaggccaagccattacgggagcacagcatgtgctgactactgtacttccagacccctgccctcttgggactgcccagtccttgcacctcagagttcgccttttcatttcaagcataagccaataaatacctgcagcaacgtgggagaaagaagttgctggaccaggagaaaaggcagttatgaagccaattcattttgaaggaagcacaatttccaccttattttttgaactttggcagtttcaatgtctgtctctgttgcttcggggcataagctgatcaccgtctagttgggaaagtcaccctacagggtttgtagggacatgatcagcatcctgatttgaaccctgaaatgttgtgtagacaccctcttgggtccaatgaggtagttggttgaagtagcaagatgttggcttttctggattttttttgccatgggttcttcactgaccttggactttggcatgattcttagtcatacttgaacttgtctcattccacctcttctcagagcaactcttcctttgggaaaagagttcttcagatcatagaccaaaaaagtcataccttcgaggtggtagcagtagattccaggaggagaagggtacttgctaggtatcctgggtcagtggcggtgcaaactggtttcctcagctgcctgtccttctgtgtgcttatgtctcttgtgacaattgttttcctccctgcccctggaggttgtcttcaactgtggacttctgggatttgcagattttgcaacgtggtactacttttttttctttttgtctgttagttatttctccaggggaaaaggcaataattttctaagacccgtgtgaatgtgaagaaaagcagtatgttactggttgttgttgttgttcttgttttttatatgtaaaataaaaatagtgaaaggag

SEQ ID NO: 6019 - protein, 384 aa, Homo sapien
MKVTSLDGRQLRKMLRKEAAARCVVLDCRPYLAFAASNVRGSLNVNLNSVVLRRARGGAVSARYVLPDEAARARLLQEGGGGVAAVVVLDQGSRHWQKLREESAARVVLTSLLACLPAGPRVYFLKGGYETFYSEYPECCVDVKPISQEKIESERALISQCGKPVVNVSYRPAYDQGGPVEILPFLYLGSAYHASKCEFLANLHITALLNVSRRTSEACMTHLHYKWIPVEDSHTADISSHFQEAIDFIDCVREKGGKVLVHCEAGISRSPTICMAYLMKTKQFRLKEAFDYIKQRRSMVSPNFGFMGQLLQYESEILPSTPNPQPPSCQGEAAGSSLIGHLQTLSPDMQGAYCTFPASVLAPVPTHSTVSELSRSPVATATSC

SEQ ID NO: 6020 - DNA, 1723 bp, Homo sapien; identical to SEQ ID NO: 2160

SEQ ID NO: 6021 - protein, 163 aa, Homo sapien; identical to SEQ ID NO: 2161

SEQ ID NO: 6022 - DNA, 2422 bp, Homo sapien
ggcacgaggggcggcagcggttggaggcttcgcccggctttgcagcggggacttcggcggcggcgcctcaggcacctcggcccggacacgatgaggcgagtggtacgacagagcaagtttcggcatgtatttgggcaagcggtgaaaaatgaccagtgctatgatgacatccgggtttctcgtgtgacctgggatagttccttttgtgctgtcaatcccagatttgttgccataatcatagaggcaagtgggggaggagcgttccttgtcctccctctgcacaagactggtcgaattgacaaatcttaccctacagtatgtggccacacaggaccagtgctggacatagactggtgcccacataacgatcaggtcattgccagcggttcagaggactgcacggtcatggtatggcagatcccagaaaatggactcaccctttccctgactgaacctgtggtgattttggaaggccactcaaagagagtcggcatcgtggcttggcatccaacggcccgcaatgtgcttcttagtgcaggctgtgataatgccattatcatctggaatgtgggaacaggggaagcccttataaacttggacgatatgcattcagacatgatttacaatgtgagctggaaccggaatggcagtctgatctgcacagcttccaaagacaagaaagtgagagtcattgatcccaggaaacaagagattgttgctgagaaggagaaagcacatgaaggagcaagacccatgagagccatcttcctggccgatggcaatgtcttcaccactgggttcagccgcatgagcgagcggcagctggctctctggaatccgaaaaatatgcaggaaccaattgctcttcatgagatggacactagcaatggggtgttgctgcctttctatgaccctgacaccagcatcatttacttatgtggaaagggtgacagcagtattcgctattttgagatcacggatgaatccccgtacgtccactacctcaacacattcagcagcaaggagcctcagagagggatgggttacatgcccaagaggggacttgatgttaacaaatgtgagattgccagattcttcaaacttcatgagagaaagtgtgaacctattattatgactgttcccaggaagtctgaccttttccaagatgacctgtatcctgacacagcggggccagaggccgcgctggaggcagaagagtggttcgaaggcaagaatgcagacccaatcctcatctccttgaagcacgggtacattccaggcaaaaacagggatctcaaggtggtcaagaagaacattctggatagcaagcccactgcaaacaagaagtgcgacctgatcagcatccccaagaaaaccacagacacggccagtgtgcaaaatgaagccaagttggatgagattttaaaagagatcaaatctataaaagacacaatctgcaatcaagatgagcgtatttccaagttagaacagcagatggcaaagatagcagcctgaaggtcccacccccacccctacagaaaaaatgggagcaagaacttgtgcttgggagctggttattggtgtggtcctagggagggcggaaagggaggcactgccatttggagacattccatttcagatttgtcaaccagcgataggccacattccagtaagaactcaatttgtctcccaaatttgcagaaacaaaacgtgatttaaaagctgagctttttatcagaaagcttttttgatgttttaagtgttatgtgacttgttgaactttttaaaaagtgctacttttaaaatcccagatactctgaattttagaaaacaaactaattctgattgtgtcgtgcccaagtacccttttttttttaatgaatagggaccaatgccacattgctttttatatttctttcttttttaatgttgccaaaaccaaaagtagctttgttttcctttgtattttgctactttgcagtatttgtgtgtgtggttttttttccttaatttgaaagggacagcactgtgtatgtttataaactaaatgaagataagatattattttgtataaacattcatctgagaacaatcaaagcagtagccacatggtgctggctcctttgcagcacaaacctggtcattttgatgactgtacaacaggaagacttgaaaaatcacgtggattcatattaccaccgctctcatttcatggagtcttctgatcaaaaaagctcacgtcgtatttcttcttttcctttctcttttctagaaattgggtgtttgtaccagaatggaattttgcttctcggttatcctgtgcttcagatgattataatctaacccaaaaaaaaaaaaaaaaaaaaaaaaaaaaaaaaaaaaaaaaaaaaaaaaaaaaaaaaaaaaaaaaaaaaaaaaaaaa

SEQ ID NO: 6023 - protein, 474 aa, Homo sapien; identical to SEQ ID NO: 3642

SEQ ID NO: 6024 - DNA, 1014 bp, Homo sapien; identical to SEQ ID NO: 3451

SEQ ID NO: 6025 - protein, 246 aa, Homo sapien; identical to SEQ ID NO: 3452

SEQ ID NO: 6026 - DNA, 1425 bp, Homo sapien; identical to SEQ ID NO: 1685

SEQ ID NO: 6027 - protein, 181 aa, Homo sapien; identical to SEQ ID NO: 1686

SEQ ID NO: 6028 - DNA, 1714 bp, Homo sapien; identical to SEQ ID NO: 2908

SEQ ID NO: 6029 - protein, 444 aa, Homo sapien; identical to SEQ ID NO: 2909

SEQ ID NO: 6030 - DNA, 2140 bp, Homo sapien
agctgaggtgtgagcagctgccgaagtcagttccttgtggagccggagctgggcgcggattcgccgaggcaccgaggcactcagaggaggcgccatgtcagaaccggctggggatgtccgtcagaacccatgcggcagcaaggcctgccgccgcctcttcggcccagtggacagcgagcagctgagccgcgactgtgatgcgctaatggcgggctgcatccaggaggcccgtgagcgatggaacttcgactttgtcaccgagacaccactggagggtgacttcgcctgggagcgtgtgcggggccttggcctgcccaagctctaccttcccacggggccccggcgaggccgggatgagttgggaggaggcaggcggcctggcacctcacctgctctgctgcaggggacagcagaggaagaccatgtggacctgtcactgtcttgtacccttgtgcctcgctcaggggagcaggctgaagggtccccaggtggacctggagactctcagggtcgaaaacggcggcagaccagcatgacagatttctaccactccaaacgccggctgatcttctccaagaggaagccctaatccgcccacaggaagcctgcagtcctggaagcgcgagggcctcaaaggcccgctctacatcttctgccttagtctcagtttgtgtgtcttaattattatttgtgttttaatttaaacacctcctcatgtacataccctggccgccccctgccccccagcctctggcattagaattatttaaacaaaaactaggcggttgaatgagaggttcctaagagtgctgggcatttttattttatgaaatactatttaaagcctcctcatcccgtgttctccttttcctctctcccggaggttgggtgggccggcttcatgccagctacttcctcctccccacttgtccgctgggtggtaccctctggaggggtgtggctccttcccatcgctgtcacaggcggttatgaaattcaccccctttcctggacactcagacctgaattctttttcatttgagaagtaaacagatggcactttgaaggggcctcaccgagtgggggcatcatcaaaaactttggagtcccctcacctcctctaaggttgggcagggtgaccctgaagtgagcacagcctagggctgagctggggacctggtaccctcctggctcttgatacccccctctgtcttgtgaaggcagggggaaggtggggtactggagcagaccaccccgcctgccctcatggcccctctgacctgcactggggagcccgtctcagtgttgagccttttccctctttggctcccctgtaccttttgaggagccccagcttacccttcttctccagctgggctctgcaattcccctctgctgctgtccctcccccttgtctttcccttcagtaccctctcatgctccaggtggctctgaggtgcctgtcccacccccacccccagctcaatggactggaaggggaagggacacacaagaagaagggcaccctagttctacctcaggcagctcaagcagcgaccgccccctcctctagctgtgggggtgagggtcccatgtggtggcacaggcccccttgagtggggttatctctgtgttaggggtatatgatgggggagtagatctttctaggagggagacactggcccctcaaatcgtccagcgaccttcctcatccaccccatccctccccagttcattgcactttgattagcagcggaacaaggagtcagacattttaagatggtggcagtagaggctatggacagggcatgccacgtgggctcatatggggctgggagtagttgtctttcctggcactaacgttgagcccctggaggcactgaagtgcttagtgtacttggagtattggggtctgaccccaaacaccttccagctcctgtaacatactggcctggactgttttctctcggctccccatgtgtcctggttcccgtttctccacctagactgtaaacctctcgagggcagggaccacaccctgtactgttctgtgtctttcacagctcctcccacaatgctgaatatacagcaggtgctcaataaatgattcttagtgactttaaaaaaaaaaaaaaaaaaa

SEQ ID NO: 6031 - protein, 164 aa, Homo sapien; identical to SEQ ID NO: 557

SEQ ID NO: 6032 - DNA, 717 bp, Mus musculus; identical to SEQ ID NO: 480

SEQ ID NO: 6033 - protein, 79 aa, Mus musculus [sequence omitted]

SEQ ID NO: 6034 - DNA, 4104 bp, Homo sapien; identical to SEQ ID NO: 1031

SEQ ID NO: 6035 - protein, 913 aa, Homo sapien; identical to SEQ ID NO: 1032

SEQ ID NO: 6036 - DNA, 1683 bp, Homo sapien
gggcgggggtacctgtacccacgtagtcgccggttaccgatcggactaagttccagaagcaagagataaagtaataatgggtactgtggggaaaaacacagaagaacaattcggtaatatagtggtgatttacaagtcaagttaaaatgtccccagaagtggccttgaaccgaatatctccaatgctctcccctttcatatctagcgtggtccggaatggaaaagtgggactggatgctacaaactgtttgaggataactgacttaaaatctggctgcacatcattgactcctgggcccaactgtgaccgatttaaactgcacataccatatgctggagagacattaaagtgggatatcattttcaatgcccaatacccagaactgcctcccgattttatctttggagaagatgctgaattcctgccagacccctcagctttgcagaatcttgcctcctggaatccttcaaatcctgaatgtctcttacttgtggtgaaggaacttgtgcaacaatatcaccaattccaatgtagccgcctccgggagagctcccgcctcatgtttgaataccagacattactggaggagccacagtatggagagaacatggaaatttatgctgggaaaaaaaacaactggactggtgaattttcagctcgtttccttttgaagctgcccgtagatttcagcaatatccccacataccttctcaaggatgtaaatgaagaccctggagaagatgtggccctcctctctgttagttttgaggacactgaagccacccaggtgtaccccaagctgtacttgtcacctcgaattgagcatgcacttggaggctcctcagctcttcatatcccagcttttccaggaggaggatgtctcattgattacgttcctcaagtatgccacctgctcaccaacaaggtgcagtacgtgattcaagggtatcacaaaagaagagagtatattgctgcttttctcagtcactttggcacaggtgtcgtggaatatgatgcagaaggctttacaaaactcactctgctgctgatgtggaaagatttttgttttcttgtacacattgacctgcctctgtttttccctcgagaccagccaactctcacatttcagtccgtttatcactttaccaacagtggacagctttactcccaggcccaaaaaaattatccgtacagccccagatgggatggaaatgaaatggccaaaagagcaaaggcttatttcaaaacctttgtccctcagttccaggaggcagcatttgccaatggaaagctctaggaaacaccagtcttgagaggtggccagccagactgcctgtccacatgcgtgtcagcacatacagccgcttcctggaagccgcctggaatgtcttcacggcagcgttttgctcacacagcagcttttgcacgccccaggcagccccgactgctgaaatccaacttgagctggctggtggtccctggatcctagagcccttcacttcgggttactccctctttcttgcctctatttcttagttggaagaaataaactcacaaattatggtgcagtaattttccggggaaagtaaagcctcaggaatgcccacgcctttcttccaaagcctttgtctctgagacctcttaagttctaagattaaatgcccctcgctgttcttcctctg

SEQ ID NO: 6037 - protein, 383 aa, Homo sapien
MSPEVALNRISPMLSPFISSVVRNGKVGLDATNCLRITDLKSGCTSLTPGPNCDRFKLHIPYAGETLKWDIIFNAQYPELPPDFIFGEDAEFLPDPSALQNLASWNPSNPECLLLVVKELVQQYHQFQCSRLRESSRLMFEYQTLLEEPQYGENMEIYAGKKNNWTGEFSARFLLKLPVDFSNIPTYLLKDVNEDPGEDVALLSVSFEDTEATQVYPKLYLSPRIEHALGGSSALHIPAFPGGGCLIDYVPQVCHLLTNKVQYVIQGYHKRREYIAAFLSHFGTGVVEYDAEGFTKLTLLLMWKDFCFLVHIDLPLFFPRDQPTLTFQSVYHFTNSGQLYSQAQKNYPYSPRWDGNEMAKRAKAYFKTFVPQFQEAAFANGKL

SEQ ID NO: 6038 - DNA, 1656 bp, Mus musculus; identical to SEQ ID NO: 75

SEQ ID NO: 6039 - protein, 216 aa, Mus musculus; identical to SEQ ID NO: 76

SEQ ID NO: 6040 - DNA, 2809 bp, Homo sapien; identical to SEQ ID NO: 1527

SEQ ID NO: 6041 - protein, 422 aa, Homo sapien; identical to SEQ ID NO: 1528

SEQ ID NO: 6042 - DNA, 1546 bp, Homo sapien
cgtcgccaccgcagccgcccgagaggagctgggggaggacggtggcccgcgaggctcgtcgcagacaacgcggcggcgatgtccgcgagccaggcgagtgccgcggcggcagcggcggggccttgcgcgcggcagggcggcctgggcttcggcctccctccggttccctggaagcgggcccgcgaccagcgcgggagcagcagcagaggcggaggctccagcgcgtctctctcctccccctcagcctgagccgggggaagccaggcggcccgggtgtctggagggggggggtccgctgcccgagaatgggaattctcttcactagaatatggagactgttcaatcaccaggagcacaaagttatcattgttgggctggataatgcagggaaaactaccattctttaccaattttctatgaatgaagttgtacatacatctcctacaataggaagtaatgtagaagagatagtgattaataatacacgtttcctaatgtgggatattggtggccaagaatctcttcgttcttcctggaacacttactatactaacacagagtttgtaatagttgttgtggacagtacagacagagagaggatttctgtaactagagaagaactctataaaatgttagcgcatgaggacctaagaaaagctggattgctgatttttgctaataaacaagatgttaaagaatgcatgactgtagcagaaatctcccagtttttgaagctaacttctattaaagatcaccagtggcatatccaggcatgctgtgctctaactggcgagggattgtgccaaggacttgaatggatgatgtcacgacttaagattagatgatctctactgacctcttctcatagattttgtataaatgaagtgctggactttacctgaaagctgcaaaaattaatggtttagatatatttataataaactgatttaaactttttctataagaagaaaaattaagaccacttatttgaaaacaaagatgaagtctcaccttccagtttgctttctcattagttttttccaaagtaagttattgaagctgtgattgacatttttctcataatgaatcctctcaggacattgtgtagcctatggtaagtacaaagggagaggaagacattttgaattttaagagctttattatcagtttaaccctccctagttgaatgttattttcttcttgttccattaagtcagaatacaaatcagcacagatattcgaatgtttccaatattttaaaatgtaatgttacttatgaaaagtattttgcttaaggttgtgtgtgtattgtgtatatacctcaagttcaagttaatggcattgatttatgttccagacaaaaataacacaaataataatatccttcgttataaccacaatgagataagtattggcattagtgttcagtgccattttatactttctctctgtgttctctgtattgtactaaccaacctcccaaatcgctgagctgcttgtttaaaaaaaaaaaaaaggaaaaggaaaaagcaaaaaaaaaaaaaaa

SEQ ID NO: 6043 - protein, 179 aa, Homo sapien
MGILFTRIWRLFNHQEHKVIIVGLDNAGKTTILYQFSMNEVVHTSPTIGSNVEEIVINNTRFLMWDIGGQESLRSSWNTYYTNTEFVIVVVDSTDRERISVTREELYKMLAHEDLRKAGLLIFANKQDVKECMTVAEISQFLKLTSIKDHQWHIQACCALTGEGLCQGLEWMMSRLKIR

SEQ ID NO: 6044 - DNA, 3178 bp, Homo sapien; identical to SEQ ID NO: 1387

SEQ ID NO: 6045 - protein, 416 aa, Homo sapien; identical to SEQ ID NO: 1388

SEQ ID NO: 6046 - DNA, 4485 bp, Homo sapien; identical to SEQ ID NO: 3507

SEQ ID NO: 6047 - protein, 1040 aa, Homo sapien; identical to SEQ ID NO: 3508

SEQ ID NO: 6048 - DNA, 2420 bp, Homo sapien
aaaaatgtgtgtttgtgggtgaaatggctgcgcaggtcggagcggtgcgcgtagtacgggcggtggcggcgcaggaggagccggacaaagaggggaaggagaaacctcatgctggggtctccccgcggggagttaaacggcagcgccgatctagcagtggggggtctcaggagaagcgggggcggccgagccaggagccccctctcgctccccctcaccggcggcgtcgcagccgccgacatcctgggccgctgccgccgacgaatgcagccccaactgtcccaggccctgttgagcctcttctcctgccgcctccgccgccaccttcgctggcacccgccgggcccgctgtcgctgcccctctcccggccccaagcacctcggccctcttcaccttctcgcctctgacggtgagcgcggccgggcccaagcataagggccacaaggagcggcacaagcaccatcaccaccgcggccccgatggtgatcccagctcctgcggaaccgatctcaagcacaaggacaagcaggaaaacggcgagaggactggaggggtgcctctgatcaaagcccccaagagagaaacaccagatgaaaatggtaaaacccagagagccgatgattttgtcttgaagaaaataaagaagaaaaagaaaaagaaacaccgagaagacatgcgaggaagacgccttaaaatgtacaataaggaagtacaaaccgtctgtgctggcctgacccgcatcagtaaagaaattctcacccaaggacaaataaatagcacttcaggacttaataaggagtccttcaggtatctgaaagatgaacagctgtgccgattaaatttgggtatgcaagaatatcgggtaccccagggagtacaaacaccttttatgactcaccaggaacattctattcgtagaaatttcttaaaaacaggtactaaatttagcaactttattcatgaggaacaccagtccaatggtggtgctcttgtccttcatgcttacatggatgaactctcatttttgtctccaatggagatggagagattttctgaggagtttcttgctttgacattcagtgaaaatgagaaaaatgctgcttactatgctttagcaatagtgcatggagcggctgcttatctcccagacttcttggactactttgcttttaatttccccaacactccagtgaaaatggaaattctgggcaagaaagatattgaaacaaccaccatttcaaattttcacactcaggtcaacaggacatactgctgtggcacctaccgagcaggtcctatgcggcagataagtctcgttggagcagtagatgaagaagttggtgattatttcccagagttccttgatatgttagaagaatcaccatttctgaaaatgactttgccctggggtacactttctagcctccgactccagtgtaggtcccagagtgatgatgggcctataatgtgggtaaggccaggagaacagatgatccctacagcagatatgccaaagtcacccttcaaaagacgacgatcaatgaatgaaataaaaaatctccagtacctacctcggaccagtgaaccccgcgaagttctctttgaagataggactagagctcatgctgatcatgtcggtcaggggtttgactggcagagtacggctgctgttggagttttgaaagctgtacaatttggtgaatggagtgaccaacctcgcataaccaaagatgtgatttgttttcatgctgaggattttactgatgttgtacaaagacttcagttagatcttcatgaacctccagtttcccagtgcgtacagtgggtagatgaagctaaactaaaccaaatgaggcgggaaggcattcgttatgctagaattcagctttgcgacaatgatatctacttcatccctagaaatgtcattcatcagttcaaaacagtttcggcggtgtgcagcttagcctggcatataaggcttaaacagtaccaccctgttgtggaagccactcaaaacacagaaagcaattctaacatggactgtggtttaactggaaagcgagaattagaagttgactcccaatgtgtgaggataaaaactgaatctgaagaagcatgcacagagattcagctgttaacaactgcctcatcatctttcccacctgcatcagaacttaatctacagcaagatcagaagactcagcctattccagttttaaaagtggaaagtagactggactctgaccagcaacacaatctgcaagaacattcaaccacttctgtgtgatatgtacatattcaaacacattttttaacttttttaaattttgatgtgaagttatagttttataactggcttaagttaagttttattggagaaatcttgcctataattctataaagagaaatgacattccac

SEQ ID NO: 6049 - protein, 754 aa, Homo sapien
MAAQVGAVRVVRAVAAQEEPDKEGKEKPHAGVSPRGVKRQRRSSSGGSQEKRGRPSQEPPLAPPHRRRRSRRHPGPLPPTNAAPTVPGPVEPLLLPPPPPPSLAPAGPAVAAPLPAPSTSALFTFSPLTVSAAGPKHKGHKERHKHHHHRGPDGDPSSCGTDLKHKDKQENGERTGGVPLIKAPKRETPDENGKTQRADDFVLKKIKKKKKKKHREDMRGRRLKMYNKEVQTVCAGLTRISKEILTQGQINSTSGLNKESFRYLKDEQLCRLNLGMQEYRVPQGVQTPFMTHQEHSIRRNFLKTGTKFSNFIHEEHQSNGGALVLHAYMDELSFLSPMEMERFSEEFLALTFSENEKNAAYYALAIVHGAAAYLPDFLDYFAFNFPNTPVKMEILGKKDIETTTISNFHTQVNRTYCCGTYRAGPMRQISLVGAVDEEVGDYFPEFLDMLEESPFLKMTLPWGTLSSLRLQCRSQSDDGPIMWVRPGEQMIPTADMPKSPFKRRRSMNEIKNLQYLPRTSEPREVLFEDRTRAHADHVGQGFDWQSTAAVGVLKAVQFGEWSDQPRITKDVICFHAEDFTDVVQRLQLDLHEPPVSQCVQWVDEAKLNQMRREGIRYARIQLCDNDIYFIPRNVIHQFKTVSAVCSLAWHIRLKQYHPVVEATQNTESNSNMDCGLTGKRELEVDSQCVRIKTESEEACTEIQLLTTASSSFPPASELNLQQDQKTQPIPVLKVESRLDSDQQHNLQEHSTTSV

SEQ ID NO: 6050 - DNA, 5634 bp, Homo sapien; identical to SEQ ID NO: 3251

SEQ ID NO: 6051 - protein, 543 aa, Homo sapien; identical to SEQ ID NO: 3252

SEQ ID NO: 6052 - DNA, 4877 bp, Homo sapien; identical to SEQ ID NO: 1079

SEQ ID NO: 6053 - protein, 1366 aa, Homo sapien; identical to SEQ ID NO: 1080

SEQ ID NO: 6054 - DNA, 1548 bp, Homo sapien; identical to SEQ ID NO: 1281

SEQ ID NO: 6055 - protein, 339 aa, Homo sapien; identical to SEQ ID NO: 1282

SEQ ID NO: 6056 - DNA, 2965 bp, Homo sapien
ggcacgaggctgctttctttttcctttcttcggaatgagagactcaaccataatagaaagaatggagaactattaaccaccattcttcagtgggctgtgattttcagaggggaatactaagaaatggttttccatactggaacccaaaggtaaagacactcaaggacagacatttttggcagagcatagatgaaaatggcaagttccctggctttccttctgctcaactttcatgtctccctcttcttggtccagctgctcactccttgctcagctcagttttctgtgcttggaccctctgggcccatcctggccatggtgggtgaagacgctgatctgccctgtcacctgttcccgaccatgagtgcagagaccatggagctgaggtgggtgagttccagcctaaggcaggtggtgaacgtgtatgcagatggaaaggaagtggaagacaggcagagtgcaccgtatcgagggagaacttcgattctgcgggatggcatcactgcagggaaggctgctctccgaatacacaacgtcacagcctctgacagtggaaagtacttgtgttatttccaagatggtgacttctacgaaaaagccctggtggagctgaaggttgcagcattgggttctgatcttcacattgaagtgaagggttatgaggatggagggatccatctggagtgcaggtccactggctggtacccccaaccccaaataaagtggagcgacaccaagggagagaacatcccggctgtggaagcacctgtggttgcagatggagtgggcctgtatgcagtagcagcatctgtgatcatgagaggcagctctggtgggggtgtatcctgcatcatcagaaattccctcctcggcctggaaaagacagccagcatatccatcgcagaccccttcttcaggagcgcccagccctggatcgcggccctggcagggaccctgcctatctcgttgctgcttctcgcaggagccagttacttcttgtggagacaacagaaggaaaaaattgctctgtccagggagacagaaagagagcgagagatgaaagaaatgggatacgctgcaacagagcaagaaataagcctaagagagaagctccaggaggaactcaagtggaggaaaatccagtacatggctcgtggagagaagtctttggcctatcatgaatggaaaatggccctcttcaaacctgcggatgtgattctggatccagacacggcaaacgccatcctccttgtttctgaggaccagaggagtgtgcagcgtgctgaagagccgcgggatctgccagacaaccctgagagatttgaatggcgttactgtgtccttggctgtgaaaacttcacatcagggagacattactgggaggtggaagtgggggacagaaaagagtggcatattggggtatgtagtaagaacgtggagaggaaaaaaggttgggtcaaaatgacaccggagaacggatactggactatgggcctgactgatgggaataagtatcgggctctcactgagcccagaaccaacctgaaacttcctgagcctcctaggaaagtggggatcttcctggactatgagactggagagatctcgttctataatgccacagatggatctcatatctacacctttccgcacgcctctttctctgagcctctatatcctgttttcagaattttgaccttggagcccactgccctgaccatttgcccaataccaaaagaagtagagagttcccccgatcctgacctagtgcctgatcattccctggagacaccactgaccccgggcttagctaatgaaagtggggagcctcaggctgaagtaacatctctgcttctccctgcccaccctggagctgaggtctccccttctgcaacaaccaatcagaaccataagctacaggcacgcactgaagcactttactgatattcattccattattccatatgacagttgttttgagtttcgtaccaccttattgtccccttatacagataaggaaactggggtgcagaaaggtgaattaactttacaaagtagacatgacaagtgaacagcagagctgggatctaaacagcaataactaacattaacagagaatttaaaatgttcttagtgctgtgttataagctttggtggatgtcactcctttaatcctcacaacaccctgtcgggtagtcatattttgcaagtatggaagctgaggcagggcaacatgaagtaacttacataactcatacagtaatttgtgcagttgggagatgttcagccttagtccctggctaattgcctgttcttttccagcctgattttttttcccacaggaagagcccacatgtagccctgaggtttccttcccaggacagctgcagggtagagatcattttaagtgcttgtggagttgacatccctattgactctttcccagctgatatcagagacttagacccagcactccttggattagctctgcagagtgtcttggttgagagaataacctcatagtaccaacatgacatgtgacttggaaagagactagaggccacacttgataaatcatggggcacagatatgttcccacccaacaaatgtgataagtgattgtgcagccagagccagccttccttcaatcaaggtttccaggcagagcaaataccctagagattctctgtgatataggaaatttggatcaaggaagctaaaagaattacagggatgtttttaatcccactatggactcagtctcctggaaataggtctgtccactcctggtcattggtggatgttaaacccatattcctttcaactgctgcctgctagggaaaactgctcctcattatcatcactattattgctcaccactgtatcccctctacttggcaagtggttgtcaagttctagttgttcaataaatgtgttaataatgcttaaaaaaaaaaaaaaaaaa

SEQ ID NO: 6057 - protein, 584 aa, Homo sapien; identical to SEQ ID NO: 20

SEQ ID NO: 6058 - DNA, 2504 bp, Homo sapien
ctttgccgtccggctattagcctactgtggctagtcacccccggggtcccggccttctcgggctggggccgccgccaccgcggcaggacggggaggcgggccatggcgtcctgcgtggggagccggaccctaagcaaggatgatgtgaactacaaaatgcatttccggatgatcaacgagcagcaagtggaggacatcaccattgacttcttctaccggccgcataccatcaccctgctcagcttcaccatcgtcagcctcatgtacttcgcctttaccagggatgactctgttccagaagacaacatctggagaggcatcctctctgttattttcttctttcttatcatcagtgtgttagctttccccaatggtccgttcactcgacctcatccagccttatggcgaatggtttttggactcagtgtgctctacttcctgttcctggtattcctactcttcctgaatttcgagcaggttaaatctctaatgtattggctagatccaaatcttcgatacgccacaagggaagcagatgtcatggagtatgctgtgaactgccatgtgatcacctgggagaggattatcagccactttgatatttttgcatttggacatttctggggctgggccatgaaggccttgctgatccgtagttacggtctctgctggacaatcagtattacctgggagctgactgagctcttcttcatgcatctcctccccaattttgccgagtgctggtgggatcaagtcattctggacatcctgttgtgcaatggcggtggcatttggctgggcatggtcgtttgccggtttttagagatgaggacttaccactgggcaagcttcaaggacattcataccaccaccgggaagatcaagagagctgttctgcagttcactcctgctagctggacctatgttcgatggtttgaccccaaatcttcttttcagagagtagctggagtgtaccttttcatgatcatctggcagctgactgagttgaataccttcttcttgaagcatatctttgtgttccaagccagtcatccattaagttggggtagaattctctttattggtggcatcacagctcccacagtgagacagtactacgcttacctcaccgacacacagtgcaagcgcgtaggaacacaatgctgggtgtttggggtcattggtttcctggaggccattgtttgcataaaatttggacaagatctcttctctaagacccaaatactctatgttgtgctttggcttctttgcgtggctttcaccactttcctctgtctgtacggcatgatttggtatgcagaacactatggtcaccgagaaaagacctactcggagtgtgaagatggcacctacagtccagagatctcctggcatcacaggaaagggacaaaaggttctgaagacagcccacccaagcatgcaggcaacaacgaaagccattcttccaggagaaggaatcggcattccaagtcaaaagtcaccaatggcgttggaaagaaatgaaaaaccctggttaatcaaagatgttccagagtgcctagaactgagagggaaatggaactcatttggaactccccgtgaggaggtcgaggcgcacagggcaagcaggaagaggcgagggcacttgggggtcattatttgagatcgtaagtcttgtttcccacagacctggccgcgtcaggcagatcatcgcctggggggcctttgccaacgtggggtctcttctaacttcagcacttgacatgcggtcaccggtggcagcgcggtgtgttgaagggaaacggtagctattcattcacagttgccaagagcagctccgcgcctgctggatcgtggatgcagcgtaaacatcttccttcagacgaggcattaaccccatggttaatggactggtcaccagtttttattttatttttatgaatctacctttccattgattgatttaagttcaggccacttttctgtcttttatttggttactgttgttatttgtttttaagttaggatgctttttaacagcctttagaagccgctgctgaaattgatactgggggaagggttccccttccttctagagcagaaaagggagagaagtgttgtattcctgtttggtaacctcagtctcctgtaagacctcctaccacatggcgagtatacaccaatcaggagagggtagctgcctgcataggagcctcgcttccgattattcccttcccaatattattcatccagacttagccacagtgcacaaaagcaaacctgctagagaggcagtgaacaccacagcttctccccagcttggtgccttttacatcgggtttgttctccttccatggtgtgttgctgacattgtcactgagtcccatgtgaggtgctggtgagtattacctttcatctgtgccatgctctagaaccttgaccttgatagttcaccacgtctgatggatccctgttttaaataaaaacgattcactttaaagcct

SEQ ID NO: 6059 - protein, 473 aa, Homo sapien
MASCVGSRTLSKDDVNYKMHFRMINEQQVEDITIDFFYRPHTITLLSFTIVSLMYFAFTRDDSVPEDNIWRGILSVIFFFLIISVLAFPNGPFTRPHPALWRMVFGLSVLYFLFLVFLLFLNFEQVKSLMYWLDPNLRYATREADVMEYAVNCHVITWERIISHFDIFAFGHFWGWAMKALLIRSYGLCWTISITWELTELFFMHLLPNFAECWWDQVILDILLCNGGGIWLGMVVCRFLEMRTYHWASFKDIHTTTGKIKRAVLQFTPASWTYVRWFDPKSSFQRVAGVYLFMIIWQLTELNTFFLKHIFVFQASHPLSWGRILFIGGITAPTVRQYYAYLTDTQCKRVGTQCWVFGVIGFLEAIVCIKFGQDLFSKTQILYVVLWLLCVAFTTFLCLYGMIWYAEHYGHREKTYSECEDGTYSPEISWHHRKGTKGSEDSPPKHAGNNESHSSRRRNRHSKSKVTNGVGKK

SEQ ID NO: 6060 - DNA, 2225 bp, Homo sapien
acgcgtccgatttaaagctacattgtcagcagaagtatataggatactttcagcgcaagggacagaacccttggtgctcttcaaggaaggtgctgttcgtggtttagaggccttgcttgcagacccccagcagaaaattgaaactgttatctctgatgaagaagtgattaaatggacaaagtttttcgtagtattcagacatcctgttttaatttttattactgaaaaacatggaaattactttgcttacgtgcaaatgtttaactcacgtatcttaaccaaatatacactcttacttggacaagacgaaaactctgttataaagagttttactgcatctgtagatcggaaattcatctctttgatgtcattaagctctgatggttgtatatatgaaaccttgataccaatacgtccagctgacccagaaaaaaatcagagcttagttaaatcactgctgctcaaggctgttgtatctggtaacgctcgaaatggagttgcactcactgccctggatcaggatcacgtcgcagtcctaggaagtccactagcagcttctaaggaatgcctctctgtatggaacataaaatttcaaacactacagacttcaaaagagttaccacaagggaccagtggtcaactctggtattatggagaacatttgtttatgctacatggaaaatctctaactgtgattccatacaagtgtgaagtgtcatcattagcaggtgctcttggaaaactcaagcatagtcaagatccaggaactcatgtcgtgtcccattttgtaaactgggagacacctcaaggatgtggacttgggttccagaactcagagcagtcaagaagaattgagacgaaaaattgaagtgagtttacagccagaggttccaccatccaaacaacttttgtcaaccataatgaaagattcagaaaaacacattgaagtagaagtacggaaatttttggctctgaagcagacacctgactttcatactgtcattggggacacagtaacaggacttctggaaaggtgtaaagcagaaccatcattttatccccggaactgtctgatgcagcttatccaaacgcatgtgctttcttacagtttgtgccccgacttaatggagattgccttaaaaaagaaagatgtacagttgttacaactctgtctacagcagttccctgacattcctgaatcagtcacctgtgcttgcttaaaaattttcttgagcattggtgatgacagtcttcaagaaacagatgttaatatggagtcagtttttgactatagtataaattctgtacatgatgagaaaatggaagagcaaactgaaattcttcaaaatggcttcaatcctgaagaagataaatgcaataactgtgatcaagagttaaataaaaagccccaggacgaaacaaaggagagcacttcatgccctgtggtacaaaaaagagcagctctacttaatgcaattcttcattcagcatatagcgagacatttcttctgcctcatttgaaagacatcccagcacagcatatcacgctgtttcttaagtatttgtatttcctgtacctgaagtgtagcgaaaatgctactatgactcttcctggaatacacccacctaccttgaaccagattatggattggatatgtctacttctggatgcaaattttactgttgttgtaatgatgccagaagcaaagaggctactgataaatctttacaagcttgtaaaatctcagatatctgtttattctgagctcaacaagattgaagtaagttttcgggagctacagaaattaaatcaagaaaagaataatagaggattatattcaattgaagtgctggagctcttctgatattatcaattctccttcatagacattttataaagctcttttatgtgaactcttgcttcatccaggcaagaacggtgttttgtttgcgaccatctcagtgtcaagagaaacgtgtcagtgagtacctggaccatcacttaactgatgctccggggtaggactgcaggtttcacatgaacctgttctaggctgtggacattggtgtggagaggttctgcaattttttaaaaatatgtaactgggttgattttaagtaaaattatttgtgtattgataaaagtctaatttcttatcatgtgttttgaattttttcttttaataaaaaatgaccattgaagcagtgaaaaaaaaaaaaaaaaa
